United States Patent Application Publication US 2006/0134663 A1 - sequence listing, part 101

SEQ ID NO: 309437 - DNA, 1000 bp, Homo Sapiens
gaattcatttggattcttgttctgtctagaaggctcccaccatctcttctctacctggcagatgtctactcatcttccaagatccaaaggcacccacctctgtagccttcactgactcctcctggcagaggtcagtcctctggcatcccacagtactctgctccactttcttcagcacttatcccatttgatacccatcacctgcttagtcctctgctccccttttcacgtgtgagctccccaagatacagtgctttctcatatctgcatcctctgtcccagcagaactcaatagatagccaatcagtgtttgctccgtcaatgaatggatgagaacattgagacggccttaaaggagattttctcagatacatcacaggggcctcaggccacctgtgctgccagaccctcgcagggcccctgaggtttctgcattctttaggtctgccctggtttcttggtttatctctgcctctgccccttttaggtggattcattgactcctggcctccccttctctcccactgggtcttgaggcaatgataaccttcgtgttttctcaccatctcctatttgtaccacaggcccatgagaagttgtgttaacccggagatcatgtggaatgctcttcagaggtgcacaataccccaccctcctccctctctgcctttcacaataccccagagctgcctcagatgtgcccctcaagcagttctgtgtttaacgactggctggggggagggggcggtgaggggaaagggcgtactgagttacagcatttgccaagttctgttgtgtaaactacgccccctgtggccagtctgaagctactgaggtgatgtcagcaaggccagagctgtgaagaggcgcggactggcacatcatcatgtggtttttccagcacagagatacaggagacataaacgccctcaagaacataaaggtaaaaaggagtaaaatacgtaggaagtgatgagtttagagtacttattatctttct

SEQ ID NO: 309438 - DNA, 1000 bp, Homo Sapiens
ggatcgcaccactgcactccagcctggacaaccagagcaaaactccgtctcaaaaacaaaaaaaaaaaaaaaaaaaaaaaaagaagaagaagaagagagggaggggagggaaggaagaaagaaagagaaagtgttctgtgttcccaccaaaagttttgagatgtattctaattggaccagctaatcacatgcataccctgaaccacattaatggagggatgagaggcactggtagacttcggctaagtctagttactctaagttccactcctagaaccatgcagatcctcaaaaggaaattgaggccctattcgaagggaaaaaaggtaggggaaatagatgccgaagaggccaagcatcagatggcccctacagtttcctatgattttcctgccagtggattgtccagacatagttcaatgtttcccaagccgcctccgtcatgctaggctgtagctgttgtcaggaggcctttcccattgacatgtctccctctgagagtgcaatctctgattctggctctgaggccacaaaaacattctggttgtcttgtttgtcgcagcctttcaagagccgggaactgaaaccttgttgctcctctcctccaggtaaatctccccagtttcccactattctacataagacttggctgtgtaatttgaacacgtttcctaacttttgttgttattgttgttgttgagacagagtctcactctgtcatctaggctggagtgcagtggcgtgatctcggctcactacaacttccgcctcccaggttcaagcgattctcatgcctcagcctgctgagtagctgggattacaggcgcacaccactatgcccagctaatttttgtatttgtagtagagatggggtttcaccatgttggccaggctggtctcgacctcctgacctcaggtgatctgcccgccttggcctcccaaagtgctaggattagaggcatgagccaccacacccggtcaacatttttttttcttcttt

SEQ ID NO: 309439 - DNA, 1000 bp, Homo Sapiens
cccaggtagaggctcctctctgttcatccattgtcacaaaggaactgctcagagcaacttttccaatctgggcttttccctctccctctgagaatctggccctggacccaccaagcttcattagaatcagatccctcagaagaaaatgcagtttcccaaagcccaaaaggccccacacagggaatttacacccgaccactctcacctggagccccatacccacactcgttacttttcccctacatcttagaggacatcttgtcaccttaattatatgaccgcgctcctagactcttaataccctatcggtaggtgtgtgtctggcttaccctagtatctccactactaatcctgggccttccacagagcagatgctcagtgcatagagaagaaatgagccagttaacagaaagaattatttattcagatttaatttctcttacattcacgaagccaaggaaatccaggtatgcatatatatttttaaattttacagaatagactgaggcataaggcgggaattaagtatcttttaatttatctcacctatttcacggtgaattcacacttctaaatacttactccactgctgttattatgtcccaaattcacaaaatagaacggatttcccaatctgaataaaaaacaagactcttactcctaaactatattaacagcaatatacgttaactacgattcataaacttggatgctgaagttaattcaaccatccattaaaaggaacatttcaacaattgtaaaaggaaacagagataaatctccaagtcatccaacaaaatagaaacccactactaagaacactgactattttcttcaaacagagtgaagaatgggcctcatgttacacgaggcaagggaagctgctgcacagggctgttagatgcactggcccagccctgccccttccccacagccctggctgcaactcatgctcagactccctcttcctcctctaacaaagctgcttcacgcagggatg

SEQ ID NO: 309440 - DNA, 423 bp, Homo Sapiens
ccaagaggatagatgaaaaaaatccccagaattctatgcatgaattaattacgtgattaaacatacaaatgtactgttctccaagaaaactgagctgtttccatattcagcattgaataccaagatattattttcttgtttgtagagatattcatgatctaaagagagaaaacacccagatcaaaatttcaagttgttattaaacatcttcataagctgaaaattacagaatacagtttaagctcacaaataccaaataggcatttctaagttgagaaaacatgaatgatattatactaacattcattcattttttcatcattattgtcaaggtttcaattcacatttaattttttattatacatgtcaaagaaatacttgggttcctttcagtctttctccctttgcacttcaagtagaaaa

SEQ ID NO: 309441 - DNA, 1000 bp, Homo Sapiens; identical to SEQ ID NO: 120082

SEQ ID NO: 309442 - DNA, 1000 bp, Homo Sapiens
tgtgtgtgatcgggaagataagctgggaggggtctcctgctggggtcctgatgcctctgtttccaaacaaggtacaggttcagtccagactctttccccctgggaccaacagcagccagagcagttagccagttagtccccaggcctgtggccacaggcgtttctgacctgctgggccgagaatgggtaagttgtctggagtcaggtgggcccacgtaggacagggtcacaaagcctgggtttgtttctgggtactttgcgcctctggggtgctagaggtggggcatggtggctggaagtaaaactgccaactctggccctcagaactctcaggtatagaagcccaggatgtctaataccctgtcccagtgcccgagagctgcctggtgtcaggtagagaggacactgtacctgggtgaatgatcagaccctggtagctaagaaggaacttgtccctttgagtcagtgtgcagaccccctttcaggccatgcctctgtgaaccctgtattgctggggccggaaggagcccctgagcctagccccttcccgtctgccctgtgtcctcactgcgtgtgggtatgacctctgcctggtggctggtgtatcccaactgggcaagagatggcagagggtcccccttgtgggtgcgcttggatgtgcagagccttctccatggattttcttccctgtaagtgccgggcccctcaccccagctgacaggctgttgctgtgcctgctcacacctgctcctgcaggcacactgggctagggacgaggaaggagcagccacaagtggtagaactgccttggtggacaccagcctcgccctgtctttatttcctgaatggtttgtgaacttgctcacctggaccactgtatcctgccactgtccttcctggtctcgcactgccactgcatggcctcctgtcactgtgaatcgtggcccagtctcagtttgtagtttctcattaaattggccctttcactcccccgccctgg

SEQ ID NO: 309443 - DNA, 1000 bp, Homo Sapiens
agatttcacataattttaatgatcaaattacccaatcagtaaaccacaaaatcctacttaggaaaagggtctataatatttattttgaatatggaaccatagttctttttccctaggttgagaaaacttgagcaaaattagttttatttaggcctgtggtttaaaaatattgagatacaagagtttttttttttttttgagatggagtctcgctctgtcgcccaggctggagtgcagtgatgtgatctcggctcactgtaacctccgcctcccgggttcaagcgattctcctgcctcagcctcccaagtagctgagattacaggcgagtgccaccacgcccagccaatttttgtattttagtagagatggggttttaccatgttggtcaggctggtctcaaactcctgacctcgtgatctgcccacctcggcctcccaaagtgctgggattacaggtgtgagccactgcgcccggatgaaatacaagagatttttaaagaagttttcaaactattcaggttacagacacaaatttatagaattaaggagatttatagtgtacatcaaagttcatagcttatttatttgcaattttgtggttcttaaactaatgaagaattatactaaatgacctatatagtctcttttagctataaactttcaattatattattctgctttaaaataattaagaccatatctcaaagttgtttaagtagataatgttggccctgaattaaggatttttttttcatcccctttctggcttttagtccttcctagtcagttattaatggggaataaatattacacattttactcaactgattcttaattcctagctctattgccccctcctctctccagagcccacagtatcccaacatatggtaaatactcaatacttattgaggattcttgaatgagtagcaatatatactatggatggatcaataatttaaaagaatctggatggaggtgacagtagttgcttttataa

SEQ ID NO: 309444 - DNA, 1000 bp, Homo Sapiens
attcgagctcggttccggggatcctctagagtcgacctgcaggcatgcaagcttcataaaccccaagcagaataaaaccagacaaatccatgccaaaacacatcataattaaatttctgaaacattaaaaaaaagtcttgaaaacagcaagagacagctatcttggaagacagttcagatgacagtggatttgtcatcagaatcacagaggttagcaggcagtggtataatatttttcaagagctgaaagaaaagaactgtcaacccagacccttttacctagttaagtcatccttctcattcgcattctcagatgaagggaaactaagaaaatttgtcaccagcagacctatgctaaaagaatgcctgaagaatctgtccagacagaaagcaagtaataaatgaaagaaccatggaacatcagtaaggaagaaaaaatgcagcaagcaaaagtatggataaataaaaatagggttttgttatcccagagaaatgaagacatgttcacacaaaaacctgtgcacaaaaatttatagcagctttatttgtaatatccaaaaactggagagaaccagctgttctttatgaaatgaatggtgaaacacactctggaatagccacaccatgaaatactactgctcagcagcaagtaggaacaaacttctttttttttgttgtttgagacagggtcttcctctgtccaataaggtggaatacagtgacacaatcatggctcactgcagcctcaacctcccaggctcagatgatccttccaccrcagcctcccaagtcactgggaccacaggcaggtaccaccaaacctggctaatttttaaaaatttttatgtagagacaagatgtcactatgttgcccaggctggtctcctgggcgcaaatgatcattcctcctcagcctcccaaagtgctgggactacagtcctgagccactgtgcccggctggaagaaactattgatacaatcagaaacctgcatgaatccc

SEQ ID NO: 309445 - DNA, 1000 bp, Homo Sapiens
aagatgaggcagcaagttgtaagaaattaccagaaaagcctcactcctgatctcctgacccaccccctcatgctctcagtgcttctactcttgcttcattaatttatccaacaaatactaattgtcggctaggtaccaagttctgttatagataatgaagatatggctgtggaaaaagaaccagaaacctgcctttacattctagtggaagaggaggaagataaacaataaacaaggtcaacaagtaactacagcatgtcaggtgatttaagtgctgggaaggaaactgagtggtatagatcattgcagagggtaggttgcaattttaaatggaatagtgaagttagcctcactgataaggcagtcttccagcaaagatctgacagaggtgaggaagtgaatctatggaaacctgggggtacagccttccagcaaataacaggtgcaaaggcccagaagcctagggcatttgtatttgagggcaagcaaggggtctgtgtgctggagaagagtgaggaaggtgagaattagggagtgaggcctgggagattatgaggaaaggaaacagatcatacagcgccttggaggccattataaagactttggtttttacccttatgagatgggaagctattggcggttttagagcaggaaagtgacatgatctgatttatgttccaaggctcatgctggccaccttgttaagacaaaactggagggaggcaagcagagcggggacaccaatgaggtaaccatagtgaccatccagaggagaaatgatggtggcctggaataggtagttctgagaagtgttgtattttggaggtagatcaatagaatttattggtgcattgaatatatatgatgtgaaagaaagcggggagacaaagataacctcaacgcttttggcctgagcagctgtaagactgggattgcatttgatcacagggcaagctcagtcgggctcaaaactgtttgctccttcctggctggaacttcg

SEQ ID NO: 309446 - DNA, 1000 bp, Homo Sapiens
agcgatatgctggccgacggccgagcagccgggaccccacccggcccccgtgctgaggcgcggcagtcacgtggcccgggggctcggtcacgtgagctcgctgctgccctagcccccacctggcgtccatggtccaggccgcgtggggtggagggggaaccggggaatgcgagtccccgggccgcgcgccccctgcgctcccgccgccgcctccaggagcggccagcgagccagcggccagcggaagtgccgcgctcttcccgcctccctccccgcggccccctccgcccctgccgcgaccacgcagcgccccgggccgccgccggaccacagcgcccccgcgcggcccggaggcagacgcggcttgggttccggggacctgggctgcccctgggcgcggggagccccagccctgaagaggcgcccgcccggcgtgtcccctgtgcttcgtcatcgcccttcataagcgtcccagaggtcatggtgaccattgccatcttgtggacaggacattgaggctctgcatcccaagccgctcctctgtgttagtttccccgttttctgacaggatgaaggtgtctccttgctttgttggctgggtagtaattctgtcccacttcccatgatcttcgaggctctacatggcctcgcccgcgttcctcgcccactcactcgcccgctgtgaagccccactggcttgctctcagttcctctaattcacaggctttccccctaatgctctgcccccatccctttactcatccttacatcccagttgagatgatactcctcaggcgagggttcccggaccacccaaagtatgaccctctaccgactccatcctttttccttcccactattcttttcccttcatagcacccactgcaacttggaaaggcatctttatttggatgtttatgcttttaacggctgtctctctcactggatgagacgctccaagtggtcagagactgtgctggtttattgccccatgctcttc

SEQ ID NO: 309447 - DNA, 1000 bp, Homo Sapiens
tgttatggactgaatgtctcccccagatccctgtgttgaagcctaacccctagtatgagggtatttggagttggggccattgggaggtaattaggtcatgagggtggaaccctcatgaatgggattagtgtccttagataaggagagatacaagagaaatgatctctccaacacatgggacgcagcaagacaaccatctgcaaaccatgaagagcgctcaccaggagctgaatccgccagtgccttgctcttgcacttccagcctccctaacagtaacaaatgtcagttgtgtaagtcactcagtctgtggtagttatagcagcctgaactgaaacatcttcttacacttccataagtatcacttggcatgtacttccagaattgtttataggaaatgttaaatatttatacgaaagcataatggagagaagacagcagctgatagaactcagtggcttatcttcagggaaagcaggggaggcttaacccaaacaaaaaagctcattagcagggcctctgaaaatcatgcaactgagcagcttatttacagttctgagaaggaccccctcatctagccaagctctgaaaggccctggcaccacaggtccccctccccctggcctctttcccccatgtcaagcactacaatggcttgaaggacacttatttccacattttctcttcacgagacttcaggtccccaagaaaccttccaactcctcagaatatggcctaacccacaacacatcctggatttctacgtctcctaatttttgttttgggtggtgatttggaaggagacatccaaggcaatggattttccctcaatttctgaactgaaggctcacagacagcctcagagatgagctgagcagcagaggcatcctgggaccaggaggaaacctcttattcacacaggggactagatgagcagaaaactagtctttaggttagcagcaggttaagtaacaatcagttgtatcccaagttaggatctga

SEQ ID NO: 309448 - DNA, 1000 bp, Homo Sapiens
ggcctcccaaagtgctgggattacaggcgtgagccaccacatctggccttgttttggttttttatgtttttgttacctggtaatctcttttaaaaatacatttaatagaatttcactggcagataatgagttgctgaaggctgccttctttgcctcttacttcctactctccagcttccaaacccctctattgggagtgggggattctaggctgaccaggaggaaagaagctgacactaacactggttccctggttcctatgaaaccaagcttatcctgcctgtactaaatcttactaaagctgtaactgagtctctaagaataacttcagactgcctcagaacacagacatcagtgtgttctctaggtacttgtccaagcatttctgaaacagctaagctcaacttatagtaaaattgcaccaatatcaaaattatggattattcgaggtcttactagcaaaaaccagtcttggtaacactgaatgcagtcttcctaatgacttagtaaatacaggatgtgctacccaaagtgaacatattttcaaaaagaaaatatatttaatatcatatcacaaggtaattgtttaaaacgttactgcaataatgaaacatgattatttaattgctggcttccatagtatgctgttactcattttacatattcaccgtgtatccaaaactggaaatttcacatcttttaaaaggtgagttaaagttgtcatttcagaggtgcccttcttcatgtcctatttatgttccacttggaataagaactaatatttttactgtttctttttcaccctgcccaccatataaattttccaataagaaaatatttttaaaagagctctcaagtgtaaaagaattctttcttgctataaataattatccctaaatatttctctttaaggagagttcacaaactgggtcttgttcaaggggcgtactcatcaaggctatacagtgtggccccagagctgacacactggggtgcatag

SEQ ID NO: 309449 - DNA, 1000 bp, Homo Sapiens
acccaagcttaggatccttccacactgtgactgtaaaattgtgtgaatgttatatgcattttacacagctaaaatcagcgtgtatacgttcatcttccaccttcccttatttgtcacgactttacaacgccaccgagttgatgtgtcaatctgcttctgaaatgctgctcgctgaggctttgtttgctgctgatcgtagagaacaccacggcagacatctctgtccctgtcttttagtttcattttaatgattgagttgggctgagtcccccagaccagacatggctctggctatttgctcagtaagcaggcgatttcgggggctgccgagggccaggtgctgcggcaggcactggagaaacggccgagacactgagtgtggggccccggaattcagaccatgtcaaaggctttgggatagaaacagtggtgtgctgggtcagcagcagagtgccggctcttcaggaagtcagttccggctccaaaggccgccggaaggagtcctggttcttttctttctgattcttttgtctactgtttacatcttttaagggtaagagattgggtttttgttttttaacttagtatatacggttctggttgttagtagttcttttggaaatagattttggatatatcatgttttacaaattagttggttgacaaaacattctctgattctcttttccatggaagcaattgcatctgcaaaggaatgccctgtgtgtgattcctcaagatttctttcagttgcttccgaacctgacttggctggacctccggtacaatagaattaaagcgcttccttctgggattggagctcaccagtaagttgtttatgtttccagattttaaaaatcatcttttcagtgcacgagtgcctgttctttcgctccttgtcctttactcttgattgaatttttacctcggaatagaaacatttaatagtatttttaaagccagctaagaggtgcgacggctgaatgtacccaacacagaa

SEQ ID NO: 309450 - DNA, 202 bp, Homo Sapiens
agcccgccagccagagacattctccacacctgcccagctcacccgctgtagtttggcccagttgtcctgggctgacagtccattaagtgcccctaccagtgggagaaagcagcctagaaaacacggggcaaagcccccctagggaagagaaattaaagtcctatgagtgctgaaatccccacctacccccaacacagctcac

SEQ ID NO: 309451 - DNA, 650 bp, Homo Sapiens
tcaggatgtctgggagcttctggctcttggattcttcatttgtaaaaggaagggtgtagactagatggactagatgatcacagagttgcttccaattttaaaaatctgatttacaagtaagtgacactatataccaagtccatgtaggatcctaaatcagacagttgtgtgtttgaaaattccctcatctaccccaccaggttccctgcttgacttaccttgaaagccttctaaagcatcaaaaaggcaagaaacatattctgagagcaagacctattgagcagacttacatcaacagatcaactcatttcagtagatgcttattgagttaagcactcattacaatagccatgcaaagtgggtatcattatctaaattttatagatgttccaccccagaggtgcaaccgtggacgtgttatttacacaggacaagcatgtaaaatacacacacaaccattactcttattacatttatttgaatacatggttgtcttcccctaatttacccctaggctgaaacctgtaatagtcaaagatcccatcttatttaaatctctcttaataaacccccggcatttagtgagcattcggtaagtataggtttgaatgaatgaatgaacgaatgaatgaatagaaagcaaaaagctt

SEQ ID NO: 309452 - DNA, 1000 bp, Homo Sapiens
ttttttttttttcgaatactcaatttttattggtagtagttatcaagaacaaagtcctcggacttctgatgggaaatctgaactgctgtttctcttttagcgtacaagaagaaatagatccctctcattagcactttaatatcagtgtcacgtgtctggaaggaaattgtattcatttaggtaagcaacacactacataaatatcatagctgttagacccaggggactctcaggtgccagaattggggactcctttaattggaagggagctaaagggtctacctcctacctagaagtcctttctatgtggatatgaattaaattctcttgtctgttttgctctgatggggtctgtgtgggctagctggctctggtgtgtgcctgacgacagactgaactccttaaccatttcagacagcttgaagatgtatgatcattatttgaaaagggagagagggaggactctttgttttctccaccagtttggctcctgaggtttcttcagcgttaggtttctgtagggcccagctttctccagtgtttggctactgcaactctgtgttctgccagtctcttaactcagacagaaacaatgcaaaccagcagacagagcatcaccttgaaagtactaaaacagctgtcaatctagaaatctctgccccgcaaaaactgtcataaatactgcaagacccatgttcagatttccccccttttacaaataatgttttgttttatttcccagctactacaagtgatccaaatgttctttatagcagactttttcctgcagtctaggatccagtcagagatcttgcattaagttatatctctgtaatctttaatttcacgctatctgcaatgttttgtgtttttcatgacattgatgtttttgatgaggtcaggccatttattctgcagaatatctgtcaatttggattttttctaattgttctttcatgattagaatcaggcaaacattttttgacaagaatacatcaga

SEQ ID NO: 309453 - DNA, 1000 bp, Homo Sapiens
cacagactcaatcaccttccatcggatctcgtaacgtggcttctggaggaccaaccccaggaattagttatcagagggagtctcaggccctgagccccattaggttcgtccgtctaggacacatggggcaggagaccctgaggcccagagaggggcaggggcatatttgaagtcacacagcaagtgctcaactgagccaaggtcttcgtgggctcggagggaacagggaccaaggggccccagaggaggcttcaggacttggcagactgaggagcaactggcagctgagggcctggctcatgagaacctcctctctagcttctctcccagccttcgctgctcctcagatggaagtagtagagcaggtgaccccagaaagtgacaccaggtagggtactcggctggatgcggatggccctccccagtgctgggcaagtcagaaagatgtaagcttagaatgttgacatcttaaggtgttagatggcaccaaaagttttttttctacctaaataggcattatttctgtatttattctttaaaaatatcaaatacttttataacttaaattcctgaggtgtcaggtgtggactgtttaactctgcttgtaacaacagatacttgaacttaccattcgtaactacaacccactgattattttaaaatttagctcatgtattataacagagataagatttgggcagttacttctcctgaattgtctttgtttttgttttgttttgcatggggccttgtctagtctaatctttatagttagaatatatggtctaggttggggtgggaaaacttgttagcagccttgggatactttcattgttgttctggttaatattttccagtcccccttcccatgttacaagtgttcattttacacccaatttcaagtagggcatctaaaagtataaaggtttatgagaataaagagtaactaaagagtagcttaacaacctattagcatttcaaagggcagggataaggatga

SEQ ID NO: 309454 - DNA, 1000 bp, Homo Sapiens
gaattctctaactttattcttttttttaatcaagattcttttggctattctgggtcccacatttctgtataaattttaggatcagcaatgtctacaaaaaaggcgggttggtttagatacagatttcactgaatctgtagatcaatttgggtagtattgccatcttacaatattaagtcttccaatcactgaacatgggatgtttttccattatttagatctcctttaatttttctttctttctttttctttctttcttttttttttttgagatggagtctcgctctgtcgcgcagctggagtgcagtggctcagtctcggttcactgcaagctttgcctcccaggttcacgccattcttctgcctcagcctcccaagtagctgagactatgggcacctgccaccacgtctggctaattttttttgtatttttagtagagacagggtttcaccgtgtaagccaggatggtcttgatctcttgacctcgttatctgcccacctcggccccccaaagtgctgggattacaggcgtgagcgaccacgcccagcctagatcccctttaatttttcaacaatgttttatactttccagtacacaaatcttgcactcttttgttaattttttcctattttattatgtttgatgctattgctaattggattgttttcttactttcattttcagaatgtttatcgttagtatataaaaatataactcttggctgggcactgtggctcatgcctataatcctagcacttttggaggccaaggcgggtggatcacctgagattaggagttcaagaccagcctggccaacatggtgaaacccccgtctctactaaaaatacaaaaattttctgggtgtggtggtgtgcacgtgtaatcccagctactcagaggctgaggcaggagaattgcttggacccgggaggcggaggttgcagtgagctgagatcatgccattgcactccagcctgggcaacaagagtaaaactcca

SEQ ID NO: 309455 - DNA, 1000 bp, Homo Sapiens; identical to SEQ ID NO: 120084

SEQ ID NO: 309456 - DNA, 1000 bp, Homo Sapiens
gtagtacggctcgtagctgaaggaactcatggtggcggccggtggctccccggccgcggcggcgtgggagcccggagagagaggacaggggagagagggaagggggaggatggatggctgtgtgcggctcggcgccgttctgccacccctatttatacgccgggaggctcctgacgcagcctgcgatcgatcacggcacgccggccagtgggggcagcgcgctgctgcagccaaggcgaggattctgcgcaaaagggaaggcggggtcgagctacggcccgaggagctgcggcggtcgtcctttccactttgctcagagggccctgattttctctgagatcccatgccccctcactcatttcccttctgtactcactcacgcagcccctcccgtcctgcattgcccagaccccgtgacacttggatccttaagttgcccccaaaacaggttgttgctcccttttgacaccctagttttctgtatcccgtcacctcgcagacaccctgtccccccaactcgcccttttcccaccaggaacctccttaattttttcccttggtgtttacggtgatggtgcggctagggaattttagatacaaataaataggctaggttatgtgtatgcatgatgtatggagaagattttaatttctttctagctttctggcactttctgcaattcatcttcctttctcctgatttatttttctttttctttaatgagctgcttaacacatagggaatgtcgcgcgatgcgcgcgcgcgcacacacacacacacacacacactcgtgaaactgcggcactactgcaggtattggtttagcatttttaaaccattacagcagttaatccgcctgttagtgtttctagattttcacatttcttaactgagaatgaagccgcagatggctttaacgtgttgcagtgtgtgggtggtgagggcagagaaagagttggaaacacagagactgacttgctgagggagccgcgcgtccgc

SEQ ID NO: 309457 - DNA, 1000 bp, Homo Sapiens
tcgagaacacctccacacagaggctgcttaacgcccagaaggccttcaccggcatcgaggaccccgtcaccaagaagaggctctcggtgggcgaggccgtccagaagggctggatgccccgggagagcgtgctcccacacctgcaggtgcagcacctgaccggggggctcatcgaccccaagaggacaggccgcatccccatccagcaggccctcctctccgggatgatcagtgaagagctggcccagctcctgcaggacgagtccagctacgagaaggatttgacagaccccatctccaaggaacggctgagctacaaggaggccatgggccgctgccgcaaagaccccctgagcggcctgctgctcctgccagcggcactggaggggtaccgctgctaccgctccgcctcccccaccgtcccgcgctcccttcgctgacacgggccaaggagccagtggggaagtgcgtgtgttgggccaggtaggatacgtacacctcttgcctcagagcagcctcatcccaggcagtgggtcttccctctgtccaaccactgttttattattttactaacatggtgatgggctccctcccctaaccttggtgcctgatccatccccagaccaggacagcagccactcagttcttcctccacctccacccagtgatcccaataaacgaattctgtctccccgtgccatgtggtgtcccattcattcacatttgagagtgcaggacccatgtgtctgggggatgagtgcaaggacagcgttgctcaagtccttgcctgggcggacgtgctcaatttgcctgcctgggaaacaggcatcctcggagggctgtgcctccttgagtgcggggcagggatgcagtggcaggtcatggaaagagattatggtttaaaatcactaaaggaggccgggcacagtggctcacacctgtaataccagcatttaggggggccaaggcgggtggatccgaggtcaggagttcgagacca

SEQ ID NO: 309458 - DNA, 1000 bp, Homo Sapiens
aaacaaatctgcccatatggttacttaaccatcaataaaaggcaccagtaataggttgatgtgaattaattaatctgcaagacgcagcccctttaccgtcccgattttttttttttaaaacgtttttaaagacagcatctcattctgttgcccaggctggagtaccgtggtgcaatcaaagttcactgcagcctctagctctggggctcaagcaatcagcctcctgcctcaacctcctgagtagctgggactacagaaacacaccaccacacctggctaatatttttatttatttgtagagttggggtctacaggctggtctcagactcctacagtcaagtcatcctcccaagagaagagaccagcaagctttgctggccaggcagtgagtatttttcagctttgtggtccagatggtttctgctgtacctactcagttctgctgatggtagcgtaaacgccactatatacataaagaaatgggtgtggtggtgtcaataaaactttatttacagacaggcagtgtcctgacttgggtcccattggctgtcgtttgctgacccctgcaacttgacgctgcaaagtgaacagcccagcacctcccaggctgcggttaggacctcagcccgtcaccgtcatctcctgggtctcagttttctcatctgtaaagtggggctgaagccacctgcctcatgtttctcctgggatttttgtaaaatagtgcacaaaagtagacagaaagctccaaaggcagtttgcaaataggaagacacaatcaagtctatctgtgaaaaacatttattctgagaatctaaaatctggacaaagtactggactttagaaaaagcctacacaaaattgtctcattcttccctaatacattaataatctaagaataaggaggtgaaaaaaaccctttaaaaataacattgctccagtttgtctgcaggtatgtgatttaaaatatccctgttttattgaggtataggctgcaaacttt

SEQ ID NO: 309459 - DNA, 1000 bp, Homo Sapiens
tcctgatacttaatagttttttatttttatttttttattttttttgagacggagtcttgctctgtcccccacgctggagtgcagtggcgcaatctcagctcactgccacctccgcctcctgggttcaagcgattctcctgcctcagcctcccaagtagctgggattacaggcagccgccaccatgcccggctaatttttgtatttttagtagagacggggtttcactgtgttggtcaggctggtctcgaactcctcacctcaggtgatccaccctcagcctcccaaagtgctgggattacaggtgtgagccaccgcgcccggcacttaatagattttaacctagtaattggggcatggtttcctccgcggatcaagtgaaatcctacatggtacactggactttggggaattcggtagtggcggggaggttctccaaagttacaattcaaagaccaacaagtttactccttgatttttttttttctttgagatggagtctcttgtcacccaggcaggactgcaatggtgtggtaacggctcaactctacttccatctccgaggttcaagccattctgcctcagcttcccacgtagctgggattacaggtgcccgccaccatgcccggctaattttgtttttttgtttttgagacagagtctcactctgtcacccaggctggagtgctgtggcgcaatctcagctcactgcaagctccacctcccgggttcacgccattctctgcctcagcctcctgagtagctgggactacaggcgcctgccaccacagcccggtaattttttttgtgtatttagtagagacaagggtttcaccgtgtcagccaggctggtctcaatctcctgacctcgtgatccgcccgcctcggcctcccaaagtgctgggatgacaggcatgagtcactgtgcctggccagtcctgcacaatcttgaaatgctgaggctctcagcaagctgagtgttggagataacttcatagacaa

SEQ ID NO: 309460 - DNA, 1000 bp, Homo Sapiens
gctctatatccctgggtgttacctgcatagcatgaagtactatccagaactgacatgcacatgtggaagaacggcagtggggaatgacacattattggatacattggttaccgtgcagaaatgcttctttatcctgataatatcatactcaataataggtcatcactcaaaggtgccattagccatgtgtctgcctgtagcgtgtaaagccaattttgaacaagaaagtatcagtcagtattctgagctgtcctcatgcctggattgggtgtaagtggtggagtagtaaaagcaagtgtcttcagacccagatttgatgtcctcagacccagattcaagccttctctgctggtctgtgaccttcagtaaactaagtaatgtctttgagcctccatttccttatcagtcagtgtttacaatagtgcctgatgcataggcttgttggaaggatgaatgagataatataggtaaaccacttggcataatgactgactcacagtaagtgctcagtaaatattaaccacccttattgttggagtggtggtaattatctccaataaagatcttacagaagaaaaagatgttcttttaaaaaaagaggctgttatttgacgtagatgacctggaaggaagatagaattcctcttagggatagaattggtatttcctttaggaaagaacaccttttgtacatattcagtaacaaaaggtgagccagccctgcccccacccccaccactggcaaagctgggatggggaaagattgccctgcataagaatacaatataattttcttataagttctttccaaaggaggggataaagggtttgatagaaagtggttcctgggagagtttgcagaagagtggaaaagatcttgctaagatgacaggaggcacatgagccaccagaaattccttggattcatagtaatagtgatgtttgccattgaaatggaaggtattttctgtcctgtgcttaactcatccccttttcattg

SEQ ID NO: 309461 - DNA, 1000 bp, Homo Sapiens
acctgccaactgtcccatagacttattaacattcataaacctttattgttttaaaccaatgagttttcaagtggtttcttatcagcaacagctactgtgcaattgtcgtcatgaccctcttgattttatagggcttgggtgacagaatcatagaaacagacaccttctgggcacctactatgcaccagggacatgactccattacatcaccttgaccaccttttaagtagggattattatacccattttacagattaaaaaaaaacaaaacaaaactagggatcagagaggaagaacaatggcccaatgccacccagcagagccaaaattctacaccagatctgtctgtggtccctccaccccaagtctgcagctaggaccttggcttcaaataactcacgtgcatgatgttcacactctcatcgaaaatcttcatatagggcttcaggatgttgaaatggaaggcaggcatcagcatcccacggtggcagctccacttgtcaccagcactcagcaggaacccatcccttagcagggcagccaagggccatgggcaaggtcatcttcctcccctggtcccccaacttatttcccaaccctgttcacctgcagatactcacccagccagggcttcaggaagctgtagaagaccttgtcctttggtgcaatggtggctgacatgaatggggacaatcaggggccatggaggtgggtaaaggagggactttggggttgggggaaggctcccagctagaggtttgcacttctcccctccaagccccacatagcaggaagagggccaaagagagaggaagaagagaggatgtgggaggagagaggagactagaccaggctatagcagcacagtgcagcaatgacagcctaacatggcacagcatgctacagtacgacttgacatggctccaaaatagactaacatgttctgcaaaacctgagcatagctcaacactacaaaatgcctctacagggacctagtata

SEQ ID NO: 309462 - DNA, 1000 bp, Homo Sapiens
gcagcacatctgcaagatgaagttctggagattgatgcacaatgagaatatagagcagtcttcctgcagtaccaatgattggttccatgacccccttcaaataccaaaatccccagatgcttaaactccttatacaaaatggtagagtatttatacctaagataacctaggcacatccttagactttcaatcttcactggattacttttaatacctaatgtacatgctacatagctgttacaactgcagtgtacaagaaaataagtgacaagaaaatatagtattttgaaaataagaaaaataagtctacatgttcaatacacacacaaccatcctttttgattatttttgacccaaagttggttgaatccacagatgcaaatcccttggacagagggctaactctgtcactatagaagtgtacacttaaatggttaagatgaccaatttatgagtcaaaaaggaagggggggtcagatacttgtcagtgtacgccctacataattacctcaaatattaagcccttaccatgtgccaagcaatataaacaccatgtgcagctcagtctaattgagaagaaaaccaaatcatcacagcacctgctaagccatctgtggagccagggttatctcatcagccaggctgcatcaccaggaagcagccacctgataacagctttccctggaagtcccctctgtgatcaaccagcatctgatttaacaacagtctcatgattttcaagccaacctgtccctcactagttttgcctgaaaaaatagtgccgaatttcttgtgaagtacagacactggtagaaaatacttcaaaacattgatagataaaatcagagacaatttaaatgttcttcacagttctccagaacataatagcctgtagtaccaatgactggttccatgatcccctaagagaacacaacttaggaatgtggattctaatgatagctttatactgcttaggcaaatttacttctgagccttatgt

SEQ ID NO: 309463 - DNA, 1000 bp, Homo Sapiens
tggaaaggcaagtgatttgatatttccttttttttctgactctatgtgaaaattcttttcaaagtaggtaaaagccatcactatatttcaaagaggtcacagtgacatcatatacaaaaggaaccagattgaaaaagatattgctgacatagccagtagtgagattactaaagaataaacagaaatgccttggaaattatttttacaccggcttgaattgaaacattaaagcaaaatgaaagctgtaaggtgttcactagttttccaaatgcgttgtcaagtttattggtaagaaatagactcctaaatagatgcagaaagcacttaagtgttctgctcaattcaactatgtgatttttgtctctcagttaaaaatttgtccacctatgtttcaggatatgactacagacgaaaacgatttgtgctttgctgttatggatgtccgtggtcaggatgcctcccacagtgaattaaaatgcttgatttcattaagaaaaaaaaattagaccctttaatggttaaaacacttcaaaatgctttgaggcagaaacaaaacctttccagaataaaggtagcaattcctatctatctaaagtaattccttcagctttcaaatgcagcatcaagagtgccataaatattcaatattcttgattaacattttttagggaaaaagcattcagtatacaaagactgaatagttcacttcttaaatagtatcttcttaaaaggtaagaagaacatatctcaagaggagatgccatcttattaaatgaaacaacagtggaaatatagccagacctgactaaccttgcctgtattttcttgtaggcaggagaaaatcagaggcatcaagatctggtagaagggccggtctgctgtttaacacataccagcagacaggtcccacgtgggaggcaccacagacctttaagatagggtgaagccttgatagaaggagaaacagaagctgcccactgtctttacttagaagtggaga

SEQ ID NO: 309464 - DNA, 1000 bp, Homo Sapiens; identical to SEQ ID NO: 120085

SEQ ID NO: 309465 - DNA, 1000 bp, Homo Sapiens
tttttttttttttttttttggtacaaaggccattttactggtacatttaataaatgtttattagcacctatcatacaaggcacaaagaagagtaaaagacctcatggatctgaccaatttgtgaaagattcattagaggcaaaatgaatggtcagagcagcagccccccacatcagagccatccaaccagatgtcctaaagtgctggctgagggcaattaacaagtccagaaggccatttaaatacactgggtgagaacaaactattttaggtcctacaacttccagaccactctcccatggcctcttatcaaatgacttcttccaatcactttctagaatgtagaagataactcatcgtctcagccagactacattttctaatacccgatgatgtatagtggtaaataaagccctggtccacaatttctgtaaccattaagggctccagggtggcttcagttcagtgacaaatgagcaccaatgttggcatgaataccatgggtcactgtgaaagagtttttttccctacatggcttctctgatgttgaacaaggtatgaagttcgagtgaaaccttttccacatgtgtcacactgatagggtttctcaccagtgtggattttctgatgttcaataagacttctattccgtgtgaaacttctctcacactcattacatttataagacacgggagcctcagtattttcccactggctttccgtcctaccctgactttcccaggactccccgtgctcaggattctgaacatttttatcaccatgaatcctctgatgtctcaggagatgtgaattccgcctaaaggctttgccacacatattgcactggtatggcttctccccagtatgaattttgtgatgttcaaggaggctgcagctctggctgaaggtcttcccacagtcatcacactcatagggcttctccccagtgtgggttctctggtgtttgataaggtttgagctgtgactgaagaccttacca

SEQ ID NO: 309466 - DNA, 1000 bp, Homo Sapiens
  misc_feature (71)..(71): n is a, c, g, or t
tctgaaggtkggaggtttgcttgagcccagtaggtagagtatgcagtgagccatgatcctgtcactgtatnccagcctgggcaacagaaagagactctgtctcaaaaaaagatcaaacaaataaacatactacaacgtaacataaatcaaaacaatgtggtactggtataataaagttagaaatacaaacctatatatctatatcagttgtatatgggattattataccatacccagttggccataggtatatgggattatttctgagttcagaagtaattcagagarttcagagttcagaaataatcccatatacctatggtcaactgattttctccaagggagcaaagagcattaaatgggggaaataatagtttcatcaacaaaatggtgcttgcacaacttttttttttttttttttttttttttttttttttgagacagggtcttgctctgtcactcaggctggagtgcagtggcagcaccatggctcactgcagccttgacttccgaagcttaagtgatcttcccacgacagcctccccagtagctgggaccacaggtgagtgccaccacatccagctaacttttttgtagagatggggtctccctatgttgtccaggctggtcttgaactcctgggctcaagtgatccttttgccttgggctctcaatgtgttgggattacaggtgtgagccacaatgcccaaccccacaacaactagatactcacatgcaaaagtatgatgtcagacccctgacctcataccatatgcaaaaactaactcaaaatgggccagtgacacataatagatagggtcttgctctgtcatccatgctggagtgagatggcacagtcatagcttattgcaacctcaaactcatgggctcaaacaatcctcctgcttcagcctcccaagcagctatgactacaggtgtgcaccaccacacccagctaatttttaaattttttgtagagttgaggtcttgctatgttgcc

SEQ ID NO: 309467 - DNA, 1000 bp, Homo Sapiens
aaatgtataatgtgtaatttccatctgtatctttccattaatgtaatacccatttccactttctcttctattaactctctgaattatttgcctatgtttctatcaccttagaggttttgctggcatattacttggtaggaaaatagcaagttttaatacaagatgtgtgatatgagcccaatattgtaaataaacatttaaccctatatgtatgtgtgcataagttatacatatatatattatgtgtgaatgcacataatgtacacacacatgcatagatgtacatgtacatctgtacccatatattatctttaaatgtattccaaattgtaagtagcttgttctaggagatgagctgtgaaaagcataatcaattatgttacttcttatttcttacatttcaagtagaagacaggaagagtggtgaacataatttaacataagatacttagttgtctatgctttggagatgacatgaggctaattatattaggacaatagcataaaattatcatcccactaatgttaaaactaaaacaatataggagaagctgaaaaagattaaaccctggtaattcttcttagaaattttgttcagccaggtgcagtggctcacgcctgtaagcccagcagtttgggaggctgaggtgggtggatcacttgaggtcaggagttcaagactagcctggcccacatagtgaaaccctgtctctactaaaaatacaaaaattagcctggtgtggtggtaggcacctgtaatcccagctacttggggggctgaggcaggagaaccacttgaatccaggaggtggagattgcagtgagccgagatcgcaccattgcactccagcctggggaacaaaagtgggactccatttcaaaaaaaaaagaaaaaagaaaagaaattttgttcatgtttgaagagagaagcatgacaaaacacatgagcagcaatatgaaagcatatatttatacttcattacttcattctaagttggaa

SEQ ID NO: 309468 - DNA, 1000 bp, Homo Sapiens
cgtgaagttctgcaggaagttgtggcaggccagcaggccgcagggcagcagcagcagggctgtgtggttgagctggaagcggcccatgctgcccagagcatccagcaggtctgtgaaggccatggccataggcctgacctgaggcccagtacccccggctttatgtagagaggccgggaggggccctgggagggggaggaacaggccaggggtgaggactgcagacatcctgtgcaccctgtgtcggagggctcaggttacaccccataggagggttcaggtgtccccacatctgcagggctcccctcccccatgccctttctctagctctctccatctctcaccccgagggctgagtcacagcctaccacccatatccgcaggtctggccgccctgcccactgccctcaccgacaggaccccagcagtgaatggagcaccatcaccttccctttcctccagaggacaccgaggcatgttcgggagccccgattctggctttggcacatgggacacagtccctgtctctaggctccaaatcacagctggagccttaagtgctgagagttcagaataatgggatgcagtgtttacagctgcttacccttcccccacttcccgagaaagcagggacttggctgcacaggtgacacgtgggaaaaagcccttttaaaatgcccaaataggccaggtgcagtggctcatgcctgtaatcctggcactttgggaggccaaggcaggctgatcacctgaggtcaggagttctagaccagcctggccaacatggtgaaaccctctctctactaaaaatacaaaagttagccaggcatggtggcgggcacctgtaatcccagctgcttgggaggctgaggcaggagactcgcttgaacccgggaggtggaggttacagtgagccgagatcacgctactgcactccagcctgggcaacaagagagaaactccatcagaaagaaagaaaggaaggaaagaaacaaagcaa

SEQ ID NO: 309469 - DNA, 1000 bp, Homo Sapiens
tcactcatagaatcactgtgatgacaagagcagccaagggtaagtctttgcacagggcctccctggtcattattgggtcaacaagacataaccacatgccttatctccacttccaaaacccaaacagctctcaaaaacaagtcattgtagctcatttggaagaaaagactgatatgaaccaatatgcaactacctataatctttctctatccctcttactgtgaatatttgctgtggaaatattaacatgtttggtctccactggggtaggactccacatgtgtaggactccactggggtgctacacatacacatagtagatatgccttaccaccttcctaaaattggataattaaatttcacaacttatctagcccaaaggtttcagagacggtagacctgtatctttatgagggcgaggatgagaatataacctggcctgttatcatgcaccaaggtacctgctgttctcatgaagatgtctgcagccagccagccagtctctacaaactccacccccaacctcgctatgctcccttccctggaactttccaaggggcccttagaatttgtattcagctctcacaggctgagaccagggtgacatcctgggaaacctgcctagtgatagccaaggtgtagctccagatgaaaggcacacaactttaaatataaaaaagccattcaggctaggctcagtggctcatgcgtgtaatcccagcactttaagagactgaggcagacagatcacctgaggtcagaagttcaagaccaggctggccaacatggcaaaaccctgtctctacaaaatatataaaaattaacaggcatggtggtgcatacctgtaatcccagctactcaggaggctgaggcacaagaatcgcttgaacctgggaagcagaggttgcagtgagccaagcctgcaccactgcacttcattcaggctgggcaacagagtgagactccatctcaaataaataaataataaagccattcaac

SEQ ID NO: 309470 - DNA, 1000 bp, Homo Sapiens
ccttaaagaggtccttcacgtctcttgtaagttatattcctgggtattttattctctttgtagcaattgtgaatgggagttcacttattatttggctctttgcttgtctgttattggtgtataggagtgctttgtgatttttgcacactgattttgtatcctgagactttgctgaagttgcttatcagcttaaggagattttaagctgagactatggggttttctaaatatacaatcatgtcatctgcaaacagagacaatttgacatcctctcttcctgtttgaataccctttatttctttctcttgcctgattgtcccggccagaacttccaatactatgttgaatatgagtggtgaaagagggcattctacccttttttgtctggggaaaaattgtcatccttggggggaaaaaaaagcagtagcatctttgagcttaattgtaataccatagtgccatctggtgaccatatggaatgactgcattatccacatgggatatttcatgtctaacaaaaatctacaacatgtaaatctctagtgtgttctgggttagtgttatagggacagacagtgagggctgtacttgagaactgttctcctgagctactcctttggagatccctcccctggttaggcactttttcatgtcagaaagaaaaataagaattttcccctttgcctaccctaagatggtagatggcaggttgtataagcaaatgagtgaagtcttcacacatcccttcggctctaaggaagatgctgggaaaggggagttggtattttgtcttgttgagagatcttcccttgaaagatttggctactgtacctatggcctcgagtccaatcccaaataggagtttcaaactcaagtaaccccgaatagcacctagctgtccctaaatatgaaataaaggcccctcttcattcttccaactaccccagaatgcaaagaactgtaccatcagagtgtagccagggcttttgaatccatcaca

SEQ ID NO: 309471 - DNA, 1000 bp, Homo Sapiens
gcagtgagccgagattgccactgcactgcagcctgggcaacagtgcaagactgtctcaaaaaaaaaaaatttatttttgcatgaaaaatttccaggactttggtgataagcagcgaaatcaatgccttaagtagattttgaaatggtatattaaaaaatggtactcatttggatactgtaagaaaatactgattaggtttctgggatataatggacaaatgattctcaactcatggcaagaagattcctccctgggtatcagaataatttgaggtggaacaaagaggctatgaagtttcagaacaaggtggtattttctgctcttgctttaatttcctttattgtaaaaattcagttaacatcaaagagagtgtctttttttttttttaaggaagaatgctttaaaaagagataagagcagtgccaacatgaaaaccaaaaaaaaaaaaaaaaacagtgcaacggggtgccaaaaaaaagggggaaaacatctgaaataagggggaagagtcaaaggtaaaaatcacaaagcaatggaataattaaaaagataacaaaaggttaactaggcaagttagaccaggggaagacttaatatgaaatttgtcctaggataaattattaaaatatttaaagatataatctaaagctcctactgaaatagaagataaatttaaaacaattttgattaaaaagagaaaatatactgtaaaatatttatttaataaaaataattttataatctatacagaattgaataaaaagtacaacaaattattttcacttatttacaaaactgcatacagtacaacttgcacattgagttcagcattctataaatatggccacataccaagatgtgaacatattcttgtcttatataagaaaaggctcaggttgtatgccacaaactttgaattaaattccagggaaatattgctttggtaacatgaacaatttgtaccacattccattaaaaaaagatttaataaaatccctc

SEQ ID NO: 309472 - DNA, 435 bp, Homo Sapiens
acaagagtcaccagcgtaggcaggggggcaggcacagatttccacagcaagtgctatgcgcccacttcctgtgtcagaggcttcctctagccccacctcgctcagggtgagcctttgagtctctgtgaagtagaggccttggatgcgcacatctgccagtccagacagcactgtcatcagctcctccctagacactggggcacggctgctggcatgtctgaagtttccctcgaccacgtgcactcgtccatgatgcagccggtctggccgtggggtgtttgtctcctcatagatgatggacatgtgctgaccagtgagctgtacatccggcttcttttccagaagaaccatgtcgccaggcaagccaaaggacttggcttggtaagtgaggtaaccaccatatgaagaaaccttgtcccccaggtaggaggtggg

SEQ ID NO: 309473 - DNA, 1000 bp, Homo Sapiens
ttttttttttttttacacaattctctagtttatttgtccgaaataaatacaacctgagaacatccatttcaatgtccccaaacactatttatcccctgaaaaagcagcttaaaatatgggtgcacattttgcagcttatgttctttggttaggctctgaagggtgtttgttctgggctgggctaggctgggcctagctgtagagacacacctaagttccgttctctgtttggaggctgcacccagcctgagtccccaccagtcccctccaagagccctgatgctgcttccggagcacctgtcttcattgcctctcccttctgcagcctgaaaggagggatgttcaggactctgcagctctgtgtccagcccttgcagagagctttgtcctctgacatcagctaccacacaggctcattctcaactgacacagaaagggttacttctgaccctacagcagcttacccagggcaaagtgagagaaactgaagcacagctggtatatgggtttaaagtactctccctttaaccctgccaggaggttgagagtccctaaaaaatacagaaggggacactgcctgcctactccagttattccctggggccctgggccactagggagcagaaggacggggaggccacaggccaccctttgtcttctctttgtgggtgaggctcagaggtttgggtccatgttctcctggtctgaggctgcctcatcatcatctggggactccagactgaggctcctgccccgccgcagggtggcatagaagtgcagcacacgggggtcacagcgaaccgccatggggtcaaagtccagcacacgtaggccctgcaggctgcgggcccgagaaagggccacataggcctggccactggcaaacacacggcccagagaaatctccacacaatccagggtcatgccttggctcttgtggatggacatcgcccaggccagctggaggggcagctgctgccgactgaggagctggcccccg

SEQ ID NO: 309474 - DNA, 1000 bp, Homo Sapiens
actaccatccagttgctcaagtccaaaatctacatatcttctttcatccatctcttttcctcacaccctcttgcaccaaacagatcagtcagtcctataggctctattttgtattagttatcgtatgctgcataacaaattatactaaagtctcaccattaaaaacaacaaacatttattatctcatcatttctgtgggtcaggaattcaggcatggcacagctagatacctctggctcaaggtctctcatgagttagcagctgagctgtcagtgtgaattgccatcttatctgaaggctcaactggagtgggtgaaggaggtgagatcagcctccaagattactcacacagctctttagagacttcagtcccttgatacttcagtcccttgatacgtgggcctctctacagaactacaacagaacaaggtagctgactttcactagaatgagcaatctgaaagagtgagatagcatgcctccaaaatggatgccacaatcttttattaacctaacttctgaaatgacatcccctaacttctgtcatattctgtttgttagatgcaaactgctaactccagtttacattcaaggtgagaagaattaaacttcaccttttgaggctccccttcatatgccttgaggcatattgatatggtttggatgtttgtcccctccaaatctcatgctgaaatgtgatccccaatggtggaggtgggacagggtaggaggtgttgggtcatggtggcagatccctctgaattgtcttggtgccatcctcatggtaatgagtgagttctcttgctctgagttcacgtgagatttggttgtttaaaagactatagcacctccccccacccccactccctctcttgccatgtgacatgctagtgatgcccatcaccttcccccatgattttaagcttcctgaggtcctcaccagaacctgagcagatgttgacaccatgcttcctgtacagcctacagaaccatgaaccaa

SEQ ID NO: 309475 - DNA, 1000 bp, Homo Sapiens
ctgtaaagtgtgaagcaattagaaatactgtaatgagaagctagggagaaaataccttatttttttcatgttcattttttagaaacatttcagaaatacttaacgacattcactctccaatatgagattaggttttatcgacacagatttcttgatctgaataataattctgacaatgagacccaaacaaataaaaggtgatttttttcctctctctctcttttaaaaagatcttttggtttgcatctataaatttgtaaattaattttaaattatttataaaatcattggcaatgtagcatctctcttaaaaatatatatttaaatatattacagaaggttttaaccctgtccttctaagacatcaatcttttaatatctcctaatagctaattttctttttaacacgatggaaaagattttttaaaaaagcaaaggactgatcgaaagaattcacagtagctgaaattaaacatttcatatggagtaacttaaatttatctaaaacacttaaatatatctttatacacaaattttgtagtaaaatatagctataagtgacttaaagactctagtcttctttgaagacatctttaaacttttttatacatagaatatgctgaaacaatacattccaccgaaggttaggcaaagcgcaatattttcaaacacaggtagcgtaatctaggtcctccactctgatacccttctgttaaaaaaaaattaaaggaaaaaaattctctaaactcatgtcttcttcgtttgtatatggaaatctagaaatttttcagtagatcaatgtagatagcctggaaatctcagccctaaagtaatgttttagttaaaatgttccttattgaaaaaaaaaaatgttccttattgaatgtgtatatctatcaggtaagtcatattattactcaacgatttggtaaaaatgattgtcaatttccacatacttgtttcccatgtagacactgccctaaggttttaagcttcatca

SEQ ID NO: 309476 - DNA, 1000 bp, Homo Sapiens; identical to SEQ ID NO: 120086

SEQ ID NO: 309477 - DNA, 1000 bp, Homo Sapiens
cagctacaggctgacaatgtcatatttaataccgtgctatcaaaggcttgagactaatatttttattcctgagacaagtttgacacaactttgtgtccctgggattatcccccatatgatcctggagctgacctcattaagaacatgtgtttctaatgtcagggattatttcattttggccaacccttgtgttttacctagtggcaatcaggtttcacgtctcaacaattaataaccgcaagatgttgttgacatcagttaagaaaataattacacaaggaagcccctgctggaacagtcagctggctttgcaaaaaaaaaaattgataccggcatgtgtggcttaatcttgcctctaattcacctttcttaaggagagttgagtttatctcccttccaggagaaattgccccctaaaaagtccaaggcttactttgtccatactgcccatattggtagcctgtgacagggtccatactgtagcctgtggtgctataggtgggtggacagtaggactgagatgttggcagactgtccaagctcttcatatggtctagtctctgactgcagctggccgacaccgtggtggtaggttccagacccccggtgagaggggagagcgcgtaatcagtctggggctgatgaggtaccccaccgtggttggtcaggagtcccattacctaaaaaaagagccagattgggaagaggttaaaatgcagagagatccagattgcagcctacagctgaaagaataacttgacagtccagtttttatttctttggaaattggttaaagagctgtccaggagactatgaacccaagttctaagtggcagagatattacatcatgcccgacgataacatctgactgcaggttgcagaagaaggaaagggggagggagaagaggggagaagagggggaagaggaaaagaaggaaggagaagaggaaagagagagattacaccacgtccctagtcataaaatcagactggaatttc

SEQ ID NO: 309478 - DNA, 1000 bp, Homo Sapiens; identical to SEQ ID NO: 120087

SEQ ID NO: 309479 - DNA, 1000 bp, Homo Sapiens
tcacttccgattgctggccatctctgggggggcgcccccgtgggcggggtcttgggtgggtagagcaatcaggggacggtgacgtttggcctccctgaacgcctcgagctccttggcgagcatgtgaccccggcgggcacgcaggagggcaggcaggcccctgcgcaggcgctgggtggactgcttccaggtgtcatattggaagaacttgcccacggggtatctggggaagttgtccggaagcacggtcggaggggtcgacacgtccctctcggacttggcgggggtagcacagtacgtctccaggagggccaggtcacagctgcggaaacagcactcctcaacgatgccacggctgcgacggctcacacggcttgcgggcctgcgtcccttgtcaaaatgtccaaaaggtgcaggaagaaaggcaggctcttcctccagagcctgaagccctgccctaggcgtgcggtgcctcagcagcaggagcctcacggcccccagcagaaatttgaagtagaagccgcggtccccacagacgaactggagggtgtccaccagctccccgccgcacagggtctcactggggcggtaagcagcaatgcagcacgaggcgaaggccaagaaggtgagaagcaccagcatcgacttccccattgggattcccattggtgtaagcccagagcctcctttccaggcctcaaatcgaaccagtaaggccaggggcctccagaacatctccccgtttgcgctaccaaactctccccgtgggagctggagagaccagctcaggccacctgggaagtccgacaccaggttccccagactacaatcgcgagccctggaccatcccgtagcgaagtgccatgggctcccatcctgcacccccggctcatctctgcacagggcagcgaagggcgggggggtctccttcccacctccttgtatggaaacttccacgctgcccactgggcaggggccctggcctctctctgggtcgaag

SEQ ID NO: 309480 - DNA, 1000 bp, Homo Sapiens
ctgcattctctctctacattgctgaagttcggggcagcccagcttgcagttggggaaggaaatcgctaagaagtgtgaaaccacaggagacattgcccagtacctcggctggtgatatcagccccacaaagcccttagtgatctgaaagtttcctctcccagtgcagaaatcattccagatttctctatagaggccaggtatttgccctaaagagattcaatcaattcatgagaatcaaggagtagatctaaattaaatttgatctttcttaagtctggttggtcttgctttgtttacaagtaggattctctacttggtttccaaaagaacatgtttcacagaaacaagctgattgtaggcaaaccagaaaaccttcccaatgttcagtaacacattgttttaattctaatatataaaaatgtttactttaaaaggattcaccggagaaaacagaaaacacacaatcacttattttttcacccacataccaacaatgaacattgttttatctttgtctgcagaaatacacagacacacatataaatgaatggcatgcctatttgtgttattactcagtagaaaaaatggccaaaggacatgaacaaatatggcacagaataatataaaatagaccttaaacataaaaagatgtttatcttcactcacagtaagaaaaaaagcaaattaaaaccacaatgcagtactatttttacctgtcaaattagcaaaacccaacattaagcagtaggctgtcagcactcacacacattgtgggagaaggggttagggccatttctatggagggcagtttggcagtacccatcaaaattaccagtgcatatgttcaaatgacataaaacactatcattcatttcagcattttttataatagcaaaagactggtactaaaccaaggcaccgattgaaagtatgttcaccagtgaaaaatatctgtatttagctgggcacagtggctcacacttgtaatcccagcacttt

SEQ ID NO: 309481 - DNA, 1000 bp, Homo Sapiens
gagcggatctccgacacggtcctccgcatggtgggcatcgcggcggcggctgcaggtgggtcctcagcccggactctgcacctgtcacggcgtggtacacgcgggagacccggctgcgccgcgcagagcgctcagctgcagcctgggccgcgccgccgcccacctagggcagagctgccgccgggcgcggcccccgcacgccgacaggaggaggagaaaggcagcggtggcggcgaaggtggcggcgcccgcagagctgggcgagctcttgctgcagccgcggaggggcggctcggcgaggggcggctcggcgaggggcggagctcgggcgccggcgccgggggaggggcctgcggggctcgcgctccccctcccgcggccgctcagcaaggaaggcgggtgaggggcggggagagccagggggagcctccttcgccccgccccgccccgcttcggaccgtatcacgactcaaaggggggatcaactcttagcccccttagtcctccagcgttttcgctccgccctgtggagttggttgacccggttcctcctccaggccactcggactctctcacatcttgctcagaaaggaaagactgctctggctgctgcattctcacgaatcccctcccgctacccctggcttttgatcgcagtggagccgcccgtcgcccggaaagagctgttgggtctgagccggcaggcgaaggcgaaagggtctgggactacaaggtttagctcccagccagagcaggaaaggaacgactgactgttcgccatctgggtgtaattctaacctctctgcacgcccagcccgactcgtggcctgagccgcacttgtcctcctgcctcgcccactagcaacaggctgccaggtcgggaggcccctggtgcccatggtgctcttgtccatggggcttgggtgcatctgggccccgcctgcaagtgggcccggtgcatctccctagttcaggctctgcagcctgacaaggcactgaa

SEQ ID NO: 309482 - DNA, 1000 bp, Homo Sapiens
acaaaaattagccaggtgtggtggcatgtacctgtagtcccagcaactcgggaggctgaggcaaggagaattgcttgaaacccagagtgggaggttgccagtgagctgaaggtcgcatcactgcggtccagcctgggtgacagagcaagactccatctaggcttgcaccaccactactgggtaattttgttttttgttttaatttgtagagatggggttcaccatgttgcctaaagtggtctcgaattcctcagagcaagtgatctgcctgccttggcctcccaaagtgctgggattacaggagtgagccactgcgcccaatctcaaaactttgttgattatatgttggcagatgcttcaggagaagtgattaaggtctcctaaatgatatacctgtgacacttttccactttagtttgtggcgcgtgcacacacacacacacacacacacacacacaatggttgtatggtgcaacagcttccttcctgtgctatgttttcaatctcttaggcatctgacacctatgagatgtcattgtgtcatgcttactaaagaagatggggataagtttttgtggtcgaaagtggtagagataacagcagcagatggctgtgaaccagccaagggtgtgcttcccacctgcaggcagttggcgaaatctgagtccccacagcagtagatcaggagcctgccttccaaagattgttacaccagtgatactgaaggtgtttgaatgtagtgcttctgtcatgagctttctccagccattcaacagcaacaagtttttattgttgtgcctgttatgtgccaagccacagctctgggtcctgaggatgaattagtgaataaaacagacaaaagagctgatctacttactggagtttacattctagtgggcagagtagacaggcatacaataaaggaaattaatatgtaaggaattcccgaggaaataaatagatcaggactaaggggatttgttgtgccacattggggaaa

SEQ ID NO: 309483 - DNA, 1000 bp, Homo Sapiens
gatcttgccccggctccgccttggacatctcttagcagagcagcacacaaggatgagagaccaccggccagggccagggacgctaacttctctcagggacaggtggcatctgcaggctgcaaagccctgggaggctggaaagatgtgctaccctccaggcacaggccaggaaaggctccggacacaaaggacttgggatccaggggcctggcttccccagagtccacctgtggacagcagggcacccgattacaagtccagacactttctgacccagccccacaacttgccagccagtctgtttgccagctgtaaacagactgcccaggctgcctctctgggaccaaaagaactcaggggcatgacagacactggacttcacaaggccattttcaccagactcacgtgcacatgaatggaaggctgtgctgcggccgggaaaatcctcccttgcccagggactgcctatgggttctgccttctcccttcctcagacccacaggcagaagtcaacaaacaccagagaagttttacaggaccatacaagtgtttctgaattatttatggcaaatgcatgtttctgccaccagtgtacattcctgtgtggacacgggcagcaacaggggagaggccgcctccccattggctgccagtgtccacagccagggaaggggagagggggcggcagcctctccctcgagcacttcggtgtgtgcaccaggaaggtaacttcctgccctgtcttgaagtggtttcactgtgagagcaggcctgaaggggcacccctggccaccagctcccctaagcatacctaagtagccgggtacatgcacaactggggaggggcgaccacaactgcccccctgccctcacgtttctgtgcatcccaatgtgctgaagcaagcgcattgctttcatgaatgcccacaactaagggtgacatggatacaacggcctggccagtggctgcccaggaagcatctgctgtggttggggctct

SEQ ID NO: 309484 - DNA, 1000 bp, Homo Sapiens
aggaattgcacaattaactcaataatgctgtgtgttctcaagaagctcccttagtgaggccgatcttaagatggccgattctgcccgttgaaggcatcctgggaaagaaaacaagcatcccagcgggcatctcaccacgacttctcctggagtcctcacacggtcactgacaactacagtcagttttaggaactagagtgccgtatcatcagacttaccctgtcctgccccaccttccctgctaacatcgaggtgtgtgcagttaccttctgagcttggaacaagcagactggaattttcctctgctacctcttgtgtataaaatcttgtttataaaatttcaaaaggaagtagatacactagggaagaaccttaattctaaatttggttcatgtgtggcaaagttcttagcttctaagagtataaaataaatttttcaaaaacagagttggagtcttgccgccattcttcatatatcagaacacagccgtagtgggcgggggaacacgagcctgtgcctggtgctaaatgctgttgattcctcttagtactactttacactaataaaggggactgtgggtcctctgagcctgttgctgttcttttctctggaggggctgaccatttcaggattcatctgcaaagcttagaggaggatgctgaacttaggttgatggtctccattcatctccaccaaagcttttggctctcccaagtggtccccagcatagatcgtgtcgctggtcacactgggcttcttgctagatcccacaggtctcagtctcattcctagtggccagcgttgctcacatgggtccccttccctatttgctagtccagattttcgccttcctgcaagccacaccccttcctccccgatccctggtgaccacctgctaaccctctgcaagaaccaagttgttccaacatcacagagctgtcagggtgtggatctctaaccagctgatacttgattctgtggaggggaaggagagagagt

SEQ ID NO: 309485 - DNA, 1000 bp, Homo Sapiens
ttcttagagggatagaggtgggtggcaatgaatggtacttcttatgaggcccatggtgaccagccctgcttcctgacaacaggaagaattcaatgactatgaggccaacgacccttgggtacaacagttcatccttaacctggagcagcaaatggcagagttcaaggtgagcaggggccctagggatccacttagggaattacccacgtcagcccaaaccagcagcctgcagggtctcatcacattccttctggggaccctgaaagcccttccaaccctcacctgtagaaactcccccgtggcctcacgctactatcctcaccacctaagactccagcatagaggcagaggagttaggtggggctcggctgatgtcaaccctctgtgtgcaggccagcctgtccccggtcatctacgacagcctaaccggcctcatgactagccttgttgccgtcgagttggagaaagtggtgctgaaatccacctttaaccgggtaaggtaaaggggtcatgggtctgcggctctcgtttctcctctgaggaagacatgtcatgccaccccccccaggacttgcatcccctctgtctgctgcccacaggccctgcatgtctgggtccagtcctgctctggcttctgaagccgtagagcaaacaaaccacagggcaccacctgaggcctggcgggccttgccacccagctctgggggcaactggaggccagttctgcttggccaggcctaagtagtgactgggcttgggttctcctgcagctgggtggtctgcagtttgacaaggagctgaggtcgctcattgcctaccttaccacggtgaccacctggaccatccgagacaagtttgcccggctctcccagatggccaccatcctcaatctggagcgggtaggtggggcacccttggcccagccagggaggggtgactgaaagaggcaaagatggatccccgccacttccctctaaaccatgtctgccagcagccagct

SEQ ID NO: 309486 - DNA, 353 bp, Homo Sapiens
  misc_feature (76)..(76): n is a, c, g, or t
tgagctcaggtcaagtgtagaaaccatcatagttacaaagatcagtagtaaaaccttttcatcattgcccagaaangattaggctttcatagacatacatacgcacccccccaccctcaatctcattcattcctacagctgttatctttataaacacatgtgcgtacacacacacacacacacacacacacacacacacaccagacatatgcccttattgttttacattgttttatagttttgcttctcagaactgtagagatcatgcatcaggtagactggaaagacttctgatgctcagatttggctagtttcatcattgatccacttcactaaaagcagatctcagaaag

SEQ ID NO: 309487 - DNA, 1000 bp, Homo Sapiens
aaaaaaaaaaaaaggagacagagccactccaagatgctttttctttgtattgggcagttaagtaggtcagttaccaaacaaaggataatttgaaagttctccaaagcagcctgtgcaaaatatctcttccgtattataccactaacaactaaaatgttgtcattactagaggctcatccagcactggtctttctcaaaaggcacacaggcctgggagggcagtgtggttttgaaacatgccagccagctgaatgcaagttgataagcaaagataatagtgcggtgagccaacatgggggaaatgcctggaggcagtatcacagggaggttctgacaagcacaagtgaagagaaagactggagcccagaaaggaagaggaaggagagaaggaggcactcaaagagaagcagagtatgaaacaacttcacaggtttgcctggggctggcagcaatccagtcaacagtggagtggctggcagcagagaaaagtgtttgccactgccttgtcagcatggagtgaatggagagtgtggctgcagatgttagagaagagtaggagagaaaaggcaaacaagaggaaatataattagggctttggtaaggaagtgggaactaaggaagaggctaaccagtgaactaattcagatatgatcaaataaacaggaaatgaaacaatcagaaggcaagggagagaggcaggaccagcctgacggaagtggcaatcaagtgccagaagttaacttttctttaccatctcataacctctttccacctcacctttcatcattttgcccttcttcatcctttgctgccctcacatactatctcatctcagttcctaactgcttgtctgagaagcagatagtcacacaagacatgcgatctcacatcctttcatgtcaatcttggtctgtgccccagccccataccaagttacacaaaaaaatgaaattatttcatctttctctttattctgacaacattatgacattaaataaaa

SEQ ID NO: 309488 - DNA, 1000 bp, Homo Sapiens
taaaaaaatactacctagttctttcctctgtctgtaatagtaagttaggctctatagctgaacctactcaaaaatttgagaatttctccatattaaacagctttcttaaaacagaagtctatcctacggaatccattccaatgttttacatgccttaaaattctcaaacccctagtccgaaatcccctggaccatgccatgcccctggttgtttttgtactgagcccagggcaactggttgacatcttatcaaaacccttgattggttgaaggctatttatttatttatttgtatttattgtttttgagacggagtctcgccctattacccagcctggagtgcagtggcgcaatctcgggtcactggaacctccatcccctgggttcaagcaattctcgtgcctcagcctcgagtagctgggattgcaggcgtgcaccaccacacccagctaattttttgaatttttagtagcgatagggtttcaccatgttgtccaggctggtctcgaactcctgaactcaagcaatacacccacctcggccacccaaagtgctgggattacaggtgtgagccaccgcgcccagcctgaaggctgttatttaaaaactgaattatccagctcctgatgataatgaccatcacttatacctttctgtgtcctccaataaagtcttcaagtacagctggaattcaaattatttaccatccttgaacctttctttaatgttcttaatattcttctttaactatggaaaaactgaatctatcattttgctaaaagtttaaccaggacaccttataaagaaaaagaaaacctaccatttttacatctctttcctccctcccctcccttcctctctccttcccttcctctctctctctctttctttctttgacagggtctcactctgtcactcaggctggagtgcagtggtgcgatcttggctcactacaacctccacctcccagattcaagcaattcttgtgcctcaacctctc

SEQ ID NO: 309489 - DNA, 1000 bp, Homo Sapiens
tctccgacctaccttctcgtggtggtgatgtgataataaaaattgaatagtgagcaacccagtgggctatggaaatgtgtggaagatggcatttctatttctcagtggggctcttacctattactcatcaaccttgtaggcagaattgactgatgcagcctacacagtatttaattacataaatgggacaccacctatgtgcccaacatgggatttgataggaaggatttgaaggggttagagacagggagaccaaataggagtctgcccagccacccagctttcgggtaatgtgcgtctggtcttcagggccaacaatagagagaatgtgaaattaagttgatgatggaaatgaaagaaggaggaattgaaagcttctcaactaagaaaccagaagacaagcaacaagagagcatctcatgaaatcacacaacaaggtaactgagtgggtatttcctgtgagcagttataaagttagattgtggacgggtacggtggctcatgccactttgggaggccgaggcgcgccgatcacctgaggtcgggagttggagaccagcctgaccaacatggagaaaccccttctctactgataatacaaaaaaattagccaggcgtggtgacgcatgcctgtaatcccagctactcaggaggctgaggcaggagaatcgcttgaactcaggaggcggaggttgcggtgagctgagatcaggccataaaaaatcagctttgtcaacaaaagtgaaacaaaaattttaaaaaaaaaaaaagattcaagtccagattttgctaaagatgataatttgggggttttcagcatggactatgatagaaccctcagagtcgtttcagcatcctgagacaggaaatgcattttcatttctgtaggggggcgttaaggagacccccaaagcgcttggctgttgatgtcaaatcagtcagagaagatgatcccatgcaacctgaaccttggtaaaataaaagcatgctattattcata

SEQ ID NO: 309490 - DNA, 1000 bp, Homo Sapiens; identical to SEQ ID NO: 120088

SEQ ID NO: 309491 - DNA, 1000 bp, Homo Sapiens
aatgaattgagatccagtgtggacagcttctccggaagcagaagcttggctctggaggaaggagaggccgcagcaggggaggtaagagtattgagtatactttaggatgtggtaggtatttatatatgtttacatgctgtgagggaagagctgtggaaagaaaaacaggagaggggaagagagagagagagaggagttaattgatagagggctgactgactgatgggcctgagactgcaattcagagcagagacccaggagggaagaagtagtgagggttggtggcggcgggggggcggggggtggtgagttcgtacaggctcagaaagttgagctttactttgcttatcatctatttgcgtatctatctatttatttttgcccgctgtaaaacaggcattagcaaacgttacactagatgggaaaactcaggatgcttggtaatctctattcccttttcttgttcagtcttttctaaatttgctctgataagcatataccttatttatttaatgttatctcagagactaggtcagtcccacagatgaaagtgcaccaggagatgcagggccgtcagcacagtagtccaggtttggaatggcctctgcggatgggaggggcctccttcctgctccactgtgtacctcgtctctggagaccactctcttcctcagaatcgaaagctgatccctcctgcctttcactcccaccccctcccagcctggaccctggggtcctgtgttgcaaccacttcagtccccactgtccattcccttgtcccctgatccttcagctacccttcccttgcccacctccaatcttgagtcagtccaaacatctcccacatctttcctgccacctgtgcagctggacagagaaatcaccgatgcgaggaggttgggactcctgcactctcatggccaccagcctcccctttgccctcaaaatccactcagcaagcaagagaacttcaactcatttgagccgagtttgggaaatc

SEQ ID NO: 309492 - DNA, 1000 bp, Homo Sapiens; identical to SEQ ID NO: 120089

SEQ ID NO: 309493 - DNA, 1000 bp, Homo Sapiens
tcattagaatcaaaaggtaggcttttttaagtgttaaatgacaggaacatcgttgttaaggtttgcttctaaagcacggatcctttcaaggtgacctaggaaatctgagcaaggtgggtgaggaggaaattattttatgttagaaatagttacttcattgttacctcttttgagttttctaggtcttttaaaatctgatcatttaatgacaagtcatatttcacagtcattaaaaaaagtttcaggtggccgtttccaattggaaaactggctgggcactgtggctcatgcctgtcatcccaacattttgggaggccgaggtcgttggatcacttgaggtcaggggttggagaccagcctggtcaatatggtgaaaccccgtttctactaaaaatacaaaaattagccaggcatggtggtgggcacctgtaatcccagctacgcagggggctgaggcaggagaatcacttgaatccaggaggtggaggttgcagtgagtcgagatcgtgccactgcactccagcctgggagacagacggaaattctatctgaaaacaaaaacaaattggaataatatctaaagttataaatttggcaacttaacaactatatcctttaaagtagaaccatgcaaaattcatgtatcatggcagtcataatcgtgtgaaaacaacatccacatattatgcaggtgcatcacaaatggacacgccctgtaatttattccttctgaaccaagtccatctgagttcatcctgggaagactgatgcctgaatctctgattaggttcataagtaaataatcatcatattcattcatgcgtttctgccacaaatatgccctaaatcaggaaggtacatagctatgattcatgccttcagtgattttaaggggaaaaaaaggcacctctctgtgagttacgagtctgagccagggtgaggataaaatgacatgagctaatcacagtagtgaaaggtgacattttcccatcagactgaa

SEQ ID NO: 309494 - DNA, 1000 bp, Homo Sapiens
tatgttgccagatatcctatgtgatataacttcaatctatgaatgatcttttcagcagcttattccacatctgatgagactctaatcagatcatgactgagccccagacattcttgcttccaagtcttccatgaaattcagatcaactcagaatgaaatcaaactcttaaattgttttaatatatgttattgatactttctaacctttttctttaggttgtttctcccaatgaaaattcgacttagtgtcagtgaccaaggaaagaccctgttgattcagtgaggactcatttttcatatggcttcacctttctttgattaattaggcactagctctacacaaagctgagcatagttaccgaggtacaggttgaaactccgaggatgacttatttcattgatcttcattagtatgaggactttctctttgacttagttgtctcttcctagctaggaagttctatctgcaggtgagggtagaaagctgaagggaaccccctggccatgcatgtctatgagaggagactcagggctagagcagaacatgacatgttaggaatctgcaccagaattgatttagaaaatgtagggagggatatagagcatagatacttcaggacttagagatattgctttgtttcttataagaactgtttaccttctaatagaaggcattttaaaaactggaactggaaatttgaaatggatgtgctaaatgtacaccttttctttatatactatcaacatcagcaggtataatgattataactaatcaagaatctgacagctgccctgtgtaggaattgtaaattcaacataatttataagctgaaaaagatacaatggactggctcaatacttgggttaaaataaattaattaaacaaaagcctgggggtttccaagagttgtacacatctctataatgaatttattttttatagacagggtcactttaggttgcctaggctggactttttaactcctgagctcgagttatc

SEQ ID NO: 309495 - DNA, 1000 bp, Homo Sapiens
aaagcacttctggaggagtatgaaaaccagggtggagaaggaagtcttgggaaggcaactcttctagaaagaatctgagacagacaggtaggagccgtggacctgccctacctagagggctcaggctctgaaacatctccagccagcaggagaattagggctggggccagggaagagcaaagcaactgggctaatggggttaagaaactcctagggtcagccgggcatggtggctttcacctgtaatcccagcactttgggaggccgaggtgggcggatcacctgaggtcgggagttcaagaccagtctgaccaacatggagaaaccccgtctctactaaaaatacaaaattagccgggcatggtggcgcatgcctgtaatcccagctgctcaggaggctgaggcaggagaatcacttgaacccaagaggtggaaaattgcttgaacccaggaggcggagttgcagtgagccgagatcacaccattgcacaccagcctgagcaacaagagcgaaactctgctaaaaaaaaaaaaaaaagaaggaaactcctagggtcggctacagatgccacctttctaccagccaggtgacatagtccagtaagaggtggatagcagacgagctgagacagctcacctccatcctgtcaattcccaaagggcccctctttacccctgggccaaggttcaggctttaggcccctctccccaaattagggatcatggagcagcttctttacccttctacaggttttgccccacgagtctagtcctcaggccgagctatgatctttccagagtcccactgtccttgagacagaactcaagttcctgacctggctgcccaagtccaccttgatctgtcctcacctatatctctgcttcccctgtgcccattcaacatgcctgccatttagcaaacccaccctgatctttgggcatactgtcccttctctctgagatgtcctcaacccctagctcagtctctggaaaacttcta

SEQ ID NO: 309496 - DNA, 1000 bp, Homo Sapiens
ctccactctactttgtgctgctaaaaatctactcatataaaccatggactgtattaataagctgtcttgttctatggcttcgggttagttttagtgaatggtaggtccctgcagatcactggagaaggaggaaaatgaaatcagaatatttatttatctggctccttccttggagaatttctgtaatttctgaaatttcgatttcatttcttgacctagatgatcgctttttctctaggtcttcatcctcctgtgaagatccttcaggtaattctacgtctttatcctcctgtgaagatccttcaggtaagtctaggtcttcatcctgctttgaagatccttcaggtaagcctaggtcttcattctgctttgaagatccttcaggtaagtctaggtcttcatcctgctttgaagatccttcagctgagtctaggccttcaggtaagtctaggtcttcatcctgctttgaagatccttcagctgagtctaggccttcgtcctcctcctcttggactggattgatggagttctctcaggactggtcattctccagttgatttgaatgtattttcttagctttcctgtagcaaaacgctaatactgttgaatattctgacgttttcatctttttcaaactcggttcgggggctaagtccctgtttggtgtctcctgcatctgttaagaaaacagggagaggccagaaagacattattttgggtgaataggatagagactggatagcaaggggggctttatgagaaggaatgcaggtggaggaaggggtgtgtgccagagaagaacaaggttgaatcatagggtagggatctatggggaagaagaagaggagcatgggtagggtcacctgttagtccaaagtgcaccattttgtaagttctttgccattttgcagaccttggtcaaagtgaaacatcccatgggggttcaggccgtgagaaacatcctgcctaaccacctgtccacaaggcggacaaaggccca

SEQ ID NO: 309497 - DNA, 1000 bp, Homo Sapiens
ctacctcttcccttcccttcccttccccaccccacaccagacaacaggcagagataaacacagtcatcagctccttaaacttgattttattgtaatcatcgccatcagtggtgatgatttgtccaatttggtttctccatgtgtgactaatcctccccactgtcctgtgaagatccttcagataagcctaggtcttcatcctcctgtgaggatccttcagatgagtctagatctttgtcctcctttgaaggtccttcacatgggcctaggtcttcatcctcatttgaagatccttcagataagtctacgccttcgtcctcctccttttggattggattgatggagttctcttgggactgttcattctccagttgatttgaatttattttcttacccttcctgaggtaatacacaaatattattggatattctgatgtttttgtcttcttcaaactctgttcgggggctaagactctgtttggtacctcttgcatctggtaagaaaatagggagaggccagaaagacattattttgggtgaataggatagagactagatagcaaggggggctttatgagaaggaatgcaggtggaggaaggggtgtgtgccagagaagaacaaggtgaaatcatagggtaggtatctatgcagaagaagaagaggagcatgggtagagtcacctgttagtccaaactgcatgattttgtaagtttttgctatgttgcagaccttggtcaaagtgaaacattccatgggggttcaggccatgagcaacatcctgcctaaccacctgaccacaaggtggacaaaggctcaactaaagaaacatccctatcataagtcctgttccccttattctttcatcttctccagccctgggctaacctccagatattgattaaactctccatcttatttttccttcattcccctttccaggcagctgcaaaggaacaccacaatgatattccactggaaaaagggccaaaccacctgatc

SEQ ID NO: 309498 - DNA, 1000 bp, Homo Sapiens
ttcagtggtccacattctcttcgtggactctaatttttagactttcctgtttaagcccctgtcctctctctaccttttccatactcagtaacttctttacctcttctatgcttgagatataccagtgaagactggccaggctctgtcctcatggatgttaagagtcttgggaatggtgaccttgtgagtgctagcttaaaattcctatttcattcgctgcttcctgcctttaaaataatctacagctgtactcattgttaagcccgctatgcagcccataagaggttatactatttgatgaaggcaaatttttatgctttgaattctctccccctcaataaccttctaatgaattgatttcctatatagtcaacctctcccatagtctataaaatatttcatcctaatacaagtttttgttgtctgtgcctccacctccagccccctcagccctctctgcctagcttttgaagctcttcaagccagcaatttgacttctgccatcactgctcttacttttctctcaagagccaccaaatgccagatccagtggatacttttcagtccttttcctgattacatctccttccttcttgaaagtctttattcctttggcttccctgacatcatttttattggattacgttctctatttcttcctttttgttttgggtgtctccttctgcctactccttaaacttggttttctcaagaagttagtccttgggttacttttctgtaaccctgcattctccctaggtaatttaatccactctcggttttgattactgtccacatggggtgtattactgctctcaaatatctggctcctattccaacttctgtctcacacttcgggtttttatagccagttatctttgggatacatgtttgaaacaactctggttatactctactaccaacttttgccacatgcattccttcatgttgaaatggcatcatccagcaatttctcctattccctaacttcccatacctg

SEQ ID NO: 309499 - DNA, 1000 bp, Homo Sapiens
gctagcattctgaacactatagccaacccatgtagcccatcctggcccaattaattgatcaagcttttctttttttctgagactaattaggtcccatgggttcaaacaccaagataaggggtgctgtccacttctatgtactatttctcatttttttctgtcatcccatttaatggtgaggtcagtcattctcaaataatcacttagctctcctcaaagtcccaagttattgatatgattataaatatccttatatttgtaaaataccaaacatagatatcttggcctgatgaatctgactgatttttataacaggataattggcgcccagagagctcatggagaataaacaaaatgtggctttatctaagcttatgtctgtttgcgaacattcatgttccatgtagtataaaccaacagttcccaacatgggatgacgttaggagtctggagacattttttattgtcatactgtgtaggaggtgctagtgtcatctagtaagatgtaagaggccagggttgctgtttaacatcttacaatgtagagggccaccacccacaacaaagaattgtctagctcaaaatgtcaacagtgccgaggttcataaaccttggtgtaaaccatctgatttttatgttagcaggctgtagcatagtatataagcagttattttcttttcatggtgttatcaatgtgaataaatggattctttcatttcagtcaacttatttggcaggaaatacaagtctacatgctagtaggaggagagaaatatagaaaaagtagagtgaagataaaatttataatttatagaagatgaaaataatcattgaattatggaccttgcaatcactcctcaatggaaattaaagcaatcagttgttccaagaagctgtttctggaggatgaagggagaacactgtcaacagcattgggctcatgatttttaacttatctgaagcacagaatggccacaagcaagtgtatcctcaaaatcga

SEQ ID NO: 309500 - DNA, 1000 bp, Homo Sapiens; identical to SEQ ID NO: 120090

SEQ ID NO: 309501 - DNA, 1000 bp, Homo Sapiens
agttaccctgggtatggcactcagaagcacctgctacatagtcagctctaaagagttcgttatttctattatttcacctaggaaagatattcccaacttttgacatcgattccccagggtagggttaatctcttagagtaatactctaaaatcttatatggaccaggcacagtggctcacatatgtcattccagcatttggggaggctgaggcaggaggatccattgagttcaggagttcaagaccagtctaggcaatgtagtaagacaccatctctaccagaaaaaaaaattcactgggtatggcggtgcatgcctttattcccagctactcaggtagatgaggcaggaggatcctttgagcctgggagatcaaggctgcagtaggccatgatcgtgcaactgcactctagactggatgacaaagtgagatcctgtttcagttacaaaaattgtattatataaatatttaactcagaattatagtatacatactctaaggataactaacttatataaaatgatttataagattgttcaaagttgctatttcctttttcttaattattttattcagcacctttatgtctagtttgtagtaataagtactataaaactaagttttcacaaaggctgcttttgatttcctgcacctgatgtatatttgtacacttaacagttgtatacacaaagccatgtatactgcattttgtgggtgatttaaggcatttttaaaagttattgagtacttgagagcttaatccacagtggatgcttctccaccatagcccattagctggtggtcataacatttactgctgccttgtattttttaatctgctggaatagacattattatttccattgcatcttaagttgttgaatcaagtagaattcagagtgggacaccaggaatgggagaggttatggttatatagcaaatgctatattgtatgcatttttttcctcttaattgtttaacaaaagtctgttgtgttagc

SEQ ID NO: 309502 - DNA, 1000 bp, Homo Sapiens; identical to SEQ ID NO: 120091

SEQ ID NO: 309503 - DNA, 1000 bp, Homo Sapiens
ttttttttttttttttttttttttttttttagagatggaatcgcaagaattcccaggccctctttttatttacagtgataccaaaccatccacttgcaaattctttggtctcccatcagctggaattaagtaggtactgtgtatctttgagatcatgtatttgtctccactttggtggacacaagaaaggaaggcacgaacagctgaaaaagaagggtatcacaccgctccagctggaatccagcaggaacctctgagcatgccacagctgaacacttaaaagaggaaagaaggacagctgctcttcatttattttgaaagcaaattcatttgaaagtgcataaatggtcatcataagtcaaacgtatcaattagaccttcaacctaggaaacaaaatttttttttctatttaataatacaccacactgaaattatttgccaatgaatcccaaagatttggtacaaatagtacaattcgtatttgctttcctctttcctttcttcagacaaacaccaaataaaatgcaggtgaaagagatgaaccacgactagaggctgacttagaaatttatgctgactcgatctaaaaaaaattatgttggttaatgttaatctatctaaaatagagcattttgggaatgcttttcaaagaaggtcaagtaacagtcatacagctagaaaagtccctgaaaaaaagaattgttaagaagtataataaccttttcaaaacccacaatgcagcttagttttcctttatttatttgtggtcatgaagactatccccatttctccataaaatcctccctccatactgctgcattatggcacaaaagactctaagtgccaccagacagaaggaccagagtttctgattataaacaatgatgctgggtaatgtttaaatgagaacattggatatggatggtcagatgaaagataccaaaatgtcagacagcccatcgactggtgttgccatgagattcaacagtcaacatcagt

SEQ ID NO: 309504 - DNA, 1000 bp, Homo Sapiens
ttttttttttttttttttttttttttttgatggctgttgcttgttttattttttgtccaagagaggtggtgttggaccgaggtagagaagacagtggtacaccagaaataacccaaaggattgccccttctgtagaaggcccttagactccatgatgcctttcagctgggtgctatacttgcacctaactctgggggcttcactttctatccctacaattactcaaacagataaaaggctggatgttaacatgtagttataaggggcgtgatctaatagtaaggaatatcacttcccacaagtccttcaaacaagatttgtgaggagctggatttgtcagcatgtcagatctttttgaaaaccagagagtagaatgtaagcaatacccttgtcgtaattaaagaccagactccatccttataccactgatgcctctggtaccttaatccttaaaatatttagtgacccttgccttctaattcttgacacaaatatataatgaccattttagatcggggaactccctttctttgaaggcagtttagggattccacagatgggctttgaacctgctaaatgtgtatggaaaactgagtgaattacaaatgtctttttctcaaaagtgcgtttctggtttctgtcagattcaacaggtctgtacccaagacaggttctgaaccactgcttatgcagagcttttagtattaaagagggagagtaaaagaagtgtcagagtccagatttatcactgaacccaatactttcttactccctggggcatctcctaatactgatcctaaaatgctcctgtttctgagaagctagggcaagacctgccttacaaagaccagccattttgccttattcataggatcataagcaagagaactgcattccaggaagaatgaaggaagaaggaaggctgctcacagtagcagaagggaggcaggggccaagctgttcaagtcacataaactctaagaagcccagtcagcaaaat

SEQ ID NO: 309505 - DNA, 1000 bp, Homo Sapiens
  misc_feature (11)..(12): n is a, c, g, or t
ttatagaaaannttatcatttgtgattttcagtcaacttacctttatcttgatttgattttcaacattcacactcaggttattatttagtggattttaaagcctcaataaagtaattttatttctacctgatggtcttttggaatcggtactgcaatatctgatcgcaatttcaggacttctggcccaccaaattcaaaaactctaacagctctcatcaacttctgtccagtcgccatggtgatctagatactaaggaagaaaaaaaattaatgtattgtcacattgtatctaggatatcaccatgtttttcccccctggagggagcagatcaaacaattttttcaaataacaatttaaatcatgagcttccactgatctcatttcatgtttaggacctttcatcttacaaatccctcagctataatgcagaatccttcatgctacttcctgcagggattcagtacctttaaagctaaggaatcaaacatgcaaacaaaaacatctgatagacatagcatgataccatatttaggttttcttgcttgagttgcaataccttagaaattttatgagttgagttttattaacattaggtaaactgacctccttttgttagattatgaaacattccaaacatttacctgacacccagggtattggttcattttcatactgctatgaagaaatactggtgactgataattataaaggaaacaggtttaatggacttgcagttccacatggctagggaggtctcacaatcatggtggaaggcaaaggagaagcaatggcatgtcttacatggtggcaaacaagagctgtgcaggaattcaatcatgggtcaggtcttttgcatgctatccccatgatagtaagtctcatgagatctgttgggttttttttttttttttttttttttgagacagagatctcgctgtgttgcccaggactgcagtgtagtggctggagtgtagtggcatctctcagctcactggaag

SEQ ID NO: 309506 - DNA, 1000 bp, Homo Sapiens; identical to SEQ ID NO: 120092

SEQ ID NO: 309507 - DNA, 1000 bp, Homo Sapiens
tctctgcctgtcttcaaacataacacctcctcatgtgtcatcatttttatgatgaccttgatgtatatgtccctgagaaaacagaagaaatgtgaaatcaatttccaaaagctgccaccatgggcatctccaacccacctgcaacagttccctcctagtatgtactgaagccctgcatgcttccacctaaggcaatctctccacctgtgcactaaaaagagctaaaacttactgagcacttactacatggctggcactattttaagctctacgtgtattaacttaattctcattgcaaatcctatgaggctggtactgattttaggcccactttacacatagataactaaggtacactgacaaggaacatcccttgagtcctgcagctgataaatgccagggctccgatttgtctccagaatccatgcttttcaccaaggagaattataggaaaaacatttgacattttagtaaattaccctaccagagtgaatggacagttactctttttaaagagatgtgtgtgggggttgagatggaagacatgacaaaggaacaaggaaaacacctccgccacctcttaacaatgagtcatatggatgaaaataaaccagccaccactggaataggctgcaaaggaagcagtaccttcagggaaggggctgtttttagtttcggtaaggaggaagaaaacactcaggatgggtgggaggaaaatgaggcatttgcacattggacattaaccaaagcaaacagggctagggtgtgacaagacaaaaattattcatgttcaagtattcccagaaaagtgacagtgatagggggctaaatattataaaactcaaatttctacagtgagcaggtataacttgctgtaacaaatacatcagtctcaagaggaaaagcaatacaacctttgcaatcaaagtaaaatctcacaggagaggttatcttaagcaaaaataaaaccactcaacctcataactacaggatacacggt

SEQ ID NO: 309508 - DNA, 867 bp, Homo Sapiens
  misc_feature (198)..(199): n is a, c, g, or t
tcccgagtttaccattaaaacatgattaattaacccttcttgccttggttttctcatctataaaatagaaaaacagcatcattcatattaggagagttaaatgagaaaattcgtgtatggcacttagaagagtgtcttgcacaaagttaaagccagataagtgacagtaatatttttaatattattttactttccaannattttcaatatagaacattcaattcttgagtaactaggcaaaatatttagtaaaggcaaactacataaaatactggcataccgtgattttggttcggggactggtttctccgttccgagactcctcaggcacattcactttcatgtaagtatttggtgagttcagccatcttgttttttcacgctgttgcctctgtgccatgtatttgagaggagagagtggcactgtatcgtcttcaaaggaaaaagcagtcacagttgctgggatttccacatcactcttgtgcctaggcttctctcgaatgagaggatgcctgtaagcatagcctgttctatacccctaagggagggaaaagccacatttgaagcatcaaacctgtatcaataacagcatttggatcctaattccttttgtatacaaatgatttaaaagactcctttgctaaaaaacaaagaaaaaggcatccttccaaacaccacataactttcatgtaacactggagctgaaattatgcaaatttcaagacctagttagagctagttagagctgataacagctgatattgcaatttccactcacacaactgttcccgacaaacgaacagttctaagttgctgtaccagaagtgcttttctatctataaaactgttctggggaagcaaatctca

SEQ ID NO: 309509 - DNA, 1000 bp, Homo Sapiens
cagcatgataatgaagttccctctgctttaatcctcacacaaaaacagtagcctgaagtaacctgatgttaaccaaccagctacttttcttttttttttcttttttgagggggtctcactctgtcacccaggatggggtacagtggcgtgatcaaagctcactgctgccttcaattcctgggttcaagggatcctccagcctcagcctcccaagtagctgggactacaggtatgcaccaccatgtctggctaattcttaaattttttgtagagatggggtctcatcatgttgctcagactggtcttgaactcctgagctcaagctcttctctcttagcctcccaaagtgctagaattacaggcatgagccacctggcccaactaattggttatttttttcttttcttcttcttcttttttttttaagagttctgaagtgattttacttttatttccttcactttaagccaattatgaaatttcagtgatttctggggtaggggggtaaggcagtgttaagaatcattggggctgtggcccagtcagcctgcggaggtgcaggcagggtgggccctcatggggcagccggaggagcggactgccccgccggcaggtaggtcatgttccgagagcctccgcggcttccaacttgcacagctccatcaggccgtcccccgcggtggccagtgagttggcaatcagctcggttgccttggagtcgccctcagcagagatcacggctgcctttttctgctgctcaacctttttctgctgctcagcctttttctgctgctcagccttttccttcacaaatctggccctctctgcttcctgctgagccacctgtttggcttccactgcttctgtgaactcctttccaaaggtcagatatgtcaaggacacgtcgtccaggatgagcccaaatgtggctgcttgctccgtaaggtcgttgctcacctgcctggagaccagctctctctgagtgataacttctccagca

SEQ ID NO: 309510 - DNA, 1000 bp, Homo Sapiens
cataaagaaagaaacggcaatgcaatttaaaaactggtaggccgtttaaaagagccggtttgacctctgacaaacccagccaagacaaggccccttggcccggctcgcgagtctttgtagagagcagagcttaccctgacgacgatggcgttttgtggttaaagtgacttgggcgcacccccaggacagggtctggtcccacacgttcacaccaggggggcgggaggggggacatcaaaaacagaccacatcctctgccagacgggctccaggagtagcggtttggacgagggacatttacaagcacagagtgcacaatagttttgttatttacaaatacacagcagtccttcaagttttcaagtttcataaaaaggaggaggggaggagaaagggggaaaaaaacaaaaacaaaaacaaaccgacgaaccaaacaaaaagaaaaagaaaaaccaaacactgaagaaaaataataaaccagattaacaacacaactgtatcgctccaaagacgacagagagttgacaggttcacacacggtttgcggtatgtacatcaattacagaggtggcgacgcaggggagagaggttcacactcgtgttttcacttgttagaggcgctcggccacacccagcacccatgtgtgccagcgcacacgtgcacacgcaccccacgcacggccacacgcgcacccacgctcgcttgcacacacgcccacacgcacagacacgcctgcgggcagcaggcgcaggggagcgcgtatcaccagtccgcgtcctcctctatgtaataatcaggggcggtaccatcaaagaggccggggtcgagggacttccgctgcttccctctggcgaagacgcgggagatggagccgaatcccatcttctctttcttctttttccgtttttggtcttcaagatcctctagtgactgtacaatagggttgtgcaggttcttctgaactgggccgggactgtcgccctgtagccagaggagaag

SEQ ID NO: 309511 - DNA, 1000 bp, Homo Sapiens
ccatcatttgaacttattttattgatactcattagtgaataaaattgtgttgatttttgatgcattacaacacactttttggtagtggttgcacaatgttgaccgtttatttatttactatactaagtattgcaacctctgaactgccaatttttacatggtatttctggcaatgatgagtggcttctctctctgaatacataaaatggtccattcagtccatggttttcatattcctttgttattctatctactgctttaaaatacattcaaataaaaagatataagttacttgcagtgaatgcacacatacaacagcagggagagctgagaacataattaaccaatactcttgtgttcagagaataaatagtctgaaaccgtgggactgaggcttgttccttaggggctttctcaaagtatcctttgtggacataaggttaccctcactcaatggaaggacacatcttctgctgccggggaggacacagcatgacagtttcatttatatgggatgttttccttccataaatgtctggaacacggtgtcacaggacaccatggtgtacagtgcagccctcaaattagaataaataagtcacatggttggactggaatgccacagacacactatgactggaactggaaggaacgagaatgtttatttaaaatacggcagacataaataataaataaaagtttaaaacttaatcggcgacagcaacaggaccagcctcccttgttgcattcatgattcttttcacaagcacctggatcttttcctaaggataaaaagaggcacaaggagacaaaaggctttggagggaaagaaaatatcttgttgtgaccatgtgctgttctgaaacaagaaggaaaagcatgtgggcattgaatggctgcgatcaaagaccgcatggtgacagcaccctggccagcctcgggtttcagaaaaagcgctggagccagcggaataccaaagccttgtttccccctggaaccg

SEQ ID NO: 309512 - DNA, 1000 bp, Homo Sapiens
gttacaaaaccttgtattaatcatttcccttcactttcaatataacgttgatatgaaatatagccatgattcttagttacatgggaggaaatgaataataaatacattgtagcaagtttaaaccacaagggtgtttcactggtaacaacatttgaaaactgtacacttgcaaagaacagcatcttcaaacattagtatatctgtatatcagtaaagcttttacatgtaacaaacatgctctttccatatatgacaaatttaaaaaatatgcattgcttggcaacatgaactaggcaaaaatatttctttgttcactaactttatacaggaaaacaggacgaaaggcatgcatgtacaatacagatgcctgcacagggcatgcaacaaaagaaagctttttaaaagtcagcttacattaggcataaatacatgaggattatatattaataagggaggaagttttctgttcgacattattaacattcctgttttcttcctattcctcccagaggaatacacattcacctttaagtaaagataaaggaattacaaaaaaataaaactcactttgcaaacatctctgatgacttgtaaaaaaaaaaaaaatcaacattagtgttatcacagctccatgtgcaaattatccttctgcaggttcttcttgtaacaggcacacctgagcgccttggtcaggctgcttccccaggcccaagctggagctgactgctacagacatctccaggggaccaatgaggccaggcctgcttttcctccccttgcccgccttctggttgcatgcttttgcattcagcccagctcagcccccaagcccaggctcctggggaataacatctacaaccttgcaccggcagtagctacaagaggtgcagaagaacaaaagatccggagaaggctcccatcccgtaaaaggcagccaaggacacctcaaaagaaacccttgtttccctcagtgtctcttcaaacgaatgggagagagggg

SEQ ID NO: 309513 - DNA, 1000 bp, Homo Sapiens
aaatttttaaccttaattatctgtaaacatttttgtaccttacctagtccataacaagaagttttttctttgttttttttttttttttggtgggggcggggggtaccaaatttctttatttgaaggaatggtacaaatcagcttaagtggatgttttggtacaacttatagaaaaggtaaaggagaccccaacatgcatgcactgccttggtgaccagggaagtcaccccatggctatggggaaattagcctaaggcttagctttcattatcactgtctccccggggtgtgcttgtcagagaaatattctgccaagccagattcgggtgccctcatcttgcgcaagttggtcacatggtcacccaattcttgatggatttcccctgctcattcaggtaatgtgtttcagtgaagtcacacaaatgggggtaattttgtcggtggccagtttgtgcagttccagtagtgactgattcccaagtttttccaaatgtaatgcatgctccatcgcattcagcctgctctcccagtcatcatggtctggtttcttgaagtcccgaaggaagaagattcagccacctcattggttctgcagcttcatcagtttcttggcatgttccctctcctcatgagattggtgaagaaagtatttggcaaagttcttcaaagccacatcattgtggtcaaagtagtaagacatggacaggtagatgtaggaggcatagagctccacgttgatctggcggttgatggcggtagttctggcgcacctgcgagggggacgcgcagtcgtcatggtggtggccacggtggctgtgcggcggtggctgcacggcgctggagtggcggcgggggccttgggacagtcagagggcccagtgaagaggtaacagagggctagctatgggcggccagccggagtggggtacgagtgcctggttccgtccaagcactgttgaaccaggaaactccagggactttccgcaaagaacgtctcatt

SEQ ID NO: 309514 - DNA, 1000 bp, Homo Sapiens
gatcaaatatgcaattgcttgttgaaatggagctctgaatggcctctgtatgcagacagccagagtctctgagaattgtaagccaaaaaagtaagaaccttaagtcaaagaaagggcagctcacctccccacctctcaaagaataaaataaagtacaaaaaaaaaaaaaagaaaaaaaaagcttagagttagacttatggagaatggaaaaagtgttctcatctgaggtggcaaatgttctcacatggaagtttctaccacatctgagagagactaaacctccctcagccctttccttaaccacactaaggtactgtccatttacctcctttcctttatgacatcaaggttcctgcctgttctccaactccaatagaccgtatttttttttcaagtggcaacaacccagactgctgcttggaaggataaacacatcttcataattctaaaagtaaatactgttaatacaaaaggattattaaaataagttcatgttttgttgaccttgacaaggtttcctaaaagatgatgtcttttcgtctgaaaaaaggcaccctaatagaccaatagtagcaacctaggcaaaaattggagtgaaaaattcattaccagagtttaccaccaaatggagagcaaaaaacctccagaaaggatataaaaattactaatcatgaagcatctaagcactggctatgtgagtaaatgacatcagagcagtctcttggaggggcctatttagttggacaagggttccaggactttaatttcattcacaactattaaatatttactgatacctctgcataacactgcaaagcctcaggtgcatcagtcaagtgtaaagggtcttaaatgtgttttcttgactggagttcacggtgtcgcattaaaaatgaagataaggaggctaagcatagctagttgctggactgtgttgagctttatctgaaaaatttaacaacagtgaataaggtccaaagtgtaaaataggcacatttcc

SEQ ID NO: 309515 - DNA, 1000 bp, Homo Sapiens
gatcccactcctaggtccttcgagtagtcaaaatcagagacagaaagtaaaatggtggttgccaggcattagaggaaagataaatgcgggattattgactaacgggtaaaaagagtttcagttttgcaagaaaaaaattctgtggaaggatgatggtgatatttgcacaaccatgtgaatgtacctaatgacactgaactgaactttaaaatggttaaaatggaaaattttatgttatgtatattttaccatagtttaaacagataactaaaaatgtgtgttctaattcatgtgaattctcaaaagaggctatatctaaaagacagattcgtgtttcatgttccatgaagcttagaaattggagtgagagactgatgaaacatgacaagtgaacgcatctgaaaacaacaaagtttcacacaaatgtatggattttattgacaagtgatattttcttacagtaataaatataatgcagtcttcttaagagtcagtttggagttgagaaggcagtgtacccttgatggaaacagtcagactggtggtaccatcttcttcagaactgcatctaagaggctgtgctggctgggaatcatacagctgtgggcaacaactgcatcagccccaaggcttccctccagaccaaaaggtgattcatggcccctggttaatatcaccctaggttctcccctgtcccagttttaacataatatttcataaaaatactagtgccataaaaagtcaatatttcaaatataaaaattattttatacaaatgtaattcataatcattcttttaaaatacagcattgttatatatgtttgaaacattattaaaataaatatttcctagagaaaaaattttgcttcacaaaattataaaacagaagcatataaaactaattcatgattggtgcttcttcagtgtgtctctcattctctcttagtgtagacagcatgaagtacatacatctagcctgaaaacataccaccatcaacc

SEQ ID NO: 309516 - DNA, 1000 bp, Homo Sapiens; identical to SEQ ID NO: 120093

SEQ ID NO: 309517 - DNA, 1000 bp, Homo Sapiens
gaccataaaaatatgtaaataagacaactaaaaataaatttacatgcaaggtgtgtaggaacacttaaatgtgtttgtggtaaaagattataaaaaggcataaaaatgtaaatgttgcctatggaaaaaggattcttttgaaacctatgtaagggtaaaatttggctttccttcccttgtacagatttttcatgtaatagagaagaataatgaaatatttggtttgccttgttggtagaatgccaaggagagaaaagagtagacaggagacaaactgtttggaaagctaagtcttacctcttaatgagtaaagattgttgcctagttttaaaatttttgagtcatccttttgccaaaataaataacttatgtgtaacctggaattgtatttcatactatcaagtgtcttaaacctctttttactaattagagcttttatttaaaattaatgatatgtaactattactgtatatgtaagaaaagaaacacacttagctattgctttgcggatttgcatttaattttaaattttacaatttagattcagcatgaattgcaataaatggatcttcagcagagttactaatagaaaaatgagctttgccatcatcagaaacgtagattttaatgcctgtgcagttgccattaattttatctccagaaatgacatcacagtatgtgccagcaggaagaccagtttgcaaagttaaagaaaatgtcctgtaaaataaaatttcagatttaacttcaaaacaatgaaatcaagaatacagactaacacaaataaacagcataactttatgttttagaaccctaagcagtgaagtctcattaagaagaaaacccatatgcctccctagtaggtgtaaacagctttctaggaccaaaagtaaccttacagaaaacctaccaatttccttttcagtagtgaaaatataaccgaaaaatcaaagttgaagaatatcaccgaagattggcgggagcggtcacattttgataa

SEQ ID NO: 309518 - DNA, 1000 bp, Homo Sapiens; identical to SEQ ID NO: 120094

SEQ ID NO: 309519 - DNA, 1000 bp, Homo Sapiens; identical to SEQ ID NO: 120095

SEQ ID NO: 309520 - DNA, 1000 bp, Homo Sapiens
cacacatctacaaccatctgaactttgacaaacctgacaacaacaagcaatggggaaaggaatccctatttaataaatggtgttgggaaaactggctagccatatttagaaagctgaaacgggatcccttatactggtataccttttacaaaaattaactcaagatggattaaagacttaaatgtaagacctaaaaccattaaaaccctagaagaaaacctaggcaataccattcaggacatagacatgggcaaagacttcatagctaaatcaccaaaagcaatggcaacaaagccacaattgacaaatgggattgaattaaactaaagggtttctgcacagcaaaagaaactaccatcagagtgaacaggcagcctacagaatgggagaaaatttttgccatctatccatctgacacagggctactatccagaggccacaaagaacttaaacaaatttacaagaaaaaaaaaaaaacatcaaaaagtagacaaaggatatgaacagatacttctccaaagaagacatttatgcagtcaacaaacatatgaaaaaatgctcatcatcactggtcattagagaaatgcaaatccaaaccacaatgagataccatctcatgccagttagaatggcgatcattaaaatgtcagggaacaacagatgctggagaggatgtggagaaataggaatacttttacactgttggtgcgagtgtaaattagttcaaccattgtggaagacagtgtggtgattccttaaggatctagaactagaaataccatttgagccagcaatcccattactgggtatatacccaaagaattataaatcattctactataaagacacatgcacacatatgtttattgcgacactgttcacaatagcaaggacttggaaccagcccaaatgcccatcagtgacagactggataaagaaaatgtggcacatatacaccatggaatactatgcaaccataaaaaaggatgaattcatgtcc

SEQ ID NO: 309521 - DNA, 1000 bp, Homo Sapiens
tcattccatcgatgtgatcgctgggcaaagggagggtggaggaccttgggctgacctcagggatggtgccagagagaacgtgtgctcatcctgaaactgctgtgtgacttgagaggtttcctggtcctctctgagcagggctcaccataccagtgccaggtgggacctccctgccaaggagctgagcccagagcccagagtagggtatcatgaggacctcttccctcaggctcagggcaagctaggacctgcttgaggcttgcaggggcagttaggccatctgtgcacctcgttggggtcttggccctcattggaccctccagtgccttccctggccagggctgggtgggagatggagctgccagcctgctggaaatttttctccccctggggcccagggctgggagccaagggcagctggtgcccaggaggagggagaaggccccacgggctgggcgtgccatgaaccacatgtgagatccggggcatacagggaggcaatgggggtttgagggcagtgctggggttccagagggggcaggccagagccccccaacatcggccaggtggctgggcctctgccctcgtgggacccagggagggtttccatgtccctctaagcctcagaggaaattccagaggcagagaaagagaagttgggaaagggagctcttcactctgacatcagctgaggtagaggcggagaccacaggggctccaggggcgtcagaggacagagcagcctgtccccacacctcttaccccctggggactgggcctgccccagcctgttaggaagccctggcctggcctgccgagggccccgtccccctcccaggacccgtggcttgcagccaggtggtggggagaggggcccaggtgtgtggtgtgggtggcaggtgagtgatgggcccagcaaggctggctcaggcccggggtcaccagagggtttggtagagactcttcaggccccccacaccctccccaccctatgcccctc

SEQ ID NO: 309522 - DNA, 1000 bp, Homo Sapiens
gaattcttacagttgtggtccttgatctgcagattctactccttaccagccatcaactggtttaacaaacctcctccttccttaaatgtaatccatgtcagtgagtctacagtcttagaatttagcagccagtaaaatttccaaaaacataaaggaagtgtggtggtgtgtgctggtaatccagttactcaggaagctgcggcaggaggatcacttgagcccagcagttttaagacaagcctgggcaacatagtgagaccctgtctctaaaaatatgttaaaacataaatatgtaaaaattaaaaaggaaaaaaagaaaaggtgaaaggcaaaagggaaggggagccgggcatcgatagtagcctgtgcctgtagtcctagcctactcaggaggctgaggtaaagaattatttgagcccagaagtttgaggctgcagtgtctatttgggtttgtgaagagccactgactccaacctaggcaacaaagcaaccttgtctccaaaaagaaaaagaaaaagaaaaaaagaggctaagtgtggaagctcacatctgtaatctcagcactttgggaggctgaggcaggagaactgctttagcccaggacttggagaccagcctgggcaacaaagggagaccccacctctaccaaaaaaaaaaaaaaaaaaaagccgggtgtgtccctgtagtctgtagtcctctgtactccagcctgggtgacagagcaagaccctgtctccaaaaaaaaaaaaaaaaaagggaataacaaaaggtaacattttactttcccagcaaaaggcattaaaaacaacaaaaacaaaaacctcatcatctaccagtatcacaaataaaatacattcttaccacatgcacaaaacccatctttcagaccaaaaaaacaaaaacacctcgtcttcttggtccttttccttcatttcacaaagtacattaaggaattggcacttgggaaacaaacacttaacccagacccacatttagtcat

SEQ ID NO: 309523 - DNA, 1000 bp, Homo Sapiens
ttgggcaacatggtgagactctggctatacaaaaaaacttgaaaaattagctgggcgtggtggcatgcctgtggtcccagctactcaggaggtgagacaggaggattgcttgagcccaggcattcaaggctgcagtgagctgtgtttgcgccactgcactccagcctgggtaacagagcaagactccatctcaaaaaactaaataaaaacaaaaatgtattcttgcttggataataaatcgtaaggactgctatatttcagaaaacagaatgattagggaggctccctgaattttcagctagctaaatgactgaagccagaacatttccataagtagactggcagattaacttaagaacagtaattcacagtatttctttctccagtctcttttgcaaaacattcccattcattattcccaccatgacatgcagtcattctgcctcgagatctttatacaagtcccctgtgggttctagactcccacagggaacccctcactattggttcactaacaaggttctacacctagtcctattcaacatatttgtcattacctggatgaagacatagagaacatgcttctcagtttttaaaactttcagggatagaaagttgagaaagcaaatgatgaagcaagattcagaattactttgcaaactgaaacaatggacccaaagcaaatcacataaaatgtaaggatacacttaaaggcatacatttagatttttacaaatagctcaaggacaggatactggaaacacagcttgacaacaaattctgatgaaaacacctggaagtttcagtagaacactaacacaaaaatagcagctgctagaaattcaaacatgctgctcagcaatggtttgaaaaagcaaattttaggcaggtctgacagaagtgtggtgccgagatgctgagaggtaaaggccccagggtaagtgggaccaagcagaccccacctcagctgctctgtccacgtgggaatcaaattgcccag

SEQ ID NO: 309524 - DNA, 1000 bp, Homo Sapiens
  misc_feature (222)..(222): n is a, c, g, or t
ctcttctttccggatccttacagcatggtatcggggaacactgtcatcgtacctagagcgtttaaagaatccacactagagaagagggaaagagaaagagaaacaaattaatctcacaaagaagcaaatacactaaatgggaatgtctaagctttctgttcagctatgtctacctctggactaaggggaaaaagacatggttttcttttaagaaagaaccangaggctgaaatgaaagaagagccagtggggatcaacggaagagaacagctgtaaaactggaagaaaagtccattttcatcttctctttacattttataacaaatgttttactaacaatttaagagtttatgaaaacagtgcttccatatttaaaaataatcacaatatgatatgtaaaatatctgattatcagattagattaagaataatttttaaatggcataaaccaaagattatttcatgcccctttcccactaataaaaatgcaaatccatgtcacaagttattttacaaattactatttgaatatgccagtgttccaaccaggttcaactttataatctttttctctcctctgaggctctagtacacatatcacttctctcattagccaggaggtcatttaaaaaaaaaagaaaaaaaagccaaagtacctatctattacaaaatatgactgctgtctaccccatttaaacaaagagggaaattaagggtaatatgtaaagctgaatggcaatgttgtgattcactgtgatagtgccatggaaaggattacaggagtaattctgtcctctcatgcccacgtaaatggtgaaagggatcactagcaattcctatttccatgtatttccaaataagagaaacttgaatttaaaatcaactgagatccaaggttggataaaatctctggatacatgaaatatggtcaaactccatcacaacatattgcaataaaaactgttcagggtattttttgtactagaattttgtagatgga

SEQ ID NO: 309525 - DNA, 1000 bp, Homo Sapiens
ctaggaagaagaaaacaccacaatcacttgaaacaagtattacaattagatctgaactttctagaaacaacagatggaatcaatggtgtggattgtagctgggtatacgagctataagcaaacagctattactcaatcggttatttataactatctgatgtgtaatgaggaaagcatgatcatggcaaactttctctgaagttcagggttaagggcaatgagtgatcaaccaaactcaaaggccaaagtgaccacattatagtcagaaatacatacttttttaatgcaaaagtatttgatctgtattgttttctgtctgaacaaccaaatgttacaaaatggtccaaatcaacttacagtgactacaggttgttctgcaggttattttcattgttttctctatcaccttccacctcaacccctctgttactaattcctttacttacctggtcgaagggtctgagtataacccagtccaatcaggctggcattatttactttagcctaagattaagagatagaataataacagtaaaacagtgaattacagatcagtccaatataaccatcactttgtgcattaggtttccaatgctaaaagcaccctagggccaatctagaattactgattttttttttttttttttttgagatgaagttttgttcttgtcacccaggctgcagtgcgatggcccgatctcggctcactgcaacctccgcttcccgggtccaagccattctcctgcctcagccttccaagtagctgggattacaggcatgcgcccccatgcccggcttattttgtatttttagtaaagacagggtttcaccttgtgggctaggctggtcttgaactcctgacctcaggtgattcatgcaccttggcctcccaaagtgctgggaatacaggcgtgagcctggccacattatattcctttcactacacaatgagctggcttattaaaattaataaagaacaagcaaactacactcatatcac

SEQ ID NO: 309526 - DNA, 1000 bp, Homo Sapiens; identical to SEQ ID NO: 120096

SEQ ID NO: 309527 - DNA, 1000 bp, Homo Sapiens
agttttctttttcccaaagtgtttcacatgggctactgcactgtaagtattcaagcaatttgtttccttttggtggtcagaagatattatgatggttaatggccacttaggagacacagaggcagagcctgatgggctgcctgtccaccggaggggccaggactctccgtcctggatgctgctccttgtgggatgggaccaaggccaggtgtgcggctgcaccgaggcctgcagtatccatgacccctgttcccaaggtccttgcccgtagcccctcggggttttctgcagaaagcatgccagggtttgccaggagggcctgtgcttacccagggaggcaagggccacactcagcgtcattctccatgtcccctggtgtcagcacggtggcccggaagaagccctcacagtctttgtgacgcctgcatatctggtagcctcctttggaaaacttctccgccgggcaggggacgcagccgtagtcctcgtctttggtgccgtagccacaggactgtccagggaaagaggacaggggacacaggtgagtgcagcagccaaaccatacggactcggcccacagtccttgggcagtgacgtgccagctgtctccagaagctactcttgccgggccttggtttcctgagttgtcctaactgcaaaaccccccaggaaccagctcatgctctgggcttgcccctctcctcgccactctcaggctccagatgctgccccttttctgagcctccccgagatgaattcagcgagctgctggaatgcccaggcagtgcaggtagcacttggcatctgactttcctcagcttgctacaagaaccggacactgaaaccccggaggtttcccttagtgctgaacagaacactcaggcttagcttgcccagaggcggagggagatgcagcactcaggaaaaaatgtactagtactggagaatatttcaatcctgcttccaatcagatgatctgacgctcatttaatcagggtag

SEQ ID NO: 309528 - DNA, 1000 bp, Homo Sapiens; identical to SEQ ID NO: 120097

SEQ ID NO: 309529 - DNA, 1000 bp, Homo Sapiens
caaggctctcactagggaaaagttctgcccccatacacgcccaacccctttccccctctggtggatccgggaagcacccatcctgcctttggctgccctggctgaagaagagtgaagtggaagaagcaagagaaacaaagtgctcgcggttctttttttttgagacggagtctcgctctgtcgcccaggcaggagtgcaatggtgcgatctcggctcactgcaacctctgcctcccaggttcaagtgattctcctgcctcagcctcttgagtagctgggactacaggcacacgccaccatgcctggctaattctgtatttttttttgagatggagtttcactcttgttgcccaggctggagtacagtggcgcaatcttggctgactgcaacctccgcctcccgggttcaagtgattctcctgcctcagcctcccgagtagctgggattacaggcacatgccaccatgcctggctaattttgtatttttagtagagacaggatttcaccatgttggccaggctggtctcgaactcctgacctcaggtgattcacccgcctcggcctcccaaagtgctgggatttcaagcatgagccactgcacccggccgtaatgattcttggagggtgccaagagtgacatctccttggcagctcatcctatccacagggaacccaggggtcctggtttttgtacaaggggctctgctgctctctgcacatgatggtctagtaagccccttgccaaaccaccccagcctggatgctcccagaggaccacgactgaagccttgactggagccagcatttgggagcccaggagcaggtcttggcccaagagaggccagggcagaggaagcatgctcacagattacagtgtagtgaaggaagtttatttacggatgtggagagaacatggtaaaggcccctgggctggccagcaagggggcaatcagtggagattgaaaacagattctccaagccagggccagggaaaagggc

SEQ ID NO: 309530 - DNA, 1000 bp, Homo Sapiens
gctcctgcaggctgccaccaggggacagtggtgcccaggctggtggcatatttgggaattctggacttaggccagcctccctcctcccctgcacaagggccagattctgaaatgatctgtctttattatgtcatcagaaaacaaaaaaatcccccgagtgtaaacaggagaaatctgctggttaagttactcatcattatcttattattaacaaaataaagcactatctatgtttacagtccataaaaaaagaaacagcctggagagaagtgggggctttgaggatggagagaagacgggggcagacacagactccacatctggccctgtgggatttggggttcccgtactgatccaagggctatttagatcttcagagttaggtgacaatgggatttgatttccttagggaacaaactttgtgaaactgatcagaggctgagatccagtccctagtatagagtgggggaggggaggggaggggcagggctgggtgggagaggctgaagcccaggagtcttctcaacctcttccaagaatggggacccccccgaccctgtgctcatgagggaggaataaagaccagctgccatggacagcccctctccagggcctctgacgctggcaggaaggggagccccatcaatcctcctgtcccaactccctcgtgggatcaggttgggaccaggggcgggggcaccaggacaaagccccttgaagccgaggcacattcccatgctgatcagagctaaaaatggctccgtgggaaccgactggcagagccagggagggagtgaaggggagggcaggaggaggtcaggaaggctgatgagcccagggcagaccaggggcctacatagacccagagaatccagagggcacagggggcaaaggacagacaccaagaaagagagaaatagagggccttgcagagagacgaggacagagagagacagaaatgcacacaaggacacacagaacctgagacacccagactgac

SEQ ID NO: 309531 - DNA, 1000 bp, Homo Sapiens
gcaggaaaacccagtttctgtatgacagatgctctgacaaggtgaccccatctacattgagccttggcactccctaaaccatgtagagacaggaatgtaagggatttattatagtaattatagtaatctgtgttttcaaggtcaccgaaaactcctgttagtgcatacaggattacaggttacagtttagtggagtaaagaacaagggctttaaaagctgggtttgagtctaggctctactaacaccagctgttcgacattggacaaattaatgagtctcagttttcccatccacataaatggacaaaatcaatgtcttcccaaaaatattattttaaggattaaataaactgggtccacagaggaacacaccaaatagcagttcctttccttatttattcaattacattttcaattgctatctccctgaggaagtatgtagagacactgccaggtctcatccagaagccacttacaattactcatgaacatggcttgtttaggttgttttgtggtggctttaattatattacctttctccaacccagctcccccacccttaaaatccaacttcttatactcaggctcttggggaggagaagatgcaccaactttctactctttctcttcctttcccgcttacttcttctagaagctcaaagtactcttaggcctgctcttctggtttggtagtaggtttttcctcctagggttgattcacacacaagccctggcaaccaatctagggtccagcccctagtagatcagtgttgtctctcataaagccagtctgcaaatatcaccttgaatcctacagtctgtagaagcctccagtctactgctttctagctccaggttttttaaggtctttggacctagggaaaagggagcaggtctgtatgttgaatgaggtttgctatgtgcgcaatggagcattacaaaaccatttcctactattctgtgtcctccatccacttccccttaattatcctttatcttt

SEQ ID NO: 309532 - DNA, 611 bp, Homo Sapiens
ttcatctatcacagcagacactgttcattttattttaatttattgctttacttgatctaaatttaaatctagtttatagatacataacagatacaagtaaaaatgtaaacatctatgtttatatttgtacttgcaattaagtattattacactgaaaataatttcagcatgcattggatacctatgagaaatttttcccttatgtctatgactcatatgaaaacaaactggtatagatccttaccccctaagccaaaaaaatcatttataatggaacaaaaagcatgaacttacggaatctgaaactttagcagatgccctcttgttcccatcaacagtgaagtgaaaacctcgggttcctgtttgcaacactgttggccactggagacacagaagacacagatccagagggttagtgtcctgaaggaacaaatgctgtgggggatagtaatttccccttgcaaactgttcaccttcttatgtacccaggtgctcctgtgcatccagagagctcagctgggaccctctacttaaccctgaaggcagcccaaggggcaaggagagacggagcccccaggtcctcgttgtccaccctgacttggcactctaga

SEQ ID NO: 309533 - DNA, 1000 bp, Homo Sapiens
atctaggtttgtgcaagtacactttatcatgtttgcacaaagacaaaattgtctatggattcgtttatcagaacaaatccctgttatgtgacacatggctatatttggaacctctacttgcctggaaagaggaagtaaggtacatatttacttacatatgaatgatggataaaagaaatattagtgactttgcaaatatccaatggtgagataagcaaaaatgactcttagcaagaaattaattctatactaataaaatcagttgtggagttattttctgtaggaaagcaaaatccataacataatgccagtagtaacaattaaattgtttgcttattcatatgaattctattctactctgttttgggaaatctgcttaaacatttgagtattattttattgtattttctttttttaaaaattaaaggtcgctcactagtccggtttccattagcggccataaccaagggagaggaaccagctggcatgggaaggggccatcttcacaacattccatttatacacagaactaaacagacaggcacagagtcactgttgtggttagaagttgtagcatgggaaggtggaggaacaggtggagagtggggttgtttttaaaatatatatataggccttccccaactggggttcctgggagaacttggtctgcttcaacccaagaggaatcagaagatccaagcagtttgggaaggccagaactgtcagggatggagagaggaggaaaatccagggagttggggggctgtttggcaattggggtgaagggagtgccttccctctgctgggattcccccaggccctccagtctggcaggaagggggcagcctgcaatccctgagggcaggtctgggactagtagattctccaggaagggcgctggaggggatcacaaagtttgccctccaagaagacgacagtgctgacccctagctgcttcttgatgacgtctttggagctggcatagatcattttgctctta

SEQ ID NO: 309534 - DNA, 1000 bp, Homo Sapiens
cattcatacaggagccggagctgtggaggaacagaggcaggtgagtaaactctgcaagtggccaaatgtcccgagccatgcccctaaagctgggggaggagtttgtactgcggcgcttccatctggctagcatgagcgcaccatgcaccttgcaagagtgggcccgagctttagagcctacagcaggccagatgcatcagatggcactcatccagaagccttgggggcccctctggccaggtgactgagccatgtatctacccatcttgtgatccttgtgcttatgagaaacctgcctcttgacttggaaatatgagatctaggcatctatttcttggttcaacaagaagcaaactgatgctgcaggcctgggtggaagcctttatatgtgagacctcaaggctggtaaagagtcaagcttggatgggacagtaaggtcaccttgaccatgccggcttgtctctctggggatagccacagtggctgggattgtgtggaggaactccacatcttaagctttgacttgtctaactagtttgctggtgtttcaatggtcttgtcttttgacccttagactaagtgaaatcccatcgtttgcactcccatagcatcctgtacttcccctctggtaccactcatcacactgaggcctctttaatgcctggcttcctctctaggctgctgtccatcctagctggtcactgtactatctgtattctcagtagtgccgacacagagaaagtgttggctccggcctgtaatcccaggattttgggaggccgaggcaaaaggatcgcttgagtccaggcatttgagaccccatttgagatagtgagaccccatctctacaaaaaatttaaaaattaaccaggtgtggtagcgcacacctgtgatcctagctattcaggaagctgaagtgggaggatcaactgagccccggagttcaaggctgcagtgagccgagatcgcgccactgcactccagcctgggtgacagagtg

SEQ ID NO: 309535 - DNA, 1000 bp, Homo Sapiens
agtatcccttatccgaaatgcttgggaccagaagtgtttctgacttcagaacatttttggactttggaatatttgcattatatttactggctgagtatcccaaaccaaaaaatcccaaatccaaaatactccaatgaagatttcctttgagctccatgtcggcactcagtttcggattttaaagcattttgaatttctgagcatttcggatttcagatttgggctgctccacctgtaatacagacccctgaggattgtcaagtcaactgtttgttctcatgtatagtctctaaatgtgtgtaaaatgtttatcttccctgaagagtttagagggaagtttgaggggaaccacccttaggttggatgattcatgattcattcgaaggacaatacccatggtgtattgtcaactggagaagtttacccaagccttggagcctaggttttttactggggggtccatcaggtaggcctggctgactgcccaacaggtgatctgttttcactccctccagagttgagctgataccacgtgaaccagagctctcacccagtatcacattgctggtgtggctcaaagctctcaccctaaatcacattgttactagctgggtggcccaagacccccaggcaaacaaagacactcctgtcaggtctagcattcaaaggacttagagactgccttccagaagcaaaggccacacctctgttggggcagggtgaaagtctttactacacacttcccattttctttttttattattggctactgcactcaggggcctggccagggctgggcctctttctcagaacagcagcctaggtcagcactgttcctcaggcctgcctcggggctgcccctgccaccaggcttttgctcttgcaggaattttaaatatcagggtgataacagagtgctcacattatgtaaatatgaaggcaaatcactgccttgatgtttgcgcttgattttcctctgacgaaaacagtattgattgca

SEQ ID NO: 309536 - DNA, 1000 bp, Homo Sapiens
cattatttgtagcttctggctgtttgtttgcatcacaaaatcttaagttttaataaggtgactgcactagaatgtatgatccagtgtctcagaatatcttaagttccataaaagcagggatctttgcttttgtttaccaatgtttcccaaacatctagtataatgcctggctcatggcaggtgctctatataaatctgatgaattaattaatgaatgaatcataactaaccaaaggaagccagtcacataaatggtccttactttgttaatgtcccaattcaaaaggtaagcagaagagttttcaaaacactttctagctttttcctgtcctttccctgggttagtcagtgacaggactgctctgttcagaaagacttgccttcatattccactttagctttcaggcaataaatagatttcactcatttcatgccatctcagaaaaccctctttcctttaaaatgagacatttgtccccagtagcacacataagctctatgcttataaaacacttttcaaacttagaaacaccacacgagaaatactcaaacacaaacaaatatcccttaagttaggatctactcagtgacttcttataatggttaattatgtagaatacaaacttacactagttagccagggcatatttactttactccttggagagagaccactctcagtgttcactataaataagctttatatttcctagatgtaaatacgaagatatggagatgagaataatcattctggttatgatgccaacattcattatcagggaataacactattccatgataatagctaaatacaacttgacagactatgcctaacttggtaattatgcctcttacccttttttccccaatacacagtgtattttactttgagaagacctggccttctagcttttgacatctttggaaaaaaatggcagcttttttgtgggtgcaataacttctcagtaataactcatctaatcgtgggggtgtagatttt

SEQ ID NO: 309537 - DNA, 1000 bp, Homo Sapiens; identical to SEQ ID NO: 120098

SEQ ID NO: 309538 - DNA, 1000 bp, Homo Sapiens
catacacaaggtgcagctgctacacaggggtgaccatttctgctttggggatttagggaaggctgcacagaatgagagcactgagctctcttgaaagataaataggatctcatcagtcaggcacggtatagatttgtgtgcctggcagaggcaagagctgatgccaaagggaggagttatgaaagttcatagtttggtagtgctggatgggagggtttgaaataacaggcatcctgctgacccaggcaaagggactcagaccatgaagggccttctatgttatgctaaggaatatgggactattatgtcttcttttttttttttttttgagagagtctctttctgtcacccaggctggagtgcagtggtgtgatcttgcctcactgcaacctctgtctcctgggttcaagtgattctcctgcctcagcctcctaaatagctgagattacagtcacgcaccaccacgcccagctgatttttgtatttttagtagagatgaggtttcaccatgttggccaggctggtcttgaactcctgacttcaagtgatctgcccgcctcaacttcccaaagtgttgggattacaggcataagccactgtgcccagccaaggactattatctctaatcaagatagagaatgaaggattttatatgggagggtgacatgatcaaactggatcccttttgtgtgcctcaccatatatcctctccatcatctttgctctgctctgtgccctaggagcctgacctctgtggataaaatctgttggcaaccttgccttctgactttcatttggtttggcccttggggagcactagcaagggatcagagagtgggaagagagtaagattagataatttattcccccagatctctacttttgtagtcatcgtgcacctgcctttgtcactcagctgaaggtcattgctcttgttaggtggccctctacgcagtgcttgctttttctctttagtaattgctttattctcttgcctcat

SEQ ID NO: 309539 - DNA, 1000 bp, Homo Sapiens
atgttcaagacttcagggacaccaggggcagatggaggatggcagagaatggtgagaggaggccagagcaggcaagaggcctttaggactctggcttttactgagggacatggacgccgttggaaggtctgagctcggaatgacctgagctgacctgtcttacagggacaacttgtctgtgggggacactggcagggaggctggctgtggccacccaccgccgggcactggcaacctcgtccttgccttccacagtggaccggccttggtctgtgtgacccacagaatacagacatgatggggaatcaccctccatatcaggttttaagggaacaccatggcttccatctggacgctgctcgcagataccgctctggggaagccagctactaccaagctgtgagctgctctgtggaacgggccatgtggcatggaactgaggccttctgtcaatagccacgcgagtgagtctggaagcaaatcctcgccaggtcaagccttcagagacggcagccttagctggcatcttggccacttcatgagaccccgagtcacagccatcccagctgagctgctcccagattcttgaccttcaggagccgtgtgaggtcgctttggctgcaacttgctacacagcagtaacagcaggatggcttaggccaggcggtaacaggtaaattgtgcatacattttaaagatcagaattttgatttgtcactagaagcccattgtgctacagatccacctcagaatttttatttttaggcatttggcaagaggaagggggggaggggcagtgacgtggggaaaacggtatggagggtgtgggggtgggcggtggcgagtagaggtggcaagcagtttggacaggtcaagtctgagagattcattagacatccgaatggagcgtgaggcggcagtcagttataaaagccaggctctggggagaagaagtcggcatttggatgtctttacatgcgagattctggctgagctcagg

SEQ ID NO: 309540 - DNA, 1000 bp, Homo Sapiens
ccactcgatggcttattaaatcacccaagaactcacattgccacccggctctatgcctctttcatcataggatagtgtagatgctataaaataatcagcatccttctccagaaaaattcactttacatttgccgttaccctccttgttttccctgcatggacctcagctcacagcttattagagaaccaaaaggccaagcgggaaaagaaatgaatcttcatgagcctattccttcatgtgccaagagcttgctcccctgcttcttagtgagattgccatgaggtaaccacaaaaatccaagagagctattatcaaacttcagggttgtaaaaccacggatttatttatttgttcctgaaagggtctaagccgcctaaatagctgtttaattgcgtatttctcattagagctcctttttccttttagaatacagtggagccactgttgttctttatgaaagtaagcattagggataagggggtttatgacctgaaaccttttttccatgctgaacacacatgttgtcttgactacaccaatgagggaaaactctctattctgtcaaataggtttatgaaagggcatgagcctggtgctcccacggagcgagggaagcctcacacacaaacaggcatgggacaataggtgtataaactgaactatgcaacagcacttaagctctggctatttttctcctgcatgagctctgtagaaatccagatggcagccctaaaggctgtgccttaagcagaagaagcatacatctgaccctcaaagggacaaaatgagatggctgctctgaccagctctgtaccagctgtgaggaggccttttaactctgtgggtctcagtgtcactacctataatgtgaagtggtaggaatagctgatgtctgaggtctgcttcagctctttaagtctaaattctgaaaaacaaacaaaactcaacattttcttcaaggttggcaggaaaacgcctcttccgtgaaagcttcagcaa

SEQ ID NO: 309541 - DNA, 1000 bp, Homo Sapiens
ggcagagtagaagaatgaaaaagaggaaggcagagttgagttagcagagcaagaagcaaggagggaggacagggtgacatcgtcgggaaatcaggtctgcaatgttccctttcctgcccagttggccctgatggagggtcggtggctggtgatccttcaaggctcctagatctgtcctttgtctcccatctccacacaccaagtatgcgctggtttgggtccactggggaggatgccaatacacaaactagtcctccagggagggcctgaactggggaaagggtggcgcccaggcaggaagaaaccaccatggaacaccccaaaggcaggagtcttggatgggtcccaaagtcagcaacacagataactagtttctccaattctttaatttctccatttcctttcgtctatccaatctcaagtttttacaggccatttagaagcggccttcctcacccactccctggccacatcccacacaagccctctccatccacattccatacacctaatccactggcctctggctttatcctcagctccggcttacgtcagaaaacagacttttcactcctctggacgttcaaaatcttaataatctaagtggtcttggactcagggaaccctgggttagatttcataagctaggtaggctcagccacactggattctgacagctgctcatttagtttcatggatctcactttcctggttcttccttctctgtgtaactgtacctatttccaatggcaaattagatcaaaacaaaacaaacagaaccatgcctctccaactaaatgcatgttagaaaacacaaatctgttgctgattcaaacaccctggagatcctcattcttttccgtctggttacaatcctacatatatgtacacactttccctcacacatgtatatataaacacatgtgtacacacacacacaaaacacacacacacacaccacctgatcctatttccactgacaccctgatgcaccaaggaa

SEQ ID NO: 309542 - DNA, 1000 bp, Homo Sapiens
catcgtgatgtcttatttaaggggaacgtgtgggctatttaggctttatggccctgaagtaggaaccagatgtcggatacagttcactttagctacccccaagtgttatgggcccggagcgaggagagtagcactcttgtgcgggatattgatttcacggaggatggtggtcaagggacccctatctgaggggggtcatccatggggacgagaagggatttgactgtaatgtgctatgtacggtaaatggctttatgtgctatgtactgttaagggtgggtaggtttgttggtatcctagtgggtgaggggtggctttggagttgcagttgatgtgtgatagttgggggttgattgctgtacttgcttgtaagcatggggagggggttttgatgtggattgggtttttatgtactacaggtggtcaagtatttatggtaccgtacaatattcatggtggctggcagtaatgtacgagatacatagcggttgttgatgggtgagtcaatacttgggtggtacccaaatctgcttccccatgaaagaacagagaatagtttaaattagaatcttagctttgggtgctaatggtggagttaaagactttttctctgatttgtccttggaaaaaggttttcatctccggtttacaagactggtgtattagtttatactacaaggacaggcccatttgagtattttgttttcaattagggagatagttggtattaggattaggattgttgtgaagtatagtacggatgctacttgtccaatgatggtaaaagggtagcttactggttgtcctccgattcaggttagaatgaggaggtctgcggctaggagtcaataaagtgattggcttagtgggcgaaatattatgctttgttgtttggatatatggaggatggggattattgctaggatgaggatggatagtaatagggcaaggacgcctcctagtttgttagggacggatcggagaattgtgtaggcgaata

SEQ ID NO: 309543 - DNA, 1000 bp, Homo Sapiens
ttacacaggagagaaatgaggctcgggaaaggcgagggtctgcccaggaccacaaacgccaaaaatggtggcagcagccccaggtctctgccccagctgcccagggctcttctgggtcccccaaactcccaaagacccctggtcccatgtacctgctgagaccttggtcccccagggcatgccgagtgttgggggagaaaaggatggggagaatcctcaggaatgggctggctatgagagtgcagagcaaactgaagtgggagggagcactatgggtgggggcaattccagtcctgtggggtttgccagagccaaccagaagctgggctcggacagagaagtaaactgccccaagtctgccatggacccctccagcagtcactgctcaggaaaaacgcctagcagaccccaaaggcctaggtccttgcctccagggacaggggacagagaagggaacaagggggaggggaggcctctgggcttctatctggacttctatctgcagtgctccctactgtccctgcccttcatcccaggaccactgctctcatcctgacctccacccgccaccagacagcctcctaactaactcccctgcatccttccaccccagcctcagaggctccttcctgcataaacttctgtgttctaaaacctatttacttgatcttggagggagtcctgagtttctacaactcaaatcctacctcatcactcataaaccctccccacaggtccctccctactctccaaccctcacccagacccctaccctgcctggagcaaatcccattcccacatctcttcagccggcaccagcctcctgcacacacactcaaggccacagcatcccacagggtcgcatttgatcagcttgccctccagaactgccccttgaaggcagggagtcctgaggctgtttctagcatgacccaggccaggccttccagggggaagtggtgggaggtgaaggctgggaatggggaaaaggggtgcacgt

SEQ ID NO: 309544 - DNA, 772 bp, Homo Sapiens
acattgtccacaatcactctgatgcccccagcaaccacccacttgtctttcaggctggtagaagtttcctgctcctgttacacaagtgagataactggaggcccgagaagctaaggaatttttcaccagctgctaaagaggagcctaagagtccagctcacttgcctcccagtgtggggctctgtcctctaaaataaaaaaggggtgtcacttggccacctgaaggtgcctatccctccttaccagtcccagcgtggcactgcacaggctcccaacttccaaacgcatcacactgtggcacgtaggggcccgaccgcagaagggcggatgctccagccgagtcgtccggggaaaagcggcgtctctgatagaagcttaaggctggagtcagggaaggagaaaagcagaatatgaccacctgctctgtgtgggctctgtagctgagaaccaccacgtatgtcctggttccaacataaggaggccttcttatttatttatttgacaaacatttcaacccacagtattacaaaggctccttgcacagtaggcaggcactcaacagattgtcctttaagaataacacttaggctgaagcttgaaagaatattatagtagacctctacaataacttccatacagaaatcagtaggtcagtgaagtgtcttcaggcacatgagataatagtaataataggtaggctctatactcatctgttatgtgtgaggcactagctaaatacataccttaattaatttaatcctcacagcaatct

SEQ ID NO: 309545 - DNA, 1000 bp, Homo Sapiens
tgacacaaagccttcttggatgtgtacttacagttgcacaacttgaaaatattctgtacattacaagtggggttatagtcacacacacacgcacacatttaacacatttgtgtattaattttacttcaggactgtaaagtgttacaaaattctagctattaaaagagggcattgcaccaagttatgttgtgttgagaaccactgacctataatatctttttattgcctttattattttgaatggacacataattatacaatttatggggcacagtgtgatattttgatgcatgtatatcatgaatagtgatcaaatcagggtaactagcatatccatcacctcaaccatttatcatttctttgtacatggataaagaaaatgtggtgtatccatttgtctgttgacaaacacttaggtttggccattgtgaatagtactgcaataaccatgggagtgctttcatattgctttcctttcaatatgatatatatctatatatctatatatctatatctatatatatatacactcacatacacacatatgggggatatagaaatggaagaaagaaagaagatcacatttttacctaacgctttcttcttttctattgttactttctttatatttttatctttgaagctcagatttatcataaatgttgtatacaattttaaatattttccttttcctaattgtttgtggtagcaaagtaacattctgcttttaaggtcttcttaccagatgtgaaatattcccaagtattcccaaatgaagcaaaacttttcttgaaaacctgtgccctaaatagaatcaagtaactaaaaattaaacacagcccataaaaattttttgcttcatgttataaatgccagtacaaaaaataaatagaagattaagttgctataatccaatttttaatagccttttttttgtatgatgcaatggtttgaatgtttttctctccagatctcatgttgaaaactaatcctcaatgca

SEQ ID NO: 309546 - DNA, 1000 bp, Homo Sapiens
tccccaggactctctactaggtagccaccaaactgccaaagaccctatcctatgcaagtcacataaattgtctgtttgtagaaattctttctttttttctttttttgagatcgagtctcactctgttgcccaggctggagtgcagtggtgtgaacttggctcactgcactacctccgcctcctgggtttaggcaattttcctgcctcagcctcccaagtagctgggattacaggtgcgtgccaccatgcctggctaatttttgtatttgtagtagagacggggtttcaccatgctggccaggctggtcttgaactcctgacctcgtgatccgtcctcctcggcctcccaaagtgctgggattacaggggtgagccaccatgcctggcagaaattctttcctttattgactgtagaggctactgcaactaggtgacagaggtgatttggccctgttagtttcaaatcccaatttaaagaatgatagtacagagatgcctgaactccctgccaggtaattttatgtagcttattccccattccatttctttgatcatgacacaggccattcaggaagtcctatggagagtaaatagatggaccgattttcagttttgctgtttcttatccaaatcttaaaagggataaggagcatggactttcaaaatccaaaattatagagctagccctcatctttactccatttagcctgataccagggtcttcagtgatcgtgatcgggttaaataatcccttatgtcgctacctaaattactacctgagggaagcgttagaggacatttccagctatacaattcaacaatttatacttctttgcatgtactagtttacatgtaatgagacctcgctatattgctgatatttgtttgtaatcagtgtttttttctctcatactctctgttaaccttcacacataccctcatgttttcctaatatttaaatttgctatgaagacttaaatttgccatcaagttctctatg

SEQ ID NO: 309547 - DNA, 1000 bp, Homo Sapiens
tcccacctcagccttccaagtagctgggactacaggcatgcaccaccaagcccagctaaaaatatgtattatttaatttgtctcagcaaaactctaagggtatagagttaccaaaaagattttagaaacttttttttaactctttctttctctctctgtataggagacaggggtctcactttgctgtctaagctggactaaaactcctggaatcaaatgatcctcccacctcagcctcttgagtagctgaaactacaggcgtatgccaccacgcttgcctctgagaaacctttttaagaaaacacattataaaacataactattattaaaagttcattgtaggccaggcaaggtggttcatgcctataatcccaacacattgggaagctaaggcaggaggattgcttgagccccggaggttgaggctgcagtaaggtatgttcataccactgcactccagcctgggcaacaaagcaagaccttgtctcaaaaaaagaaagtccatttgtaaacttttatctcattgacatttatttattcttaacaattgtgtttgaaaaattgtatgagacatgaaacaaatctagtcattatctcaagttaaattttttattaactatttttatatgttaggcaagtatcaaaaaagcaagaactttgaagttaaatacatgtatagtttgctgataagtcaaaagacatagttcttttttttattaaaccaacaatattaaactagtccttggccaggcgcagtggctcacgcctgtaatcccaacactttggaaggctgaggcggatggatcacctgaggttaggaatttgagaccagcctggccaacatggtgaaaccctgtgtctactaaaaatacaaaaaattagctgggcgtggcggtgcacccctgtaatcccagctactctggaggctgaggcaggagaattccttgaacccagaaggtgaaggttgcagtgagcactgcactccagtctgggtgacaga

SEQ ID NO: 309548 - DNA, 1000 bp, Homo Sapiens; identical to SEQ ID NO: 120100

SEQ ID NO: 309549 - DNA, 1000 bp, Homo Sapiens
cattttgcaaatttaatgtaactctgataccaaaatatgacagcacacagaaagcaaacaataaagcaggaacagcaaacagatttttccatcacatgacaccctcagctgattggccataactgccttgactgctgtgtggacaaagattccaaggatgtactttggctccatgggaaggactactgcaatttattagcggtatctgtaaacatggggaataaatctgaaacctcactagccatacgagaagccacaggcaccaagactggcggctccactgccaaagccagcactggtgctcggtccaccaccaaagccagcaccagtgtttggtccaccgccgaagccagctcctgtgctcggtccaccgctgaagccactggtgcttggtccactgcagaagccaacaccagtgcttggtccaccgctgaagccaacaatagaactgggtccactactgaagcccgtgctggtgctgggttcgccagtaaagccagtgctggtgttggaaccactgccaaagccaatgatggtactcagtcctctgtcgaagctggcattaggcctactgccaaagccatcgctggtgctgaggccaccactaaagccagcactggtgccaagtgtgctgccgaaactagcattggtgcccagtccaccaccaaagccatcactagtgaccagtccaccaccaaagccagcactggtgcccagtccgccactgaagccagcactggtgcccagtccaccaccaaaaccagtgctggtgcctggtcctccaccgaagccagcgctggtacctagcccaccatcaaagccagaacttgtgcttaggccaccactgaagccagcactggtgcctaggccaccaccaaagccagcactggtgttcagtccaccaccaaatccagcattggtgcttaacccattgccaaagctgaaaccggtactggtgctgggtccatcacaaaaactagggctggtagcaccactaaag

SEQ ID NO: 309550 - DNA, 1000 bp, Homo Sapiens
accatttattgagtttattgccagtctacatgttcgctaaaggactctccatgtcttacacctgaaaccctcccaccagcctgggagcccgttttacaggtgagaaaatggaggcacagagaaggtgggtcattttcccagaacacacagctgctaagtggtgaagttgtgatttgaatccaaacagtgtggatccagatcccgtgctcttaatgcgagctctaaatgaggctagaggagtgaacggtgagcccctgggaggtaggtgcctggactctggagtcccttctcagcagtcgccatgtataactaggaagcactcgcatttaactggatcagtatgtccccagactgagcttcttggggacaggatgttggatgaattaattaacgaatgaatgaatcgggcaagggagacagagttggggttagtgattacaacaggaggaagccttcccccgctggacctcagttcacccaggtgagcaatgtgtgcacttcactaagtctctgtgactccttggcgggtataattgagcggcgttggagacaatcctgggttcaaatcctagctgtgccgcctactggctgttagcctccctgagccccagttcccacgtctgcaaaaaaaatgagagtagccaacattgacgagcacttacttataccaagctcttaagcgctttgcacggcttatttcctttaatctttgcaacaacccaaagtataatagtaagcacagggtttttgcgtgatacccggtaggccttattaagaattagctcttattttcatcaaaggtagagaaaatgagtaactattgaggcccccgctggctccctacggaggcccccgctttcagccctaggcgcctctgtcttgtagggctgtataggacagtccggtcagcagttacctcaagctgagctgggcttgtaggttggggagggtggtgggtgggagaaaagttgatggggaacgcagcggttcccaccccctg

SEQ ID NO: 309551 - DNA, 1000 bp, Homo Sapiens
attagataagaatctccttaaaatttaattgactaaatgtattacattcaatattccatgggcttcttctggacaaaggatcggcataaatacaaacaaacctctggaccttcttccctaaccgacgaagatgaaacacaggaggcaaggggcacgggcacgccttcatatttacactttgcctttactttacagttcagtgccagaaatatttacagaaaatacaataagaaaaaatcatgtcttggcaacatactgaaattcatacaaactgtatatatgatttcaagcaaataatgatactgcttattttttagccacaactgccaagcccttcagaggagaaagatgtcttggtcactataagagatgaggacttgggaaacttggtttgcttcaacaagtatttactgggcgcctactatatgcaaggcactgtggaatcccaaattataccttttccctcaccattaaaaaaagaaaagcatctgaagaacatgagttgatattctgagaaacacactagaagtacatggcttctttagctactaagaaacccaccgtttgattccacatcgtacggatagaccacctccaatctctccaactcaggaaaagaggctgtcatggaaatctttaaaacagaccatctgactccaatgtcatttcatgtaaacacagcaatcagttcttttcaggaagagagaacctgaatgggctttaaaatggtgaatagagaactactgccagcagcagtgtcaaattacctccaatacatgtttctttttttattatttatttatttatttatttttaccacctaccacaaaacacatctttgagcaaggctaacttccactttgggtaaagctccaccttccagaagaaatgaatactcttaaagactctgcctctctagaacccagtctgcagagtctgacaaatgcttccctagtgtatggagaaggtaaccgttcatgaaggcctcatacacagaacc

SEQ ID NO: 309552 - DNA, 1000 bp, Homo Sapiens
tggaaggaagtcactattcagctcacactagagaagtaggaagttctgctccatatccttgagggcagagttcataaattatttggaattcttcttcatgggagattcatctattctaccccatttattaatgtattcaattttctggcactacaagaatatatatatatatttttgtaatcgactttaaaataattaggaaaatgatagaacattttaatataagaacaagatatggtaaattgatgaatattattagacattatcagtaacaagagctttgtatcttaagttgttttgagttcaatttcttgttcacatcttacttttagcttggttgagctaaaaaatcattaaccattgatttttttttgtaaccttgcatataatatgtacaatgagagaatcaattaatttagaattacatactcctaatttaaaaaagaaactggtgtacttattgctgataactaggaattatattatcaaagggctgttaattcaacaaatttacatgctaaaagagaaatttatatgttaaaagaaattaaaaggaagcaagagacattcaatttgcttttgatatgcagatttaaaaatactaggtccattttaatagatgataaatctccagtatcacaaggattagggaaagcaaaagacctgaaaagtaataccagttctcagttctctaactctcaaaaggcattccacaggtaaattcggtgaaagggccggcaattgttcaaatgtttaaataagaagaagttgtagttctcacatttccagttctcttacaggtgtgtgtatttggaaagataatactctctaatgttggtcttttccattgttcaggtttatcctgttgttaagtaataagcagcaatccaaatacaaacatattgtacaacagctattaatgaacatcacctgagttcagtgtgcctgacagctgacacttagttaatttctccatgaaacaagaacagtgaaacttcca

SEQ ID NO: 309553 - DNA, 1000 bp, Homo Sapiens
gttcccaaggttgtaacagaagattcaaaacatcccattctagccacacacaaataaatatctgcggcttagtgataggactctaccttttctcctagaagcagttactgaacatccaggagtacaactccttcccatcattcccatgtggaagggtctctcccatcaaggagaacatgtggcatctctgatcctttacattgagaacatttgttggatatgttcatttattcaatagtcatttattgagcacctactacgtaccttggtactgttcaagctgtgggagatacagcggtaaacaaacaatatagagcagaaagttaaatattttatggttcatatgtgaaaaagtaattatgtttataaatagactaactgctggatgttaccaccaagtaagaaagcaacaggtaagataggctttctctctccctataccaagtaatttatacctacacagattgggcaattctagctaatgaaaatatacttaaaagtatttcttaggccgggcatggtggctcacacctgtaatcccagcactttgggaggccgaggcgggcggatcacctgaagtcaggagtttgagaccagcctgaccaacatgatgaaacctcgattctactaaaaatacaaaaattagccaggtgtggtggcatgtgcctgtaatcccagctactcaggaggctgagacaggagaattgcttgaacctgggaagcagacgctgcagtgagctgagattgtgccattgcattccagcccgggcaacaagagcgaaattccgtctcaaaaaaaaaaaaaaaaaaaaaaaaagtattattctccaagaaaaaggtccttaagaaaaaattgagatcaagttgttagatttttaaatactgaagattgcaggcccaattacccatcttacacaaaccataggggttgaagttatcttaatatggcccagccatcactggtaatcaatattcatatcagtgtaagtaaaaagaaata

SEQ ID NO: 309554 - DNA, 1000 bp, Homo Sapiens
ggcacatagtaggcactcgattactgcttgttgtataaataaatatatgaacaattgattaaacaaaggtttatttgaattaaggtatcatgaaatggtgtttgcagtaccaagtcagagtttattgaggttctgtctgctgtcattgtcatgttagaatattgccttgtgctgatacaattccttctcatgaaaaacaaaaaacactaagaacaacaagaatgtagaatgagtcttattcctactaatggaactccacgcaataatccatgtttcttgtctgccacctgaaaatgtgaacaaatttcattatccaacaagtctcatttgcttattatttttaataactatgacaatatacataaaggactgttgaaaatggatagtaatccactgggttaaagagagctcatctcaccattgctggaggttattcctcactgtctcatttgactcctgtttcaaagaagggaattatgggaggttttatagcagtttatagtggaaaagagaaatttcagagactctggatgttcaagaaacattttttgttagtgactcataaataggtttaaatgtgggtagttgacatagatgatgctttagatataggctatgcgtggatttattttctttcttaggctaggaagtaactatcccaccctgctgtatttaacagtcaaaatgattctatattctctatatctttgattgcaaagtgatctctatttataactatcatttatattctacatttgaaagaaatatattcacaagcacccaggaaaaaaatgatttattatatatgccatatgagtaagaattaattacttatcatttataacaatgtaaaaaatcctatcccacacattagttatgagccaggccggaggtatggggatttgaaaagagatatggatgataggagggaaaggaaatgaagggagagtgtttgagttaaggcagtagtttccccctgcttgaaactggaggcaacttc

SEQ ID NO: 309555 - DNA, 1000 bp, Homo Sapiens
gatctacccgcttcagcctcccaaagtgctgggattacaggcatgagccactgtgcccagtgggtctactcttttgcctactgcggatgccttcttgggcagccctgctccagctgccatgcagccggcctgaagaagctggtttgacagagacttgtaacttgtcttgcatggtccactatattttatttttagagacaaggtcttgctgtgtcacccaggctggaatgcagcggcacaattatagctcactgggctctagtgatcctcctgcctcagtctcctgagtagctaggaccacaggtgcatgctgccacaccaagctaattactattttttgtttaggcagggtctctgctgtgttgcccaggctggtcttgaattcctgagctctattgatcctcccgctttggcttcccgagtagctaggcctataggcacatgctagcacacccagctaattactaattactattttttgtagagacagggtctcgctgtgttgctcaggctggtcttgaattcctgggctctagtgatcctcccgcctcagcctcctgagtagctaagactataggtgcatgccaccacacccagctaattactattttttgtagagacaggttctcgctgtgttgcccaggctggtctcaaattcctgggctctagtgatccttccgcctcggcctcctgagcagctaggagtacaggtgcgtgctgtcatacccagctaattactgttttctcgtagagacagggtctcactgtattgcccaggctggtcacaaattcctgagctctagtgatcctcccgcctctgcctcccgagtagctaagactataggtgcatgctaccacagccagctaattattctttcttgtagagacagggtctcgctctgttgcccaggctagtctcgaattcctgggctcaagtgatcttcctgtcctggcttcccgagtgtagagattacaggcatgagccactgcgcccagccat

SEQ ID NO: 309556 - DNA, 1000 bp, Homo Sapiens
cttacagcagacatacaaagagttgagggaaaaatctttaagaagtcaaaccaagtgacatggttttatgcttctattcacataaatttatcgaaatttcctaaactaagcacactttttaaagccttaaaattttaaaacaaaagctgaaaacttaggagataaaattgtttctaattctggtttattttggattgtctctcagaagtttaaatatatatatagtatatataattatatatattatatatattatatatataatatatattatatatataattatatataattttatattatataattatatatattatatatataattatatatataaaattatatataattatatatatataaaattatatataattatatatatataaaattatatataattatatatagactgtatctatagttacagatacataaatatagatagataactatagatacataaatatagatttatattatatatataatatttaaaaagccaccatattgttcaagccatttggcaaccattttttctttatacaaattatattttgtaatattcttcaacataattttctaatgattatatggtattccattttgtgaatgcaccaaaacttaatgtataatttcttactgttaaatatttagatctttccaattttcaatattataagtaatgctactaaaagtatccttttacatatctcttaaatccttataattacaattgctgtcttgaaggatatacatttacattttttacttacattatcaaataacaaagaagtttatatcaatgaccaattcaactaataaggaatgtcacattagatttttttattcatcattaaattacaaggcaaaaaaatgatattttgttttaatttgcatttatttgattgttgaaactgtatacatttttctcatgcatttcttctttgagaattacctgattatatcctttcctatttttttttcctggaggtga

SEQ ID NO: 309557 - DNA, 1000 bp, Homo Sapiens
ggtaattcactgacccttgctataaaggcttgataaattttattaccattattaatacaatgacttacaaataatctttaatacttaacaaagcaatatattttttaaccaagaactaagtatatacctcatttacaattattttaaaacaaatttgcttatgggagcaatgaaaaaaaaaatcttgcctgtaaattctggtgtaacttaattgaattttaaagaaaaagttttaactacagagactgactgacattccattgttctacgtccctgagggagaagtaacttaattgaattttaaagaaaaagttttaactacagagactgactgacattccattgttctacgtccctgagggagaagtaccttaattgaattttaaagaaaaagttttaactacagagactgactgacattccattgttctacgtccctgagggagaagtacaggccaaaatgaagagcaatgttcacaaaggcttggtagaaataagaggagaaatttgctggaatcttcaacatctctgacctttgttctctcttggaagggcttggtttggactcaggacagagcttatcttccaaagcacagttcagggaaggagcagctgtaacaaatgttcccttaggagatgtttgtctattatgttgcttaatgtctattgacattgaattgcttttgtttgtttcagacttcaattctaaaaaaagtttgtctctgctaacagaccagtatacttccttttaccaaatgttagaggttacatattgtttatttagctttttgccttagttatctgtaagactggagttagatacaagtgtcagtcattataatgctttgcatctacttgaaagatacactttttttcctcaattcttatttttccaaaatgtcaaagattatcctaaatgttattgcataggtatctttcattgtaaattccttcagatgctttttagatctagctgaaatataaatcaaaaattataaat

SEQ ID NO: 309558 - DNA, 1000 bp, Homo Sapiens
tccaaagctagaattgtttctagcacctattccaacccagtacattatcattgatctgaaatgtgatgattattggaatgcataaacattgacgtattttggaatgtattaaaactgaaatggataaaaattagtatatatgtttattttgttctatctcctttggttgtatttttctctgcagtattaaacatttggaagagactaaaggtatgcaaaaataatgtcttattttcattatgtgtgcttccatttgacacatgggaaattagattaatttcactattaaatagtactttatacaaatcttaatatgttgatttcttcaatagttaatcatattctgcctctcatttcatgttgtttttctcattatttcaaactaggtaacttacctgttgaagactaacattgcatttaatgcattaagttataaatgggccagcatatttgaaatctaagcatgtttgcttaagttggattgtaatacgtatttcctttttactctgtctcctgtaaataacctttatcctgattatgtttacttacataattattgatagtaacctacagttctgatttctgctgtcttgctgctattccctggttacttcaggtgactcaaaacttggtcctttataaaattaaagaaaaaaccactttcttaaaagggctaatgagtggtagctgggttttcattagagcttaattttccaaggggttgtactcctagctgagagtttttggtctacttactggggaaaaatcatactatgctaaacccagtttttatgatgtttaattaaaattatccctgttacatgattcagtcatgtttgaagcattttataaaaggggaggttgtcttctcaaactctattttcaaattcaaatttttatgtagtgaaaaagtcaattccagtttgtttctccctgcatgtagtccttttattcctcttatgcagggtataaaattgtaagactcagaagatttactgga

SEQ ID NO: 309559 - DNA, 1000 bp, Homo Sapiens; identical to SEQ ID NO: 120101

SEQ ID NO: 309560 - DNA, 1000 bp, Homo Sapiens
gtagaatctgatgggactggatcccccattagggcttgacctctagctgggccttgtctgttgaggaagttgctctatcaggaaagcagcaccaacagagaaagctaggacttttaggtcccctcgtgcctgacatgcaaaccagatgtgattttggaattctactcccttaggcaggcaagccctgttttttatttctgcttaagctttttagtacagtgagagcgggcatctggggccacagctttctttggcacgtttgttatgttctgtttaccctgtttgtgcctcgggcattgcagatcagccggcagtccattgatgcactcaaagactggttcagagatgaaatgcagaagagtgactggcagcttattgtggagctgaagaaagtatttgaaatcatctaattttttcacatggagcaggaactggagtaaatgcaatactgtgttgtaatatcccaacaaaaatcagacaaaaaatggaacagacgtatttggacactgatggacttaagtatggaaggaagaaaaataggtgtataaaatgttttccatgagaaaccaagaaacttacactggtttgacagtggtcagttacatgtccccacagttccaatgtgcctgttcactcacctctcccttccccaacccttctctacttggctgctgttttaaagtttgcccttccccaaatttggatttttattacagatctaaagctctttcgattttatactgattaaatcagtactgcagtatttgattaaccaagcttctgcagattttgtgattcttgggacttttttgacgtaagaaatacttctttatttatgcatattcttcccacagtgatttttccagcattcttctgccatatgcctttagggcttttataaaatagaaaattaggcattctgatatttctttagctgctttgtgtgaaaccatggtgtaaaagcacagctggctgctttttactgcttgtgtagtcacga

SEQ ID NO: 309561 - DNA, 1000 bp, Homo Sapiens
tgggaatattaagcaggaggagataagaatgtctccaggatagtccattagcttaatttagccattcaacaatgtatacatctttcaaaacatcatattgtacaccataaatatatacaatgttgtcaatttcaaaacttctttttaattaacttttttttccttatccctgaaactgtttttttttttttaagttaagttccgggatacatgtgcaggacgtgctggttgcataggtaaacgtgtgccacggtggtttgctgcacctatcaacccatcacctaggtgttaagccccacatgcattagctatttatcctgatgttctccctccccccacacccccacccccactgccaccgacaggcccctatgtatattgtccccttccctgtaactacgtgttctctctgttcagctcccactcacgagtgagaacaagtggtgtttggtttcctgttcctgggttagtttgctgaggataatggcttccagctccatccatgtccctgcaaaggacatgatctcgtttaattaactttttttcaaaagagtgtttccagggttacagttaacagtaaaattggaggcagggcccagtcttttcactcctttccaatattatgtcttttatccaatcatatgcctcttattagaaaatcacaatacaacaaaggtcaaatcctcctaggaaatgctatcaacacactttggggacagtaatgataaaagcttcatggacccacatttaacaacaaagcttatgtgataactgtagcaaaagaatgggagtaagactgaacacttctgaatcctcttgttcttgaataccttcaagccaggtcctctctgtaagtttgtatttcacctccagtgattctgagtaggcacaactcttctccccatcacacagacatcaaactccaggcacctagagaagtagcttgccccaaattgcccgatgaggaagtgggtgtgtgtgagaatccagggtttgggct

SEQ ID NO: 309562 - DNA, 1000 bp, Homo Sapiens
attgcatagtttaagccaccttgacttttataagcgtagaaacagatggggtttaaagtaagaactcattaactgccaaaaaataaaaaaaagaaatcgagagctttaacatgacatgattttctgcctgaacagtttcagttctgcttgttgtggcactacaacagctcacgtgcatgaactgtccatcgtacattctggcttcagagtctgtggtatgaaatcctggtactgattacaattcttactattagagtatgtaccatgttagtgcattcataatgaaaggtcatgaactattaccaagggtggtgagcactgctcaagaatagatggttgctcctttggaggaaagagggttgcttggagtaccctgtccgcctctcataacaatcacttagtctcagtgtctggagggatgggggcaccactgtttgagcccatgagggattagtcaccaggagataaactgtggtgacctcagatcttgactcaggactcgttcttagcagccagggtcctcagtctcctctgtgaggaggacacagtggccatgtcctgggctctctgctgctgctggacactttcctgaggttgctgcccttcatgaaggggagcagctgtgatgtcagcaaccagcctgaagagggacttactagggaatgtttccaagccaactgctaatgctcccacctattatttgggaagcattcatttcctcagataagcctcagaacagcccaatgcaaagaaaacttgatttcattaaaacagagctaggggccgggcgcggtggctcacgactgtaatcccagcactttgggaggccaaggcgggcggatcacgaggtcaggagatcaagaccatgctggctaatgtggtgaaaccccgtctctactaaaaatacaaaaaaattagccgggcgtggtggcaggtgcctgtaatcccagctactccggaagctgaggcaggaggatggcgtgaacccaggaggtggagc

SEQ ID NO: 309563 - DNA, 1000 bp, Homo Sapiens
aaaggcgggtaatttaattgccaaaaactatgaaaccccggacgctgtagaagcgagccagaaaggcagtaacgatttcgtgaccaacgtagataaagctgccgaagcggtgattatcgacacgattcgtaaatcttacccacagcacaccatcatcaccgaagaaagcggtgaacttgaaggtactgatcaggatgttcaatgggttatcgatccactggatggcactaccaactttatcaaacgtctgccgcacttcgcggtatctatcgctgttcgtatcaaaggccgcaccgaagttgctgtggtatacgatcctatgcgtaacgaactgttcaccgccactcgcggtcagggcgcacagctgaacggctaccgactgcgcggcagcaccgctcgcgatctcgacggtactattctggcgaccggcttcccgttcaaagcaaaacagtacgccactacctacatcaacatcgtcggcaaactgttcaacgaatgtgcagacttccgtcgtaccggttctgcggcgctggatctggcttacgtcgctgcgggtcgtgttgacggtttctttgaaatcggtctgcgcccgtgggacttcgccgcaggcgagctgctggttcgtgaagcgggcggcatcgtcagcgacttcaccggtggtcataactacatgctgaccggtaacatcgttgctggtaacccgcgcgttgttaaagccatgctggcgaacatgcgtgacgagttaagcgacgctctgaagcgttaatgactcaggcgggtgatatcactcacccgccctcgcctttcaggcgctattccgaaatacttcctcactgctttactttctttcgtcactctcccaccatctttccccgattaatggatgataaagaagtcgcaaggaaaggttatggcactgccagtgaacaaacgcgttcccaaaattctgtttattctctttgttgttgccttctgcgtttatttagtgccgcgcgttgcc

SEQ ID NO: 309564 - DNA, 1000 bp, Homo Sapiens
tctcatatcacccattcaaactcccagaacgatggcacattctcaaccaaccttattttctaagtaattctaactccattagcttttctttttattaatgtttagccgtattctccaagttgctcaacctcacctctcatctgcactctaagtttcccacgtccttagtaagctgtggagctcagcatgagatcttgtaagctctgattagtgtacttggaatataacactagttactacattaaaagtgaaagggaagtgaatgtagggctgcacatgtcacattctgctcttcttttaaaagtcccttcatttttattacttggtcagagaatttacgaaatttcaaacttgattagcacacatgtgagcatcacttcaaatgggcatggcttgactacattcactgccctcttgagaaaagtttcagaacagggactctcacctcatagcagcatatctatgccacatacctttccttcagagacccaaaccgcttctccttgctgatgctgaatagtgtcctttaagctgccaaaccagctatcattggctgaatttaggttgattgtagctatagaaatataaacaaaaaggtctgcattaatttccagaggcatgtttattaaggatgctatttgacataatttacactcatttctgtgatatttaagactatggcagacgcaagaagatgtttgcacatctttgaatattaaaacccttttaatgaatgcaattaaaactactaatcatgtagctgtttgagttcacattataggtggatgtgataaagctaaaaatagatttttagaatgtttattttcagaaaggctaacttttaaaaatgtttttaagaacatgtgttttcggccaggtgtggtggctcatgcctgtaatctcagcactctgggaggctgaggtgtatacactaattagtatacactaatatactgtattggctacctccaataaaatactaaaagtaacacttaaacat

SEQ ID NO: 309565 - DNA, 1000 bp, Homo Sapiens
actaaaattaaactcagtgaatgtttacaaatcaatacatagtaatcctatatatgaaagctaagatgtataagatgtttataaatttactattagaaaatactgctttcttaaaggtgattttaaaaagctagctgatatctgatggctcaagcatccagaaaatgtatgcaatgataagacattgactaggatgaacagaaaagggatacaggaaaagtccgaacacatgaaattctaaattaaccaagaactgccaaaattcagttcagccaccctctcatctgactactgactgaccactatttttaaagaaattgtgaaaaatttaaacagatatgacctgcattttactaagaaacaggcacatgtacacaatgaatttaaaacatctttggccagccctcctactataaaaatattgatatcttcccttcatctttcaatgatacttcaaattgaccccactatatcacatgtaatttttttgcaattaatctaaaaacgctgaacctaaaagatgctagtttagtaatggaaaagttataagaaacaagtctatccaagatagcttatcatatagacttgtttgccaccattcctgggcctatttcttctcctccttgaaatttttcaatctagaaattctgtgccaatggcacaagtccccatgaatgacagctaacataccccaacacctccagccttattggtccctcaccaattaaggaaaaaaagctgttgagacaatcccaaaattattagagaaattttctactgtgatattaatggattaataatgcttatctttcaacccaactagaaacactgcattccaaaattatttttccaactcaatgtttagaacaaacattcttttgaagtttgcctgagatttcgacttgccatgctatgagagtaaatgacccttgaggaaaggcagtctttatatgatgatgtgataacattattaggttttgaagtataaaaatgctagaga

SEQ ID NO: 309566 - DNA, 1000 bp, Homo Sapiens
atcttggcaacactaagggacaagcacgaaggtaaatataggcatgctgaagaggctagagaagagataaaaagagcctgggtccttgatatcccccattgaaaagctgaaccaataccagcaactgcctgtctagacttcttaaaaagcaactgcagatttcttaaatagtaaaccctatttgtttcaaccactgttaggtttttctcttacttgcagccaaatgcttaaaaaaaatggggtctcactctgtcactcaggctggagtggtgcagtggtgcaatcgtagttcactgcacccccgaactcctgggctcaagccatcctcccacttcagcctccctagtagctgggactacatgtgtgtgccaccatgcctagttaaattttatactttttattttggcagagacggtgtcgcaaacttctgggctcaagcaatcctcccacgtcagcctcccaaagcactaggattacaggcgtgagccactgcacccagccatccctttataattcagttaaaaaactgaaaatgtatagagccatggcataccagtgatctattgctgcatagtacatccccaaaactcagtgacttaaaacaaccaccattaatttagcccttgattctgtagaagctactgaatgatctcagctgggctctctcatacatctgcagtaggctggggaattggctggtggctggctggtcctggatggcctcacttgcatatctggaagttgactgaatgtcagctggcagggaagactgtgccatgtgcctctcatcctccagcaggctagcccaggctgattcatatggtggcacctttccaagagcaacaagagaggtaaagccctgatgcacgagcacttttcaagcccccgcatgcatcttatttggtaatgtctcattggccaaagcaagccacatggatgaccctgactgaataaataaatgaataaatagacttcagtctactggttggggtataaggca

SEQ ID NO: 309567 - DNA, 1000 bp, Homo Sapiens
aaaggagctgccaaaggagatgaggtgtcttcactggctgggtcagcagaaagataaaacatgaacagactcagacttagactaagtatatattttaatttctacaaggtcccctttcaagttttagggaaatttaactgaagtgtatacaaattagacattgctaatatgtacaaaagtattttatacagtttttgaacgatactagctatttgcaataaacaggatgttacaaaaacagtccaataatgcatttcctattaagaagcacaatacacaacataattcaattttattaaaaaataacttcaaaatgtagaacaatcccctttaggaagaaaagctatttctgtagttcactctgtcagtaaacacacaagttgaacgctgcagcagagggctgtccttttccatggagaaaagaaatgaggcttctagggcctatcttttctgggtaaaaattccacctacagctgagatgggcagttattgcctgtggtaggcagaatttgaaaatgcccctcccactttcaatgagctaatctccagaacccgtgaatatgatgagatgagacagtactcctgcaattatgttctatcgcacaatcaaccttaaaatatatctgtgggcttgagctaatcatatgcccctaaaacaggaggacgggagagagatatgaagcatgagaaagagcaggaaggctggtttgaagctggaggggaccacataagaaggaatgcaggcagccttgaggtgagagaggggcctccagctgagagccagcaaagaactgaattccgccaacaacctgaatgaacttagaagcagattcttccccagagcctccatgaaggaatgttgtcctgccaacccttatttcagcctttaagaccctgagcagagaatccagccacactgtgccagactcatgagctacagaactgctatgggtattgttttttaaactgctaaatttggggtaatttgtcacacagcaat

SEQ ID NO: 309568 - DNA, 1000 bp, Homo Sapiens
gcacacagtacctccaattaatgaatacaagtctatatttcttctatcaatagcatggcttattaccaaatgtagtatatgtgtattaagtccacggatgtcacttgccataggcactttctcgagcttactggtcacacaaactgaagacatcagcagcatgaccacgggattgcaagattacactaaggtgaaaaaccttgaatcatttaaaacaggatgtctcaacctcagcacaggtgacaatttgggccagatcattctttgttgtggcagctttcctttgtattatcgaatatgtagcagcatctctggcctctacccactagatgccagtatcacaccctccccaggtgtgagaaccgaaaatgtctccagacattgacaaatgttccctggggagcaaattttggtctaggagtctaaaaacttagtacagtgtgtcagtttcaaaagagtatattctgcaataccaagaagttccaaaaaaacttcaggcattccaaatagctgctttatacaaaactttcttggatgaagtaaatgaaaccttgttactgtagatagctcattcttccacatgtgcatgcttaacacttgtgatgatgaatctgggacaggctgggacaggagccaacagtgactgggttttatagtttcgatgaattacacctccttttaacccttcagtggactaaccatccctgccaggctaaccctttcttcgcaaaccatcttccccgacgccttccacataagatgccctcctgcgggccctcaccttttgacactgcctcccaccgcactggggtcaactctcacccaagggttccgccaccttccaccaccaaaccagcctgtccctgccacatgccccccgggccccagcgctcatcctctgcccaggcccgctcttgacccctgaccccggcctgaccccgccaccccctccccgcccccagggaggtacctgaagtagtagacatcgctcttgccagca

SEQ ID NO: 309569 - DNA, 1000 bp, Homo Sapiens
cccagctagaaccagcccttccctctctggagtcctctgtgaacaccgtacagagttctcttacatccctcatcatggtcttcagcattcatttggatatgtgcatgcccatctagcagggatagtttgaaagcagggactggcccttactcagccttgagtctttgtgctagcctgtgcctagatcctactggcttcagtaaactgagcacagagtgatggctttggctacccagaccccgaagcagaaatcttgcataccaggatatagtcgtatttaatcttgggaagggactttatagatcaagaaaaagaattcatcactgggacattcttggtgtcccttcatggacaatttttactggcggtaatccctgtatcagtgatgacaatgaatgtgacaccatgccccacctgatggtgatgatctgcccaatgcccaagtccaggtcattcaactgtgcaataaacaccgctgccactgcttcatagagcgcggtcccatccatgttgattgttgcaccaacgggtaacacgaatcgagtgatcctcttgtccacctggttattttcttcagcacagcggaaggtgacaggcagtgttgctgaactgtgtgataaaaatagaaaggaacttatgtctagaaatgctggaccttagtccctgcctgaagacatgcctgtcttccaaaaagtaaacaaagggtccttttaggtaatcttgtcgagaaaagtaaagaaaataacaaaacaaaatgaaacaaaggatccaaatcatgctagccctttaggcaggtccaggaatcagaaggtgctgtgcccaccactgctcccagttattccataaccccttcctgagctgcaggtcatgccaagagagcaggaaatatgcaacagcatgaagcaatgtgttcagggccaggggccgagaatacggaggtcatttctcaaagacagctacaaaaaccgcaagctggagtctgttttgtaaagtgaggtga

SEQ ID NO: 309570 - DNA, 1000 bp, Homo Sapiens
atctctttatgcctttcctttatcaataaggaaaccaaggtccatggaaatcatacaacagggaatcgctgaaaggttctgaagaggagagtcgtgggatcatatctgtgctttagaatgatgagttttcttgaaaaattagagaacatatttaaaggaggaccatatgtcagagcagtaagtagaataatcaagaaatgaggaaatctggactagggcaatagcaggaagggtggcgagacttggaagaagtcaagagatctgaagcgagcaggtttacagggttttatgagcaactggatgtgggagtaaaggaggataaaagtcaaagattatggctggtttctgctctggacaattggaccaacaaaggtactatccaccatgccaaagaatacatgcagtggaatagatatgaggcataaagaagaaggataatagctcattcagttttaaaacctgagtgtggctttacagtctcatgatgtaaaaagagaaacagtaaagcaataaaatgttaacaatatgtcctgaaggttaaaaattcagaacaacaaggaggttgatagaggtgagctttggaaattggttaatatagggatagtacggataaaggtatgtagctagacttcagaatgaggaagcttgaccacccggctttaatggtcttctactatcagcaacatcttgagtttattttgagataccaccattccccattcctagaacatgtgatttaaaagaagctataccatttccatgtccccaagagggagcatatatcccaggtctgcccaaggagaagcaatcctgagcttccttggctaaaaccattgggaaagctaagatagctaatgtagaaggattaaacccacagctactgctggctctcttatgactgcaaggagaaagcatgcttaggattaaaccacacagaggaaagcagaactgagtaataaaaaaagtatgacatgctataaataacaagatgtcttagaat

SEQ ID NO: 309571 - DNA, 1000 bp, Homo Sapiens
gatcctgactttgtgtgggcctaggctaatgtgtatgtttgtgtcttagcttttaacaaaaatgttttaaaggtaaaatataaaaataaaaaatttaaaaacagaataaagcttctagatatggatattaaaacatttttgtacagctgtaaaattttttttgttttaagcttagggttattacaaaagagtcaagaaattaaaaaagcaaaagtttataaataaaaagttacagtaagctaaatttatttcattattgaaaaaacaaaatgttttgcatatttagtatagcctaagtgtacagtgttcataaaatctataggagtgtacaaaaatgttctaggccttcctatccattcaccactcactcactgacacatagagtaacttctagttctccaagctctactcatggtaagtgccttatacaggtgtaccatttttaatcttttatactttatttttattgtctattttctatggttaactatggttagataccattgtgttagaatctctgacagtattcagtacaataaaaaacgataaggtttgtagcctagcagccataggctataccatgtagcctaggcgtgtagtagactataccatcaggtttatgtaaatacactctatgattttcacacaacaacaaaatcacctaaggatacatttctcagaacaaatcccccatagttaagtgatatgactgcatatatgtgtgtattacacatatagacacacatgcaaacacacacacatcaattcatttgatcctcacaactcaaccactgtaaagcagattctattattatgattatatttacagataaggaaactgagttccagagcagttcagttacttggccaagttcacataactagcaaatagtagagttgggatttaaaacccaagaaatttggttatacttttgaccaagatactagaaaaaagccttactatgcctacactaaaaaccctacattaaatcactccaca

SEQ ID NO: 309572 - DNA, 1000 bp, Homo Sapiens; identical to SEQ ID NO: 120102

SEQ ID NO: 309573 - DNA, 1000 bp, Homo Sapiens
attgggcaaagaataccctatttagactcctaggtttacatagagtataaccaaacacatgtgaacacacaataggaaattacaaaagatgtaaagaaataagccgtcatgagtgagaatcaacagaataggtttagatcctcaatacttcaggttgtgaaataattaatagatgataaaataacaatgataaaaaatgaaaacagaatcacaaaaagcatgccatatgagattactaaaaggtaaacaggcatattaggagaaaaaaagccaaataagactttttaaaaatcactgaaatttaaaaccaattgatagcttaaacctcagatcagacagaattatcaagactataccaatactacttagggttataggcaatgttgatgacataagacatcccgagcagtgttcataagagaaaggtgtattcctctcctatattaacaggacaagctaggtaggtgggctctgttttgccattctgtacatgtgacttcatctttgggtctacagcagttgtcccagtcatcttcagccatatgattcaaggtagcagcaaactagcagcaaattaactttctagcccattgaaagggagaagcagagtattaagggcaaataacttcagatttctagggaatgaatattaagttgtacatatcacttctgcttatataaaagtaaccaaaacctagcattatcgccacatgtaactgtaggagaaattgggaaatttactctctatctgggtggccattttcagctaaaacctggtggtaggctaaaatgaagatggggaatattgatcttgggatataacagcaatttccaaagcaaaatagaatgatatggagatagaaactgggacagagcggttacatgatatgagtagtgtgagaagatctaagatctaatataggcccgatcaaagtgacaggaatgatttttaaaaagtggaagaaaggaaatattggggaaaaatggctggaaatttttc

SEQ ID NO: 309574 - DNA, 1000 bp, Homo Sapiens
ttaaaacccagtcctccttttcctggaacagttatgtcccgtccaagaagaaagacagtgacatcggtttggtcttacacattttccaccatttaagcagggagactggcaaacagctgtatgacagcgagaccccgtccagccaggcgggcagtcacactggtaaggggccacacagcgacctccgttcagacagggaagaatgcagattggttcttcacagaggcgccccatccagccctctggacaggaacaagcatttgggcgttggcagatgcccccattctgacatggaaatcgacagacagctctgcaaataggaggtgatgtccatgttccattttctaaacaaacactcctcaggaaaccctccaacatgtatccactgtaacatgagtaggtgatcatgtctccatattgataatgtacgcctcgagcaattgcattttctacgtgagctggtggaccacatgagattttttcacatttggcgcttgtctgtgtccacgtctcgtcggggttgcaggtaatgatgccgtggccctgcagcagaaaaccttccctacatttgatggacacattctgatcaacataaaactccttttcagacagcagagcattctcgggaatcacaaaaggaacagggcatggatttggtttgcagagagggactgggtggctccaggttccattttctgtgcagtgtgcctcagatggcccttcaagactgtagcctctgttgcaggaatataccacgttgggtccagtcgtcctgttttcaatgtcagctttcccattgagaaattcaagtggagtttcacacctggtctctttgcatattgccacccctccactccactgtctgttctcctggcagacacgttccctgttcccctctagttcatagccaggctcacactgataaataattgtgctttcaaaggtgtatttactgccaaccacaaatccatgttctggactttcaggtttcccacaagaa

SEQ ID NO: 309575 - DNA, 1000 bp, Homo Sapiens
gggtcttcaggttagtcccaatgtactggcatggagctagttacttgagcaggtcttcacaaaggtctgagtagcaggtgataaaaggggttgtgaagtctggactcctaacttaagtggtggagatgctaaaagagaaacaaaggcagagttgctgagggtagggagtatggcatttattaaccctgtgtttcccccgtcactggtcactgctcttgactcgtagaacaacaggtacagaactgcaagggatcatccccagctccgtgatcaccagatccacaagctctgggggagtcacatcatagactagattcaacaaccgtagggatgcgtggttctgccagttagccagcgcaacatgttctccccgcttacattgcagatcatcagggtcatctgcaatggaaggcgtacccattatgttctttcagaaaagaagttctagtttatccgcccctctccctccctctcaagtcttcacaggtagctggaggcttctcttttgcctccttacctagctcattagagacaaaggcatcagtctgcacacgctcacagaacttgtatgtttcacagcaaaccagcactggtacattatgggctcgagccaccagggctaactgtgctgtccctacccgtgacatcacagacccattggccaagagtgcatgagctcccaatagcaccttggaaacctgtttcacaggagaagaggaagaaaaaaatgtcattgttgtatcaatgcaaaataaggtcccctacttacaggacagcaacattaagacaagtaataaatctcaacacctgtgaaaagaagggaaagaaacaaaaacagacaacaagtaataaatctttttttttttttctttgagatgaacttctgctcttgttgcccaggctggagtgcaatggcgcgatctcggctcaccacaacctctgcctcctgggttcaagtgattctcctgcctcagcctcccgagtagctgggattacaggc

SEQ ID NO: 309576 - DNA, 1000 bp, Homo Sapiens
gttctgagctctggcctacttgagaggcaaggggagtaaagagagaggggtgggaaatcaggttggggaggtaagcaggggtgccatcatatcaaactttgtaggccaaggtacaggtgcagacttttttcaaagggcaatggttcattattggtaggttttaatccaggtaggaaaataatcttatctaagattttaaaattcagtttggcctcattgtaggagaatagaaaattaagcagggagaccagtgaggaaggagtgtagctgcagcagctgcagtagagagacacaaagggagagtcaatttgtattttggaagtaaaaataacaggatgtgcaaggagaagaaagcaaagacaccaaggaagattcctgggtttttagcttgaagcaactgcattgtggtagtgaaatttcccaaatgggtaagactggagaagaaatgatggtaaggataatcaaatttctgctttggatatgctaaaacatctaaagaaaggtataagtagatagctatactcgtctgtattttataaaagatgccaagatgtatcaagatttaatacaaacaatttttaagaaatcttaagaaactccttttgtgacaagttaatgataaattatacatacacccatgtatatccatgtatatgtatgtacatataaaatttggctacaaagaaaactacgtaattttggagatattaacatatagatggcatttaaaatcacaaacgacctagaataacctagggtgacaatgtgggtaatgaagagaagacggctgataattaaacccagcacactcaaacttttaactattgggcaaaggagaaggcatcagccaaaaggtctaaacaattagtgactggaaaggaggaatacaaagagcatatgctattgcaaaagtcaagtgaaaatgtttactgaggagaatcaatcaactatatcaaatgtgctgagaggcttagtaatgtgaggactaagaatgggtcaa

SEQ ID NO: 309577 - DNA, 1000 bp, Homo Sapiens
ctcgaggatctcggctcactgcaacctctgcctcctgggcttcaaccaattctcctgcctcagccttctgagtagctggcattacaggcgccgccaccatgcctggctaattttttgtttgtttgtttgtttgtttgtttgttttttgagacagagcttttgccttgttgcccaggctggagtgcaatgacgtgatctcggctcactgcaacctccacctccgggttcaagctattctcttcttcagcctcccgtagctgggtgacagacatgcgccaccacgcccggctaatttttttgtgtatttttagtagaacggggtttctccatgttggtcaggctggtctcttaccccgacctcaggtgatctgcccgtttcgacctcccaaagtgctgagactacaggcgtgagccaccgcgccctgcaatttttgtatttttagtagagacaggggttcaccatgttggccaggctggtctcgaacttctggcctcaagtgaccctcccgcttcggcctcccaaaatgctgggattacaggcatgaacaatcgcgcccggcccatttatatctacttttaatgacacacagatcaaaggtggtttgattgcaggttccaggctaacctgtagcctcccattacaggctgctggaagaattctaggtggtaccacccatcaagtgattaggaaacactcaagaaacaaggtgggggaggaaccgaatcctctatgtccctccccatccttcccagccctgccctcgtctgctccgggtgaggcccaatgcacaaactccagagattgaaaacttctggacccaaaggaaaataaaaccaaaggcagagatatattttggcaagaaaagggggtgcccccgtttcacattcaatcctttctggacagagccttccctgttggaggttcaaaaggaagcaactgtaccccagcaagtaggtcaaattcagggtcaaagagcatgcaaggccgggcgcagtggct

SEQ ID NO: 309578 - DNA, 1000 bp, Homo Sapiens
  misc_feature (283)..(382): n is a, c, g, or t
  misc_feature (734)..(833): n is a, c, g, or t
gaacgggatccagaggtggccccagaagtggaaggaacccctcgaatccgccagttacaggaagctgtcttccaccaggtctgaagagtctatgccgatgtcgtccatcatgtcgatgtcttcaatggtctcgtcctctctcttgatgaaggtggaactgctggaacccgtctcaatggcactctcttcagaggtctgcgagctggaggagggagagaagagcaatattacaactcctacacagaactagacctaggactgtggccccccagagacaaacgannnnnnnnnnnnnnnnnnnnnnnnnnnnnnnnnnnnnnnnnnnnnnnnnnnnnnnnnnnnnnnnnnnnnnnnnnnnnnnnnnnnnnnnnnnnnnnnnnnntcagggcctataggggaggggaaaggtgagacaccgaggctgcccccacagctacctgtgtctgttcctcttgcccaggtcctcctcctcagggacagggtcaatgtcaggcagaggaatgatgtagccactgtcagcgctcagtctctgctcatccagaccaccctcccagtccttcagcttgtcttcctcgtttttgtaggtgacaccaatgtatgcattgtctgagtccacacgcatgcgtgccacagcaggatggtcactcttcaggaagtccaggtgaattttttcataactctataaacattcattgaacatatttaatcaagtgttaacaaccaaacctcaaaannnnnnnnnnnnnnnnnnnnnnnnnnnnnnnnnnnnnnnnnnnnnnnnnnnnnnnnnnnnnnnnnnnnnnnnnnnnnnnnnnnnnnnnnnnnnnnnnnnnacagctcactggtataacttccagctttatccagacctttccacccacagatccaaacacacctttttatattgtccaggcagcagattctccacaatctcactcaggtggtaaaaggagggtctcttctccggctcactgttccagcatttcaccatgatctcgta

SEQ ID NO: 309579 - DNA, 1000 bp, Homo Sapiens
catacataatgaacgtcttttattttcgggtttgcaaacaacggtagtcaattcacacaaaagggtacttttaaaactacctgtatttactctattttatgcctgtatatatgaaacaaacagcgtgaatgtgcataaatgtatgtctgtacatgtgggtatatatgtgtatacaagatggtacctgtacacctctttgtatgcatgtatgacctccatgatgacaggtgcagttgtacatttactgaggagggagagattctctaccatgatctgtgtccccattagaatcagtacgactgtggattcgggacacatacaaatgcaggttggtgcccatgaaagaaaatgtcagcccttttcttggcatttggtggtgaaattgcctgctctgctcctcacctccttggctcaggatcacggcatcagatggcagtgtaaattggttgtagtcctcgaactcaataaagagaaaggacttctttctctgctctccctctctgtggacctgcctggctggttgtggcagattcagactgaacgggacagtggagaagtagcttcggagcaaaagtgacagctctgtggtctgtcctcatgctgaccttgatgcgggaggccctggagggttcaggtgtcttagtttccacccaccttgcttaaccttgcaaggaagaatggcatcaaaacgaggcttctccaggatagtctctctctataaataccgtgtatatatacatacagatactcatacatacaccaatactaacccacagacaaagctgggtgcctggagcactggctagcgacatgttaacacaccagaaaaagtagtcattgttcctgctcccagaagatcaagtcatatgtcatgatctttaaacattcagggaaaattcagaagattccattaattaaaggagggaggaagatgctgtcaaaatgatgaagtacagactaagtgaaattgtaaagaaaataaaaaaccggaacaattgag

SEQ ID NO: 309580 - DNA, 1000 bp, Homo Sapiens; identical to SEQ ID NO: 120103
  misc_feature (177)..(177): n is a, c, g, or t
  misc_feature (237)..(237): n is a, c, g, or t
  misc_feature (563)..(563): n is a, c, g, or t
  misc_feature (601)..(601): n is a, c, g, or t
  misc_feature (625)..(625): n is a, c, g, or t

SEQ ID NO: 309581 - DNA, 1000 bp, Homo Sapiens
gattatgaaagaaggcaaaaagttgcaggcagatttattattaatataatactttatcaaggagcaaaattacttctctttacagtcaaggaaattaaagtaaatgtagcaacaaaattatttttaaacaacattcatcaacattaataagaaactagtctaacaaacgggaacggttaagttgtgatacattcctgtggtggaatactcaacaactattaaaaatcatgcttttgaagactaataatgacaaaggaaagtttcataataaaaattaataaagatactaactatatacaatatgatctatgtaaaataaaatacgtaggaaatgttaatagtggctatttctgggttctgagattatagataatttttattttttctttgcatatagtttctgtgttttaaaaatttttacaatgaacatatattactcttataatcagaaaaatatatacataaaataaacttgattctctagcatccaattttaataagtccactttaaaatgaatattaccaaaagcttatctttcatgaaaaaatcatacctctaaagatgatatattatatagtacagtatattattatacactatgaccctgtgtcagtgaggttggcaatgcctgttatgacattggtttatcttgcctgatacaatattgacttatctataaaacagctccagtgtaatagagagacttccctgtctgaaaatcagcaagacttatttaaggggcattaaaggatgagacctaattagccctttctagatatcactagcatgtttcagcgtgaaagttcaaagtaaaactagttcaaagctacttccacagaagtagcagcaaaaacataaaatagacctcagagatcacagaaacaaatccagtgttattcagaccagattgcttttgaacctattaagaatttgtaaaactatcaactcaaagaaattacagtacagctaaagaatagaaagtagtgtcactgttcatag

SEQ ID NO: 309582 - DNA, 1000 bp, Homo Sapiens
gaattccccaaagacctggaacttgctctccacagccacagccttggccccgccctgtatctgtgctgccgccagtaaggctgcccctggggagggcggagccagaacctcacagcctcacagggcagagcaaggctggattgacggacaccaggccgagaagaaacccttggggttggcggcagttcttagtgagggcaattcattcaatccagagccagaaacaggattttatttaaaatttattgtaatggggtccgcgcaaaaggaaggggtggagggtggggtacatgcaggggacacaggaacacgatgacatggccagggccacaacttcttctgtcgtggggaagagggatgaaaagacaagaccagggctggagctggggtggaagaggggagggggacactggctgcattcccccgcccccaggaagcacctctaggccctggacccctcgctcaccctggcccctaagactccatctcttctctgcctctggccctcctggctcttcctcctgctccccttgactttttcccctgacagattctcaagtaggacgatgttcagggcctgaccccaaccccccataccaccttatgaaggtacaacctttgccggccctggttctgcccctcctcaaacctcaccgctttccctctttgggacagctctgatccccctccttcctctcctccctccccctggaaaaaaaaaaaaaaggaaaagaaagcaccaactccccggggaggggctgcagacagcagggggagaggactggaaggagagaagaggaccgtcgagggaagaggctcacaagtccctgggaagacagggcatgggcttacagagaggagagggggtacgggcagtggctgctcgtgtcctctgccacccctgcccactgtccaggggacttcaacacaaccgaggggacaggtttgtgtggggtcaggtctgatagaagaggagcaggagaaacaaatcgttaaaacc

SEQ ID NO: 309583 - DNA, 1000 bp, Homo Sapiens
agcaatgcctcctggtctgataatacagtatctcatttctgaatgtaaagatttaaaataaatcaaaatgaacattaaggcgtacaaagctactttaagtctgctcttaagatcagtttttgctcatattcaaaatacatggaatgttggcacaaaactgaagctgctgtagaaagatcacagatgttctgtgggttactcaaacttccatttctctaaaaacatacccttacatggtcttaattttatgaatttaagtgttgagaaatatctaaataataagtaacaattaaaataaaatgttttatttgtaaattatgtacagaatacactttacgttacgccaatgaaatggggagggaggagggagagccatcaccttccaacaaatgctgttcactttctctgctggagacgaccatctttctctcagtcagacgtacaaatcagtgtggatttcctacattggaaaaataatttagctaaaccagaagtgttgctgcattgttactagttggcttgtttccacaaaatagttttgaactctgctaactcagaatcttaaaagaaatctcctggtataattttataatgaaaaataaaaactatcaaggacaatgagtttacacatcttaaagaaactgtgaaatggctacataactatgcataatgtgaaatgttggagtttctttgttccttttaaagttatttttgattagtctaacagtaaaaagccataaaactatcaaaaattgccattaatgtaaatttaactgtggaaagtacatctttgataactgtcaaaatgaatgagacctacttactgtaaaattatcaaatggataaaacatattaatggctttaaactgtaccaataatagtgccaatattctataaaatgaaggaccgaatataactgcttgaatgtcaaatacatctcagtagatagatttaaagaatgctacaaatgccatgtgttcaatatggtaatcagccaaca

SEQ ID NO: 309584 - DNA, 1000 bp, Homo Sapiens
gatcacacacacatgcacacatgcacacacgtgcacacaagcgcacacatacacacgcgcttttccaggccttggtagctcatgggagtccctgaaccatatagaactatagcatatagcaaataacacatcaaatccctgccaccccattgggctctgcccacagactcacccaggcaccactgtggtctcttgggtttccccccaccccaacccccaccccaagtcaccaccactgaggctgattaacaaaaacacaacatcaaattcctttacttctgaggtctcccctttaaggggaggcagaaatagaacattctttatcggggagggaaaggggtttaataaaaactggtataattagttaaatactgatctcggttaggccctctctgtgttcatgggcccagtcttggctggctgcctccccccagggagccccccctcaccccggggtctgaggtggcaccaggagggggctgggggcggccagcaccagcggcgtcctgctcagcccctctgcagggagcgagcaggcaggcaagccgctgggcggtgggacgtcaccaccgcaggaaatcgcgaatgaacttccagagcttggtgacccacaggttggcgccgaggtccatcaggtactggatctcgggcgtgagcatgcgccggcagagctgcgcgtgccgctgcccgatgctcttcttgaggttgtagcccaggatggacttggtgcccagcggctgccagggctgcatggcctcgtcctggatggcggcggcgtccacggcgtggcccccgtcgatgcagatggtccgcatgcgctcgttggcatggcgcagggcggccacctcgcgggccatgcgctcccgcccgaaggcctccaccttgcgccagaagctggcgttgaagtggcggtagaggtgggagtccagcatgttccaggcggtggcgcgcccatacagctcccccgagagccgcggcacgggcgagtcgcggcgggcgt

SEQ ID NO: 309585 - DNA, 1000 bp, Homo Sapiens
  misc_feature (560)..(659): n is a, c, g, or t
aaaacattcaattatttcaaaatgataaaaatttattgtctttctggcctatggactcagctgtagttgactgaagtcgctaaacaggacggatttaagtagaggtgatatgtccagtcaccggcatagagacgtcctctgcgtcaccatccacacacagggcttctggtagacatcaggcaaagctttccatgttaatattcatctgaatatggataattagggtggctagcaaaactgaaaagagaataatgtataatataaatgcaatgactccattactaggggagtagtaaagtgatttcaatgaagctgtcattagtatgaatgttaagttgtctgactagttgtagaatctgcctttcttacctttatgaacatggcttcataatacagtattttcaaaataataaattattcaatcatattcccttatctggaagttaacacgtaaaacacacagagtcaaatattcaggtatattcctgtacatctgtcagcagagcagagatactctgattatactttcttttggtactttacttattacctgctactgnnnnnnnnnnnnnnnnnnnnnnnnnnnnnnnnnnnnnnnnnnnnnnnnnnnnnnnnnnnnnnnnnnnnnnnnnnnnnnnnnnnnnnnnnnnnnnnnnnnncaggatctagcaagcaattccatatgaaggaggtggaattggcacctggaccacaaagttgatggaaatgtttttgatttgataaggagctgagcaggtttgggacaatgtgatataagcacagatttggaaacatctaatgaagtcacatgggcagtatccacagcatgtccagtggtagaaacaccaggcctatatggaacgtgcagacttggcaatgatgttggctgctctggaaagttccatggagtcaggagagcagaggcacaggttgacccatgctgatccctgcccactcaccctgccagagaacagagctctggagtgaatccagcaggaga

SEQ ID NO: 309586 - DNA, 1000 bp, Homo Sapiens
taggttgctggagctcccattcttgcgatgctggagggaggccattaattgttggtcatcctgtcaatatggctcatgttcaggttctgtgctgtgtgttttcttctttctggaagagctaaagacagactaacaaatatgtcacttgcttctcctctagaggctgaaaactccacctactctcacctcaaaaatgtctataaaatattggttatcatctactctctgccccaaacttataggcaaatcagtttttggccttaaagaactagaaggaaaagaaacacacaagtaacagagaaaggagtaggaaaagaatctttaaggaaaaacattcaattacttcaagataaaaatttattatgtttgctttctggaccatggatatatctagctagctgaagttgccaagcaggaggggagggatttaaccagaggccgtgtgtccagtcaccagcatagagacatcctctgcatcaccatccacacacagggccttctgctagatgtcgtgcaacaccctctatgctaatattcatctgaaaatggataatcaggatggtccataagactgaaaagagaaaggatagtacataaatatggatgaaatgactctattaaaaagctggtagcaaaatttatatgaagctgccattagtgtgaatgttaagaagtttattttcggactatttgtagaatgtctttcatgaacatgagtttataatgtgttttttttttttcaaaataagaaaattttcaacttatattcccttgcctggaatttatcacacaaactacacagggtcaattgttcaaacatagtcctccatatctgtcaacagagcaaagagatattctgacattttctatttcaaattctcaatgaaggcaggaactcatcttgcattgttttgaatagaaataagccagctatatgttcatcattaacaaaaagttttgagggttaaatgttattggtagcaatcacatatccttttaa

SEQ ID NO: 309587 - DNA, 1000 bp, Homo Sapiens; identical to SEQ ID NO: 120104

SEQ ID NO: 309588 - DNA, 1000 bp, Homo Sapiens
tttttgctaaggaagtattatggtatacatagatactgtctatgctattttaaaaaatatctaaggaaaatacattaagatctgtttattattacctattagtggtttcttgtgtatgtgttggtttgacaagtagaggttgttttctaaccaaaaacataacagaaaagatttagtacaggattacctgtgcagacagctgtgacaaagacacagggagacaaatgaaaattcaagctactcatgtttattaactgatctacatttgacaaaacaaagataggggcacaaagagctgtttgacaaagtcaaatcccaggtatcgaacaatagtattcccctggctgccctagagggcacttgtgcccactctgagggggatgtcctctgccatgcgaccgctcagttatcacactgcactgctgttgggttgcatgtggagtacaggtctgcatgcatctgacatcagagaagtggcccactaaacactaagagccctagttctagatgtcacaagttgatgttagtaaccaccaagtactaattctgtactaaaatggtcagaaaagataacaagctttgagtactgtgtaaaattataccctttatagggaataggctcttgtaagctgccttttaacttatttcctcccttgccaaagtctattcatttatgtcagatcaagaacatacagcacaacattttctaaaaaagcactttaacaatggtcattaacttctccctaaggactcatgcctaaggttatttacataagatttgggatcttcataatttaggagaacttttaattctgagctcgggaagatatttctcctattagacaataggacactcagaaatacctgaggtataatcactgaaaaccttcttaaaggcgaaaaaaaaaaaagattgaggtttcctatactggcatgaaagtacacatacaatttttatcgtagaaaagactaaaatgtgaatagtgacaaaacataacag

SEQ ID NO: 309589 - DNA, 1000 bp, Homo Sapiens
gctcgaattcctgggcttaagccatccccccacgtcagcctcccaagtagctaggactacaggtgcataccaccatgcccagctaatttctaatttctttttgtagagacatggtctcgctatgttgcccaggtttgtcttaaattcctgtcctcaagcaatcctgctgccttggcctaccaaagtgctgggattacaggcgtgagcactgcgacctggcaatttcctgattttgatggttgtatttcagttttgcaggagaatatccttgtttgtaggaaatgcacactgaagtatttgttgatgatggggcatcatggtaagtaacttagtctcaaatgtccaggaaaaaaagtgggttttttttttttgcaacttttctctatgtttaagtttgtttcagaataaaaatataggctgggcaaggtggctcacacctgtaatcccagcactttgggaagccaaggcgagcagatcacctagggtcaggagttcgaaaccagcctggccaacatggcaaaaccctgtctctactaaaaatacaaaaattagctaggcgcagtggtaggtgcctgtaatcccagctacttgggaggctgagatgggagaatcgcttaaacctgggaggtggaggttgcagtgagccgagatcacaccattgcactctagcctgggtgacagaacgagactctgtctcaaaaaaaaaaaaaaaaaaaaagtatatatatacacacacacacacacacacacactttgtaaaatacttgattttaattttgaagtatgagggtagagatggaatgttgggttatcagcagccacagggaacaaggaggctggtgaattgatagtccacgatccagcctgcctatggtggggggtgagggtggtactatcctttagccagttgcattaggcttgactagtttttataagatttccaattgccatcaatttatatggagtttatactctaaagcaataacactgattttgagaa

SEQ ID NO: 309590 - DNA, 1000 bp, Homo Sapiens; identical to SEQ ID NO: 120105

SEQ ID NO: 309591 - DNA, 1000 bp, Homo Sapiens
accccagtgcttattagatgcttgttggatgaacgaggacactaaatgctgagggcaggtgtacaaagctacatgctgagtggttatacttttgtgaatcaggtttacgtttctgtgtgcaaagaaaaaagatgaagttagtgcccaggggtgaggggctgctttctcgggcggacgaccctgcacggacccaggcgccccatctgccggtaagcaccccaggaaacctgcccgtctcccaaggctgccctgacctgtaactcccacacctcccacccggtacagagcatgaggcgtccacaagcacggtgggcccacacctggggctgagggtgcggcagaaagatggacagagcccaggcagggaggtggggggagacctgagccaggggcccacctgggccgcgtgcccggcgatgtccccaacgcgccccttccccatcgtcctgttggcagcctccatcccactggacctttctgcctgttgtccacgcacaccctccagctccaggtataccacaggcgcctaatcaatgtctgcacgcagacgtggcatccctattcacaggtcactgagcacactttcagtgggtgatgcctgggactctgcggtctcagccgaggaggaggggccgtcaggctgcccgggcagaggggctccagggcctgccccactcagcgtgggcgtgcagcgccgcctggtggcagccggcagggagggcccagctgtggaacccagcagcccccacctagcagggcagttgctgccagggaccctgagccagcctcagatcctccaaggctgtgcagcacgaggaccagtgggcagctccggatgtgggccctgcaagtccaccgctggcccagcaggatcagtgccgggagcagctgccgcccggggcccgtcaccgtgtttattcaactccccctttgcgtagccctgtgaggccggaggccgtgagccctttcttggcttccgtggcatgaaaacgctggattt

SEQ ID NO: 309592 - DNA, 1000 bp, Homo Sapiens
aacataaaagctgttctcagggagcctcctaggctaagaagctttgccccacacagcctgcttctgaaacccctcttgaaagaagcactccaaatgcagaggaatacatccaggatgattattcacaatattcagtaggtaaggttgaagacatattaataatttggtaaagtttaacgttgtttttaaaataactaaaaagatccaattgctcaaaccctatgttttaaaaaagatagatttggccaggcggggtggctcacgcctgtaatcccaaccctttgggaggcagaggcgggcagatcatgaggtcaggagatggagaccatcctggctaacgcagtgaaaccccgtctctactaaaaatacaaaatattagctgggcgtggtggcgggcgcctgtagtcccagctacttgggaggctgaggcaggagaatggcatgaactcaggaggcagaggttgcagtgagccgagatcacgccactgcactccagcctgggcgacagaccaagactccatcaaaaaaaaaaaaaaaagatagatttgatgacagcaaacaataagaatttctctctttattaaagacaccataggaaaaagttagccgatgacaagttgaaataagatagttgcaacaactaaaacaaatagtgaattaagacttaaaaatatataataaatttctgcaaaccaacaagaaaaaggaaagatacgatagcatcaagagaagaaaatgggaaaatgcaatgaacaagtaattcacaaagcagaaactcaagtggttaatctgatcctaaagccatgttggatagcaagttttcagatactgtggcatatgtttcactacatcaaattgaaaaaaaagaaactagttcacctaaaaatccaaattaataccccatatatcaccaaaacactcctgtactgtaatgacatattatgtaacatatcacaatttctgcactaaaaaactaaactaattacttaacaagtaagaa

SEQ ID NO: 309593 - DNA, 1000 bp, Homo Sapiens
tacattgggttacacctgaagccagcacatttatgagtcttgcccaaggtctgctgtaattactccctgactactgccaatgtttgctcaaggccatggggctctacaatcagcaggcagaaaagccagcaaggcctgtgtccttcctttcagggtggcgaggtcccccaggtcccatgtgggtccagagatgccatccaggagtcagagactagagccaaaactcgtaaagtctacctggtgttctatcatattgtggctgaggtggcacgcaaaccacaagaccgtctttcccactcttccctcgcatttccaaatacaaaggagcctcaacccatagccacaacacttcaggcccacagggagtactgctagactactgccaatgtttccttaaggcccaagggcactttaatcagcttctattgaattctgcctgaggtgggattcaaacttcagaacaatgggctcccctctggccgagggcaggttcagaaatgctatcccagagtcaagtcctggaatcagggacctcaagagtctgcttagtgcattaacccctgtgatctttctggtatctgaagccagcaagacttggaggctcacccaaggctctcagtgtagtacctgggtatcaatattattgtttattgttgattaataagagacataccagtctgatgattgatttttaatttttaccaaagccatttatgcacaaagttgtaaaaataagattatatcaaaaatctcatattgaaaatgagtttttctctgcttattattactgctttccagaggcaagcatttacaactctttttagctatttcttctatttacctccatatttctaatacttttaagtagaggttgatcctgtgatcctgctagtttttattcctggcatacttcattttattgaacttcactttattgcacttcacatattttggtgttttttttgtttgttttttgttttcaaattggaagtttgtggca

SEQ ID NO: 309594 - DNA, 1000 bp, Homo Sapiens
gccaacattttggaattagcctcctccctatcccttgtctctctctctctctctctctgtctctttttttatctgagacggagtttcgctctgttgcccaggctggagtgtggtggcgcgattttggctattttactttatatctaaggtctttcataatatgaaatagaatgtagatattgcaacaagtagcatttttggagacagctgtaactcctttaccaggaataacctttgcatgtcacatttagagataaagctcaaaatgcaaatctttcccctgagagtgggaaagcattaacaaataggcaccacaagtctttacatattcaaaatattaaactaattctaggattgtatacttgatttaagacatggtagttaatagaaaagttctagactgaaaacaattttgcaaaaatatacatttgtatatgtgtgtatatatatgtctatatgtctatctactaggaaaatatattgcttaaggtgtttgtgccatttcttagttaccaattttacattctgtgttcacagcttttgccatcccatctctacacttaaagccaccatattattttgaatcactttatacccattttcaattatctaaataatcgtttatagccataaactaatactgtttagccaatgaagcactttcatgagcaaaaattatagattttttgaacataattccaggaatagttcagtttttgcaattagtaattgtaccttagtcatatgaagcatgaaatcagctattatttttaaaaatcaattgtatattgaccataaagacatagtataaatgtcagaaaaacattctccttcactgtaagaaaacatgtgacattttatttgagttcctaagaaatttcctggatttacaactcttggactttcaccacttgtaaatatgagtatatcctttaccctactacagcttttaccctaggaattcggtatattttattaaaaaaaaaaaaaggcgaaaatg

SEQ ID NO: 309595 - DNA, 1000 bp, Homo Sapiens; identical to SEQ ID NO: 120106

SEQ ID NO: 309596 - DNA, 1000 bp, Homo Sapiens
  misc_feature (109)..(109): n is a, c, g, or t
  misc_feature (313)..(313): n is a, c, g, or t
  misc_feature (372)..(372): n is a, c, g, or t
  misc_feature (427)..(427): n is a, c, g, or t
  misc_feature (429)..(429): n is a, c, g, or t
tttttttttttttttttttttttttttttaagccaagaacttccagtttttattttttaaacatcatttaacaagaaaaaacattcaaccaaattaaaaagaactaggntggattaatttacaataaaataatcaacttaaaatatcggcccttccatttagggccaaggaggccaatagttcctgtttaaacagcagaattgcacaattatttttacctatatttgatggcacaaaaaaataaaagtcttacaacttccacggacatcctcccctccctccagagcagagttcatacaattccatcttaggncagtactcaggcttttaaaaatcatcttacgttttgaaatataatacaactactctggnaacaagaatacttttaaaacaattcttatagaaaacaaataccttagataattgngnggcacattagactgctcaaagaaacagcaaagatgaaaaataatgtacaagaattatagtcccttgtttatagaaaccatccaaataaaatattttccctaattttccttgcttcttataatttattagcagagatgaattacaagaagcagaacgcaccattttttggttcttggttgtagctgccaacttaggagttcatgactataaatataaagcaaatatgattatgctcacaagctctggaatggtaaaaaaaccccacatatctctaaagtgtttctctatccttgctttcaggtcatgacaaaaaaattcacagcagtttaaaggatggtgaaagactaaacatgggcccactaaaatagagattaattttacctattacactcctatagtaaaaattgtaataagtatgatattgtattaagtaacattctatagtaagccgttggagcaaatacagcatttaacaggttcatttacagatccggcatggtagccttcagacagaacatcttattttcactcttgaacatgtaacctttaaaaaaaccaaaaggaatatgta

SEQ ID NO: 309597 - DNA, 1000 bp, Homo Sapiens
gatgagaagatcagagtcaggggtagccccaaagagatggggtgcctggagcactaaacccacaggctggaaggtgaggaggagtctaggatccctttagcccaaagctgttgccccctggcctgatgggtagctgagggcctgtcttagtgcattattatccctcatggtgcagcattgcccttccccttctcaggtattctgctgggtgaacatggtcctcagacactttcctcccaaggagggggagagtcaggccgtggaaggcagcagggaggtttgggtgacaccacgtccagttagccctggaatgaacaggcttctccagatgccatggaatgaacaggcttctccagatgccagatggctctgtggctggcccttctcctcccttccccctccccatgcccactctgcaggagtggctgccttcttcatgcagtccggcttcctggctagcccagagcttaacttagcaggaatcatgacaaaaccggcccagaccacatcgtgcaaagagcctgatctttgaagccaagcagaataggttcaaatcccaattctgccaccaacctgctgtgtggcctacggcaaatcatttcatcttcaggggccctggcgtcttctacaaatggggacacgtatctctaccttctaaggatgttgtaaagattagagcgaatgtatgcaaaatctcagagagattcttcacacatggtaagtgctcaagaaataccagttccctaatggcttattcaggccctgcctcgtggctctaggattctaaaagtcatatctaagcaatacactaaagaaggctgtgccatggagcgggggtgaaatgggggtgggggtagaagtgaatgagtaggagttgaggtggcgtggctgggcccatagtggtgattgggagggcttcaggccaagaagaatgggacaaattaaggagacaagctgagaagggctgtgagagatagcctcggcacaccctcacaggcag

SEQ ID NO: 309598 - DNA, 1000 bp, Homo Sapiens
ccaattatcaactcaccgtttcttatttatgtcaaagtatatatttttcttacatacttaacatatgtagcattattgttcagtatttgtgtacagctcattttttttaagttactaaggttttttattaacacctcagagtagaggttatgaaaggaccctgaattgttccaggaattttcttcagtgagcatttgtgaagactcggggatcaaggttgggttaaactttgtgatgggtccattggcagtctagtcacaagcacctcctcgatccttaggtcccagcggaaaatgatgccagactcttaaactgccacaaggtagcctggaaagaactctacagtccagaaagagcctggaaagtggttttgtgagatgaaatttactcctggtgaaaatgctgtgaatattgtttagcctacaacaaaggatttagaatattgataaacatagtaaaacagtggcagggtgtgagaggactgactccaattttgaaagaagttctactatgggtaaaatgcttatcaaacagtatcgcatggtacactgaaatctttcgtggaaggaagagtcagttaatgtggcaaatttcattgttttcttttaagaaattgttacaaccacttcaatattcagcaaccatcgcccttatcaggcagcagccaacaacatcaaggcaagacccttcaccagcaaaaagactaagactccctgaaggctcaggtgatcattagcattttcagcaataaaagatttttatattttttctttgttttaaataattgagcttcaagtaagggcagcaagtagtttttcttctttttctttctgtttttcttttttcttttctttttttaaagacgtgttttgccatgttgtccaggctggtcttgaactcctgaattcaagtaatcaacctgtcttggcctcccaaagtgatgggattacaggtatgagccaccgaacccagccagcatcaagagttttaaaattaagga

SEQ ID NO: 309599 - DNA, 1000 bp, Homo Sapiens
attctgaggcatctgctatttgctaaggcggatagccagtaacaatgatctactacttcttggagagctgattttttctaggatcagtgggagtgaacaatttttttttttttttttttttttaaagaagagagatttacttcttacagttctgaaggccgggaagtcttccagcctcagatggaagacggaggggccacaactggccagggccttaatatttcatcctcccatggcagaaggaagggagaagaggagggaagagagagagagagagaaagaaagaaagagagagagagagagggacgggtggggatggggataaaggtttggagaagaagagggctgaactcatccttttatcgggaacccacttcttagataactaacccactcccacaataatggcattaatccattcatgagggctctgcctagtacctcttaaaggtcccacctctcagtgctgttgctctggggattaagtttccaacgcatgagctgtgggggacacattcataccacagcaagctctattcacaacatctatttcttgtggagtcggatttggtattctgtgtcttcctaggaatttgtccatttcatttatctaacttgtttgcattcaattattcatattatttctttctaataatttttatttctataagattggtaataaaatcttgacttttgtttctgattctagtaatttgagtcttttgggggtggtgggcaatctagctaaatgtttgccattttgttgatcttttcaaagaaccaggtttgatttcataatttttttctttattgcttttctattctctatttcatttatttctgctctaggctttccttctttctgctttctttggactgttattatcaattattgagtgtgttgtatgaatataccacattatgactatgtattggtgaagttttcttaagaacttcaatttttgttaaaatttgcctcatatattttgggtatatgttg

SEQ ID NO: 309600 - DNA, 1000 bp, Homo Sapiens
ttggcctcccagtgttggtattacaggcatgagctaccacatatggcccttgtttcatttcttgctatggcttgcagcaccacctgacagcctatttctttattcattgttatggagacttcttgaaaagaatgtaagttctacaagggcagaagtttttatctgtttaactcattggttatcacttgtctctgcaacagtgcctggctcttgataggtacaaatatttgttgagtaaataaactatatttaacaacacccaggagagtgcttgcacatagtcaacactgaagaaatgtctcctgaggaaaataaatcagtgcaacactttttttggacactctgcaaattcgaagggctgttattaacattctaaggtaatattttatgggaaccatgcaaataataatagtgataaatgcttgacatttattcttgtaataatgttacaattaaaaaaaattatgaacccattttacagatgagaaagcacagagactgtgagttttataacttgtccaaagcaaggatttgcactacattttagggtcatgcacaaagatgtaacagcaagggacactgaccaaggatgttcatggaggggatacaagacggaatatttggtagacaataaagttcaggcaagaagaccctttggtatactgaaccctataactctagagactagggtgccattgattcagagagggaatgttggcagaggtggggtattggaagaatgtgggatgtaggttgggttgggacttctgagacacccataacagtgtgagaatgaaatattctgaggatccaatgttagctgtggtgagtcacagaggtacacagaatgttgtcagggcagaagattgtgggcataagagaatattttcaggatgaactatcatgggagtctagagccttcttgagtgcaaaaaatagaaggtctaggatactggcattgaataaatacttgaagagttagaggatgttgtcaaggatg

SEQ ID NO: 309601 - DNA, 1000 bp, Homo Sapiens
  misc_feature (716)..(815): n is a, c, g, or t
ctgttctgaataactttattgcaagtcacataatcttggtttagacttgacgcaacgggaggttacagagctgtaaataacaactggtcattaccttattgagtttagaaaactttcaagttcgtgacatatgttaattgcacttaaatagacagtgagagaaagatttataaaggcatcattcaaaaggatttttacatttgggtgtgccttactcgattacaaaaatttcaaaccatcttcccacctagggcctagggcgagttttctctttccctgggactgaactatcacaaagcactaaagggtttaagcaaacgtgagtatcactgaaaagcactagaagaaagtctcaatgtggctggaagaaaccagaaggcaagattgcctgggtgagaaagaaaacataaaaatctgtgtgtgagatcacaagcagcaacttctctgtgttgaattcagatgtctttcccacagtcggggcacaggatgtcgtccctctctgtgaggaagccacgccccaccagtgagagggagcacttcttacagttaaagcagtcgttatgccactgccgttcctcaaaggagatgtattttgtgccaccaagtcctgttaacagagagaaactcataccggatgaagaaagttagaatcaggcaactcggactgaagaacgaattctggtctgatccatttcaaagtctggacctgtgcaatnnnnnnnnnnnnnnnnnnnnnnnnnnnnnnnnnnnnnnnnnnnnnnnnnnnnnnnnnnnnnnnnnnnnnnnnnnnnnnnnnnnnnnnnnnnnnnnnnnnncagggtcacaggctaaaatgctaggccttgttcaagcttccaatcgcccctggaaatgggaacccgggacactcaccgctgatggggttggtgcacccagcacacttcttggcatacaagtcacagaagcagttcaggcagtaggcaaagtcatcgcgagctgtgaagcgctgcccagacagctg

SEQ ID NO: 309602 - DNA, 1000 bp, Homo Sapiens
aaaataatttatttcataggtctgttttaatttcatgtctcacagcatacattatttaaccaagaggtgctggacagagattgtaaaaagggaggaaacatttaggataagaaaccggctcaattccattagaatttgatcctatcttgtaaagtcttgctaggataaatttctataatacttcttttgtgcttacaaaaaaacattaacttctgaatttccaatgttgtaaataaaaaaattttacaattaggtatgcattcaattaacacacaaggcaaccaaataaattctgtcatcaacattagcataatgtgtatttcccgtcactgcactaacattaaactaaacttcaaaccacaaaaacattgtgactaacattaaaaaggcaagctgtaagatactcaaagcttataaaggacaaattgcacatggttaagatgggacatcatttgacaagggctggtgttgtgcatatggctgcttttttttataagaaggccaccggcaaacagggcaacaatgtcggcccccagccaaccacatcacaatgcaattctgatgaaacacatgaccacaaggcaaccccattagcaaacatccattttcaaaattctctaggcaaacaacacattcagtacagtgcagcatatcagcaggccaagttaaccaatcaggttccatatcttcattagtgttatatgatccatatgacctccccttcctttcacatgggctggtctgacaatatttattggcacatgaacaagcctcagcatcacagtgacttgctgttcctggagaattgtgaagtacgctttgcttatcttcaaatacttccttctcactactcaaagtgtctgtgttctcactttccgagtcattttcagtatcttgagacccctccgacatttcctcttcagactggactccaagacatttaaatcgccacattggtaagtttttaatataatcagttggtatcagagggtgaagccaa

SEQ ID NO: 309603 - DNA, 1000 bp, Homo Sapiens
tttgaaatccatccatgttgtacacacaatgtgtgtgtgtatctccgggtttgttccttattgatgaaaagtactctcttgtaggaaatcattacacacattacaatatgttaccttttgtgtctagtatctctctctactttgtagaggtgaacagtcaaaagaattagaattgaaacatggagaataaactcaggattccaaaaatgggatagaagcagaagcagtatgttctaggatcttggcagcagtcaaaatgaagtgttttgtggacaacaaagtcatctgtagggaccttaacatcggagcataacgtgagtcgcaaccagggtgcccagtgatctgtataaactaggactacaagataggcatcattaggagatttggctggtatatctgtatttcttaggaaggactggtcttgactctatcctcagctaattgctgttgttgagattgtgtttgctgaataagcttgcattttgctttcttgagttttgttctgttttttttttgtttgtttgtttgttttcttttcttttttttttttttttttttttttttttgagacggagtctcgctctttcacccaagctgcagtgcagtggcactatctcggctcactgcaagctctgcctcctggattcatgccattctcctgcctcagtctcctgagtagctgggattacaggcacatgccaccgcacccggctagttttgtatttttattagagacagggtttctccatgttggtcaggctggtctcgaactcccgacctcgggtaatctgcctgccttggcctcctaaagtgctgggattacaggcatgagccaccgcacctggcctctgctctgtggttcttgagccaaacctgtactgttggatacatgtccatttttgaggccatttctttctgaaggctgaggtttgggtatgggttcttattgaacaagatgttcaaatcttccaattgtttctccatgaacatcatatgttcc

SEQ ID NO: 309604 - DNA, 1000 bp, Homo Sapiens
ccaaccccaacactacctacactaaatctagtacatcaagttagctttttttttttcctgaaaaaaggcaaaaaagactttacattgcatcatacagcagatatcctaaatcagtcaaactatcagaggaaactgttggcgtacagccttacaaacaatttaccctaataaaagttccccagtcagaaaatgtgtttcacacaaaacatttttcccttcttgcatttcactaccttacacattatgtgaaaaatcattaaaaacacctactacatatttaaaaaagccaaaatttcagcaacttttattgactaccttttaaaagccctatgctgctgttttacaaggcataatagaccagctcatttggtcaaagcattctacatcattagtttgaactaacttttactgaaacagctacagcatcaaaagagttaaggcaaattggaattcatagaaaaggataagacacttcacactacgttgaaagaaagacagaaagctaagaaaagagacactgacggcaacactgaattacagcaacactcgcactgcaagcacagaacaccatgggtgaagtcggactatttaaacttcagaaagcccatttcatacagctggaaaaaaaaacacaaattaaacacaaaatgaacaaaaccacaaaaatccggtcatgcacttggataagtcttcatggtctttgtgcatacccagaaaattgaagttttcttttctttttttttttttctttttttgcatcataacatttgataaaaatcttttgtttttgttttttgtttttttttttttactaaaataaacctgttcgggggaacagctactagatgaatttaagggttttatgcaccttatagaacttatagcaaaaatagttttagttgatttcattataaataacgttttcaagaacctgtgcaaaactgtcaataatttcctaaagcacaattgatcagaaaaatccatgattgttcagccttca

SEQ ID NO: 309605 - DNA, 1000 bp, Homo Sapiens
  misc_feature (876)..(975): n is a, c, g, or t
ataaacaggattgtctttatcttcccagcagcttcagcattgaccacaatagttagaagttataaatgagtaattaaaggcaaaaatctggtcctaagccaagagaaccaccctcccctgatgaataaaaaatgaggtaaacagttctccaatatttctccactttattaacgctgaccaccatatttatgtatctaaacattttttataagttttcagtggtgtttagattctgaattatttttccataattaattaggcacgttggtttgtattttatagagaacacatctttaggacacagataagaacaagtataatttgcaaatattacaaagatgatttccaaatctcagttgacctctttcccaactgcaaaccctcatttagtctttagtgacaacagagaccaaaaacaaccacccacacatctcatgtgagattctggtggcttagaaatccctgaaagagcagtaaactgattattgaaaagctcagaacactggcaaggcttaagtgcaaactatttaatagaaggccacaagaactgttttcctaagaggagctaggaactacaaatgtcatttagtaatgcattgaaatggcattgcctagtgtgagtgttgcacagaaacttcaggtcacttcttctggatctattattttggataagcttccactatcatagcatggccctgtaaagaaaacaaagtccaattagagcaatgaatggtgatgaatccacctagtacagggacagcagagaacaaggagaaaagtacaggctttggagtgggatcctggctctgccaatcaatcactgtgatcttgggaaagtttgtagtcagtctaaactggaatttcctctacaaaatnnnnnnnnnnnnnnnnnnnnnnnnnnnnnnnnnnnnnnnnnnnnnnnnnnnnnnnnnnnnnnnnnnnnnnnnnnnnnnnnnnnnnnnnnnnnnnnnnnnnggagggtcctttgacaccatctgta

SEQ ID NO: 309606 - DNA, 1000 bp, Homo Sapiens
cgagaaaaagagcattgtctggttatcagaatatcagatctctcattctggccttgctaggaaatagatctttgattctagaaaagtcaactaatttctatggttcttacttttctcctttataatatacccatttaaattccaaaaaggtatatgataaatcacaataatttcaatcacatggattttaatacaaaatgtataaaatcaatttccaaaaattttctgcatatactgaaaatgtctgtacgaatgagctaactactataggccttccctaatttattctattaaatgtgggtactcaatgtaacctgaaaatattgagcttaactcttctttttttttttcaaaagggaaacttgaaaaagactgcttcccccagaaaatttatcaacaataggtgctcaattaaatgtttttaaacaatgaacaatatcccctttcatataaataatcaggggagagatatttttaagtcttttttttctttttccatagtgtcacctacacaaaaaattatgtaaagacaccacttctatgaggaggtattcattgtagatgtacagaagtcaacggaaacttaagtttacagaaaaaataaaccagattatcattccacccaactgtatattcccacagatgcttaataaaagctatctgatgatataatgaattatcagttcttgaggaagtatatacagttggtgactatttttcaaaaatcatcatccaacaaatttttttcatttaaaatctttcatattaccctttcgacaatcagttgaaattttaaaactaagaacatttaaaaatataaatgaaagtagcattagctatagactgatattcaacttcagacgttaaaataaatacaagtgtgtattaagagtaaaattatgtcaacaatgtataaatgaaaactgccaatgtaattaatgtttcttttaacatatcccatccattgctttccctccaaaagacaaaggtagcaaaagac

SEQ ID NO: 309607 - DNA, 1000 bp, Homo Sapiens
cataacttcattgtcaatttttattttttctgtgaaacacattgcttatatcccttattcattttttagttggattgtcacttttttctaattcatagaaattatttgttgattcattcctaaaagtgtgtatagttttacagattttattaagggccttcattcttagttatgtagcaaatattttccccgattcatttcatgtctttttttatgtgatgaaatacacataacataaaaattaccattttcatcattttaagtgtacagttcagtaacattaagtacattaatactgatgtgtaaccaccactcatcgccaaaacatcttcatcttcctaaccttcattgtatgtctttaaattcattctttgtgtcttatattatacaaaagttttacatttttatctattctaatttatcaaccttttcctttatgacttctggcttttacatcttgtgtagggaaatttttgctggtgctgtattttctatattttcttttaatacctttctagacttgttttaacattttatctttaagccatttgacatttttgtgctggtatgcatggtctgaggtgggcttctaactttactttcttgcaggtggggacctgattatcctaacaccttttttaaaaaatccatcttttcgcctggtgcagtggctcatgtttgtaatcccagcactttgggaggccgaagcaggcggatcacaaggtcaggagatcgagaccatcctggctaacacagtgaaaccccgtctctactaaaaatacaaaatattagccgggcgtggtggtgggtgcctgtagtcccagctactcgggagcctgagacaggagaatcgcttgaacctgggaggcggatgttgcagtgagccgagatcgcgccactgcactccagcctgggtgacagagcgtgactccatctcaaaaaagaaaaaaagatccatctttttttgattattttattatgtcacttttgccaaaaagta

SEQ ID NO: 309608 - DNA, 1000 bp, Homo Sapiens
tgtttgtccttctaagcttagagattggggagcagtggctgcaggtggacatggtagaaaacgtgaaggtggatggttgattggactcagagctttagacctgtcagggataacagtgtccatcttattttcatttgtagctttgagtaaatcaataagtagtgcagggtctccaagtagcctatcctttctggaaaagtgaattcaccacctggctacatcaattaattctttattgctggactactctggcactcccatttttagtaaagtttatgaaggtataataagacattccaaaaacagagtgactccactgcaaaaaagaaagacctgagggcaggaattatgtcttattaaggattgtatctctaggccttagcatagtacattcaacaggtaagatattcaataaatatcactttatgagacaattcatgcattttacaaatgtttattgataatcaatgtatgtcatttttacaggttgtggggctagacaagaaggaaaaaaatcactgtcctcatggaagttaaattgtactgacaaaggaggaaaatgtcagggagttaacaattcagtctctgtggcttcctcctgtcctctccctgaaactgagatccagccaatctgcacatttattctgagagtggccccactttaatgactacacccagctgtctacacaccaggagcggagggaactgtatcctgaggcaccaacccgattacccacccaacagccacagggacttccagtgactagggcatcatcctcaacgccaccaacccctctccttcctgtggcttttctaactggaactggaactcagaaagtacattaatcaccaatttgggaagctataggaaagtatgttttctaatatacagtgagagaatgtgactgataaaaccaattttcttgagactttctccctggaaagtgaatatatgtattcatagggccttcacaagcacagactaacaagcaaagagcta

SEQ ID NO: 309609 - DNA, 1000 bp, Homo Sapiens
aggaggattccagcttcccgggtgaggggagagcactgtccaggcagggctgggccaggaggcctgggctgctgaggcgggaaagcggtggctgtggagggcacgtgctgcccccacctccgtctcggggcctggcttccccactggatggcagaggccgctccaggtgcttccacttggtggcgcccatgagtctgctactggagaagctgtggtctcagggaggagacagacaccacaggccagactgggtggaggaatcttcccctcacaatgtcccctggctaaaagcatccatctagctgcaagtactatcttgattcaacccaggggccgacaatggactgcagcccagggtaagtccagcagttttgcagtcttccgatgccccgtgccatggacctgccggccagagctcctgggctcccgtggaggttagccctgcaggcaccggggaaatggggctatggcctgtgcttcagtcaggacacctgggggctgcactgcggaggccaagggcatctaggagcaggggctgtctccttggggtggagactggcggctgcagcctcagataaggcactagaggactggactggtcctgggagccaggcccagccatgtggtggatgacggtgctcagagagaggatttgggtcctgcgggaggtgacagctgtttctcttttcttttttttgggacggagtctccctctgtcacccaggctggagtgcagtggcgcaatctcagctcactgcaacctctgcctcctgagctcaagagattctcttgcctcagcctcccgagtaactgggattacaggtgcccaccaccactcccggctaatttttgtaattttttttagtagagatggggtttcaccacgttggccaggctggtctcaaactcctgacctcaggtgatccgcccacctcaacctcccaaagtgctgggattacaggagtgagccaccgggcccagcctgttttctcttttctcc

SEQ ID NO: 309610 - DNA, 1000 bp, Homo Sapiens
ttactttctgtcatagcctaggttacccaaaaagtggagactgagaaaaagtcttatttgtaagtagtttatttgagaattttacctcatgtgaagaagtaaggaatagagggggtgttaaatagggaagaagagagaccagttactaggatgacttattgagttggcagccactaggagggactaaggcatatatgcataagctcccaatacctgtatttaagggttgaccaacacggcaacaactcccttgcactttctggttgtgtatgtatgagcattgggctggttttccatgatattctactccatggaatcagaggaaccatatggcaggacacaagaagcagatggaataggcctgagtaaaactgtcagaccgaatctatgtgaagctggtcaaaggctgcacagaattggttattgcaactatggctggaataagagaagatggctgagagaatttgaagtggtggacaagaagtgtctgatacaattcttaaggaagaagtgtctgatacaattcttaatgttttaccggaagtgcttccatggttctagtctactgaaagttgagactgccatttggcaattttggttctttatgttttcaaatcagtaggcaaagaaggggtttactgtactgcctgtggtacttcaatcccagttaacaatggaaaattgtgtttctctgcataatgaggaaagggaagaccatatctgacatgcaggggattcttctgtatgtcacttagtaaaagttaatggaacactattatagcaacccaagaaaaacaataacactgaggattcagactcaaaaggaatgtgggttgaatctagctgaagttatgtaaaagggaacatggaatgggtgtggaagaaggagttgtaaatgtcagttgtggtcttgtgatcagttgtagggtaaggaaaagctagtaggaggtaatatgacacgtgaagagtggttgagataatgatggtgtctggttattaa

SEQ ID NO: 309611 - DNA, 1000 bp, Homo Sapiens
tctagagttctggttaggtaagttagaaatcactttaccctccagattccaacctttcttctgacacatttggcatttacatttacatgtctgggtatgttggattctgaatgtttccttcacatctatcttctattctagttcattaatttctcctcaactgtgtctaaccttctgattaacatgtctactgagggttttatttcaattataatttcttcttttttttttgaaacagagtaagtcttactctgtcgtccaggctggagtgcagtggcacaatctcgactcattgcaactccaagtagctgggactacaggcacatgccaccatgcccagctttttttttttttctttttttgtattttcagtagagatggggtttcaccatgttggccaggctggtcttgaacttctgacctcaggtgatccgccccggcctcccaaagtgctgggattacaggcatgagccaccacacctggcctcaattataatttctaatagctgaatttggttattttcaaatctgattgtttcatgcctatattttcaagcatttttctttctttaaaacttaaaatatattatactttatctcataatactaatatctaacatttgtgcaggtctgcttccacatctgttatctctgcaagttctcattcacagtgcttgcttgtgcattagtagtattttggctgtgaagcactcattttccttcaaacttcatatgttgaaattccttgaagcctgggatgaatgtctggtcctctcaaaaaaactatttacatttgcttcagcctcacacatgagagcattaccagtctaaggcaaccttgaacaaaattacttacttaagatttgtccaacttcccagttagtataatgctggccacactaggagaacagcccatcattataaacactcaaggctttattcactgtcccccaccccactcccttagccccaaagctcaggatgggcaattctccttgcc

SEQ ID NO: 309612 - DNA, 1000 bp, Homo Sapiens
catggcatcgtgttgtttactcggtacaaccagcctgttgtgaaaagggcccgccccctttccagaggcagaaacttgctccaagaggtcggatgctctgccagaggctgcacagcaccagggtgtggaatgtccaggccctgcccatctcagtgcccctccccgctccccaccggccagcacctgctgtcctggactcctggacttcggtgtcatccttgtccccaactctaaacacagagctactcactcccagccctcccctgccacatcctcctgcttggaacagatgagcagccctgggagggctatggtttcgtggggtcgacgaccttgcccagaaagaggacactctgggtgctggtggaaaagatcaccacaaggaagggccggttgaatcgcaggatgtggcgattggtctgggcagagaagaatttgatcgcgaacgtggtggctgctgcagcctcggtgccagcctcatccacgtccaaggtggccttgtggaaactctgggaggaaaatcacaagcattatctccaagccagcaagagagggggcctggacaagactgcgagagccagaaattgctagggaataatattgcacataacagcctgcaaggccatttcttggggataacacagcaagaatttcatttgggcggatttttgagctagagacctcctgccacacacaatcatggtagctctcattaaatgagcacttgctctgtgcccggggctttgcatgcatcttatttgatcttcatggccatcctaagaggtcagcagtatgatgtccattttaaaagtgaggaaaataaattcagaaactagtactccttcaataaccataagaggaagaactggaattcaagcttgaacccaaggctctaccccctcgtgcacttttcttatcagaagtcttgagtctctttctcttatctgcaaagtctccctaatatagacgcacccaatgcagcctcacctgtgtctctcct

SEQ ID NO: 309613 - DNA, 1000 bp, Homo Sapiens
cccaccccctactcacctctagggagaggagagtctgggagttgagttaatcattaatggccaatgaagtcttcataaaaactcaatgaataaagttgcaagagcttttaggttgatgaagacatccacatgcttggagggctactcaccccaacactaccaggacagaagcttctatgtgcaggaccctcccagacttcaccttatgtgcctcttcatctgtatcctttatcaaatgccctatgtaccttttcatctgtcacctttaccaatttctttcttcacctctattcctctgcatcctttatcaaatcctttataacacaccggtaaatggtaatgtttcccttagctctgtgaaccattacagcagatcatccagcccaaggagggtgttgtgggaacccctgatttataaccagtcagaagagaagatgacaacttgtacttgcaattagcatctgtgttggactgttcttgcattgctataaagaaatacctgagactgggtaattttataagaaaagaggtttcctttgctcatggttctgcaagctgtacaggaaacacagtgctggattgtgcttctggggatgcctcaggaagcttttactcgtggaataaggggaaacaggagcaggcagctcacatggtaaaagcaggaacaagagcgagtcagtgggaatgtggtggggggaaaataccacacacttttaaattgccagaaatcataagaactcactcactatcatgaagacagcaccaagccacgagaaatctgcccccatgatctaaacacctcacactaggccccacttccagaattggaaattacaattcaatatgagattgggcagggacaaatatccaaactatatcattatgttcctggcccctcccaaatttcatgtcctgctcatattgcaaaatacaatcatgcccccccaacagtcccctaaattcttaactcattccaacattaactcaaaagtccaaagtc

SEQ ID NO: 309614 - DNA, 1000 bp, Homo Sapiens
ttgcagtgggagggcgttgtgcagtggagtgatgctgacgctccctggctgaggttccagaagggtccctgtggctgcccaggggggcagggtccatggctggttggggtgaggtgccctgggaaatggcattttgttggaaagacccagatatcggatgaggccggggtgggtcttcatgagtcatctcctcttccacccaagatgctcagctgtgggaggactagataggcaggggtgggacgaggagggagggctgcccgggtatgtaagcagagccagaggagtatagggcttgaactgagagcctggcctcccagaaggttttaatagacctacggcacagaaattgacacagcccgtaagttcatgggaggggcctgagaggagacgggtgagacagacgcgtccgagcaggttgggagaaagggcttctctgcgaggcttctctgccaggtcactgtgccacgtgggttacggaactctccttggtgtagggctcaacagggtggagccacgagtccatgagctcttcgtacttgcacagccctaggcctggcatggagtggccagggcgaggctggttctgctgtccgctctccccagggtcccgccacgagggtggcgtggcatggggcacatcgcccggacttcctgtccctcttgggtttaggaatgggatggtgaggcctccctggcagcttgttaggaggagtaaaccaagcgagccgaccagctcccagcagggtcccggcacacagtaggtgctcagcaaacgaagctgtgacctgagggtggagagtcttatggcagggagggagggaggatgtgacaccccttgagtctcctcaattcctgaggatgcgggctgggtgctgtggctcatgcctataatcccagcagtttgggaggccacggtgggaggatcatttgaggcaaaagttcgagaccagcctgagctacatagcgagaccctgtctcgatagaaaaattagccagg

SEQ ID NO: 309615 - DNA, 1000 bp, Homo Sapiens; identical to SEQ ID NO: 120107

SEQ ID NO: 309616 - DNA, 1000 bp, Homo Sapiens
catcgtgatgtcttatttaaggggaacgtgtgggctatttaggctttatgaccctgaagtaggaaccagatgtcggatacagttcactttagctacccccaagtgttatgggcccggagcgaggagagtagcactcttgtgcgggatattgatttcacggaggatggtggtcaagggacccctatctgaggggggtcatccatggggacgagaagggatttgactgtaatgtgctatgtacggtaaatggctttatgtactatgtactgttaagggtgggtaggtttgttggtatcctagtgggtgaggggtggctttggagttgcagttgatgtgtgatagttgaaggttgattgctgtacttgcttgtaagcatgaggagggggttttgatgtggattgggtttttatgtactacaggtggtcaagtatttatggtaccgtacaatattcatggtggctggcagtaatgtacgaaatacatagcggttgttgatgggtgagtcaatacttgggtggtacccaaatctgcttccccatgaaagaacagagaatagtttaaattagaatcttagctttgggtgctaatggtggagttaaagactttttctctgatttgtccttggaaaaaggttttcatctccggtttacaagactggtgtattagtttatactacaaggacaggcccatttgagtattttgttttcaattagggagatagttggtattaggattaggattgttgtgaagtatagtacggatgctacttgtccaatgatggtaaaagggtagcttactggttgtcctccgattcaggttagaatgaggaggtctgcggctaggagtcaataaagtgattggcttagtgggcgaaatattatgctttgttgtttggatatatggaggatggggattattgctaggatgaggatggatagtaatagggcaaggacgcctcctagtttgttagggacggatcggagaattgtgtaggcgaata

SEQ ID NO: 309617 - DNA, 1000 bp, Homo Sapiens
catcgtgatgtcttatttaaggggaacgtgtgggctatttaggctttatggccctgaagtaggaaccagatgtcggatacagttcactttagctacccccaagtgttatgggcccggagcgaggagagtagcactcttgtgcgggatattgatttcacggaggatggtggccaagggacccctatctgaggggggtcatccatggggacgagaagggatttgactgtaatgtgctatgtacggtaaatggctttatgtactatgtactgttaagggtgggtaggtttgttggtatcctagtgggtgagaggtggctttggagttgcagttgatgtgtgatagttgagggttggttgctgtacttgcttgtaagcatggggggggggggttgatgtggattgggtttttatgtactacaggtggtcaagtatttatggtaccgtacaatattcatggtggctggcagtaatgtacgaagtacatagcggttgttgatgggtgagtcaatacttgggtggtacccaaatctgcttccccatgaaagaacagagaatagtttaaattagaatcttagctttgggtgctagtggtggagttaaagactttttctctgatttgtccttggaaaggggttttcatctccggtttacaagactggtgtattagtttatactacaaggacaggcccatttgagtattttgttttcaattagggagatagttggtattaggattaggattgttgtgaagtatagtacggatgctacttgtccaatgatggtaaaagggtagcttactggttgtcctccgattcaggttagaatgaggaggtctgcggctaggagtcaataaagtgattggcttagtgggcgaaatattatgctttgttgtttggatatatggaggatggggattattgctaggatgaggatggatattaatagggcaaggacgcctcctagtttgttagggacggatcggagaattgtgtaggcgaata

SEQ ID NO: 309618 - DNA, 1000 bp, Homo Sapiens
catcgtgatgtcttatttaaggggaacgtgtgggctatttaggctttatggccctgaagtaggaaccagatgtcggatacagttcactttagctacccccaagtgttatgggcccggagcgaggagagtagcactcttgtgcgggatattgatttcacggaggatggtggtcaagggacccctatctgaggggggtcatccatgggggcgagaagggatttgactgtaatgtgctatgtacggtgaatggctttatgtactatgtactgttaagggtgggtaggtttgttggtatcctagtgggtgaggggtggctttggagttgcagttgatgtgtgatagttgaaggttgattgctgtacttgcttgtaagcatggggagggggttttgatgtggattgggtttttatgtactacaggtggtcaagtatttatggtaccgtacaatattcatggtggctggcagtaatgtacgaaatacatagcggttgttgatgggtgagtcaatacttgggtggtacccaaatctgcttccccatgaaagaacagagaatagtttaaattagaatcttagctttgggtgctaatggtggagttaaagactttttctctgatttgtccttggaaaaaggttttcatctccggtttacaagactggtgtattagtttatactacaaggacaggcccatttgagtattttgttttcaactagggagatagttggtattaggattaggattgttgtgaagtatagtacggatgctacttgtccaatgatggtaaaagggtagcttactggttgtcctccgattcaggttagaatgaggaggtctgcggctaggagtcaataaagtgattggcttagtgggcgaaatattatgctttgttgtttggatatatggaggatggggattattgctaggatgaggatggatagtaatagggcaaggacgcctcctagtttgttagggacggatcggagaattgtgtaggcgaata

SEQ ID NO: 309619 - DNA, 1000 bp, Homo Sapiens
catcgtgatgtcttatttaaggggaacgtgtgggctatttaggctttatggccctgaagtaggaaccagatgtcggatacagttcactttagctacccccaagtgttatgggcccggagcgaggagagtagcactcttgtgcgggatattgatttcacggaggatggtggtcaagggacccctatctgaggggggtcatccatggggacgagaagggatttgactataatgtgctatgtacggtaaatggctttatgtgctatgtgctgttaagggtgggtaggtttgttggtatcctagtgggtgaggggtggctttggggttgcagttgatgtgttatagttgagggttgattgctgtacttgcttgtaagcatggggggggggggttgatgtggattgggtttttatgtactacaggtggtcaagtatttatggtactgtacaatattcatggtggctggcagtaatgtacgaaatacatagcggttgttgatgggtgagtcaatacttgggtggtacccaaatctgcttccccatgaaagaacagagaatagtttaaattagaatcttagctttgggtgctaatggtggagttaaagactttttctctgatctgtccttggaaaaaggttttcatctccggtttacaagactggtgtattagtttatactacaaggacaggcccatttgagtattttgttttcaattagggagatagttggtattaggattaggattgttgtgaagtatagtacggatgctacttgtccaatgatggtaaaagggtagcttactggttgtcctccgattcaggttagaatgaggaggtctgcggctaggagtcaataaagtgattggcttagtgggcgaaatattatgctttgttgtttggatatatggaggatggggattattgctaggatgaggatggatagtaatagggcaaggacgcctcctagtttgttagggacggatcggagaattgtgtaggcgaata

SEQ ID NO: 309620 - DNA, 1000 bp, Homo Sapiens; identical to SEQ ID NO: 120108

SEQ ID NO: 309621 - DNA, 1000 bp, Homo Sapiens
tggaatagctgagatgcaactttgtgcttgaagaaaacccacatctaccctaaggaatttaggatacttagtacacagtaaattcctgttagtgaatctccaaacaacgtccaaactgcccctggcatttctttcatttccccataaagtttctgtgaccttatggcattcaccttgctcctatcaacattttcccctttagtttggtttttgtttttcttgtctttttgtttgaccctgaggtttctcagtttggacacagagtctctaacttactattgttcaagactagttcgggcatatcccttgattgcagttcctgtgtttcttcccacttctgtggcttgtggtttctcagtaacaaaagggaccctccaccgagggtggaggatccaagttgttgttggctgcagaatgacagcctctggcttgtgatcccttcaaatggtcatgtgatgagtcagtgtttctattattctcccaaaggtcccttcgtgcagaggcctggagtgatgctagttcatcagcgcctacatggaatggagctgttccagttggctacagccacgctccaaagacaacctttcacccctagagaggtgattaatggtgtttaagaggggatgtgggagtatggcagcagaacatcagtttccaaagttggaattcaatcccgagtgaatacacccaagagtgtacaaaacaaaaaatcagcaaaacatagcaaggactccacaggcttccaaattcaagacaagtcattgacaaccttcttctcaatagcaggtctcagcagctgcaggtcagaccacaaaagtgccccagaatgatcatcccaccacattctgtctttctgattatgacaccttatagtcagcgctcccatctaggattaaatttttaaaataatcacaatgtggagactgttgcttgcctgcctcattaaagctggcctctggcaggggggcaggccctttcaaattcaaactatgacttctag

SEQ ID NO: 309622 - DNA, 1000 bp, Homo Sapiens
gctgtggtccgggtgatagtacactagcaaaccaggaaagcacactcccatttccacttggaacacagcaaggccaagagactgaaatggacaggaaggcagggctgccctagcacttggcaggtttgcatcttggggctatatcggggatggcgtcctaggcaaggtaggactttccagcagggccagccgcagtgcacgtgacagagcagcggtgaggagggcagatgctggtagaagtctgtcggggggagcagcaacatatgcaagcatggacttgtatctgtattctgaatatctgaacctggggatacccagaaatacacagaaggaatggagaaatgccccctttaaggtctcaatgcaggtagggagtataaagtcagtatcatgggtgttaatgtaaatacttgtttacagcctcagatagttgttcttaaggatgtctaaaaacagactaaaaaccaaaaaaaaattactgaaatggtaaaaaatgtaatggttgtggttttccctcttatgttcatactttcataatatgtacataacagacagaagtgtttctcatttgaataattgctactttcttttatcggatgctaagaagtttgaaatccattgtttttgggtttttttccagaaacagttctagccttctctatgttgtctatccctgttgacacatcagtctttaccatgtaattttgtttttaaaggcatacctccctctattatatacatggtcttatgtgtatgaattcttttttcaactagaccagtaatcctcaacatgaggtcgaaaaagaaagacgagagtagaggatgaaaggacggcctggcatactaggccatctaaagtgcatccagcagctcacctgcacccccacaaaccataagcatcactgccattctgagctgatgtcgatgggagatgttataactttgaggggagtgaggaggtagaaagagttaataactctgaattactgtaagtttggtg

SEQ ID NO: 309623 - DNA, 1000 bp, Homo Sapiens
cccatttcccactcaccttttccttcatgggtccctggtgatggcaaccccgtctccacccctctgtgggattctgccctgcctcccgcacccatggttcatgaccctgtttcctcccagctcccagcagcaccagcggcctgtcctgagcttccatgtggatccctatgtttgcaacccctccccaggtgaggaggtgcctagatatggggctacagggctgggttgtgggctttgcatttctcggctcctgggaccctcagacagcatctccttcctgctgcccacctctggagccactacctcctgctcctgtcccctggagcctgctttgtagacacaaggaaaacaagtttggcttccctggtctccatttcttcagcagcctgacttctttaccaagctgatgtgaaaagaatgtgacctgggaatgcggaggcttcatttggggtggacagctgctgtctgctgccttggcaggggctcctactcccaagtgggggctgagcccatgagcaggagctcaaggagctgcaggtctgaggccagacctgtttaattctatcccacagagtcgctgcccaacgtggtggtgaatggtgtgctccagggcctctacagcttcagcatcagcccagataaagcccagccaaaggcggcctgtcaccctgctcctctgccaccgatgccctgatcagtccagaggcctttggctgcctcctaagaaagtcatgtgcctctgtcctatgaactccatataaggctgggtcctcctttggcctggacccaggacttaattacccagtgcccagttgtgccacattcccactcaaggctcagaacttggctcgcattggtagctggaggtggtagaatttgtatgctcttagagcccaacagccaaggcagggtcaagaagataagtaataaaagaggaagtcagccaggcgcggtggctgatgcctgtaatcccagcactttgggaggccaagatgggtgg

SEQ ID NO: 309624 - DNA, 1000 bp, Homo Sapiens
gctgctgtcaggaaatagaagagcagagcagagttgggcatggaggctccagctcagacttgggaagatggagaagagccatcccaagtccagagtgaataggtttcatagcacccatctcctctatttgaaggaagcaggcccctaaagggaaacacaggatgcccaactcataagaatcagactgttatgagagtcctttgatatcatgtgaaaaccatgatgggagagagagactgagggtgcagcccaccttcctggccagtgttaaatcaggaaactattttgtttagatcaaaaaatgatattccattttttggtctcccaaggtcatccaaagtttactgacatgcagggacccctgtgtgatctagtgggagtccagagctaggggagtccagctggagcagaagagtctgcaactaggaagggaactcttgtgtgtatgagggttggtaataggctctttttgtatcaagaggaagggaaggaagtcatatcccaagagggcacttaaccttagtcctaattctaggagaactaagaggggctggggcagaaagtcaaagggtcggggtagaaggattggatgccacaaagcattactggggctcattttcccctaagccacttcttggaggaaaaactccatggaacacattagtaagaaagtatacaattattcctgttttatgtgaagattggaataaaaaacagttttgttatttaatattacaaccgctttgtaggaagtgtggatcctggtaaatgatccacctcctgtatgatgactcccctcatcccttttttttctgctggatccctaggtggcttagttatgaagatgggtactatgaactgctgatagtcaaatcatcctgactaattgaagaataatttgaattttctttggcaatccaggagaggagagatttgtgccaaggagataggataagtgagcatttgagactgggttaacttgattcaggttaacctgaat

SEQ ID NO: 309625 - DNA, 1000 bp, Homo Sapiens; identical to SEQ ID NO: 120109

SEQ ID NO: 309626 - DNA, 1000 bp, Homo Sapiens
ggatcagataaaattattttggtagcatgtgctcaaaaacaagtttgtagatatcctattcaaactggcacatgagtgcttttgtattaacataaaatattttgtatgtaacataaaatgtcaagtagaaatccttctggatcaaatgtagagtaagtgattcaggaaagctccaatgtatacataaaatgaatatgctaatttcatgacatactagaatatgcaaatataattctttaatgtcatagagacagaaagtggattcagtgattaacttctctttgtcctttaggacttggtttaacggtccgctttccttggatatattttcttatcctgccctctagccccaggctgaattacttaggcactgttcccctggattcctactttttagagccaggtgcatctctttttgtggtacagataatagtatataatcacctttgattttcttgtctgcattaccatctagactgtactgtccaatatggaaaccacgaggtacatgtgactatttatatttaaattaattaaaattaaattccattaaacattctgttcttaagttgcaatagcaacattttaagtagtctttagccacaggtggctagggctactgtactgcacagtacagatatagaacatttccatcattgcagaaaggtttactgtacaggactctgatagcctctgattcccttaaaggactgatttttgccctttttatttctatattccgtacacctagcacataataggagctcaataagtatttacgggatgaatgagtacaggaagttcaaatgctgagctaagagaaataatttataacctatattattttgaagccgtaaatttaagtttttctcatttatttggttgctctggtgaacattttattgtactttgaaatgatgaattaaaaccaaaattttgagttgtgtacaagattggcaaatatgtgtgcattcaagtggtctgaactccaaagacattg

SEQ ID NO: 309627 - DNA, 588 bp, Homo Sapiens
gctgctgaagttcgtaccactgagacatcctatagggaaaaagaatatacattctttctatgtatatggaaaccatagctccaaagaaagccctcctagcatcaggttgtactcttaaatatcttgcttaatccaaaacatagtttgtcccaggaatattttatttaaatggcatttatagtctaaagcctgtttttaattgagtttggggatgaactttttttctcctccacgaaacacatcttcatgtctttgcttattgtcaacatatcagggcagccttctctggcctcttttatttaaactgcaaccacctcccaccctggaaacatgctctctcttttccctggtttatttttcttcatagtacttacaccaccatctgacctaccacatattttattttcattattggtctgttttcaccacttgaagggtggatgtgggggaaggaatttctgtgcacttggggggtatccctagaacaatgtcaaccacatagtagggtatccaataaatatgcctttaaatgaagtttggtgattttatcaaataaatacatgaaaaacattattttaattagacttg

SEQ ID NO: 309628 - DNA, 1000 bp, Homo Sapiens
tttaagtattttattaaatcagacaaggaatctccacactgttgcacataacagcttttatacaatgataaggacatatcatttgtttacaaagaaagtctaaaatttcaagaacattcaaagagctaacacagtaaaggtcatgcaagttctagaatagtgaatcatgacagaactcattcattttatcctttacctccaaaaggcccatctccttaacgagaagacatctcaagaccaggagcttgtcactagtctgatatttcattcaggaatattgagcctgttagcacggtactggcttgataggaagtaactcaaccctaactgtagaaaagggttttctgaagagactcactgctgcaaaatgcatgccctgtattcatattgtgttatacgatgaacatgccacatgctttcatttaagtacgtgtgcgtaacacccgaaccaggaatctcagctatgaccttttcacttagctacgctaaatgtcagtccaagataaaagaggagattaaagataaaactgaagattaaagagactgtgagtagtgacacattcaagtgaggctgtaaatctaggtaagtgacactaagaacctgaagagaccctatgaacttttccctagaaggccgtttccaactgccctatgacaaacagctgatcatcacgtttataatgatggttcactcacgaagcttcgaacttattcatacctacatttaattgatcaccacgaatgggtaggcagacgtgtcagaccttcaggggactctccttccccacagcccccaaaccttctatacaaagtccccctgctttaagtcaaaaggtcaattctggattaaaacttgtccgcactaagtttataggaggtaacatgcaaataatgtgataaagttaaaatgacttgtcaatagcaaacattataaatgtatgctactatctcattaagtagaggacctggagaaaccataaaggtaacaaaaacccaagct

SEQ ID NO: 309629 - DNA, 1000 bp, Homo Sapiens
gtggattcaggactcaaaatgccaggagtggcctcctgtgaaggatgtgctcttaataaaataacgagcaattccttataaagctctgaataagattaagtctaaaatcttcctttggtttacatataggatgcattcctggaaaattcaagtatgttaaaagtatgtcacaaaaattttttgtggttacctataaaaaagtttataggcttagagaattataaacatgtttccacctacatgaattgtatcacgtagatttatgtgtagacaggggaccatgcttcagtgtactgggctctcccttacaatgcagggggtctaacatgcctggtccctgccctcaaaatactagacatcccctccccatcactgcaaaacccaagcaccctgcaacccacctctccccacatctccagattgtccccagggggcactgctggccaaggttgggaatcaccactggggacggagggaaaggctgggttgagctgagctcaggctctcctctctgctgccttcactgcccaaataactgcattccacatcgtcgggatttctgctgagccaagcccaaagttctggaagccccaagtgtcttataagctcgttcacaactccaggaaagagaagcagcccatatttcaggcagaggagcaggctgtcatttcctcttagatgacatgccaagtttccagaaaatcgcccccaaaaaatcaatatgggacagatttgctagtgagtccaccaacacccaccatcacaggtacacaaaggcaggtgatcgaagggaggaaaaaaaagatatccatgggaggaatgacagtcttcaagctctgaaaacaagtgggtgtgcttgctgtgggtggggggagatgggggtagtgagaagaaatctttgggctttccccaaaaaaggttatcccttctctcagggataaactttttgaagtcccttagaattttttttaatccaagatctcctttatctatttttgta

SEQ ID NO: 309630 - DNA, 1000 bp, Homo Sapiens
tgcagtgagccaagaccacaccactgcaccccagcatgggtgacagagtgagaccgtgtctcaaaaaagacaaaaaaagcccttctttatcgggctgggcgaggtttccatgcagtaacccatccaatcaggatgtgctgctcaaagtcttacatcttcacctcaaggaaattcagcaaccgcaaaacacctgctgactcctgccgagatcccgccactgcactacagcctgggtgacagagctagactccgtctccaaaaaaaagcattctttttttttttttttaaagaaatgatcaattaaaaaacctttaatgctcagttttcacaaacacaatcaagtctatcaaatttccggatttacagcaaaatgtgccagctaaaaaggtgtacattcttcagtttctcctatactatttttttttgtgcctatctttcaaaactgagcactgggtatttttaacataagccatgtcatatgtacattttaactatgtttcaggaataaatgaaatccatgatatgaattttcagtaactcatagtgtatttataaaatgaaaagttctctatcaaaatacacttttcactgggaaaaataaataaaatagacaaatggacctacacaaagtaaacattaactttggtagatttcagtgtagttcataacaaggatatttgcccttattcccccagagctgctcaactaccaagaattttttaaatatttttaactgagattttattatgttaacatttgtttctcattccacatcatcttcagccaagctctgagcacttagaattctctaattgttgggagcttagtcaaagcatctggaacactagtggtggaagagtttgctgtaaggcctgcagtaactgctgtggctgtccacacacagcaattccgtttgtcagatggtctacgcccttctcatattcaccttgagctagtaactcttcaccaagctgtatttcttcaaggaagaacttctgaa

SEQ ID NO: 309631 - DNA, 1000 bp, Homo Sapiens
tctatagaatgttctttattcagatgtattaggtactagtatattacttaaaaatattcttcccaataaagcatttaatttgctttagataactaatatttctgtttgttttctataatgtattactagaaaaaactactatttttacattcaaaaattgaacaccaccatataatgaaaattcatgaaagttacagacgtatactttccaggcagcatagctcattatatatgaacaaaatttagagcaaacttatcaaattacttctagtaatttgatctaactttctaatgtccctgtgtataaatactaacacgtgtgtgtgcatgtgtgtgtgtgtgtgtgcacgcgtgcatgctcatgtttattatggaacctatggaaatataacatctaaaagacaattgatactacactatctccacaaaaattaaaatccttaaatctttgtataaaaacttaaatgagtaaagacttaggtagtacaaacattttatttatcatatgcttactatatttaaagataagcaaaggaaaaaatatatatatatattaaattttgtgtactggtgtacattttctctatacttactctgtcaccttttagacccatgtcacctttgaatcctggaaaaccatcttcaccctaaaacattataaaaggaattaaataggagtttaatcagtcctttggagtaacctaaaatattgctataaaaatttatgtgctgataatgagggaaaattatttttgagaaatgtgcatggtagttgtgaaacttcctcctcccttttccaactccagccacagattctgatccccaatatcatctcatattttcacatttattggctataaattaccctaggacatttttcacaaatatgttcattaaatcttattttatgagggaaataaccattctcccataacaacatgtattctatactggttaaacaaataaaaagtaaatatttagccaggtgtggtggttcaca

SEQ ID NO: 309632 - DNA, 1000 bp, Homo Sapiens
tccctctgtctgtctgtctgtctgcagccttcctttccctgccctgagtctctgaatctgtgtctcgttctatgtgtcattccctgtcattcagtaattctgactttgtgtgatttttctctttctgtccctatgtgtctgtctgcctttctctgtcctcgtccctgtctccatctccactcttctctctctgtctggctctgtgtggccctttctctaattccttctatctttgtgtctctcagtcagtctctctgactgcatctctggcaatttgtcttgaaatccctcttcttccatctaatctccgtctctctttttcctcccgtcccagccactccctctccacagccccagcccaggtgggcccctggcctcccctaggccgctcccttctcctttgcaaggagagggggggtgtgctgggatgtcacacaggtggggctgctgccaggcacaggggcaggaccggagggtgggggaggcaggtcagggcctgtggaagccgagtccaggaaagggaacagagcccttggctgtgctccaccccagggctcctctggggcctcgctcctctgctgacccttcccctgcccgcttctccctgccgcccaggcagcccgagtccagctgttcacttactggctgctgtgagacctctgcccgatgacttccagtcccgcagccacctcaacctctgcatctgcggaacccgagcgcagattcctgcttctcccagcttgtttgttttcagttaggtcccttcccttggctttcctcccctctctcccctgaccaggtgtggagcaaggcaggggagggcctaggttctgacagcagccagccctggcctcaaacctaggtgcttcctcttcctactactatgactacccttatgacgtggggacaagggactccacccctgcaaggctcagtttcttcatctgagagatgggggtgacagacctgcttgcaggggaggttgggatcaggcttccag

SEQ ID NO: 309633 - DNA, 678 bp, Homo Sapiens
tgtacattgtgatacacgttttgacaggaatagatatgcatttagtcatgagggaggctggcagcaaccaccatgcatacattttgcacaaactcttggctccgtcaaccctgaatgagaagtcggcgcctcgtcctggcggggctgggctgcaccctcttgatgccctgtacctagtgtctctaagcagtggtttcctttccttgcctgctttcaccgagcagtggatatgtgccttggactcgtagtacacccagtcgaagccggcctccaccgccaggcgggccagcatgccgtacttgctgcggtcgcggtcagacgtggtgatgtccactgcgcggccctcgtagtgcagagactcctctgagtggtggccatcttcgtcccagccctcggtcacccgcagtttcactcctggccactggttcatcaccgagatggccaaagcgttcaacttgtcctcacacctcgaagagccgggccctgggctggggaagagggacagcatttgcggaggagcgtggaggagcacgtcctctcagggtagagctgggggcctttctccaggtcctgaaacagccgatgctcctagcgaggcctgagcgtctttcctggcggccccagagcgcacattaaatctatttagtgtagcggctcgggaccccactccaggcttca

SEQ ID NO: 309634 - DNA, 937 bp, Homo Sapiens
tcagatgtatctgccaggacggtctttatagatgttgaggaggtcaagaataaatcttgtttgacctttaccgatgatggatgtgggatgacacctcataaactacaccgaatgctcagctttggctttacagataaagtaataaagaagagccagtgtcccattggggtctttggtaatggtttcaagtcaggctccatgcggctaggaaaggacgcccttgtcttcaccaagaatgggggtactctcactgttggacttctatcacagacctatctggaatgtgtccaggcccaggcagttattgtaccaattgttccattcaaccagcaaaacaaaaaaatgattattaccgaggattcattgcccagcctagaagccatcttgaactattccattttcaaccgtgaaaatgacctgctggcccagtttgatgccatcccaggcaaaaaaggcactcgtgttctcatttggagcatccgcagaaataaaaatggaaaatctgagttggactttgatacagatcaatatgacatcctggtatcagactttgacacagaagaaaaaatgactggcggtgttacctctgagctaccagaaacagaatattctttaagggcattttgtggtattctatacatgaagccacgcatgaaaatttttctgcgtcaaaagaaggtgactacccagatgattgccaagagcctggccaatgtagaatatgatacatataaacctaccttcacaaataagcaggtgagaatcacctttgggttctcttgcaagaatagtaaccagtttggaataatgatgtatcataacaaccgactcataaaatcttttgagaaggtggggtgccaggtgaagccaactcgtggagaaggtgtaggagtaattggagtcattgagtgcaatttcctaaaacctgcctgcaaca

SEQ ID NO: 309635 - DNA, 1000 bp, Homo Sapiens
cacactatgaccgaccaacaaagttcccggagctgaccagaaccactatcccaccccagccagccattcattgccaccgttacatattacttatggatgtgcaaataaccttttcttttctttatatccactgcctcattccccgctacacacatactattgtctttatactctccaccaaagcaagcataaccttcagcctctacctctaaacaaaatttggcatcaggagactgagaaatttaagaatggcatgaaaatgtctactgcagtacatcaaagaacagttgaattgtaacatgatgtttaggagaaatctccaatccattcaacagctatctattgaatgcctactttgcagtcattttggggaatacaaagtaagatttgttccttgttcaaggagcagaggtttaatagaagctcttactgctgggccagagtatcaagggccaggacttcccattgactaggggcaaaccaccagttgtctacatttccaatcactaaaaataaccagggcttgcatgttataaaatttaagtaaaactgacttgaatacaaactacttaaaatttttctgtgcttaattttaattaaaaatgttcttatttctgtctcctcctttttgtcttttgctttgtgggctgttttcctagcctttttcctggtgatttcaaagttaagtatagtcttttattctgctagtggttgctttgaaatactatttctgtactctaacaaagtagaggataaattgcttatttactttttacctgtatttaaaagctcattttccagttctggctaatgaggttttagaccctgatggtctctttacattgtgtcatttctaaaagcaactctttaatgtttacttagataggttaacaaaatttcacttattttgtggtttccccattctgaaggttgactgataaggacctacattttctagaatgtttgcaggaagtatattataagctcttctcgtctgaga

SEQ ID NO: 309636 - DNA, 1000 bp, Homo Sapiens
tcatgaattaagacctgagcctcaaagcacttgaatgacttgcccacaatcacacaagtaaatggagacactggcttagactttggttttcactctcccagggagttcactgtcacatattgtgtgagttcatttaagcttctccaggagcctgctgatgatttctaaaaagtttatagagtccagaagaagactggggtctgacaatcccgtgagtagagaatgaatcagaaagaaatgtctaattttagttacagtcacttctgtggttccacaggctggaaaaatagcaattactttagtgttgttactgagaagacctcccagtgcttctcctagtgccctcttaataaagtcttaggggagtactcacccataaggacagtgtccccgtattgaacataatacatgattttcaatccttagagcaaccttacaaagtcatagttctattcttattttacattggagctaagtagactctcagagaaatggagcccaaggcacacagttgataaggagtgaatttgagttttggctttctccaaaagccacgctactcaaaacaccagaaaaatggaaagcactgtattaacgctcattctcggtgtctttctctcctctttttattctatgtccagattttctacttattattgattaaccctattgttcacatatcctttgtttgaagctccttcaagtcctttatggaaagatagggttataaataaatcatttggtatgtataacatatatgcatatgtattggcttaatgattcatggcttcaactgagaaacccttgctagtgtcaaccacacagaaaactgcaggagtttcacttcctgttttgccaactttaagcatgaagcaattgggtgtggaagaaagaaagtgtccttgagtgacctggaggcccaggctcaggttttgtcactttcctactctgtgggctattgaaaaatttacttcattgaacttcagctttcccatcaata

SEQ ID NO: 309637 - DNA, 1000 bp, Homo Sapiens
ctgtcactgatgtaggaagagtgttggcctttttgagttgttctctgcgctcaagcctggacactggtgtctctggcttcttctcttctggctgagtggtgggcttgtgcagggaactagctctgctgacgctgctgcttccaggctgtggggtgacactgacttgttctctggcgagcttctctgcctgtttggcctccctggcctgcttcctctcttcccgagttgcctgctgctcccgaaaccccttctgtttctgcagcgccagcgttatccacagtggctgcgcggtctcaaccttctccacaagtttggagccatctaaggagtgtctgctctgaagcatcggcttttcagagggcttcacagtagcaagctggtggggccagggccccacatacgcatatgcagggcctttcctccccgcctccggcgttgggacaggcttctcttgcccagtggatggcaccggggaagcgggtttcctctcggtttccacctcttcctccttatcccgcttctgctcctttctctcctcaggtggcgggggtgagggcggccagccgctgtcccggccctccttgcacggctcgctgggctccatctcgggcttccccacccggcgagtcagcaactccaccaagtagggcctgctcaccttggagagcggggagggtggtggggtctggcccgcaggcttgggcgccagggctggcttctgggacaggggcaacctgtttgccgccttgtcctgctccggagccgggggctggctacctgccagtgggggcccgggctgggccacaggaggagagaggctgggagggctttcagaggagtccttccagggggccggggctggcttcctctctggggggagcaaggggccaggcttgagggctgcagcctccgtctctggctctccatgtgtgctccctggggctgacggcgccccatcgatactgtcccctgtgctgctgtgccttttcttcttcttctg

SEQ ID NO: 309638 - DNA, 1000 bp, Homo Sapiens
taccttcccagatgtatcacaaaggtttctaaattgaaagtgttaagcagcttccatacgtacttgatgtaaactgtgagaattttcacaactctacattcactccccacataatgtcatactcaggcaggttctgtacttgatgtgttacttggagattcaatcatcagtcttgggtcaatcaactctctccaaaatacagtgatcttgctctcctgtgtcacagcgtagtccactatctctgttccattttcattgtgataaaccaaatcaaatttcccaggttctctcaaggcgggtaaggatgaaacaatttctatatctacttgctgggtctctggattggggcttaatattcttctggatgttagttctaaaagcttaaatgcaatcttttcttcaacttgaggggcagctgctaacagtggtaacagactatagtccttcttgggtgtctctactggattctggataatagtagatgaatttgttaccaggtcatttaattgctgttgcctctggttctcagtgcttctatttacaacacaggaaacaggatgcccttgtcctcgacctctcccccgcatgccccgtcccctagctccctttcaagaaaaaaggttatctcctctaccccatcttcttcctaaactggtggggagagacacactgagaggaggaccaggagcctgtccgccaccatttgagcaagaacgcctccatccagcagcacctacagtctgtcatgacaactctgggcccggacaacctcttcctgcaaaaaggcctactgtctttaagaaacccgcagcacactccagggtgcttgatgacatcaagcattggtcatctgactctgaactagagtctgaaataggaagatgttgttccagaggtcttgcccttgctgggggtaagctaaagccagattttatacccagtttgtctgcagttgtatttttggtagagggtccttcctttgataactcagtcggtaatt

SEQ ID NO: 309639 - DNA, 1000 bp, Homo Sapiens
ggtagagacagccataggaaccttcacttctcaatgaagtgttgatgaatgttacagaaaaaggaactctcaagaatggctgcattttacatctcatctctcaagttttactctgaagttactaaagccttcagcgaccagaatctaataaaggtgaatcaccaagtttataaatgaatgaattcctaataaattaaaaatataagggatagcatatgggtaataatgggaaggactgtgcagtttgaagtcactcagacctgggtctgaattctggctcttacagctaagccttcagcaaaccagttaacagctccgagcttcgaagttttattatacaaaggtgacaactaggttcctaagaggaaccttcgtttcccactttgtaaaatggtgataaagctaccaccttacctcatggactgtcaagaaactaaactaagataaagtatgagaaaaattattttgtaaaccttaaagcacaatataggtattaatgattactattataaattacatgtatctttgttcttatggcatctgagttaaaaacaacataaaaccctaacaggcgataaaggtaatctattagatatttttccctaataggttgtttttatgctgaggcatgcccccacacttataaattatgaaaacagaataattatctcttacattgcttgagtcaggctagtcaggaaggccggttacataatttatggaggactttttctaatcctctgctactctcaagaaaacagtagttgggattacatatagcaaaaccttctgaaatcataagaggcactgagacactttttaaaatccctcaaattggtctggccttaaaagatttttacaactcccaggacagttggcctccatgcagccctcaagcagggaggcggaggccctgaggccacactgccacactgggcctggaggcagagcccctgacagcctggcaaatcctctgaaaactctctcctttctaaggtca

SEQ ID NO: 309640 - DNA, 1000 bp, Homo Sapiens
cctaccttgcccagtgctgacccggacctcctccaggatacagcactggagttggccaccacctcttctacttgctgtctgaaaaaacacctgactagtacagctgagatcttggcttctcaacagggcaaagataccaggcctgctgctgaggtcactgccacttctcacatgctgcttaagggagcacaaataaaggtattcgatttttaaagatatgtagcttctcactctctgcctcacgatagggcagggaaggggaaagtcagggtcaagacctagtgagtaggtgttctggtcatgcttcctacattttttttttttttggagatggagtctcactctgtctctcaggctgtaatgcagtggcgcgatcttgactcactgcaacctccgcctcccagtttcaagtgatttttttttttttttttttttgagacggagtctcgctctatatcacccaggctggagtgcagtggtgtgatctcggctcactgcaagctccgcctcccgggttcacgccattctcctgcctcagcctcccgagtagctgggactacaggcgcccgccaccacacccggctaatttttgtatttttagtagagacggggtttcactgtgttagccaggaggtctcgatgtcatgaccttgtgatccatccgcctcggcctcccaaagtgctgggattacaagctttacaggcgtgagccaccgcgcccggctcaagtgattcttgtgtctcagcctcccaagtagctgtgattaaaggcgtatgccaccacacctggctaatttttgtatttttagtggagatggggtttcaccatgttggccagtctggtcttgaactcctgacctccactgatccatgcgcctcggcctcccaaaatgctgggattacaggcgtcagccaccatgcccagcttaatttttttttttttttaattatttgtagagatgggttcttgctatactgccagggctagtctcaaactcct

SEQ ID NO: 309641 - DNA, 1000 bp, Homo Sapiens
caaagtatataataatgttttatgtatatatgtgtgtatatattaatatatatatacacacataatcacaattactatatatttcatatatatagtgtatatatatatataatgtatatatgtacacatgtatgtgaaatacagtgatttttttccagtaaaaatctttttattgtgggaaatcttttctttatttttatttaaaacattttatattttaagttttgtgggtattaggtgtatatatttatggggtacatgagatgttttgatataggcatgcaatgtgtaataatcacatcatgtaatatggggtgtccatcccctcaagcatttatttgtgttacaaacaatccattatactcttttagtcatattaaaatatacaattaaattgctgttgactatagtctccctgttgtgctatcaaataccaggtcttattcattctttttaaaaatttccaacttttattaagttccagggtacatgtgcaggatgtgcaggtttgttacataggtaaacatgtaccatggtgctttgctgcacagatcatctcatcacccaggtatgaagcccagcatccattagctattcttcctgatgctctctctctgccgactccctgccctcaacaggccctagtgtgtgttgttccccatcatgtgtccatgtgttctcatcatttagctcccagaaaattttcaacatagacaaaagtggagagaaaagtataatgaaactccatgtattcattacccaatctaaaaaaattataaacatatggccaatctagttttatttattatctcttcattccccactttcaacttcccagaactaattttaaacaatttctaaagatgatatgattctattcataaacactagttattattattatttaacatagggaatattcatatatataacaggtacaaagtctataatatttaaagctcttttatgttcccatattaaatgtaaatatttgtttaaa

SEQ ID NO: 309642 - DNA, 1000 bp, Homo Sapiens
gaaatttggaacttttattaaatactcattcatccatgtgccaccaccacccagagcaggaaaaaaattatcaaaatggaatttaaaaaaacaaaacaaatcaaacccaatccccagcagtctatgtacagggccactccctgcctctctgccatagagaggttggggggcagctgaggagtggtgggggctgggcaccttttctccagccacaggcccctgaggaattaattgactgtggtgtcaggaagtccctggtgccaagtagccaggcatctcagctggcctccagggaggtggttattgctgggagggcaggacagggcctgctccactgctactgggctgaagagctgtctgtggctcaaccctacagggccagtccccatagcagccccaatctctacctgagaaggggaacagactgagggccagaagggtgttctttaggaggagagtgggcgcccagctgattttgagaggcgggtgccctggtgtagcctggctgttgtcagctcccgaggatgatgcactcccctgattccagctgcctggcccccttcttgagcagggcccccattcccttcagttaggcagttttcttgctgtcttctcaccccagagacctatgtggccaccttctatgtgtcagccacagcctgggcccttgggggcaagagtggccatgcagatggcacttcctccagcatggtgtgggacccagccctcttggactcagcagccactctccgacactgttgtctccagggtcacagccccttgctgcatggccgcagtggccacattgatggcctcctctaaggtctgctgttcctccagctgtggggaagggggtgcagaaggaaggagacagtgagaccctccctgctagattccagtgttagtaatatgtggcctactttttttttttgactctcccccatctacccagtgccacacgctgagcacttagtagggctccaataaacatgaagttcac

SEQ ID NO: 309643 - DNA, 1000 bp, Homo Sapiens
ccatttaatttaacatttattttcattttatatccagatgtcacattttctacattaaaatataatcatgctgactcccccaacccccagccctcagagaaaaaagtgaagaactttacacaacatgaaagatggaatgcacggggtagggaagttgctattgcacccaagtaacaaagaacacagagagaccaacaggacgcatggcagaactgcatagaagatcgctcagggctcacgtcaggaaggcgcaggaattcagaaaactctaaagcttggaaatgctatcgtttgtgccacaaagattaccctgaaaaggtagagagaggtcaaaaagcagaaccaaattggggattttcaaaggctgctctctaacagagtttaaaatatccgtaaacataagtgcttctgctccctccccttgccttcagcatctggtaaacactttagaaacttaaaccactgttagcatgtcagaatgtagaaaggctgtaggtttttctttcttctcatcttgtaccccaaacaacaactctactggcaattgtaatcatgtgactcctctgcttggaaacccagtaaggatcaccaagacaaggggtctcactgctaccagacagataccagctgtgcaaaaagttgcaggattctgtgtattatttggagagggagagctgtaagacacaggaatcccaatacgtaagtactaaagagaaaaagaaaactcctttcactcatctattcattatataggaaagagcaaaaagacagtcaaaaccatctgcttcgagcagcagcacagcccagcaatacaggcataccaacaaaccgaaagcaaacactcaggaaagagcctcttggcccttctcaaaggagacttctctcagactggatcttgcccctaatgtagagaccaaagcattataacttcagagactggtactcttgagggagttgagaggtaaggtctaagagacccaaataacaagactgttatcag

SEQ ID NO: 309644 - DNA, 1000 bp, Homo Sapiens
agcacttggttattttatttcctcaaaaataaaacagaaaggaggcggggccccagctcagcaccaggtgggcagctcggagttgtggcctccctcctccagggctcgcctccgcctttcctcccgcccctactggcagccaacaagtcaacggaattcctggcctttgagatgtcaccccaaatgccacctgagttgagtgaagaaacactctcttggtgaaagcagaagcggagctaccaggccaggcattgctggtggccggcatcacctgagctcgcctgtgtcctgcccagcttcagtgggtcttcccccggccctctgagatgacatcctcgggccgggcgcgcatgtaccactccacccaggagccatcgtagatgggcacgtctggcttgccgcagaggtaggcccctagtgccacgtggcaggctgtgacgccagagccacacgtggccaccagtggcttagacaggtccactttcttctcctggaacagatggcggatctcctcagggctcttctccagcccctcctggctcaggaagtctgtgaaggggatgttcacggtacctgggatgtggccaggttcaatgcctacagcaggggagcagggaggaggggacaaatagaaggatgctatgaatggtacctcgtatttgtggtgctcgagatattgagagcatcccatgcaagcatggtgctaaatcctttatatccaccatctcatttaattctcacaaccataaaacctgagcactgtttagaggagcccccattttatacacggtgatgctgaggttaagtaccacctgaggctaacacatctagcaaattgctgactgaactttgaacctaagaactgggccccaaggtttcctgactatgcaccctagggacagcaaagcaataaacaagacccctgcctagctagaacgtgcagtacctgcaggcaaggagctttaatctggcagggcagacaggcaactgaataattaca

SEQ ID NO: 309645 - DNA, 1000 bp, Homo Sapiens; identical to SEQ ID NO: 120111

SEQ ID NO: 309646 - DNA, 1000 bp, Homo Sapiens
attgaacacataaaaggaagtatatttaaaaaaaattggtcaaactgtcctgttagttatcattttaaaggaatttacagggctgttatagatgattcttttggaatatttcagtttatagcaaatgcctaaactggtttcttcattgcacagtattttctcttaaaatgggtgctttaaaacaattacatacagattaaaaatcatttctttgcttaattaaaacgttaatactcttagacaacacagatctgaaatggtgaaaccagcaattccccccaccccaccttacaacaaattaaattgagacaaaattacaaacacatttcactacatgattattattaataaaaatcagtttctttttttttataaagttgcccaaaatgcaagggatgtgcataggtttacaacttagtcataatagcattttattcttattcccctgggtgtgccccatgaacggaatgtagaatgtactttgctgtagattacagattgttttgtccaacacagacacaccgacagcataaacgctcgcgactgtccacatgcattaagagtcaagacccaacttcaaatctctaaaaggtttacagggtgcttcaaagagacagtatcacattatctggatgttacataaaggacttaaaaaaaaatactattctaaaaaaaaaaaaagagagaaaaaaggcctttaaaaatttatgactgttttgtaatcactacactaattatttcaaataaataaaggaaagaaagatatcccaatattccaatccataaaatcagactctaaaaagaatgtagtgttccacccccagtcaaggtaacagaatcattgtttattattattaaaatagattatagaaagcagcatctattttgtgcagtttttaggggccttggaaataaaaagctatgatttccaaaaatataacattccaaaggattgaataatacatacatttaaagatacattttattaaagtttaggaga

SEQ ID NO: 309647 - DNA, 1000 bp, Homo Sapiens
gacaagttcaagtattctttattcaaagttgaaaaatgtaccatactgcattattgcaaaaattcactggtacaaaacactttgcagctggtgagaaggcaataaaaagttgatttttaaactcattactataaattattcttacagtactttgcaaattcagaatttcaaactgcatgttctttttctaaattgcccacagtactcgaggttcctgaagctaaggcagctgtttcagaggaggggggaggaggtagcagatgtcaagggatttccatttctctttcgatgccgacatacttcagggcatcagcctggctgtatctgtaatcaaaaaacagctcttcgccagtctggatggctctcttggcaaaaatacctatcctgtgatcaccgttaaccatcataacttttgcatagcagtttggatttaccgaatgatttgcaaaacgaattttgttacccttgcgggttgcatccaccacaaaatcattgttcaagttgaacagaaagctgcacatgtatttatcatacactttccctcttctgtcagcttcatcttgagaaataatctctccacagtattctgagatgaattcatttttctgcacaggatctttgataaaaatcccccagcctgccacgtcagatggtgccagcaatagatgctttttggagccccgctgaatactgcagttcttgcaggacacatttttactgtcccaatggtcagcggctccacaagtaagacagaggtcagggtcacactctcggacagccaggtagcacgggcactgcttggtgttgcactgtgctttgcagcggcatcccggaaagcggttttgacactctgaactacattgacaaaacttttcacaaaaattttgtgctatcacacaagggcacgaactgtcacaaggctgccgtggatgatcacagggttgatagttgtaaacatggttagaggagccgtcctttttcagctgtatctttctgcagt

SEQ ID NO: 309648 - DNA, 1000 bp, Homo Sapiens
aactaaaatggtcacttttaatgggaaccagaggtatagttacaattacatagtccgacacaaaaaaacccttgggtgatcaggaattggaaggttacaaaataacgagggtaacactgggtacaggacaaaaagctgttccagaacctggggagccaggctaattaatacggcctctccctgcgatcctgtctgtgctcacccctggaatccatcttgccagggccaaagccacctctgtccccaccaccccggccccctcggaagcctccacggtccccgccgcggccccggtagccgcctcgatcatagcctcctctgccaccacgacgatcatccccgtagttaccccccatgtgagagccacctggtccccctcctgggccatctggtttaggggccttacactggttgcattcattcctccaagagaagttcatattctcacaggtgggattaggacacttccagtcaccagctcgctgctgtcctccaccgccaccacctccactgggaaatcctcctcggccaccaccaccactgccaccacctccatagcctccacggcccatgggtcctcctcgccctcggcctccacgaccattgccaccaccccgattaaagtctgcccggcgagtagcaaatgagaccttgataggatttccggagaattctttaccatcaaaccagtcaatagctgctttagctgaaggtgggtcatcaaaagagaccgttgcctctcccttcagcttgccagtttccctgtctgtgtacaaattaatcatgggctgtcccgttttcttgtttgtcttaataataccaatctgcttgaagtaatcagccacagactcaattgtaacattctcacccaggccttgcacaaagatggtgttgttgtctgaattatcctgttcggagtcatgacgtgatccttggtcccgagggcctttagtgacatggaaaaaaagaacaaaaaaaaaacaaaaacaaggaaaagatg

SEQ ID NO: 309649 - DNA, 1000 bp, Homo Sapiens
ctcttcttctctcggtggatctttgcttttgctcgaaggcctatcgggtggtttaacttctaaagtaggcagaggcctgcctccagtcagtagagggcagggcgtagtgctggattcctcgacactgaaaggactctcctcaattttcccagcttctgcttccggcagaggatttttgagggtctgtaaaaataacgccgctttccttttacgttctgcttgaagctgtttctcttttgactccttagacgcctgggccagcttttcccgggcagcagctgcgaggcgatcttccagcttttgctttgcttgctttgcttctagctcctcctgggtaagttgaggcttcttctcctcaacaactacacagggtggggcaactgctgggttagtgtttgcagcactactagaactttcttggccttctttgctttcttcatcatcatcactgtcatcatctagcttaacacgatttttttccaggggaagcagatcattttctttggccttgattgcaaagcttattggagcaaaggaagctttcaccagcttcccgtccgggacggtcttactggacgatgcctccttcttcccgcctgagcctgcccgtgctcccacctcggctgcgtcttcaggcgcgccatcctccccagcatcacttggcttctcgggagcagagtctgtgggagcctcttctggtgcagacacagcctgcatgctatcgcccccttctttctggaggaagaactgcttcttaaactcataataagcattatactggtgccacggctgcaggaactcaaatctttgatcattcttggcacgaacactggtctcgaacttcaggccgttcctggcgacatactcggccagcttgtcaatcacgggctggacgtcggggggcggggggatgatggcggccacgggggcaagtgcacttgtggtggtggttgtggaggtggccccgctgctagtctctgctgtggttgggggcggtggt

SEQ ID NO: 309650 - DNA, 1000 bp, Homo Sapiens
aatttattatttcattttcatttcagcaagagcaaaaagaacaatccaggtattaaagaacaaaattcctgtcccataacatagtttacagtcatcaagataaaattaacttccttttccctactattgaaacaaaacaaaaaaaataaaaaggatgttatcttaattactattatctaattcagttcatttgtctttactcttccttgatataaaacaccaaaatgtgataaatcagtaatttgaaaatgaaaaatcgaaacagaatgttagacatactcctaatagtaattgtgtgagagccagtcctaacagtcttcctgaatgaacatcaagggactagggaggagtggaaatcaataattttctaacagcacttttatagcaaactaatgagaaatcactttttacaaatgcaaaaaaatgcaatgcatatatattttttaaaccgccattcactgtcttttataaaaatacagtctgtttaaagctaggattggttgggcgcggtggctcatgcctgtaattccagcactctgggaggccgaggcgggtggatcacaaggtcaggagatggagaccatcctggccaacatggtgaaaccccgtctctactaaaaacacaaaaattagccaggcatggtggcatgcggctatagtcccagctattcaggaggctgaggcaagagaatcacttgaacctgggaggtggaggttgtagtaagccaagatggcaccactgcactccagcctgggcaacagagagagaatccatctcaaaagaaaaaaaaaaaagctaggattgtcttctctataaaaaatacttgttctcttcccttagaaaaacattactaaccatgacttcaatccatggcttgacaagtgttacttctaatatctgttatactgttttgatcaaataatacagtaattatcctgaacctcagaaaaactgtctatttgagtgttaaaaacattctcctacagtaacttccataaa

SEQ ID NO: 309651 - DNA, 1000 bp, Homo Sapiens; identical to SEQ ID NO: 120112

SEQ ID NO: 309652 - DNA, 1000 bp, Homo Sapiens
agttatcatacatttatttttaacatagcaccccagtttcacatcatgtatattttccaaagttggagatctttaactatgttcttcacagacttttcaacaagtgtgaaaaagaggcagtaaggttagcttgagtctacaagtcacaatccaaatataggacacctatgtttaaggtcaatatacataatgttcccaatgcttagcaaatgaatgagactctggctgagtaaaatattaacacaacttgttagcacattatcatgaaaagacagaaggcatcaaatatatactttgctgttacactttttactgttcaatgtacttgtagtgaaaaaatatacatttttactttcaaggttaaaatagaccatcagctcattatctctcttagccaatagctatgaagactaaaatggctcttcttgcttctggctcacttgaacatcttatttgtgctgaagacaaaaaggatagcagtgctaaagaaaagggtatacccggttcccaagataggtgcggttgaggttctcgcacaaggtgacttaaaacaaaaataacacaactcagttgatccaatctccacacaatggggttgcataatcaactgttccagccccagagaagagctccctgaaagagctttaggatctggccctgttgttcaacagagggcttcaggatggaactggtatctgaaggtttctttactgtagtttccaaattccaatttaagcacttttaaagtctggtgtctgctggtcttcagagtcataaacccacttctctaatatcccacagccatgacattagcttacagcaagaccagagtattcacaaaacatgaaaaaatgagcatttcccaattgttgacagcagagcaaggcttctgtaactagaacatgtcctgtgtattgaaaccctgcaatgcctcctagaaaaggttcctttatcatcatgtgtgttggcatgtgtagaaaataactatacaagcctaaga

SEQ ID NO: 309653 - DNA, 1000 bp, Homo Sapiens
gttcaaaaattttttattaataattcattttcatagctcagaaaaggatataatcagtagaacaactaaaaacaaaacctcacctctacagagatagccagtgtgtagactttattacataggcacatattaaaaaaaaaaaaacataaactggttttacataaaattaaccacaatagtgcaagaggttacactgaatgagaatggatgatgaatgatggaaaatgtaaggcttggaacagctgaatcattcactggatcttgggttcatccatcctgacgcactgaaatttattacagacattacaagaatggagggtgaggaatggtgcttctctgtcatcgcctggctaaaacactgattttgattaatctcttgaatacggtagttttctccaggttctcttgttaagtagacataaaagttaaatgaatgctggcttaaggtcagaggagttcatatccttctcttccctcacccctatactttagaactctcacacccaacaatttgctgttgggacctgactatacatctgctttcccacaatgctctggtagaataccactggggttgctgatccaaagcacatggaggcgcaacagtgcttaaggcttcagtcatggtgtggggctagacagcatccccaactagaattgagggtttgatctgtggggtaacacgagcaagcaggaagaggatgctggaattccttactctgtccagttggaatcaatccaacacatctgactaccacaaatacaaccagaaaagaaactaaaattacacactcaaacataccatgaaagagatgctattttgtagcttgtacatagtttaaaatttttttaactacaatttgatgttactaagagacaacgaggatacagaggggactgtcccttttctctcatctggttttgccataacttacaaatagtcccaggatgtttactgagtgtcctccttcaattttcacaatattttatacaaaatgac

SEQ ID NO: 309654 - DNA, 1000 bp, Homo Sapiens
agcaataaggtcttatcatgcctaggctggtctcgaactcctggactcatgcaatcctaatgccttggccttccagtgctgggattacaggcgtgagccactgcacccagcctgaagatggcagttttcttgtatgctcacacagcacaaagtgatctcgctctagttccttccttttcttataaggactcgatctcatcggcgagccccaccctcacgatctcacctaagcctagtcacctcccaaaggccccacctcctaataccaccctcctgggggtcagggtttcaacatataaactttggggggggacacaaacatgcagtccttaacaccatcgtcatggaaatggaggccacagacctaccaacacccataaccttaagggcactggtggggacagaggggtcttacccagcactgccatgtggcagaagttctccaacattatgtctctgtagaggcctccaggcagcacttaggaattgccacctcctctggtgaggtcactaccacatcctcaaggcccacagtctcctgaaacaacagaactttgctgcttcatggaggagcgtcagtatgtccacaccataggggtgtagtcacttccctctgccagggagaatggtggaggaagaatggattcctagtgtattttttctcttcagaactgacagcccatcaaggtacaatgaaatagaaaaaaggctggccaggtgccaagtcccagctcaagcctggcagctcctcccactgagcctcatggtcaccccagaggacaggccttcctttcacacatcagaaatagggaacccaagacctcgagagaggaaatgggcccagggacatgccttggcttggggtggcttaggaccagggcaagacgcctgaccccagagcagaccatgctgacactgggcaacacattccctgctctggacctcagttcctttggctactaaggaggcccaacgatcctcgcctgtgtgggacggggct

SEQ ID NO: 309655 - DNA, 1000 bp, Homo Sapiens
gagatagtctcactccgtcacccaggccagagcgcagtggcatgatctcagcccaccgcaacctccgcctcccgggcccaagcggtcctcccgcctcagccacccgagtagctgggaccacaggcgcgcgccaccacgcccagccaatttttgcacttctagtagagccgggatttcaccatgttggccaggcccgtctcgaactcctggcctcaggtgatccacccgcctcggcctcccaaagtgccgggactacaggcatgaagaaccacgcccagccctttatttaattcttaaaacagcccatgattaggagtctgcagcaagctggtccaaaggcacccacccccttttcccactgacccctttgtctcccccaccctgctccagcagaaagccccatccttggcttagggagcgccatgacgactgaaattggttggtggaagctgactttcctccggaaaaagaaatccactcccaaagtgctgtatgagatccctgacacctatgcccaaacagagggagatgcagaacccccgaggcctgacgctggaggccccaacagcgactttaacacccgcctggagaagattgtggacaagagcacaaagggcaagcacgtcaaggtctccaactcaggacgcttcaaggagaagaagaaagtgagagccacgctggcagagaaccctaacctctttgatgatcacgaggaaggacggtcatcaaagtgaagggctgaggagggtgctagcacctcttggctccctgccatcagccagatctgagacaggaccttgccacgctggcctctttggccatagctgaagctgtggggccagttgatacctgctggcaggaaatggctgttttttaggtttgtatttatgtgccgccacttttgtaaggcctgggagatcccagggtcctccaccctccccctgaccacatacaaaggcactctagttcaagggtgaaaagtctcacccaggaggaacag

SEQ ID NO: 309656 - DNA, 1000 bp, Homo Sapiens
aaaaaggacactgagatctgacttaaatttagcagctgactcagaggttctcatcagattatggtatattcaagccttctagaacttgtccttcgttgggcatttcattctccccaacagcctgtgaagattatttgaaatgctcacttactaggagaggtgtacactctataagactcatttgtttctgttattgagacagggtcacccagaccggagtgcagcgacatggtctcagctcactgcaacctctgcctctagggctcaagcaattctcccacctcagcctcccaagcggctgggaccacagacctcgctactctgtattttttgtagggacggggcctcaccatgctggccaagccggcctcaaactcctgggctcaagtgattcaccctcctcggcctcccaaattgccgggattacaggcatgagccactatgcctgacctataagactcatttggatctaaacaaaatactgtcaatttgaatttactcaagacttcaatgaccaatacaatttctgaagaaaactttttttatgaacaggtctagtcaaagcattatttgggtagaactttctggtgtcatttggccttgggtggataacatttgctgtgttccagtaagagattcctgcacaatttcagtagaaacacagatggcacccaggcagcctggctccgatttgtatttgcatttacccgacattggccttcctgtgccacggcatcatgggctgcctgtatggcctgcggaaaaaagaaaataattagcacaaaaatctctagagttatttaaaggccatgctctgtaagttctcttacctcattcttttcaaagcattttgctctgtcttcaggggacattttctctgtttcagaaagaaactgtttcagaactgatccatcctcttaaaaaaaaaatggatgtgttagtataggtaaaataatacaagtgggtacatatttattgttgacttaagcctttgctgaac

SEQ ID NO: 309657 - DNA, 1000 bp, Homo Sapiens
cagaattggaaccaaaatttgcttttaaaatgtgagtttttaacacttgaaggatttcattcttaactctcaattatataattacaaaaaaaatccaagtttcaggaaaacatacttaatcctaacataaaattcatgtcacttatcacaaagacagtcaagtgtataaaggagaaacaaaacagaagcagtatttacaaatttaaactacatgagatgttgtgaacaatcttttgttaataaacagcacgttacatacttttacatactacatttcaaaaatgcatctgtgaataatatgataaagcgcatagtgttgaagactttaaattaaatccaaggtcatcatgttgaagacctgaaattaaattcaaggttgtagtgatgaaaaatttaaagtcaaggtcttagcgataaagactttaaattcaaagacagattgtctaaggacaaaccactagcgttcaagttgtttagtcaattagttctctgtgagtacaaaatattaggaatcactaaatggattagcctaattacaaattttgatcatttctaaataactcacaactgcaagaagtcttttcacagaatgagtcacatagtttctctctatccttgtgcaggtattttaaatccttattcaaaacagttccctctccatttctagatttttgtaagtataaaatattttaaaacaaaggtatgtccattccttagctagagaactattcttccactgactcctggaagagaaaaaaaagattcccatttcttcctctacctcaaaaacacaaagcaaacccaaacaatccaattcctaatgtagtgtcacatagaacccagggcctgaaacaatatttcatgctagttttcctgctatatgcagagaacaatttagttatttacattattgagaaatctatttaacagcctagaatcatcctagtgcttccatcagcagaaggcttgctaaaaaaggcgtgagcagcggcgtctgcga

SEQ ID NO: 309658 - DNA, 1000 bp, Homo Sapiens
gaaaaaggagtttaaaaggtcctgctctatcgttctgtgtctggctctgcaaactgctggtatgtaaaagaccctctttccagacaggccacgaactccctgaaggccgggctggcctcttctctgcctctgtcccaacctccctgacacaccctccatccacgttaataaaacagggaacacaccagagggctcagtagagaaaaacacatcataatgactgatttataatttttatagctttaaaataataaatttatttttttccattaaagtattataacacgattacaaaaagcctatgagaaacagaggagggaaaatatctgagctgctgccaccccacccaaacaatcctagtgaagcctgttgagctttctcttcatctcttccaggcatatagttgcaatgaaagtaaacaaaccagcagtttcaagagggatgagtgctggagctagatgcccaactcctgccttctaaggcagaaacacggacccaagagctgcttctctcctggcacagctgatggagcactttcccttgggacagccgtctgtgcctgcctcacctgtccttgcactcacagtgttccccacttccttccctcagcagcactgccatccccaggcaaggactgaagccagaggcttggcaaaaagagcaaccctctgatactccaagttcaaactgcttcctagctgatagtgagaggccacgtctattctgattttatcaagacaaagacccaaaatacctagaccttcacacaagacagtgcaggctctcttgttgttcattcaccaatgactagcacctggaagacagctgagtctgtggaccaagggcatttccctattattattttgattttatttgtttatttgctttttgagacagggtctcactctgtcactcacgctacaatgcagtggtgtgatcacagctcactgcaacctcaaactccctgggctcaggtgatcctcccaccttagcctgctga

SEQ ID NO: 309659 - DNA, 1000 bp, Homo Sapiens
ctttataaatatttaaatagtttaaatacatatttcataccaaggatataaaaatagcctctgtgtttttttgataaataaagacgttttcatttacatggcaaataacgtgcgaatagctaaccactggccaccagctctatttgactgattgtctaggagatgacatgcagtgataattgtccctttgccttcacaaaaagaaaaatacatcagcaggagctgtgcactcctgaggccaacagtgctatggatattgttcaggaataacaatcaggcactcatgaaaaacctttgccatacttcacaaaagccacatgggacaaaagtcatccacaagttctttgtctaggacttctagctgctcagaccctcagggtctttggattgttaccaaagtctgtcaaacagaccagtagtttaatacctgtacagaaaaatgtttctattatgcttctagtatctagaaattgtttgctacagcatggaggtggttctgcctttccctggctcctcacactcttttctgcaggattcccagctttgctcagtcttcatgcccaccagaggcaaaaaggcaaactaaaactgtcatgcagtggtaggtttgaaattagctgctgcatcatgggcactaatatcatacatttatggctttgttatctttcacttctgctgtgcttgtgacaacttccagtggaaggttctccaaaggttttgtagaagctgatgccattccttcctggttccaagatcctggtaagttttccagactgaaggaactcacagttccctgactgaagctgccctcctctgatctgcttgggagaactaggtgcaaagatgtttccgaagaggagcagacagaagatgagagagttgctgaaatggactgcagaggcgtcaacgtagaatctgaatgtggagagatgcaccttaaaaattgcaaatgaccttcttggacaacctggtagtgggaaggtgaataatcaaggcttgg

SEQ ID NO: 309660 - DNA, 1000 bp, Homo Sapiens
cttttgagacgaagtctcgctctgtcacgcaggctggagtgcagtggcgcaatctcggctcactgcaacctccgccccccaggctcaagcgattctcctgcctcagcctcccgatagccgggactacaggcacgtgccaccacgcctggccaattcttgcacttttagtagagacggggctccaccatgttgaccaggacggacccgatctcctgacctcgcgatccgcccgcctcggcctctcaaagtgctgggactacaggcgcgagccactgcgcccagcctgagggtccggttttctccccacgccaggccacctgccgacagcagcctcacccaggacagtcctgctgctgtccagcaggcgccagccccctggacccagcgcagccccccacctgggaggtgaactgagcagcctcctgcggcgggtcagacttgctgtccccacacacgttgccccgccggatgtccttcaccgacacgttcttcacattgaagccgacgttgtcgccgggcagagcttcgctcagagcctcgtggtgcatctccactgacttcacctcagtggtgatgttcactggcgcaaaggtcaccaccatgcccggccgcaggatgccggtctccacccggcccacgggcaccgtgccaatgccgccaatcttgtacacgtcctgcagcggcaggcgcaggggcttgtccgtggggcgcgtggggggcaggatggtgtccagggcctccagcagggacacgccgcttgcgttgccctccttacgctccaccttccagcccttgaaccacggcatgttgggggagggctccagcatgttgtcgccgtgccagccggagatgggcacaaagggcacggtggccgggttgtagccgatcttcttgatgtaggcgctgacttccttgacgatctcgtcgtagcgcttctcgctgtaggccggctctgtggagtccattttgttcacgcccacgatgagctgcttcacaccca

SEQ ID NO: 309661 - DNA, 1000 bp, Homo Sapiens
cattcaacaaatatttattaagcacctacaatatgccaggcactgtgctgggtgctggggatacaactgtgaacaagatagacacagtccctgccctcaaggagcttacagtctagtagttatacagacgatacacaggcaattacaacgcagtatggtaagtgccgtgatgggggaaagacatgaaaaagggcacctaactcagtctcacaggcaggggggtggtggatagccatggaaatcttttcagggtaagtaaaattcagttggagtattgaaggatgagtacaagttactcaggtaaagaggagacagggaggagttacgcactgaggaaatagtctatgcagtgctccatgtgctgctttggaggttcatttgctgacgggaatagctggatagaagtgagagaagtcctggaagaaataagcaagcgccaggtcatgaaggggctcatgtgatcttctcaagagcttggaatttttcctgagggacttgtgtgtgtgtgtgtgtgtgtgtgtgtgtgtgtgtgtgtgtgtgtgtgatttatactgtttaagattgctcttactgcagcacagagattgaatggcgaatgggatcttgagagttgatggaagaaaatcaatccttcagcttttccaactttatcttccataatatccctgtactctcagtagcccatctaatggcattcattccttaaatgagccactgatgtgcatggctttgggccactgctcactcatatggctcttaacaccttctcctcctgttaaaactcaactcatccttcaaggccagacttctgaaatcatcctaacttgtgctttctgccaataccctaagtacatgatttttatctgtattagagtacttatttattatttcaaatgaaccaaaccttcttttgaaccatgttagtttaattcatacataaggtgatttttataaataaacatgagtataattttctttacaatttccagttgaaaacaaa

SEQ ID NO: 309662 - DNA, 1000 bp, Homo Sapiens
gagatataattcaggtaccaaaatatttagcctttaaagtgaatgattcagtgttttttttttgtatatgattaatgttgtacaattgccaccactgtatatagttctagcacattttcatcacccccaaaagaaaccctgtacgcagtagcagtcaattcccattcttccctgcccccatctcccggtaaccattaatctacttcctgtctctatggatttgcctattctggacatttcatataaatggaatcatatggtatgtggccttttgtgtctgacttctttcacttagcacactgttttagaggtttatctgtgttgcagcatgaatcagtactttattcttttgtactgctgaataatattccattgtatggattaccgcattttgtttattcattaatcagttgatggacaataaacttgtttccactttttagctattaatagtaatactaccatgcacatttgtgttcaagtttttgtgggaacatattatttcagttctcttgggtacatgcctagcagtagaattactgaattacatggtaactctatgttgaacattttgaggaactaccaaacggttttccaaagcagctgcaccatttcacattcccaccaggagagtaccagagtttcaatttttctgcagcctggctaacacttgctattgtagtcatctcagggggtgtgaaatggtgtcttattgtgagttttctttgcattttccctaaagactaatgatgtcacccatcttttcatgtgcttattgaccatgtggatgttgtctttggagaaatgtctattcagaaccttctcctactttcgaattgagtgatttatctttttattgttgagattttaggtatttttctttaaattatttttggagattcctagagaggaggatgccaggttccatccagttaagtcctagctttggagatgaagtgtatgtctattgatttgggtaataattaggtggaaaaactta

SEQ ID NO: 309663 - DNA, 1000 bp, Homo Sapiens
ggtttccaaagtcagttccctttattaaatcattttcacagaccagaaatacaaaatgaaagtagaaataggccccaggtaggagctacaggcctggcctcacatgacccctgctccagcaacttgaacaggacaagcagcagctacatccttaaggtcgggaaagtaagatgaggatttggatcctgcattgccctgcctcccaccctatctctccccaaattataaacagccatccttgggaagcagcagagttaagacgtctccccactgccctagtgacatacacaccaacaggagagcatgttcagatggcacagaatccagggactgcatttcatgaggagaaactggtaccaaaatatgggtggggagtcggggggtgtgagaaggcaagcgcaaagagaaccttcctccgtttctactcatcggatcctgacgctgagtcctctgagctggggggagtactggctagttcttcttcttcagagtcctcgctcctcctcctcttctttttgctcttgttctctcccgaagagctctcatcactagacacaaactctttgctcttgaagctctcgcttagctgccttgaggacgacttggatgatgagcccctagagggcgtggatttcttttccatctttacctttactttcttcttcttctttgacttgtccctgtattggcaagagggaagaggagctgggccttcaggtcccctgtcaccatgaccaaacctctcccagctttaacaaggcctttcccaatcccagccacacagcccatttcactctgaacgtaaatagctgcgtcagcctggagggcaccaagggagagtatcatgagtacaccagaagaatcagagggcacagcctaaagcagcccaatgtgcaaaacctacttgacatttcttgctttatcttttagagttcatgcaaactgtgcactgcactccataatagtatttttttcgttcccccataccttcaaataaaat

SEQ ID NO: 309664 - DNA, 1000 bp, Homo Sapiens
cattttaaagagctttattacaggatattaatatttaggacacttcagagcaccttatacttctaatcagattttgggtaactggttttaaagtgttacttgaatatttttctcatactgtctttcaggtaaagtacttctcagagactgtttaagagatgttaatttgattaaacagtttatccttaataacctgagacatcaatccatggatagcttctatggtagttttacagctggaaaaaaaaacacacatcacatgatgtcataaattgaaaactatttcaaacacacaagatcagccccaatccatccatgtaactccaatgagtttagttttattcatacttctcaaaccaccccaatctgaagttttcccttgtgattttattagtcttccccatgtctttttgaccatttcattacttactagaactttcacaagagaatgacaacgtaaaatttgatacaattgttctgttttagaaggtgagtaaaattatacaaacctgtaattagagattgattctaatattatattatattaaaatctgttattccttgtttattacttaggataatttgacaaataattttaaagaatactatgcttttttctgaaataatcacaagcatcctccaacaatcagaagtcaaacttaggttagcgggtgaaggccttagattttagaaatgataaaaagtataaggcaaaagaaatgacaaaaccccaccaatactcagaagagatgcaattcttgtaaagctaccccaaaaaggaaaattctctacttttgattactacttctgttctatttcttatataattgaagacattgccatagtaaaatttttgcttcataattaataaatgtagataaactgataaatgacatacataaagacagatgaacaaaacacacactcaaagcaagtatctaaaatgactcctgatgccaacgaaaaatacttttttttggagacagagtctcactctgtc

SEQ ID NO: 309665 - DNA, 1000 bp, Homo Sapiens
ctttttaaaaattggttttattttattttatttttttaacagaatctcactatgttgcccaggttggtctcgaactcctgggctcaaatgatcctcccacctcagcctccaaattgctgggattacagacatgacctaccgtcccgggccctcaattcatattttattcttgagccgcttggtcaggtttgattcgcacactccctctgcagtgactccaggagcccctctcacagctcaaagcggaagctgaggctgcagcctgccatcttctccgcatagtccgcatcgaagcgctcattctgcgccacggtgaaggtggtcttccagtccccagccatgcctttcctcatgaagggggagatgctgtggtccatgaactcctgggggacggtggtgtagttggtcatagggttcttcttcatctccttgaacgacgtgtgctgaaccatgaagtccacggtctcctctggcagggagcgccccacaaactccaggatcttttgaatctcccttttcgggttctccttcatgtcttcatagaagaggtagagaacagggtgggtgcggctcagctcccaccactcctgcacgtgctggtaccaggatccgtaggacacttctccgaccatgaacttctccaggaagctgtcccaggtcccaggctcagggtgcaccttggccatgtggtagaagtggtagtaggaaactgccacatcctttgcgttgcgggcaacatagaccacctgcagggggagaagactcaaccccagcaccatcaccacacagcctgtcccaggccagctcatctcttggattggcaaaggaggaacctgaggcttagaggctgacttgtttgagatctcacggcaccggtagggccaagtcaggagctgaaccctgctcagaagccaaagtcctgcctggtccctgagaccatcatattctatagtaatataatctgcatcaatgcgtcacaccccaatctggagcaaggcat

SEQ ID NO: 309666 - DNA, 1000 bp, Homo Sapiens
aaaaatcaaactgtttattgttgctttttgccatttggtagcattttacacaggcttcgatcttcagaataccctggattcagtagaaaaaccttttaaatgaagttttgtacaatagaaacttctcagcagtcaaaatttagactgtaaaaaaatacatgcaaaacatacttttctgaaaacacttaacttggaacaaagcaccaaactacacaaatgcagaatgaaaacagcatttcaactccaccaaaagtagtcatcgtaaaaggtgtaaaagtcacctaacttcactaggcactgttcactttttaaacaagagacaataaaaaatattgcccacaaacaatatcccagctctagggcaggtttcagaaagtcttcatgctttaatagcgacgaggtgagtatgatcgagatctggaacgtgatctgtatctccacgactatagtaaggagaaggtgaccgccttctataaatctgatccctgtcttgggcagctctccatcctcctcctcctccacctcctcctctgtatgatctgctatagtagtcccgatcatcatagccccgatcatatcctctgtcatagtaatcccgacggcgagagctgccataggtaggtctccccatgtaaattcctggtgttggcgtatgtggtctttttgttatagagaaatcaactctgatcctacgcccatcaagctccattccattggcacgttctttagcttccttggcatcatctacattttcaaaatatacaaaggcaaatcctcttgaacgcctagactgctggtcatatacaatagacacatcggcaatgggaccatatttagagaacacttctcttagatctctttctgtggtgtacaagctcagcccaaatactccaagacaacagttaggatcaggatttgcccgattcccaacatgacgcctgcgagtagacatgggagaatggctgtggctgtgccgtctacgataatctcgactgtaaga

SEQ ID NO: 309667 - DNA, 1000 bp, Homo Sapiens
ggttgtggctgagaatgctggagatgctcagttctctccctcacaaggtaggccacaaattcttggtggtgccctcacatctggggtcttcaggcaccagccatgcctgccgaggagtgctgtcaggacagaccatgtccgtgctaggcccaggcacagcccaaccactcctcatccaagtctctcccaggtttctggtcccgatgggcaaggatgacccctccagtggctggtaccccaccatcccactacccctcacatgctctcactctccatcaggtccccaatcctggcttccctcttcacgaactctcaaagaaaaggaaggataaaacctaaataaaccagacagaagcagctctggaacaaaaagtacaaaaagacagccagaggtgtgcggagagggtgaggtggccgcgtggacgtgggtagataatcgcatgcagcactggaactcctgatgaggggtggggtccccacttctcctcaaggtttgagggattgcggggagggggtcagctgactcagagaagtaggatctctgcactggaacttgaggcttcctgtctcctccatgggccccaccagtcacagggacatgaaatccgtggcctggaggagggagagggagagcaggagcagcagcagccacgaggtgttctgagccagcaggctgatgccctcacacttgaccagtttgtctgcagaaagagaagggggccgggggcagggtaggaaggaagacggatcaggactcaggcaggcacaggcccaaagcaagggtgtactccctttgggaggtgggtactgcaatgtcttagctgggaccaggaacagcccggtctcacagaaccagccatctttcccatttgcagattactgatctcttgcacacatatcatcttatgaaaaccttactaaacatcatgacaagaaaactggctgagggaggtggtgtcatccctgttttcccgctgggagaaggaagattagggaggcc

SEQ ID NO: 309668 - DNA, 1000 bp, Homo Sapiens
gagacggagtctcgctctgtcacccaagctggagtgcaacggcgccatctcggctcactgcaacctcctccccctgggttcaagcgattttcctgcctcagcctccagagtagctggggttacaggcacgtcccaccacacccggctgatttttgtatttttagtagagacggggtttcactatgttggccaggctggtctcaaactcctgacctcaggagatccacccgcctcagctgggcccagccccttttctctcaatttaaaaactgctttaaaaactgcaaatcaagtattgggttaataccactttactattattaactgattcctctaatattccagaaagagcacaagattttttccatttttgatagctgcctattgtcagttttaactggagctgaaaaacagaagacttaaataaactgaaagccatcatcgagttttaaaaagggacactgaaataatccttcttgaagatattttctttaacagccacttatttctaccctgcaaaaagcttgaaatataaaattagtatttaaagcaccatacaaaataaaaaaaccagacaaaggagtaaggtatgttccaatttaatctttatgcaggcaaatttgtaaaaaatgttaatcacatctacatgaagtcgcaaaagagatgcaataattattgctcacttttaaacattaccttatattacggaaatttggctacttactctcatcactattacatgcacttcaagttaaatacttaccaaattttcactgtttattcctgctaggaaaggacacagttccttagaaatttacttcactttaaatcttaaagacataaattgagggtccatactttgtttagtgcttatctagaagaatgcattgccacatcacatactcaggtattgattttcagattttagaaaactatcattgttcatactaaaaagcatcacagttgactgtttattattggttcagaaagatcacaggag

SEQ ID NO: 309669 - DNA, 1000 bp, Homo Sapiens
catttttagttttgttaaaaaaaaattctgacaaatcagaaatgggggttcaggagtggtggtgatgcaaaagatggaagccatggggtgggggctgtcaggggtgggggcagtagtgtctccttcacccccaccctggtgtcctctcctgaaggacagacggtcacattccaaaatgggcgagtcttctaccgtgtctgttcaatgtaggaggagatgtctatctcatcaggcagctcactaatattgacctcaaagcgatcctgcacatcattgaggatcttggcatcattctcatcggacacaaatgtgatagccaagcccttggtgccaaaccggcctgctctggccacccgatgcaggtaggtgtcagaatcctcaggcatgtcataattaaaagcaatgttcacccgctcgatgtccatgcctcggccaaataggttggtagccacaagaattcgtcgttgaaaatctttaaactgctgataccgagaaagcctctcctcctggggcatcccacggtggatggcaatggctgggaagttctgctccactagtagctgggccaaggcaatgcaccgctgcacagacttcacaaagatcaccacctggttgaactcaaggacatccagaaggtcaaagagcttccggttcttctcgttgtccttcagtttcacgtagtactgctgcaacccatgcagcgtcaacttcgtctcatcatccacgaagatctccattggctgggggggaggaagggggtggggaacgggaggagggcagagtgggggggttaaacctgggggggtggaggaagttgatctccaatacaccccatggggggatggggaggaaagagaagattgaaaaccccaccccactcccaaaaatacccacattttactgtggtctctctcacattacatctaatttccttcctatcagatgagttttaagactgcccaactaaaaactatcatgggaaagaaactgcaaatgaagt

SEQ ID NO: 309670 - DNA, 1000 bp, Homo Sapiens
cccaatgaatcaacatactttattagacccactaagtgccaggggaggggcctgtgccctagagccaggttacagggctcacccgtagattcagtctggtctctccccatcatgcctctcacttccagtctgggcttctaataggagggccccgacttcttccctcccagtcattctctcgaatggagaatctttcctcattccagggacaccaaggctcaggaaggggcctatccatcatcagtagagccagacaagctctcccatcggacgtcctgtggctgggcccagaaatgggtgccgctgcctgtgggactgcccttccgggaggaccagggtgtcttcagtgctcttggcctgcacgtggaggagagtaggcagatgtctggtgctctttaagctcaaaggcatcatggccctctctgtggaacaaagggatacaagtcagggatccaggcagcccttgagctctcgcacagaacattccacctgcacccaccggaagcagcgggcacagaagaggtccccatcgcagccagcgcagcgtagggtggcatcctcattgcagatgcagcaccaggggagctcctcttcctcagcctcaggcctggggtccacatcctgggcctcaggctctgccccgcggggttgcgtccagggtcgagaagcctgctctgcagggatgttaaagccacttgcctcatccagggcagcttcttcagtgagctgcggacagggtgaagatgtactactcccctgcttcaggcccaggccctccatctcccagtatttctgtgcactgtggacttagcttctcaaactcatctttttctttacttgtggcctgtggctgctgattccctatctccagggaccagtgggcaggtctgggtctgggtcacaggagggggcccaaagagaacaggagcttcacagttactgtccacccagccccagagtagaggtggggcaatgaggtggagacgggacaaggggtggc

SEQ ID NO: 309671 - DNA, 1000 bp, Homo Sapiens
acttcttgaaaaaagcttctacagtggaattaggagaattggataagaaatgaagcacccagaaaacacatagttctgacaactcaaatatttcagtgacttctgaacaatgctcaaatagagcagagaatccaaagttcacagaagcaggaacagagtgtgataaaggaaatgggtaagctgtacgaaatggataaaatagtatggaaaaaaggaaagtatcagaaataagatgtggaaggcattcaggattacaaatcatcattttgtgcctatattcatgtgggaaaggttgcattttgtttcatagcctttttttccaaccttccattaatctcaatttgctgctggattatcaagcttaaaatacagaattgatactactatattaaacaactgcagtaaaaacaaagtaaatgctctttatagctgacaaagatataggctttctgaggttatgaagaaactgtgtgaatcatatttttcttgaacattagaaaatattattcctagaaacatttatatgtcccttacttcctctaatatgttcatatttcatctacaaagctcagctttagaaaagtgattttccatctaactgacagcttttcttagcttaaaactattagtatatttttcttaagtagaattaagaaagaataaattgtcttactttgtcatgaatatagtaacaatttgaattattatgatggcaaaaacctctaaccttgattaggtgacatgagtgatacagataataatttgagagggaggaacaattgttttgaaaatctaagctaaatatccctcaatttttcatttctatctgagatctttgaagacagtatccctaaaatgcttccacactcactataaacatctttaacaaaatcttcctttgtctcgttcaccatgactcatgtggaatcataccttttgacagttttttctccatcatccagggctcttttccatcctccaataacatgatcacatatgg

SEQ ID NO: 309672 - DNA, 1000 bp, Homo Sapiens
gaaggaagacacacctttattgcaatcccttctatggacacttccaagccatcactatgcaaatacagttggtggcccaaagccagtcagccaaagcccagcaagcatagcattggctcaagcaagcttcatgccagccattccccaccactgccctccccgcccccacagcagtgcaagccacaacacacagcattaagttatatgcacaacacacagcagcttcagtgctctcagtccaaactgttagtcctgtttcacacacagttgtaagtgacaaaggggccaaggttcctgagtctcagatcttcaacctgcctgtaccgcaggtccctgcagggatactggcaaaatcactgggttttgccacctctgtggagcccgtggttctagggagctgaccagccggcccttacataagcttcaggaattctttgacccctctagcccaagataggaactaaaattcagactccacagccttttttcctaattcagcatcctcatcttggcctttgaggatgcagtgctctgaagctgaggagcaaagagagtgaagccaaagggaggtgagcctggaggctgccagtcctccctgccctggcccgccaggtcttctgcccctgggccccttccaaaagggaggccacagtaggcctaatgtagggaatcatggagtcaaccgagaatccaagaccaaaaacccaagaagagggactccgagaagagcacttggtataaatggcaggggagatttttgtttgtttttttaacagtgttgctcattgtaatgaactctcacctcccgccagaacatggctatttctatacttgaccctgcgggatattcagtgttccccatcttggctgagttggggttggggggaggtaagtgtgatgatacaactttcacacttctcctgccaatgggcacccaccctgtgggctgcagtcttgacctgaaatcattgcatcatcacaatttgccctgcagagagga

SEQ ID NO: 309673 - DNA, 1000 bp, Homo Sapiens
cacactacaatagttaattttatttgttcaagagctcagattgcaagcattaaaccaagcataggctttgattctgtgagcccaaattcacatattgaagaagatcaaagcaaactgtgatccatgtacatggatgaaaactaaaggctcgagttaatcacattgtagtttttaaatttctacagcctagagctcactagtcacaggtcttttaggtccttctggatgtcccacagggtatctgcacttttcttgagctgagcaacctcatcatcctttagcttctggttgataacgctggttaatccccgggcattgaggatacatggaaggctcaggaagacttcattctcaatgccatacatcccctgccagaacaacaaagcatcgagattaagacatgaaactgtaagtaaaaatgatcaaagacaggaggctgaggtgggaggactgtttgagcccaggagtttgaagcttcagtgagctatgacagcggtactactctccagcctgggtgacagagcaagaactaatctctaaaggggggaaaaaagagaataatcaaaggtccgatgttccaacagaaagaattgtagaaaacttgataggcctgaactcattccctaatctaattttcatcacttacaggtccacatttccccaatacttatgttttgaattaggttttatacatagaatatgcaaacatacactatgagaaaattagatatttgtaagtaacaagtacttatttaattttattatatatgtattttattgaacactgctctatttaaatacactttaataaattttgatatatgagtcttcaaattaaattgcttttaattgtggttcttaatggattactttctatgaaattttaagttgcttaaagacttttagttaggaagaaatttcaggtggtagccaacttatgaggtcctgggtaatagttagagaccattaaaaggcaagatgcttggaatacccaagaatt

SEQ ID NO: 309674 - DNA, 1000 bp, Homo Sapiens
atattatatgctttaattttatacatataagttatcttgtttggatacatctttcatcaggactctgccacatccatactttgtccttgtggtgagagaggataaaatgttatataatttgttattcaaagaacatggcaaccgtaacagacaaaaggaagcatggcatctaggggaggagagtggagagttttccatacacaaacacatttaaacttccctgtacaaaaatacctgctgttgctttagaaatcattttccgttatgaatagtcaggtcttgcagtacaaatccaggtgcagtgccagcaagtatttcaaataaatttcaacgacttgatattcaagtccaaactaaatatttaatgttttctttattgcaaatatgatgtctttgacctgaggtatagagttgtcctctagaatctttgcataaggcatagggacatcagcaccagtgacacgaacagcaggagcatccaggaaattgaacgcaggacctaggagaaggaaggctcaactgagagagtgcaaatgccagctgggcactaccaccttggcacagaggtgtggctgaccaggaagagaaaatgtaaggaatgctaattatggggaaccgctttctggatttgcttttaaaaatatctgcctgaagagaaatgccaaacttacaagtttaaagttgaagtcgtttggccactcctagctttcaatctctttatcctgtacgtattcaggtacatgatgtttactatagcttgactgtattctagaaccagtttctttgaaataccttccatgatcctggcacagatttcagctcctactccaaactgtggccagcctccttccacagttacaagatgatttgtcttcatgacactggcttctatggtttccatgtccattggtctaatggtacgcatatttatcacctcacattcaactccttctttagatagcactgctgcagcttctaagcagtggcccacaggtcttga

SEQ ID NO: 309675 - DNA, 1000 bp, Homo Sapiens
ctattgctgtttttatgtacttacatatttattgcatcttaatgaggcaggaccctcagcagcatgtagattttgctgttgctgattgtaaaggccctgacagtgacaacttccatttggaaagctgtttgctgaaggttttggcagcagggcgtccacacaagaggggtacacagtgtgggagtcaaagccccagtcggatgagcagggcatctctgtggggagtgggtggcagtgatgggaggctggggacatgcaggaaaactgacccaataatagattaaggagaatgagaaccattcccagaaagggccttacagctatggaaagagagaaaaactggaacgtaccctgtggtgctgggctaaaatcggaggtattagtatcattcccagctgtgaatagatgagacagagagagagatggaagtacgtgcacatatcctctagctctgtccactaagatctcccgggtgcagcaatctgcaacagccaggagcacgcctcgcacccacatcctggttcctgatgctactctccattcaaaagaacaggtcttcttagagctgcagctcactccaataaatgaaagagaaaggggcaggcaagtataaaataaggcttgaacatctttttgcaccagaaagtaaagaaacagctaaagaactgtaggtacataacaaaaaaaacacaaaaggcagaagaaggggctcccacgggccaaacaagcaggacctgagcctgagagtaaatgtcataacagaccacagccctgaatacaagaagggaccaggatccacacaggtgggagcaaggaaggaaggaaaaagtaaaggcagtttgacagggatgggatattggcatcgcttcacactacctccccactcattcattacaaaggggtcgttcactgggcagtggagaagctgaccagggccaccttcaccaagcaacaagagagaacaccagcaggaggctaactgcattgggcagcccctgcc

SEQ ID NO: 309676 - DNA, 1000 bp, Homo Sapiens
gagacagagtctcgctctgtcgcccaggctgaagtgcagtggcgcgatctcggctcactgcaagctccgcctcctgggtctgcaccattctcctgcctcagcctcccgagtagctgggactacaggcgcccaccaccacgcccagctaattttcgtatttttagtacagacggggtttcaccatggtctcgatctcctgacctcgtgatccgcccacctcagcctcccaaagtgctgggattacaagtgtgagccaccacgcccagcctggtaccagaaattctaaagggagttttgttgacccagaataagagcctctttggtatttggggggaatgggggtaacagcttagtaaacgctcttcattactttatcctagaggaaagcatacaactttaacaaaatctaattgtccattctgaaacacgaaaagacaacaaaggggggatgaagagaatgagaacaagataaacataaatgctaacactgaaaaaataactcagcatatagtgacgtattttttaaatactgtaactagtatcctcaaagtactgttgttaaggcataaccaactacaaaaaaaagatgaccaaaaggagactgaagggctttagaagatgaaaaataaaattataaaagcatttttttcaacagaaggaactttgcattgattattccttctgtctggaataagtggcttattccctaaccactttgaagttcattattcaaatatcccctctcaatggggcttccactagtcatcctaagtgcccctcctccacatccatccatgtgtaggcctcagctttactcttttttttttttttttttgagatagagtctcgctctgtcacccaggctggagtgcagtgacgcatctgggatcaccgcaagctccacccccccgggttcaagcaattctctcttgcctcagcctccaagtagctgggattacaggcacctggcaccatgcctggctaattttttttttttttt

SEQ ID NO: 309677 - DNA, 1000 bp, Homo Sapiens
agagcaaatcaacttttatctccaccgaaaagacccattccactggaggggcccgtgagctagacggacttgccgtccagccctccaagccccctgcggggcggccaggaggatccctgagtccagcttgtaaacaccagagccagccctggagcctcaggcctctggagtcacggcagcccctccagacccttggattggggacatctgaggcttcacgagcccgggcagagctgcaccctgggctgtccactcggtcaccccagtaccagggaccacctcgaagcccccctctggtcggcccacagagacctgctcaggcttcagcaatcgtgagtcatgattcgtgtcttctggaggaagcaggcggaggctccagcggcccagcccaccccgcatcacaccaagactgacggcctcacttgtcctcacggtgtcctgattaaagcagagacgaggaggagcccagagccagttcagagcctgggccacttggcggttgccggtgctacgtgggcccttggaaaatgccacagacccagcaaggtgcctctgcccacccgaagtccccacaccagcagccatccaccctaggcaggggtccagataggcagagggtgggcttcggtgttgaacacgtaggcgtccaggctgagcaggtttgggtcatcggagaagagcaagaacagatacttgagcgtctcccccaggaagaagctctccatcttgtccctaggctcgggcttctgaggatcctgggcattgttgatggaagaatagccacccgaggggacccgtgtgaatcggctgaagctctgcagaatctcccagccccagtcctggtatttgcggtcccctgtgacgcggtacaggtagaacaggctctccacggtctctggccgcagcaggttgtgcctgtctgctggcttgacctccacgtcccgacggcccggctgggggtaaaggttgaagtgcacgatctcgggactcagccccgtct

SEQ ID NO: 309678 - DNA, 1000 bp, Homo Sapiens; identical to SEQ ID NO: 120117

SEQ ID NO: 309679 - DNA, 1000 bp, Homo Sapiens
atttatcaaagcaattttatttgattacttattccaggcaaataatgaggttcatgtgtacaactaagaaatcagacaatccaaataaaaggcagggtaaattaatatgaactacacaaacagctagctagaaaggaacagcagctccattcattttacatagtactgtagagtgatgtagcaccattaatctcaaagatatcctaagtactttctaagtacgtgggtctttgttcaaatgtagcaatagcttaaaacttatagcaagcttgatgatcatcttatgttcaactaatttcaaatataaaagtatatccgaaaaattatttcagaaaaaataggggctgggcacggtggctcacgcctgtaatcccagaactttgggaggccgaggcgggtgcatcactggaggtcaggagtttgagaccagcctggccaacatgttgaaaccccatctctacaaaaattagccaggcccacatggtggcgggcgcctgtagtcccagctacttgggaggctgaggtaggagaatcgcttgcacctgggaggtggaggttgcaatgagccaagattgcgccactgcattccagcctgggtgacggagcgagactccatcttaaaaaaaaagaaaagaaaaaatagacaatttgggggatgacgtgaccttatgcaattggaaaaaaaaaaccattattgagactggttttcttccatcatctgcactatttgctactatgaccaatttaaattctaagctttggatgatttaataggtagttatttgaacacacatacaattttatttatacaaagtttttttttttccctaaactatcacttttatatttattggtctgtttagtttgttctggcctgaactacaaacatggaggagcaagagagttttcatgctacagaactcaacattttgggatctttaatgatttattctattttctaccatttctaatgatcattctaagctattgtactgtgata

SEQ ID NO: 309680 - DNA, 1000 bp, Homo Sapiens
attttttaaaatttttattacaaaaataatacatactgtaaaaaaattcaaacaatatagaaataaaagcacaatatcccacccagcatacataacaaacacagaagccccctcccctccaatcccattcctggggggttatcattgtgaacagttagcatatatcctttcagacttttacctttgcatacacaagtatatatataaacacatataaacacacatggttcttttacaaaaatgcgatcacatatgttacatgattcttcaatttctttcttcattcattcattacacagatttctaaaacacaaacctgattatatcactcctctaagagcttatttcccataatataaaaatcatacacattaacatcaaacacaaagcttgtgatgatatacttcctgcccatctttcagtctcatctcagcccttccagcattaaaggactggaatataaaccacattaaatccttcctggaacaaggcaggtacaaacaaacaaacaaacaaactaggaacacactctgccatttctagactgtggcctttcccattcatgttacactttgcctggacttttccatctggcaagcttctactaattctaaaacaatcagcttaaaaattacctctaggaagactttcctgacttttcagacatgattactcctctatttcccctatactttataactagcttcttaattgcacttatctcacagtactatgatgatttattaacatgttttgaattccactttccctcccccaacttgatggtgagctctttgggtaaaagggatttgtcttatttacctttgcatcccaaggatctgatagagtgcttatcatgaaaagcagatgctcagtaacatatctgttgaggattttatgattctaggaacatttactgagtacctactatgcacagaaccatatcctaagcatgaaaagaaacagaagacacagtctttgccctaagaaactcaccatt

SEQ ID NO: 309681 - DNA, 1000 bp, Homo Sapiens
aaattatgaaaaaattacttttttaatgtacaaaaagacttatttacaagttgagcatgtcatctcaattcatagcatgtagaaaaagctaaaaatgttttggagatataaatttggctggacgactcacctacagtatattcagggatgtcttctgtacagaatatatacaggttgggactggcaagggaaatcctatctcaggaaggcgatgaacaccaccacagagccacagacccttagcaatgttccctggctttcatttgcagttggccttgtctctggacagagtttgatgtgctgggacgcagcgagcccagatgacgatgttggccttgtcctcaaactctcctaagaagttcctcattaaggccaaggtcacagtcagagtcacactctgagtggtgctgtttggcaaggttgccacacattccccatgaaaaggtttggggtgtgtgtgtgtgtgtgtgtgtgtgtgtgtgtgtgtgtgtgtgtgtatggtggggaagatgcaccaattcaccctacagtgtgttcaggaatgatgtctcctgaagccagttccaaattccatttccaggtgggtcttggtcacactgaacaggaaaattcaacgatgctccctcagagtcctgaggatcaaccccttcccctttccacccccaaccacaccacctacacatgtcatcattctctgcccagtgactcagcgggcagaaggaagggaatccggaggataccaggcatgcacactgtggcttggtggagaacactgggctgctggtgagtgctgggggaccgggctgccgtcaggccctggagtttttggtggtaaagtgggtggacgttgcattggagaaacaggattgggtaaacacgcaacttcctcttcctactgagagatccctagggcagcctgaggctgggccccgggtgcaccctcactcctcgaggcctcagtccatccctaacccacagcggctccagcagccccgaggta

SEQ ID NO: 309682 - DNA, 1000 bp, Homo Sapiens
ctacttcttttttaagttttatttggagaattcaaaacataaatgaaagcagaataatatataaacccacatgtacctatcaccagtttcaacaattaccaactcatggccaaccttgattcatctatacccctgtctactccccactcctctattactttaaagcaaacctccccagacatcagatcatttcatctataaatatttcagtatgtatctccaaaagacaaggctcatttaaacataaaaacaaaaccatcatcacacctaaaaataaagtaacaaacaatagctccttaatatcaacaatctagtcagcaacacatgcattcttctggtattcagcttcacaaatgacaagtatgtgactttgagataaaaaagaaaaatgttagtgcttttaaaatatcacaattctcccccttgttgctttaaaacaaattctttctcattcatgactacagatagtaaagtgtattactatcaggggtgtgtgggggatgactgctatcaataaagactataaaagctccaactagccttacgcttgtcaatgagctccagacccagaaaatcttagaatcaataagactttagaggacgtatctcttccaattgcccacctgatgcatgaacccccaactacatcctcccctgacaagtgctcacctaatttttgcttgcagactctccagaaaaaaattcactattttatgaagcaccaatttcaattttggacaattctatttgtcattattaacagaaaattagtgtttacataaactatatatatgaaaattatttagttcagtgtctggcacataattaaacactcaataaatagtgactgttactaattattgtaaagattatcattactggttctcaattattgagaaccaagtatttatatgccaagtacattctaagtgcttcagccatgtatacgccttcatttgatcctcacaatgccttaccaggtagatattatccccatttt

SEQ ID NO: 309683 - DNA, 1000 bp, Homo Sapiens
aatagtcatcaatgtacatttattgaggaaaccataatgaatacaaaattacagcaatcatgtgaccttttacatacaatgtcattaaagcaaactctaaaccacagttgtaaagtattcaatttacctcaagtccaagctgcatctccctaagacactgttcccatcacagtagccattttaagccaatcttctttttacacacgggtagtttcttctacattgagcccttctatggtccatgctcatcggctcaccaatggcatacactcaaaggattcctctttatgggtaactatctcaggacctgattttatgagctatgatttggtgcttgcagcatcttcagcactgtgtgtgaaaatgaaggcagtatttttgaatatttttctttgttgcagagataagcaggagttttaaaaggatcagcacattttagaaatcgaataaacaaaactgataagatgctgctttcatacattcaacttaactcaaaatatgtaccagttaaaatcatctataaaaacacacaaacattttaaactggcaaaaaaattaaatgcagcgtcagttattaaaatattattaaatcagaaaaatactgattgctacagattatgaaaggttatttgctatacagttaacatttcactgatgcacatgccttttatcaaaacatactgccttataactttttccttcttcagcatataacttttgtctaagaaaaaaatcataataaaattctaacccataatatccttactgaattattatagtttaagaataagaaaaaaataaagaaattataattttggagggcaaagaaattttctgtccatcatataaaacagattgtgaaggctgttgaagtttctaaacaagtgatttcctaaatcttgaaaactgtgtaattgtcctttcttaatattaacacttctatatttggggaaaaaatacaaaaagatttggatgtagttcaattactgcagcaatctac

SEQ ID NO: 309684 - DNA, 1000 bp, Homo Sapiens
ggctctgaccattgtttttaatttatgaaatcaagtttaacacacaagaagcctataaacactgcaatacagaaaaattaagctgctgcattgaattcttactccaaaacaatgcaaatctgcatgaggtctctcccgctatgggtgtgagtggaagagagggagacttttttacctggggttggtggtggagtgaaacacaagggtgggagaggttttgcaaatagccagagaacagaaaccaatgtgcagtcactgacacacttgaccacggcagttaatttgcacttgtacttggctgtggctgttccggctgtggctccttcggcttctttgtcttcttcttcttctgcttggagagacagctcaaagcagactcgctcttacttggggcagacacaagcaggggcggcttgccagactgagtgggatacttggttttctggctctccgtaaacagtggctgggacagcaggtggcgcagctccttcttcagaaccttcatctgcttttgtctccgacgttcttcttgctggtcagcttttcctcccttatacatgtcttcttccagctcaatctccagggcagctgctgcctgctcaatccaagagttgtgcaggcaagcctggaagttccgatactcagatttctcaatctgtcgagctaaacggattcgctccttgaccacatccatgtattttgtctgcacggggaacagtgggatatcctcatctttcttgagcgttttgtaaatcttcttaaagttgatcacatcctcaggcccaatgagcatcagactgaggccttcattggtagctcgagcagttcgaccacttcggtggacataaatctccgaggtacgtgggacctgccacaggaagaactgggagatcaatacatggccactgccaaacactggtcctctcctcagggccacatccccaaaccagaccctcctacctcccagccaggcaggtagaaacttctgcagcattgtaga

SEQ ID NO: 309685 - DNA, 1000 bp, Homo Sapiens
agctcatcagctattgttagtgttagtgtattttatgtgtggtccaagacaattcttcttccattgtggaccagggaagccaaaagattggacacccctgtctagggcaaggattccaaaagtatgttctgtataaaacttgcatagagattccaggaacacttgttcaaatgcaaattcctggtccagatctcaaagatcagtctctgcacgtttggacatttttaacaagcaaccctcatgatttttatgatccttaagtttgacaattctagggccttggtcttcaaaatgacacatgcatacccttgagaacacaccaacattttcccatgggggtaaggatacatgcatagctctatggaaaccaacttaaagatgtccaatttccatatgtgttgtcctaaaatatgtgctctgatgaggcctcttcagatctaccatttctctttacctcccttttcacaacagccatactccctatcctccaaaaaaaaaaaaaaaaaaaaaaaaagaggctgcctctcaaccatccagtatatcaaggcgtattgccttggtgtaagcagctccagaggcactaaacaaaaggatcaaaaaaaatctaaatgactcctaagacgcaaagagggtagggggcagtagctcaggactgcaatcctagcactttgagaggctgaggcaggagggttgcttgaggctagaagtttgggaccagcctgggcaacatggcaaaatgctgtctgtacaaaaaatacaaaattcagctgggcatggtggtggcacgcgcctatagacccagctacttgggaggcttaggtgggaggattgcttggatctgggaggtcgaggctgcagtgaactgtgattgtgccagtgcactccagcctgggcaacagagcaagaccctgtctcaaaaaacaaaacaaaacaaaacaaaaactgatgcttctgaaggctgtgccagagaagtatgtttgtgtgtttatctgaattaaaa

SEQ ID NO: 309686 - DNA, 1000 bp, Homo Sapiens; identical to SEQ ID NO: 120118

SEQ ID NO: 309687 - DNA, 1000 bp, Homo Sapiens
actgtgaatatatactttttatttagtcatttttgtttacaattgaaactctgggaattcaaaattaacatccttgcccgtgagcttcttatagacaccagaaaaagtttcaacctacaagaaaagaaagaattcatcacagaactttgaaatacacactcagcttaaaacctaatagtttcgtgaaattgtgccctgtattgtttttctcctcagcaactaagtacacacaacatgtctgcagcagtcttcacgaccggggacaagctcttctccaatgctgtgggacagaactgtacaccactgcaccggggaagccatcaggggaccccagcagtcacccacatggttatgtccccccaagacactgatcccatcaccacccacccctaactcaccaagaatatacagcctaactaaaagaccacagaaagagtctacttccaaaaggtacagagaatttcaagtgttcaattcttgaaacatctccatttaacacctgacacataatccaaaggagagcaggctgaagtgcgggtaaaagaactagtcctgagtttactacagtcattgctatggtggcgcatggagactggttacactaaaatccactctcactgtggctgaacctttccatgataaaatgttgacctattaccttgtgttccacattgttctgctgtgctttgtccaaatgaacctttatgagccggctgccatctagtttgacgcggattctcttgcccacaatttcgcttgggaagaccaagtcctcaaggatggcatcgtgcacagctgtcagagtacggctaaaagaatagtttaaaaggtaagcaacctagcaacgcctgccctctgggcaactccagagggcacctctttaagtcaaaataaaaatgcaaatcccaggttcctgaagtcaaattaacactcattttcaaataagcttgttatatttcacgtaccaaactaaagcctttgcctacctagaatagggtaa

SEQ ID NO: 309688 - DNA, 1000 bp, Homo Sapiens
ccattttaatcagttttattgattcatgcttccagttcttattcagttaaaaacaaggcacattaaatacatcctcttattgctctataaatgcatgcagctcattctgtgtatcaaaagtaataaataatggccataaaacaccaagacagttataaaaatgacaacccagcctcaaacatagtatttaacagtccagtctagaacaataacccaacatgatacataaaagtgccacatatgaaaacatgcggtgtgtatatccactctagcactgagcttacacttgctatttaaaaacatagtagggctttttcactccttcaaaaaggttgacatgatgcaaacatcgcaagttatagcatcattgactttaatattacattcatatgccaaaaatctttacagatacataagagaaaaataacatcaatgatgactcctacagtatatttagtaaaagtgagaatgagttttttgttgtacaaaagaggaagctacatattttgaaacagacaaagcaaagccagaaactgaagcaggatagagagcatgcatttaatagcagaaatcctaaagttacactcagtataaattgattgaaagcaagaatattgcaaacagcatgatggatatgaggcagacaaccttggcttaacaaataatccagcattatcattattgttatgactgtggtgggggctatttaaaggagtatccaactctccagcacagatgggggttccttcacctgaatcccctcaaaggctcttgaaataaatcacttgataataaaaggcaatccctgcatacccaccccgaccccaacagaatcaactgatgtcaagtttatatgcaaagggaaaaaatttcttttgtgcttggaatgaattttgaagaagcttattcccccctattgcttgtctccctttcttaaatcaggtaaagaagctgtacaggtttaattaagagcttatacaaaatgctggggtgctttatt

SEQ ID NO: 309689 - DNA, 1000 bp, Homo Sapiens
acatgtataaaagctttaattaaatctgatgaaataaaacttcatgttttatttatggacactcccaacatgtaaaggactcagggagacattcatttttactgccatttcctcctcatatctataattaaatccaggctacagctctggcccaaagcaatgcagcattttaaagctggacttgaacattccctcccgcatcatctgcctttaattataattaccattcccagtatgtaagaggctgatggtaaaacaaaacaaaaaaacaaacaaacaaacaatgatggttgccattgtgttttaaaccgacaggctgaaggaggattttaggcaggagggcgtcttctctatttccagttttattctgtaccaagtgcacaatcccttcattttacttttgacataaaaaaaggacttcatgaacaagacaaaataacttatgattatatgaaacataactgtgacaaatcacaaaactatacatattaatagaaaaaagtgtacctaattctttaaaagatttatgacaataagcaccagatgtgcctctagagtaaaatcggccccatatccagtatgatatatgcagttcatttctctacgtgagtgtatataactatgtacaagagtctgtgtgatttatggaaaacagatttccacttttttcccccaaagtgctttatgtcagcaacattacacaggatactttgctgtctgtacaaaataaatctctttttacactcactatttctccaatgagtgcttttttttttttgcttcatctgttgcaaaaaaaaaaaaaaataaccgcagaaattccacaccactaacaaaaagtgctatttaaaaatgcttccataaaatgacatggccaagacagtcaaataaaataccaaataattaaattgaaaatgtacagttactattcccaatacttcaaggcaactggaaagtcaaggttctcagatgagggagttgaatttatccttgctcaaaa

SEQ ID NO: 309690 - DNA, 1000 bp, Homo Sapiens
aaagaaattatatttagtttggccactccctagattcttggtttaccagcttataaagagtacacctaagaggcagtataatatacgcactaaaaaccatttccccctttatcatctttggctagaagcctcatgaaaggaaactgaggacggcagaggcaggcaggctccgtgcgcttctgcctcacacgtcactgaccggaaggctcgcatcgtccaagtctactaggtcacaatctttttcctgagggccatttttactttgaggtcttaacagagcttgttcagtcactttggaagctggttctcttggagagacagtctggaccttgaagttccctggcttgaccttggcaagagactcgtaaaatcctcgcttctccatggtaaaggttgagaccaaagagttgctgcgagaggctgtggaatgtgaggtggcggtggctgcgttggtaggacggaaagcgtgtttggattctgaaggaccggggggatgctcctgcaaaaaggagtggcagtcagacacggtcagtcactcatgaccaggttagtaactcagtgtgagacttgattctctgaaaaacaaataaaacacacacacacacacacacacacacacacacacacacaaaggcagcagcagaagccatgcagcataaatgtgcaagttctttcccaaagcaacgcgtttttagaggtgagtttaaagcaatgatagccaaaaaccatttccactaggaaaccagttccgtcaccaaagctgaatttggcagcctatgacactttgaagattcagccaacctaaactgaaatacagtgttccagctgcaactgaactgtgtttaaaagagaacctcccagctgtatcattttatttaagagtatattctcagtcaacactaggaattatcccacatattttagaatgaaaaaaattaaaatatagactataacaatgaaaggccatatttctttaataagcacgaatcatctttcaaac

SEQ ID NO: 309691 - DNA, 1000 bp, Homo Sapiens
ggggcgctggcgtgcggtgtcatttctgcggtgtaaatgctcccaccttggccgatttcaagccaccaggtgaggatggcactgcaacatcttccactgaggctccagctgccctctcaggtacatcagggcctggacgtcctctcctccaggagggccaggactcggccccctgccagcccccgaagcattgcagccaggagtgcagcgtgggggccctgcaggccatggccaggccccagcgccaccagcaccaggtcaggctggaagccataggccaggggcagcaccaagcccaagatgcagctcaggaaaccaccggtcatcactggcagtggcgtggagacatggaacatggatagggcagccgcctccttgcccctgatgttcagccacagactcctcccgtcatgggcgaggtctggaggccggtccagctgtcccagggccacgcacagcagcctctgggctccgtgggacaggcctctccgaacagccacatccagggtggctgctgcagcagaggctggagtggctgctataccactgttcacctgcccatccagcatcccatctaagaggtacaggagcttcccaagtgcagtgagggcctcctcccgggccagggactcgtgtggcctggcccaggcttctgtctcctccctcagggctgacgcttcctgttggatgacgtcagggggcagaaccaatgtgatatccggcgttgtcagggcaacagcggtgcggacagagggtgcggggcagaggcacggctggtccaggagggagctcggtgcagatgcagctgccttacacactggacccccaggcagcagaggtggaggcctcccctctggggagtggctgctggggctcatcggcacagcggtcacatcttgctgctggaggctcttccagtgcggggcctgggcagcacgggcactctggatggactctagggcactctgacatggcgccattggccctgacaggggtggag

SEQ ID NO: 309692 - DNA, 1000 bp, Homo Sapiens
gacattttctcctaattttatttaaagccatcattatatattaaaagagcagaggtaattctgtcttctccggttgtgcagcacgatctgctccagctcgtcatgccagggcccggaaaacctccaccttctcccggtacagctggtggaactgcttggcaaggcagtggaaaggggcttcgaagttttccatctctttctggaaagacagtttaaaaagttggctgtgttcttttagaagggtcagagggccagctctcactcaatgcttccctcattcgggggctacctactttccacctcatttcatcttcacgcccttcaaggtagccactttcatggatgccagttttacaagaaggaaactcagatggagtcaggtaactcagagatgaaggtaccttgcaggaagccacacaccttgtgaatggtggagctggggcctgaacccatgtctgtttctacaaagcctgtgcttttagttgcagtcactgtacgtgtgacgagatgtgaaaatgacacctttcctcagttttgactgaggctccaaaggccaaagcaaaataccaaggaacctggagccccccatcccgaagaagagctagacagcatggggcaccctcttcctaggctggtgctggacccaggcctgggaggaatcgaggtgaggtggtggctgggcaagccaggagagggctaccaatgagacggcctcgctgcctcctttgtcaaactaaacggctgcagcagcacttccctgaaccagcgggggccaagtggagccagcctggtgctgtcttaagggggctcggctgggaccgcctccaggagggtgacgggtcccaataagaatgaacagccaggaactggggctgcaggaggagtgaggggggaccacctgtgagaagcagcctgcaggtgagacagcgccactgatggggtggggaggggcatctcagaggcgcccatggggcaccagccggatccacccagcaggtgt

SEQ ID NO: 309693 - DNA, 1000 bp, Homo Sapiens
cgggcactgaaatcttttattcgttaatttagtttctggcaagtgtttcctcaaaatcatcatgtagttccttgaaccgtaaaaccacacattaaaaatgttattccactgaaaatgactcctatgcaaatatcgacatgtgatgtgtgtccaaatgccagagcattttgagaaaagaatcctctgcaaataaaattaaggtataagctgagtcagggatgatccgattcccaccccaggaatgacccggagctgcaccaactcagcgaggttggagctgaaaccctgagttaatgatcaaaagggacaagacaggaaggcctggggaccgtggacagggaagtgcgcagccctgattgccagtgggcggaacagggtcaggctcggggaagcaggaggggtggtgggcggtgggcgctgagcagagcaggcctggccgaggctgggggccactgtgcactgaggccagaggagcagggtggtgggggcagctttggaaagggactaaaaagggcccgagaagagaccactctggaaaggtgcatgtagaggccatgatcaaaacaaaaaaatcaagtttcctacgttcatgatagcatttggctgacaatgagttataaatacttggattctatcttccagataaaaacaccttccaggaaagggcactcacaacaggcgtgcccagttcccagtggggagggtggataaagctaagtgtttccgcttcaccactggaggacggttctatgtgggcggtcccatgtgggcggtcctatgtgggcggtcctatgtgggcggtcccatgtgggcgttcccatgtgggcggtcctatgcggcgttggtgtcctgggccctgtgagctctgcagggttccagggaaggaaactgggggtgcacactcgctggcactccaggacaaaatgcagagggggcatgagacagtcatcctggcacagccctcaggagggaactggagggacaaccctgtgccctgcca

SEQ ID NO: 309694 - DNA, 1000 bp, Homo Sapiens
acgaagaaaggaacagactatgcaggaagaaagcaacaggcacacctgaggtaaactgtggtctcagaaacatgatgcacacagacaggcgtcatcagaaagaccctgacagtgaggtctgcagttctctggaaaggcccagtgaggttttttggtcctgatgaaactgttctccatttcacagcagtcatcctaaatactccaagcagaggtctgtgaggagggtgactcgcctctcaccttctacagtccagccaaggactagagtccaagacaaagcccatgctgacggtcccgtgaggccaagaggcaggcagggccgtcctctccaggccaagcccagctgcacccagacaaggccgcgtgctgcagggcaggatgactggacatatccagggagcggaagtccccaaagctggaggctagctcagcccatcctgctgctggctgtcctgctcagcttgtggtgagtggaggcaagtccctgccccggcccgcctgcctgaagtcatcagatgtactgctcctcatccctgccattcaggagcagagaccacttgtccccatcatcgtctgctgcagcgctgtgccgagatggcttgtcggacgtcagggaggacagcgacacctggctgacatagctgacctggtcccatggtgtggccctgggggagtcccgccacctgtcatccatgcctatgtgcacactgacctgggatgccgtcaggggcttcatgtggccatgcgcctgtgcctcatacctctccaggtcaggcttcttatagcacttgagctgcagggatgagagcaccacagacacagaggaggctgccatggccgctgagcccatccagggctgcagcacaatgccgatgggcatgaagacacctgctgcaatgggtatcccaaccaggttataaatcagtgccaggaccaggttgatgcgtatccttcggacagtcctcttggaaaggtgaatgctagccaccacatccagcaa

SEQ ID NO: 309695 - DNA, 1000 bp, Homo Sapiens
gagactgagtcttgctgtgtcgcccaggctggagtgcagtggtgtgatctcggctcaccgcaacctctgcctcccgggttcaagcgattctgctgcttcatcttcctgagtagctgggattacaggcgtgcaccaccatgcctggctaattgtttgtatttttttttttttttgagacgtagttttgctcttgttgcccaggttggtctcgaactcttggactcaaacaatccacctgcctccgcctcccaaagtgctgggattacagtaagctatgatggcaccactgtgctctagtctgtgtgaaatagtgagaccccctccccccaccaaaaaaaaagctaccagaaatgaaaatcttaacagaaggtctgaaagatacaagtgagaaaatttccaggaaaatagagtagaaagacaaaggaatggaaaattggagtgaaaagataagaacattaaaggacccatcccagatgccaatagccaagtaagaggcatcccagaaacagggagcagagcaatagaagggaaggaaataaaaaaaaatttcaaggcagtttcccagaactgagagatgtgaatttcaaactgaaaaagctcaccaacaatagtgataaaaaaaggtctgtgactgtactaataaaaagaattcttccagccaaacttcaatctaatgttgagggctagacaatgtgtttcagatatgggacatgtcagaattttatcttccacaccagaacacccacaaagctccaccaaaacaaaggtgtgaactaagaaagaggagaccctgggtctcaggaacaggaaggaacataacagaagatgggttgtaggaggagcctggatgatgccagacaaaggtggtggctgagaggtagatggcagggggcctctggtccgtaatgcttcgatgattgggcaggatccctatcctgtgtcaaggtccctcctgcccacctgctctgtctactaacctgctgtccttgtcaggtcccag

SEQ ID NO: 309696 - DNA, 1000 bp, Homo Sapiens
gagatcagaattaaattctttaatacaaaatgctttttttttttttaagatatatctgtatttctttgtcgttgtttaaaaataaatatgtactacggaatatctcgaaaaactgcactagagacaaagacgtgatgttaatatcttttccccacaattattacggataaacagtagcaccaataaataaatgataacaaatattaaaattaaaaaaggagagagatttagtatgtagaattctctattttttcttgttttgtttttacatataaaaaacagaatagcaatgtctattttatcagaatcacatatatacataaacatatatatatatatatacacacaaatacaagttgccaaatatatatatagtatgtagatgtatattgaaaccttatttcaaaggaatgtgtgctggggagccaggggatcggggagggcagagctgagtgttagcaaaattaaatatctgttcaagataagctagtgactgtcaccgatcagggagagagagattggaaacatgaattttatatacaaaaaccggtacaaataagagagcaagagagagcaaaagatacatctcataaatagttgaaattaaatattaaccaagaatactgaaaaaaaaccctactctttaattaaattaactgttttaatttctaattaaaaagggatattaaataagtaccgtatataaaacactttctcttttctctgcctccacaatgggcacgtggatcctgccctgtctctctgtgcctcgggaagggaagggaaggaccaggggatggaggaaggtcaaccactcacacacacacaaccaggtctcctggggggacagaactagtggtttcaatggtgtgaggacataggtccttttaggctgcatcccaggaaggggagcaggaagaggatgagggcgagtcccaggaaggggagctgtcatgggctgcttcttccaacaatgtgtctcttctcttcgccgggacat

SEQ ID NO: 309697 - DNA, 1000 bp, Homo Sapiens
catttggtaagtatatgtttatttcataagagccaagttgttgtcccgagtgcgtctgtcattttgcagtccaccagcgttgtgagcacccctgtaagttaaacaccacagtaggcagttgctctgtatccctgtcagcacttgatagttgcagtatttgttaactttagcttttctagtagtaggtacataacagtagctcactgtggttttattttcatttccctaatgcctgataacgttgaacatctgttcactggcttctatgtcctcactggtgaagtggctgttcaagtctcatttttaaaaatggaattgttggccaggcatggtgactcacacctgtaatcccagcactctgggatgccaaggtgggtggatcacctgaggtcaggagttcgagaccagcctggccaactacacatactcttacagtcaatttagattaatgttttgccatttcaagtagcatgtagaaacctcactaccatctaggtcccttcacccttctcccctcatgttctagttgtcttacatctgtatacactgaagcctccatcagacagtatcatgacttaattcaaccatcacataacacttaaagaagtaaagaatagtttcatatttatgtggacttttgccatttatgatgttcttcctgcattcccaaagttttgaattgcccccagtaatctcttctgtctgaagaacttggtttaacatttttttaaagcagattctttggttatgaatttcctcagcttgccttcatttgagaatgtctttattttatttcattcttttattccagtaaaatagaaatttttactggatatagaattcttgggtgacagttatttcaaaactaaaaatgttccacttctttctggcctctatagtttctggtgaagatccagtctttcaaagaattgttcacctgaatgaaatgtatcgtttttctctggctgatcttatttttcttggtctttagttttcagaa

SEQ ID NO: 309698 - DNA, 1000 bp, Homo Sapiens
atatccatatctttatttaaacaagtttccataatagctaggagaatacagcattaatttaatgacacacatttactaagcacaacaatggacaactacaaatttagagcataaatgtaattctgatattgttttggtttttatcttagcactaggtgatatctagtgaaaacccatgtttcaaaggcttttgttgatatgagatgaattattaacttatttttaaaaattgcacgtgagatatgctagaatgggttctagagtctagagttagttgataatgcctttcatgtctcagtatttctgcttcctttttaatgggtaaatgtttcacctaagaactttcaaaaaattgtatcaaaattttctatgcagatcaaagtagaattccttttccagacccaacaaggaaaaatatttgaaaactgcaatgttcaattccattttagttaaaaggatgtccatttcatagtaaattaatacagttaataattaaaatacaatatgttaaatggcatgaactcatttttgcgcaacactgttagcgcaatttaaatctcccaaagacacaaaaaagtcaattttactgcaggatcccacaaaaatacataaccaggaatcataaattacaacatatatatccacatttaaagaaaaaattcaccatttgttgggaaaaaataatggctcaaatgatttacggagcctgaaatgtgggctaaaattttataacatgataacaataagatttgaaactgctgactctgaaaaatgcataaaaatatactaacctgccaagcactgaattatatataccagtttcaactaaaaaacaacattttttctttcaaatatttcaagcattacaatactgaggaaacgttagtcatatgaatccaataacgcccattaagttaagctaacgaacattttagatagaccaaattacaaataaaaaaagtataaaaagcattttggaagatattttacatagtatttt

SEQ ID NO: 309699 - DNA, 1000 bp, Homo Sapiens
acatttgcctggtttttattgagtggatctctcacgacaaaatcatgaatattacactgaaaggcttattacattatctttgtgtagttactctccagtataaaccctgtgatgttccggttttgatgcctgggtaaaagcttaagcatgcacgttacatttgtatggtttcatcaaaaaagtttttgatgcctagtgagactttggcctgtggaaaatctctatcacatataattattataaatgctctttagtatggattctctgatgttgatgaatgtttgaagtcataatggtttcccactctcagtgtttttgtttctctcaagcatgaatttttgcaatattgtacaatgtgagaattgtgccagaagaccttgccacattcattacatttgttaggtttctcaccagcaagaattctttgaaaaatcctggtctcagattttaccttaagaccttgccacattcagtacattagtaaagtttctgtcctctatggtctagctaacggttattaagccttgaacaaaaactaaaggctctgctacattcattatacttgcaaagtttttctccagtataaattattgtatgtcttacaaggctttaatgctaactgaacactctgccacattaattacatgtgttagatttctttccggcatgaaatctctgatgacgtacaagatatgaattgtcgcggaagagtttgccacattcattacatttgaaatgtttctctccagtgtggatcgcatgatgattagtgaggcttgaacgcatactaaaagctttgccacattcattacatttgaaaggtttctctccagtgtgaattttccgatgatgtgctagggatgagtttagaccgaagaccttcccacattcattacatttataagctttttctccagtatgaattctccaatgatatgcaaggtatgaattttgactgaagactttgccacattcatcacatttgtaaggtttctctcca

SEQ ID NO: 309700 - DNA, 1000 bp, Homo Sapiens
ggctggatggaggggagaaggcgatgcagccgcaatggtagtctccatggtgtgtgaggagccggcacctgctctcacacgatgccatcaaagccctgcaggccacacttcttgccggccacctggcacccgaatctcagtgcttcctgcacgctcctccctggaggaggggcaagtagctaggtcagccaggtgtttggggcagggacaggtcccagtccttttcccctcctgctgccatactcaccctgggagaggctgaagatgacggaggcattgaaggtgtctccagctcccagtgtatccaccacgcggggtggcgggaaagcatccgagtggagcaatttgccatcagggcccagggcgtcggcgccctcctcagcccaggcacagacaagcacagccctgcaagacggctccactcagctgggtgttagcccaccccgtccccccagccatcctcccagctccagggcggactcctggagtccaggctcatcctgtaccttctaaagccccttcctggcttccccggctcaccctttcctcacacgaccatacaagcccctcaaggcttcctctgctgactggaaccccaagtgcttggccacatctttgctgacaaacacctgtgggcagtggaagagaagctggtggtcacttctaactcgtcattcaccaacagcagcctagcgttgcccccattacaacacgactcccccaacatgtccacatagatccccaacgtagcatctcactgtcccacgggaacgtggttttcttttttctttattttttgtgaagacggtctccctgaggctggtcttgaactcctggccccatatgatcttcctgcctcagcctcccaaaatttctgggattacaggtgtgagtcactgcacctggccagaagcatatttttatcgatgcttatatataatagaatacagccttgtaaattgtaaaacaaaaggcctggtccgtttgttctctgatcaat

SEQ ID NO: 309701 - DNA, 1000 bp, Homo Sapiens
gctgatattttcaatttattactgcagtagataattgctctgaaagtgcaacactaaatcactcttgtcatagcctctgctccgtttccactggcaaatacttggaaattcattcttcgagcattgtggaccacaagcttctctctgggtggaaaattattgccactgccagtatcatagggaacacacacacacacacacacacacacacgaacagaaggattcaaaaagcagacactggagaggagtaggggccaatttcaaacagaaaacccagtaaagggctggagaggagtaggggccaatttcaaacagaaaacccagcaaaggagttagaggagaacagctccaactgtgcaaagtggagaccgactctccactctccagtggcaacctcacattctggtactgtgcaaagcggagaccgactcttcactctcctcacattctggttacgttggccctggtagacctttatccctttgcctctgtaacggtgataccataatcataaccgtgccacatctcagcatatcagaggcccatggagtaaaaatagatgaaaagacctctcaagctagtttggaaaaatagagggtttagataaactgactatttaatctcctacttaaacctgttaggcagaatatctgggagaacactgggcgtaagatgctgcctaacaggcataaccccttgctctaaccagcctagggccagtatgtttttgatggaaaagacaactgtcaaatactacaacgacaaaaaggaagggaaaacatgagcagctctagaaaacgtaagattcaaaactctgaacaacaacaacaacaacaacaaaactatggacaacacacctagccaggaggcctgaccactcactcactcctaagcacactctacacatacacactgactttcccacacacacaacagtcaggtagatgcccaaaggagggcaaatccaaatatctgctctctttggaattttcacggcaaa

SEQ ID NO: 309702 - DNA, 1000 bp, Homo Sapiens
ggattttacaatacagtttattagctgttctcctcttcttcataaatggaatggataatgttgataattctttacaaaccagtactcatttaagaaactaatgaggaggttgtcaaaaacacatatttaataaacaactccaaagagcaatgggaagccaaatattattattaatatgaaggaccagagaaactgatttgtgaaataatttctacctttcactaacatttcttaaaattgctcaccatgaagatttgtgcaattctagtgcagagcagtggatgaaagctgtctgaggggaaaacacacacataaatggggcttttgcctgccttcctattaataaaaggagaactagaaggaaagggcaaggaccaaaatcaaacctgatgacaagaacaacagtaacaacacggacaacaacaaaaaacctcaggaaccatttgaaaacctttgtagaaaagaggagaatatgcccacacttttacttataatctaatttccctaaatgtttcctcctcatgaccaccatgcccccattttcagttcacatgattaaggaagataagtctattcaattaatatttaatttaaaaaccaaacaaaaagttaggagtaggtggcaaaagaaacaaaatatattttaaatatatatatatgtttgtgtgtgtgcgcaactatgtaaagaaaataattcccatagttacagtttaaagaaagttttatatatatatttatatatattttattataacaaaataggcagctattgtgggtaaaatattcagtaaaatctgactcctaagaatacatttgaagttttaggctatgaattggactcctttccattgccatgatggttactacgtcaccactgtaacgtctgatttatctgtatttatatctaggaaattttctcaatcttctgtgtaaaaggcgaacttccttagcacctgaacatggcctcaattcacgaaatgtgatgatcatttacatatga

SEQ ID NO: 309703 - DNA, 1000 bp, Homo Sapiens
actgtaaaatatttatttaataaaaataattttataatctatacagaattgaataaaaagtacaacaaattattttcacttatttacaaaactgcatacagtataacttgcacattgagttcagcattctataaatatggccacataccaagatgtgaacatattcttgtcttatataagaaaaggctcaggttgtatgccacaaactttgaattaaattccagggaaatattgctttggtaacatgaacaatttgtaccacattccattaaaaaaagatttaataaaatccctcaaacagcacttttctacttgtttcggagtacacaattcccaaattagcacaaacaaaacaaagcaaaaaaagaaaaacagacagaatgtaaaatgaaggttgctacttttatgatatcacttccctttcccttccttagctagtgttcttttcctttcccttaatagtaaaggatggtgaatagaaaatgacctattcttatccccatccatttgcttctaggattcctgcttaaaccaaatgagtatgtcgactttgcaatcttgacacactattattaacactgttcagctgtgtcattctaaaaaagttaataccccagttaaaagcacctatctagattcttttcaagataaggcaacaaagtcagctttaaaatagttttcatgtctgacatatactagcagccccttggtagactgatttcagaattaaatgcatatagaacattttttcaagtaacttggtaatgaaatcactagcaattttaagcaaatattcaagatgatctacctttagaaacaaaggcagatttaaggtaaaaaaatgcaggaatcacatctatcctagttcctgtcccattgaaataattgaaaagaggctcagtttatgaaaaaggccttggactaatgcaattcctattgacatctttacttggataagaaaaacaaattaatataaaaactataaatagggatgaaatta

SEQ ID NO: 309704 - DNA, 1000 bp, Homo Sapiens
actttaaaagccaaatatatttttaaaagatcatgcttataataagtaaattacacattaaggaaacatcaaaataaagtagatgaataaaaaggcacactcgaaaaatttgagcgcagaaaggacagttctttttgttttgtttctaatgtcggaagaaaaagaaagagatatattaaaatcattgttttcaagtgaaggtttctgtcagttgaagtagttagcaatggcttcttttctcccgtgtccaaagcaggctcttcctgcgctgacttctgaggaggtgttcagtcctctgccatgtataggcgatacatcaaggcgacggccactgcagagatggcagggatcacccagttggtccaccaactggaactagaatcaatagtagtgataagagtttcctgaaacacgagaggaaaaagtaaagtaagttcaagggaatgctgaacttatttcattgactaaaatcctgtttgaaaataagaacacaatattttatgcaatgcattcttcagaagatgtcgaaagggaaaattataaacttcttttcactaaaatgcctaactttgttttcttccagagtaaaacattttaatcattatatttacttaaggacataacctcaataatttaaaaacattcaaaattaatatgctacataaaatatcttgcacacgctaggcatctaaataatgcagaaactgaaaacagacattcatgttcacatacacacaatcccacgtcacctttagaaaaagcagtttaattcttcaaaagcatgaacacaatgttcaataaaaacatcagttatttcattcaaatctgacagatgtaaaaaagtgtacctaaattacattaaatatatgtgaaccaaaaagaaaaaagaggactgccattttaagttctacattctaggccaactttcccggggggctgctttaattctgaccagacggaaccagcaagacaccagaccagcctcacaggactgctgtgc

SEQ ID NO: 309705 - DNA, 1000 bp, Homo Sapiens
aattgagttcatgatcaaaccttcatctgatcacatcacatgtactgtgcatccactgtgattagatagcttatgggatccttgaaatcacattgacaggcactgtaaagtcacagccaagttagcaattattagttgcacctcagagaatgttggaataatgatctttgaagatgggattgttcatatatttggataattattgctgtggatttctctctagcattttagctcattccagtaaatgatttttttctttatgaaatagaactaccaaaaaaaaaaaaaaaaaaaagttcaacaacaacaaactgaagggggagaaaaatacaccattaccacagcaacaaattagtttatgctagacaacttgtaaagaataaattaacttccaaatgcctatagacatggatattagtgacacaagagattttagacttttggagggttcttaaaaaattgtgctttaaaggaagagactctacattggatgcagccagtttttaaaaatgtgtctgaagcatttggtgatggtttctgcctgttcagtaaagaagcaccggctcagaacctcaacttctggacttactcaagtttgcagaactcctccaaagcagtcgagtgctctgttctctctgcttggatgttcttgttgtgaatgaacctttatgtcttgtagagcataaggaaacccagcccagagccacgagctcagatgaggagggctgctagcagcgatcaacttagggacaatagcccgcccccagcattcaagccagagccgcccaaggtacgtggctgggaagcccaggatgggaaggaagaggaagcagatgcctctgaagcctcctggacggccagggaggagcatgcacactgagatggtgtttaattacggttctgactcactgtgttctctattagagcctatcttttggcctgttgggtgaactcccaaattagggaagggcaaaaaggaaggaaaggcaatattaggaga

SEQ ID NO: 309706 - DNA, 1000 bp, Homo Sapiens
aaaaaaaggtcttgcccgggcgcagtggctcacgcctgtaatcccaacactttgggaggctgaggtgggtggatcatgaggtcaggagatcaagaccatcccggctaacatggtgaaaccctgtctctactaaaaatacaaaaaaattagccgggcacggtggcgggcacctgtagtcccagctacttggaaggctgaggcaggagaatggcgtgaacccgggagttggagcttgcagtgagctgagatcgtgccactgccctccagcctgggcgacagagcgagactctgtctcaaaaaaaaaaaaaaaaaaaaaaaaagtcttaaagatcagggaagttgggaagtttcagataagcagggataaaggtttctaggttgaaaacaataacatgtatggcactgaaataaaagccacataatatcaaaggagagtttaatactgaaagagaaagcaggaacaaagaactacattacatctttgagcatttacatgatcctgtaaagcaggattctagacagatttggtggcagcagccaacaggatgaaatgaaggtaaagaagggagagatatgaagcagggagataagctaggaagcttttctagaaatctagatatgaagtgcaggttgattgaatgaaagtgggaatagtaagggagagagatggacgtttctcaggaaggaaaaagacagagaggtggttacagagtctagggaaacacaccattcttcctggccttctctgatgctccccacgaggctcatttcagtaacaaagctcagagaaacaaccaacgaaagatctttgagacttccatgggcaaagatcaataaggtacaaatgcaaggcaatgttggctgacaggctgcggtgccttgagcccaaacgagccaagagtgtccttccactgggtggcgctgcagtactgaagggaacgcacaggccgcttctggacactgcagcaaggtgcgtctctagtcatgtttgcttcttcag

SEQ ID NO: 309707 - DNA, 1000 bp, Homo Sapiens
cggctcccctgaggaaacagcaaataatttgggcctcagaggcacagactcttgggttccttatgacctggtgcctgacggagaaagaagtgcgccgccgttttactgtctggaaaatgggttgcaggcggaacagaaaggctgcggcgaataggagcggaccagaccctggtgtaggggtcttctggatgctttagagacttcgtgccttcccggttcccattccctgctcctttggacgagaagggaactagtatttatttaactttaatcaggccgggtttggtggctcacgcctgtaattcccagcactttgggagacggagatgggcggatcacttgaatccagcagttcgagaccagcctggccagcatggcaaaccccgtctctgctgaaaatacacaaattagctgggcgtggtggcgcgcgccactcccggggctgaataaagagaatcgcttgaacccagaaggtggaggttgcaatgagttaagattgcgccactgcactccagccttggcaacagagggagaccctttccctgtctcaaataaataaataaatagatagatagataatttaacattcatcagacactatttcaagctccagtttggagcctgtgtcccgcccaagtcctcaagccctcaccccacccacccttgggctgtcaggtcacgcctgcaggtgctcaataaataccttttgaaatgtttttcgtttgtttgtttttgtcccaagtgccagacactgtgttaaagtgcttaacctccatggcaagggtggtggtgtctccattttacagatgaggacactgagacccagagggtaatcacatggctgcgctaggaaacagcaggtccctaaagcccccaggttggctggtctcaggaactgtcccactccatcctgctgcctgcacgcgccccctccacatccagcaggccagtcacgtcatacatgccactcccagccaggccctggtgtgggcctagccag

SEQ ID NO: 309708 - DNA, 1000 bp, Homo Sapiens
gtataaatatattctaattttatttagccagtctcctgctgatggacagttaagcagcttccagttgttcactatcacaaacaatgctgcaatgggcatctgtgtatatggcttcctgggcgcagggaagccaccatgatgcctctctgggcaccaaactgctggatcggaaggtctggtggatattactaaaccataccccaacaccaccaccaccaaacttctgcctctgtctttaatacaagttgggagactggatgggctccagggtgaagtgagaggttcttcaaggtgaactgtttctgcatccagtgccaggtctcctgtctcaaactgcaggggtgcaggcagaagcggggagctatgcccagtcagtgccagcccctcaccctcacgccacagcagcagcagcaccaggctctctggccaactgcctgtttgcccacgtggccacactcctgggtgggtgcagcctcactgtctctcctgcactgagatgcgactctctttgccatcctcctgggtgaccggttggcatccatgtaaagtctcctgcactggagcagcagtgttggagccaggaagatcgtcgggaaaattgatctcctggggttcctgcttggggtggggggcctggagaggcaaggtgtgaggtcacccccagcagcaggggcagctgtgcctctgaggagcccctccctgggaagcggatcccttccccaagccctcccccctttcccagacggtgggtcagtgctgattcctcgggtgcctcctgccccctgctggccacaccaagggcgacgaagagcttccagagtgggagccagtgggcttaaggggctgccacatttgctcccacccatttgacccagccccaaggcccaaagatgcagctccccacgcgttgaatgccaggaaaggagtgaagaacagccagtgttaggctctgccagtggtgccaggggcagttctgtgggggattgagctctggatggaa

SEQ ID NO: 309709 - DNA, 1000 bp, Homo Sapiens
gtcaggcaagcaagctttattgagctgcttggctgctccaccacagttagaggaggcagccctgcttacagactatagcaggtttttatagggccagaactaggtcggggtgtgggagctgagttgggggtgcaggagaactgggttggggtgggggagcttagtcgagggtgcaggtgtcttgtctgcatcctggagatgttttttgccagctttgttatgcgaggtgaacagacatgttaaccgcatcctgtaactgtctgcacagttactggagggatcagtgaaggggggtttgttttttgccctggggtagctgtgcggagagcacaagggaccgtattgtaagtcctgtgggaggggaagggaacggtctgatcagggtgaccctaacagaagagtattattctaaacacctatctcataaatcacttacaagtatataaaacaaccacaaagagcctctctaccaagattttactcacgcatcttacatttcagtgtctttcacctttcacggacaagtatatcagtgatgcacacctaagagaaaagaatttctcatatctctgacgcagcaacaactgaccatgtgttttcacatcagcactagaaatgaagacacagcatctactgatttgagaatagaatgacatcaatattcgcttttcaaaaatttaacattttttcaatgcaaaaaagtatattttgaatgtaattataactctacaaaaactcagtctcatcctccttttaaacttaaatataaatgatctattttaagtctagatgtctctgtagactcaacacagggattcagtgtcatttctgaacgtgtccgtgctctattcctttctccttcaaatcctccattgtttacttaaattggattttgcttatttttccatttagtgtatttgcaaaatatcttttagtatgaactctagtgttttctaagctatcatttttgaacaaatgttattccacatttatgagattt

SEQ ID NO: 309710 - DNA, 1000 bp, Homo Sapiens
acatcacaacatcgtttattatgtgaattttttacaatacaaacaaaaaatacagaaatgcaatatatgaatacagctaaatgcagaatggtgacttttttctcttcaagaggccatgattcccatttctagtaaaataaagagactgcatataggtagaaacaggttggtcattagcttcacaattttgcctagaaatgatctataaatgcatttccccccctgctacttaccataaagtgtaaaaagggagttaaaggaaagtttccttgttggttcctaccatatgaaagatgctatattctattttagcagtgccaatatatggaaaatatctaaattaaatgttattacaaaaatgaagcagtaatgagattctggctaaagagggcactaaatgagaataatatatatttaaagaatccaaaacaaacaaacaaaaagacgttgttataaaaaagctctaggtgcacagtaagcatatagggtttttttttttccatgtgtatttttaaacaatggaagtgtcaaaaaatagggtcaactgtgttagactaaattacattattgtatatgctgcactgaatggaacctttgtattgtaattatcatagagaagcacagtttgcatcatattatggcaatttatcctcaatgaaaatcttccagagtccttttattttggaatatcctgtaaacaatcaaaccaccagaacatgattgtacaacagtaaaatgttctcttgcattaaactgaagatatctgtttaataaaaaaagaaaatgtaggaaaggtacttagagctcttactttctaagtacagaacaccctagacaattcaaggcatcttaatctccatcaagaacaaaaaaaaaaataatttttgtcatgctgttaaatccatcattatggataaaactggtgcaaattggtcaaacggatccaacaaacactgatgtccaagctggcatattggcaactaatacgttaactggtggt

SEQ ID NO: 309711 - DNA, 1000 bp, Homo Sapiens
acttttccactgttttattacaaaaatcaaatttcatttgttacaattcagcttatttattgtaataatcaaaaaaggggtttatacaaggtatttttatacagtttataattaaagcacttattttacaaaaggagggaagtgaataagtggacaagggctgaccaaatgttggccattataacataaatacatccttgcaaagcaccatcgtaccaaagtcaatgaacaagaaacaccagttgactttaagacaatgacgaagattaaagcttaagggaaaaaaataaaagataaacatctgaaagcagcaccagatccttcacttgcaaataaggctagtccagtttaatcttcttggtatcctctctactttttaacatttttccttactaatccatatatttaatttcatgtcatattggatttaatcagactttaaaaattttccctttaatacccatatttaggcattagatatatagaatatgtatctatatataaatatatctctatcgcccatcctgcttatatttgactgaaaaacacaaccaccaaaatggacagttcagcaaaagcgcgttgtctgtaattctctggtgttgcttctgggcaaaccctaagtgatggtggagaatctaacagttcgttaggtctgtactctgcttctaaatacaagacatcatttagtttgtaattctatctgtaaagtcatggagatttttttcagcaataaactcaacaatttgaaaatgctttatgaaaaagaaaaacagcaaagtttacctcaattgaaagagggtgagggtagagtcagtaactgattaacctaagactccaccttccactccactcaggtacaggctttatgagacgtagatcaagtcagacaatagcctgagagtgtgaattcacaatacttataatttaaattttaaaaaaattataaacgtataattttatacttgaggtccaagtcttctaccataaaatgttgaga

SEQ ID NO: 309712 - DNA, 1000 bp, Homo Sapiens
aagtaatggtaaagtttatttcatttttaataacaattagaggacaaaatgtttaaaatttgcagtttaaaacatgcacattcacaaaaggccaatgacacataacactgcatagaaataatattactcaattttaataactataaaacacagtgcatcaaacatcaagataaacaaacctgagaaaactactataaccacagattcaatactctccactcatgcagcttcacaatttctacagcagtttcagcaggaatggtttttcagggagctgaaaatactactttatctttaacgcaaaactgcagttttctgtagtagctgccttccaaggctgccctgtttttcttaacctaataaacttgaaaatgtaaaaaatgacgattaaagtagttaaacaacagatagtatttactgcatttatggcttccatttagaaccatgaaacataaaaatattatttttaactattctgctcacatctttgcaagaacagatttacctgtggaaagttgctgttaattcaaagtaagcaaatatgaaatctagttttcctacttaagggagatttatttgctgagaagttttgggagctttattaagaaaagttcttagaggcaagctaaacaaaagattcaattaaatttgttcaaatttctttgtaaaataatctacttattaaaaaagttgtgcagaggaccaattaatttgtctactgaattttaaattccaggtaggccgtgatagaactttacaaggcagaaataaacatcaagatttacagcaatagccatgcattggcctggatcactttaaatatgaactcatgcaaaccataaacctatcaaaaacacagctgttctcatacagaaagtaaatcaagacgaaatatggaaaacatttatttcctttccttcaaaatttaacttacattccactttaatagctgttgaaggttaattaaaatgcagcaaagtataactacgttacacaagtg

SEQ ID NO: 309713 - DNA, 1000 bp, Homo Sapiens
gatggaatgaaagtcagagttttatttgtgttctgagtataagagaagaaagttcacttttagcttaggtaaacagataaatgtattaaaaatatgatatatatatgtctgtgtttatatagatatatacatatacacaaacacacaaaatgcaatattattcagtcagagtaaggaggaaaatcctgccatttgcagtaacacagatgaacctggaggccattatgctaagtgaaataagctagatacagagaggtaaataacgcatgatctcacttatatatacaatctaaaattgtcaaactcaaaaatgcagagagtagaatgatggttgcaagaggctgaggtaaggggagaaatggcaaaatgctagtcaaggggtacaaaatttcagttatgcaaaataaataagttcaagagatgtaatgtacaacaatgtgactttagtaaacgacattctattatatatttgaaatctgcaaaaaggatagatacaaaaattcttttaaaggataaaaaagaaaatggtaactatatgagatgatgggcatgttaatcaacttaactgtggcaaatatttcacaatgtatacatatatcaaaacaaaatcatacacctaaaaacatacatacaatttttgtcaattatacgtcagcaaagatggaaaaaatataaacattaacaagaagaattagcgcgtatatgtttgcttatacatataataaaatatatatattccacattttatactatataaaacattctgcttatatatataataaaatatatataaacaatattccacattttatactatataaaacattccacattttatatatatgaaaatattccccattatcctggtaatgttaataacaatgttaagggctattgagatgtaacaaaaagatattaccttttccaaatacactctcacaacgtgcatcgagatcatggcagtctccgtcataacaaataaacttattatttttgcatg

SEQ ID NO: 309714 - DNA, 1000 bp, Homo Sapiens
cctgattttgtataactttattccattttataattgggatttaaagtgtgggactacctgtgatttttgtttttattcttttgtgagatttttcaaatacataatttacagatcatataaaacactcttacttagatcacatgtcctaagcatgggtttgaaacgattgacttggggagggtccagcagattccaagtgtctgccaggcccctcgcaacattctgagtaaggaattctgagatacactgtgagctttgtgccttgtggcctgactatcctggctgacggatggtgcagaaattagaaattcatccaaagacttccatataaaggctggacatgaggccagtgacctatgagttgacgcagcatgaggactctgcccaaaagtggtgctccatattggatctccatgtaccgagccaggtggagtccctgcttagagacagaagggagggagtagaaaaagcaagcggagctggggttgtagaggaataagcagcaatggagagaaggaggaatccagaatggggatttggggattgcaagaagaacgggtcttgtgagtggccagtttgtcctgaacaacatctcagttcaccataagtcctgaccatgtacctggaaagtattttcttgggtgtcttcccttcccttcatgtgtgtccttgcaataagcaccctgaagcacaggaatagtcatggccaggacatcctggcagccactcggaattccggacaactgaaagatgggggcatagtggggtcagtattcctccctgagcctagtccttctccctccaggtcgagacccagtcaaactaaggggaagcattgctggctctgttgtcagctgatcctaggctccacagtagaaactctataggtagaaaccaggttccaagatagaaactaggtggcttctccccatccaaccccatagcactctcagcataagggccagatctcagggggcagtgtagcacaaggctggtccta

SEQ ID NO: 309715 - DNA, 1000 bp, Homo Sapiens
gagatgtagtcttgtagtctcgctctgtcgcccaggctggagtgcagtggcatgatctcagctcactgcaacctctgcctcccgggttcaagtgattctcctgcctcagcctcccaagtagctgggactataggtgtgtgccaccacacccagctaattttttgtatttttagtagagacagggtttcaccatattagccaggatggtctccatctcctgacctcgtgatccgcccatcttggcctcccaaagtgctggtattacaggcgtgagctactgcgcccggccaagtctattcattttaaggtgatttttgtatatggtgagagacaggggtatggtttaattcttctgcatttagatatccagttttcccagcactgccctttccccagtgtatgttcttggtgcctttgttgagtctgtttcctgtaaatacatgaatatatttctgggctgtctattctgttacattggtctatgtctgttgttattttttaaaccaataccatgctgttttggttattgtagctttatagtagattttgaaatcgggtagtatggtgcctccagctttgttctttttgctcagagttgctttggctatttggctctttcgtggtttcacgcaaattttaagattgctttttctatttctgtgaagaatgtcattggtattttgacagagattgcattgaatctttagattgctttaggtagcatggtcattttaacaatattaattctttcgatccatgagcatgggatgttttttcatttgtttgtgtcttcttcaatttctttcatcagtgttttgtagttttccttgtataggtctttcacctccttggttaaatttattcctaggtattttattttctacataacaattgtaaatgggattgctttattggtttcttcttccatgagttcattattggtgtatagaattgctactgatttttgtatgctgatttttttttaccccacaactttact

SEQ ID NO: 309716 - DNA, 1000 bp, Homo Sapiens
gaccagacaggattaaattttattgaattacagttacaagtggaaaaaatgactgacttactgcatggagaagtattatgtcaacctgttaaaagctatggaaattaaaatgttcatgtatatacaaaatataaatgacatgtaaggtaaaattacagtgatcaatttacaacaaagaaattaacagtagttttccagcttgtttgattaatcaagcaggtttactcttgaatccatagcatttctacaatttaatttggacaaagttctattccagatcagccaggttttaaaactgaaatgtgttaagggtggattgttagcttccccaggattggtgtggatgataaatactttttttaaaaattaattattattgtttataagacatggattccagctgtctccctggctggagtgcagtggcatgattatagctcactgcagccttgaactcctggacttaaacgatcctcctgcatcagcctctgaaatggctgggactacaggtgtgtgccagcatgcctagctaatttttaaacatttgtttagagatgggtctcactatgttgcccaggctggtcttgacctcctgacctctgctgattccccccacctctgcctcccaagtagcgggattacaggtgtgagccactgtgtctgacaagaatttatacttaagcataggagatggttctggaaattctaagaaattctgctctcagtaagagtagaggtttggagctttacctcttggcagtatcccttggaagggagctctgagattaaatgtaatcaaacacttattgagagctttctatggaccaggcactacactagacgctgggaattacagaggcaattacctgtcctatactcaaggtgttaatgatctagtgtcatttttctttaaaaaagaaagcacctacatttgtcatcttgagcaaatatagtaactctaacctcaaggttcaagtgatttactcaaggtttaaatcat

SEQ ID NO: 309717 - DNA, 1000 bp, Homo Sapiens
ttttttttctttttttttcttaagtattatatataattttctattatttaagaatctgcctaacaaaaacaaggtagtgtggggcttataacatatataaatgtaagatgtatgccaaaacagcacagccagtctcatctgaggatgagagggaaggtaaaatatatcgtcagaaactaaaactgcactattgacaatattaggagttttacaaaaattataagaaatactatgtacaactctatagcaatatattcagaaaaagggaatggttgattttcttgaaaagtataaattatccaaattgtttcctgagaaagtagcaaacctgaaaagataactctaaaggaaattgataaagcaatcaaagagctatttccaaagcaaacccagatagttgtataaatgagttcaacacatcttgcagaaacggctaattcctttattattcaaatttgggggggggcatagaaaatgataagcttgccaatttattttataaggctagcagaaccatactcctaaaccaaactaagataatacaattaaaaaacaaaatcaggctggtacagtgactcatgcctgtaatcccagcactttgggaggccgagtcaggcagatcacctgaggttgggagttcaagaccagcatggccaacatggggaaaacccgtctctattacaaatacaaaaattagccaggcgtggtggtgggtgcctgtaattccagctactcgggaggctgaggtgagagaatcactggaacccaggaggcggaggtagcagtgagctgagattgtgccactccactccagcctgggtgacagagtgaggctctgccataaataaattaaaataaaataaaaacaaagtcacacattattcatgaatacagatccaaaactttttgaagtttgacaaaatgaacaaatagaattctagaatacatgtactgtgacatgtaattctcaggatgcaatgttttaggtttagagagccta

SEQ ID NO: 309718 - DNA, 1000 bp, Homo Sapiens
gaaaatttaaatttttattcttagctataaagcaagaaagtaaacacattaatttcctcaacatttttaagccaattaaaaatataaaagatacacaccaatatcttcttcaggctctgacaggcctcctggaaacttccacatatttttcaatttatttcgatcttgtacaaccagtatttttctagtactttcatcaaatacagctcctgcaactcctacttgatgtgaagcatatcctggtaatctgctgggcccttctctcagccacagagtcaacgttgatgaatccgattctgcgtggtgaaagcagaagcccagggaagcagcaggggcaataaatcggctttggaggatgggaatgtgcagccatacagctgttctaccttctgatcgccattgctgtactgcagctaaatgcagaagaaaaaagtctaaataatttccaaagagacgagtggaataaattaaaactcacctcagggtttcgcctcctccaggaaaccatctttaagcaaaagaggtccccaaatgtcttgttcacatcgctggcactggaagtaccatgttttatagtaaccaccttgtttatatgatttttccatcagactgaattccttcagaataaagtcattacactgctgacctttatatccataccaccaaagacaatgcttggcacgtaacagatgttctgtagttttagagtggacaaataaaaggatttaaaccgaatcaaataccatttgaatgctgttccttttaacatccttaggtttaatcttaaagacaattatggacttctatttttttcttcctttaggagttctgttataatgtttttaatgtataaatttcaaggtagttaaactttgtttttaaataatgtatgctggttgtagaaattttgaaaataaaaaatatgaagaaatcaaacttcacattttactagcatataggaataaaattctaatttttccttattatagataatatcatg

SEQ ID NO: 309719 - DNA, 1000 bp, Homo Sapiens
gagacagggtctcactgtattgcccaggctggaaaacagtggcacaatcacagctcactgcagcctcaacctcctggactcaagggatcctcctgcctcagcctcccaagtagctaggactacaggtgtgcactaccacgcctagctcatttttttattcttcatagagatggggtcttactatgttgcccaggctggtcttgaactactggcttcaagccatcctcctgccttggcctcccaaagtgtcgggattacaggcatgagccaccacacctggcccgctttttgaactttactgaagcttatatacaattctgccagagttgttttccaaaatcatccaactctaaaacatattcttttatctaaaaaaatcaattggtttccataccactcattaaataaattattaacataattggttaactaattggttaacacaacccctcctcaattctggggataagattatgcctcattttgaggaaggtgaaaggcttgacggtgaaattgaaatgcaaagaacagagttcaaggctcatggttaggttgttattcccagatcctaatacaaaccagcaatggtgctattctgagcccttatccacaggaggttagatgccaaaaaggactctgaggtcagccaaggtgagcttggtgacagattctccagaccctgatagaacttgtttggccaaatctttctttttttcttggagctgtaagatcttttcttctactgttccctcacaaacaaatctgtgtatgacaacatctttctgctgccctactcggtaaattcggtcacaagcttgatcttcaagtgatggattcctgttagaagacagctaaagctcaaaggaactgacatactagatcagaaatggcaaactatgggccatgggccaaatccagcccacagcttgtttttgtagctaaaaatattgttacagttttaaagggatttaagaaaagaaagcaaagcaaaacaaaacac

SEQ ID NO: 309720 - DNA, 1000 bp, Homo Sapiens
aatttatataacttttatttttatataatttcacatgtacagaaaaatatccatatacctttacccaaatagctaccaccaagaaatctctgttgtaacatttcaatcgccattccctctgaaataataacaaagcactttatttgagtattctgtattccccaaagctaactgtgaaagacctacatcacctcaaaaccttccatttggttccatagatcctgccatgtcacattcttgtaaccagctgcagggccatcttgttataactggttcatgtcctgctaaagctgagaggtgaagggctaaaaacacagtcctggcacagattccaggacaccccggcacaggcttgtttgaggacattgcctgggtaaacagcctcccctgaaaatgttcagtgtacaactcttcacagagcaatcgctcagatgcgtggcagcacgcagacatgtctctcggcttctctccttgtctctgttgccttcctctccagtcggtgctttagaaatgctttattcccattgtccactgaaaatacaacctagattccttcagtaaatatctgttaaggaggtcacatgaaaagattgctccaactcattcttgctggtgggctcccaagggtaaaataatatagttcgtgtcttctcagtcatgaggaaaccattgtcactaaatctccctgggatgcttcctacatccaaccaaacaaagggagcgacagctgaggtctccaggtcaaaaacaaatatgtcaccttgctgagagatgatggcagtgatctgcgccttgcagagccccacggcctccttcggtgaggacaggaagtggtagttggtcgggctcaggagttcatggtcagctgaaaggtaaaaggaaaccacacagctttcccgtgtgcaattcccacatctcctcagcaattcagacactggctcctcataaaggcagacagcctctcctcctttcatcacaaaacgttcagtcacacgagagc

SEQ ID NO: 309721 - DNA, 1000 bp, Homo Sapiens
acaaatgatgctcaaacacagcttttattttacttcaaagtttacctcagatcagcctgggaaggtgaggggaatgaagcagatgctgttaaagggtcatgggagagaaaaggtatctgtgggaagagaataatctcttttgacttcgtgtgctgcctcacggacacactggagcagggattgggcccccaaggcctcaggtagccccgtgcctgtggctttgctgggtgcagcctacgtggctgctcgaatgggttgcaggctggtgcctaaagctttcccaagggggcgctgcatgctgccactgactccacagttctggggtcctggtggtggtcaggtcctgctcccagcgctccacaaggcactctctcctgtggcctggatccactagacactagacatttccctggtgggggccctctgtggcagctgcacctcacatttccacttagcatcactctagtggaggctctctgtgggctgggcatgctagctcagttctcttttcctcttcttataaagccaccagtcccattcctgtgataacccattaatccattaacccatgaatgaaggcacagccttacgatccaatcacatctcaaaggccccacctttcagtattgccacattagggattaagtctcaacatgagtgttggagggaacattcaaaccacagcagtatgaaaacaatattcaactccaaggtatatggtcaagattacaggtggtaaggaataggctagagaataggaataggctaaatttgctagagatgtgctgtggaattatctgtatttctagctatgatcttagcttcctcaagtccatttcattgcaagaatatgaaaaattaaattgagatccaggttctttttttattttttaatttttattttttgagatggcgtttcaccctgtcacccaggctggagtgcagtcgcacaatcctggctcactgcaacctccgcctcccgggttgacgccattctcct

SEQ ID NO: 309722 - DNA, 1000 bp, Homo Sapiens; identical to SEQ ID NO: 120121

SEQ ID NO: 309723 - DNA, 1000 bp, Homo Sapiens
gaagtttttatactttaatgaataaagcaaagaaatttaaactaagtaaatataatctgagaggcagttaaaaaaacaaaaatcaaaacccaccaaaattgaagaacacaatcttttgaaacatttaatcagtccatagcaaatagttattacataccaaaagctctaagtgttaactagttccaccacaatgccatgtaaatcttgacaatttagaaatcttgagatcaacacttaagttcttttcttgatctctacagcttggtttgtaagtacatacatgcttttgtggatctattcccctcgccacacacacacattttcaaggagccaataacatttttttccatctgtgcctaaaaatgttacaattcagttctagcacattgaccctgataatgaaaatgtttaagttaaagatggggacacaatttcaatcttataaaaatataccagtattaaccaaaccttaaactcagagggcacttcacatgtgcacgagacttttagtaaaaatgacaagatcctagaacagctgtttccaggactttttaatgaatcaagtactctctctctcacacacacacagaacacacacacacatttttatactattggttttgttaaatccaggctatctggattaagtagataggggatgggtttttatagtttttatttttgtaactatagggcagctactataacaatagcttaacaacactgaaaaatttcaattaagttcaccctgtttttagaaagtgtctaagtgtaaatgcaaattcacctcttcttaagttagcagtttatattaaatcagatatggtttctgaaatggaagtaatgtgttggagggcaacccaaaaggacagttgcgaaattatgaatgagaaattaaagtaaaaccaaatcaaaatatttatacattttagagatgggacaaaaaggatattaagaaaaatgtcttctttcctccccattcaaaagcagccattcttct

SEQ ID NO: 309724 - DNA, 1000 bp, Homo Sapiens
atgcttaaccttttttcttttctgcgttttttatggtggccagagtgtcttgctgtactaaggtctgaataatatccattataggaccatgatctggatctctgagacaagcttctttcatcccatcggcttgaacaggggtcacttaacttatctcctttactccatttttctccactaggtggtctatatgctcttaatctctgcatttcctctttccagtgaggaggagtttcactgctgtcatcatcatctgactcagaacaggatcttgatcttggaggtgtgtgatagcgaattgtgccccttcctttaatcttccgtccagactttgatacagatggtttctgatcacttacaatgggtgcaacatcaggaatcttcggttcaggttctgcagtaacaacaggcatatctcttctcagtaaaaatcggttctcaggcactggaggaatctcttctgggcggaccacaggtttttcccttttagcactggaatcaactgaccttttttcattggtatcactcctctcagagtgaccttttgggttcattgcatgtttattccttggctcttctgaactgcttgcttcctttcgcctctttttagaacgtttaacttttggcctcctcttatgtttcctccttctgcttctctcatgttcaagttcactttctgaagatgattctgaagaagaggaggaattggaaggggaatccgagccttctgaatgagttggtttcttcctttttttctcaaaaacatcttttattgattttgtggcaagtactccacagtcaataactcgcacatctgcatatggtctgcttgcagcatcggtcttcagattttcaatttgttcgattacttcaaaaccagaaataaccagtccaaagactacatgcaccccatccaggtgtggagcaggctttgtggtactatgtaataaacatcaacacaaagatgatgtcaaacacgatgtgttcaggtgaagagagc

SEQ ID NO: 309725 - DNA, 1000 bp, Homo Sapiens
ggaaaatgagatttttgactttaacaaaacaaatacagattgaatttaccaaatattgataattcatgtagaacgggtgccacagattttaaagtatcaaaaccaagagggcatcacaaaataaactttggtgaaaaatatcttcatcaaagaagaaaatatgagaagagtagtccttatgcagtgaggagaaatatatttggtaaagtaaatatgggtagtagatactgaatctatagatagcatatattccaaatgttttttagggaatatcaaatcagatgatgcttagatgttatagtaatatcacttatctcatttggaatgaaatttaatgttttttaataaatagcaaattttcattttttcactacctttataaaacaaattaaatatttagagtataactgatcataactaacatcaccttgcatttactaataaatactctaaatacatttggtttattattggaatttatatccttataattttacctgctagaaattagtgaccttgtggcattatgtttaaagtttacattttcccagtgatgtgaacagtatttatacataaaatgatatctgtccaatgaatagtaacatgtttgttggtttaaaaacagaacatgtttagtttgacattggcatgtctcttcagaatttaaaaagttatctttaaggtatggcttttgggaaatcattaataaactagccatctggaaaatgaatacaaatttcaagatgctaactaaatagaactcagacacaaggcaggtatttgtataatatgtctttcaattacaaattcatctacagtagaaacagaaaggaacataaaagtatgatctactttacagtaagctgtttttaaaataaaaattacagatcaatagtgaaggtgaggaaatttaactgagaaaattttcaaaatattaaaatattcaaaaacattgacacatgaataatacctatcttaaagtaataataataaatgacat

SEQ ID NO: 309726 - DNA, 1000 bp, Homo Sapiens
aaatcatgacacttggaggtttagcaccagcatccaaaatgaacaaaaacggaaaaaaaagcatttactatatatttcagatttctttggttggggttctccccatgtggtattaatatttcttgtttcaatatatatattaccaaaacagtaaaaaccaggaaaaaaaatagaaacctagcggttgctgaaactggagaggctactctcttgtcttccgtgcaggaattcccaggttctcagcttgctggaaaaatttgttgacattttctttttgtagttgtttcttaaagaataacagtaaacattccaatgtccaaatcttggttagtcttccactttattgcttggatgtttctttggtgttggttaaggttgtggcctgctttttgctttatttctgaatggtcattaattctttaggtcacctgccgatggtgaaggtgcctgaggagcctggtgttactcagcactgctctgctgggtgggtggagcagggttctcagttggtgcttcacctgccttggcctctttgccatcttgtgaaggagcgttaggaggacgcgggcgacgccggtaattgtagggacgccggtatccacggcgaacagacggctggtttggaccactggtggcttgctgattttctttatcttcagcctctccaactgctggggcaggtcgtgggcgaggaggtcccctgctgtagggaacacagaagaaaatagaacaggtgccaacaggacagggcttctccagaaaataaggttttatttatttttaaaaattaaaaagtcaagtgatcagggccaggcatgatggctcacccctgtaatcccagcacttcaggaggctgaggcaggcggatcacttgaggtcaggagtttgagaccagcctggccaacatggtgaaactccatctctactaaaaatacaaaaattagccgggcgtggtggcacatgcctgtaatcccagctacctgggaggctgaggcataag

SEQ ID NO: 309727 - DNA, 1000 bp, Homo Sapiens
ccctaaacaaagagggcagttaggctcttcagttcactttgaaaataactgaaagccactctctgctgtacccattagcgataaggtaaacagatcctccatattttgcaaaacccaggatacttagtcccaggtcagtaaacaaaaactattcaaaattttaatttatcatataatatggttttcccaaaaaaaaaaaatcacaaatttgatggtttgtcttgtgtaccagtgttctcttacatggaattttaccaacaattactgctacactcaaacagtgaaatcttttccacattagttaatttttactttaaaagaattcattctctttgtttcacatcaactaaaaacacagtcattttagctttcagtttctcagagttcatttttgtatttcttgtacctaatgcagcatgaccctaaaatgagacttcaattaaatctgaacactgacacggtcagtttgtttgttttaaattttccaaggaaaggtagttattgatgtgttcatctttgtatcctcttttaggtgagtcatttttttttaatctactctaaaatagtttcctcaatttaagaaacataaacacaggtcaggtgtggtggctgacacttgtaatcccaacactttgggaggccaagacgggtggatcacctgaggtcaggagtttgagaccagtctggccaacatggcgaaaccccacctctactaaaaatacaaaaattagctggtcgtggtggcgcatgcctgtagtactagctacttgggaggctgaggcaaaagaatcacttgaacccaggagacggaggttgcagtgagtcaagatcacactactgcactccagcctgggcggcagagcgaggctctgtctcaaaaaaataaataaatatataaatatatatattaaatataaatatatatattaagtatatatatttatatattattaaacaaatattataaatattatatataatatatattaaatatataaat

SEQ ID NO: 309728 - DNA, 1000 bp, Homo Sapiens; identical to SEQ ID NO: 120122

SEQ ID NO: 309729 - DNA, 1000 bp, Homo Sapiens
ttttttagacagggtgttggctttacaccaacgaaaaagaaaaacagatgaataagcttttgatcttcattttctttctcttattctcatggtaggctgagatgcttttaaatgtgatgttataagcctaaggcagcttgacttgcagcaacaagttttttaccctcctcggcaaagcaggtctccttatcgtcagccttgcagcacttctctacaaaagctgcgaaatcatccataacagctttcagttgctcttttgttgccttgggcttgtgtttcacaagctcaacaagtgcagtttgtttcttgatttgtctctccttctcagaaagtgtgcatatatctgcatggaaggtgaatgtttcagcattaaactctttgggaacgtatgtttcatcgacttccagagctgaaaagcatggtcgcccgttcaccaaggattctgtgcagcatttggtgactctgtcacttactggcgttttctcatgcaacacacataactggttcaggaacacggatagacagtcttctgcacagggcattctttttgcttcaggatgtttacaacatttgctgcccacttttcctaggtttcttgagacctctacaagagttggagttgacacttggggtactttcttggtgtaacgaactaatagcgcattctggaatttgtactctccaagctgctcaaaaagctcacaattttgtttgattaaattctgaggctcttccacaagaggtttaaattcatcgaacactttggcatagcattcatgaggatctgcagcggcacagcacttctctagagtggtttcatatgtcttggcaagtctcagcagcagcacgacagagtaatcaggatgccttcttgcatattcatacaaaaacatgcccaggaagacatcctttgcctcagcatagtttttgcaaacatccttacttccaacaaaatcagcagctaatgaaggcaagtcagcaggcatctcatcattttcca

SEQ ID NO: 309730 - DNA, 1000 bp, Homo Sapiens
gagctctttgagagtggatccagagaaaatgaggcagagtgaaaagacagagcagtggatggggagatgggtggtatgatttgggccttcatttgagtctgaagcttaaacgcctgcttgaaattcctagaatttcaaattttattttgtttaaaaacttaggattctggtaagtgcatcccaagtgtcttgagacacaaagacacatcaaatgtgaaagagatgtaaagagagaaatcttgcaacaaggtatttattttggatgagaaaaggaaatggaggacaaggtacaggagtaacaagaatttcttttaactctcaaagtaaattctgagcttatttttcttgattctgcaagctcagcggcagcagacccggtggagtgtaccacgaaaggcgcaggacccaaagcgacgttataacaaacggcaaattcctcttccgcaaatgcacctcaagcctctcgctgagtctgaggacacagggaaatcatcataaatggatcagaaggtcagcagtgatggtaaagggaatcttggataagtcatgtgctaggtaatgagtgatgttggctgcattggggccagtagcatgaacagcctcagtcaataggaataaatacacagagcagtgctggtcacacaggatttgagactcattctcatttgcgctcatttttgtgcttctgccccgtcacacacacagctgaacacactctgggctggctgtacttttaaaaactattctacagatacagttaaaatattctccttgtaatgaagtctacttgtgtgaatccagaaagaacgagtcagactgtctcttcatatctaaaacctactgaatttcacagacatatcttgacgtcaagttttatttttcaatttatagatttctgaagtgaaaggattgttaaggaagtaaaggaataaaagaatggttactctccaggcagagcagcctcaagtctttaaagacagaaagatttatttggctctct

SEQ ID NO: 309731 - DNA, 1000 bp, Homo Sapiens
gatgtggcaagctcccggcatttattgattgcaagcccccacagagcacactgcccttcccaggtggggtgaagcccagcgaccagggaggcagaggatgcagcatccgccccgtcggactccttgtcggggagaaggccctaaggaggaaccgcaggcccgcctgggccattcccccagggagccaagcgggggggcccaggtgcccgagggacgcaggcacaatccctgaagacagagaccgcctgctggtgagtggagaggctttggcaaaactaactgttaaagccactgcagggcaggcagcggtgcgcggggacctcggtggccctcgaccctcacccacaatggctccagaaccaccctgggccactccctcccaggcactcgcttgtggtctgcgttgcttgttcatcccacccagctgcggggtctcgcggggagttgcagctgcccgaggacatggaaggtctggttgctctcagcagacacgaagtgcagagctagcacttgggtgagcaacagccaggctgcacccacactctgccacccaagtcctcgatggaaagtgctggaagatgctgctttgggcatcgggggcaggaggcagggataatacccctcccctggcccaggagaggggagaaatcagcctctggtagcccctgttcccctgaggagctgccagcgggagaggggcaagggccacgcagtgcccagccgggagagcctggtagccagagcgggggtggtgcagctacagctgagaggggacgaggccaggaggagctcagccagcaggtggggggacagcaggggcctgctgcggaggacgggtggccacggccagggaggtcgtggccccaggagcaggtgctgggcttgggactctttggaagaacctagcgtgtctggcctggcagcccagccattcccacggctggtcaggatggcactttgatgccaaagtttttgcgtagctgttccagaaacacaaaag

SEQ ID NO: 309732 - DNA, 1000 bp, Homo Sapiens
caaacttagtggcctcaaacaacaccattgcattctcttaccatctgaggtcttcagggccttgttcctaatggaggctctaggggaaaatctgtttccttgtcttttccagtttctagaggtcgcttacattccttggcttgtggccccttctgtcatcttcacagccagcagtgtggcatcttctctcctctcttctctcctgtctcccgctcacaagggccttgtgattactcaagcccacctggatgatccaggataatttcccatctcaagatccttaccttaatcatgcccacagaattccttcctagtgcatgtaaggtaacagatccacaggtcccagggatcaggatgtggacatcattagtggggggtggagggcattattctatctaccccatccatcctggccagctactatagtaccacacatcagcaattagagtttcatttttctttctctctttccctccctcatttcctcccttcctccctcttgtaaaatttagatttcagttttttgaataggtaatacattctcacgattcaaaaataaaaataacatagcactggggcgagaggctgtggcacctgggtttctgcagttagtgctttcctgggccatgtgccatggccgggacacttggggctccctcagctccagagggagggaggagaccctccttgccccatccccatccccatagcgtctggccaggccactctgctttctccccagcctctatctccctacctggccagcccgtggcccggccctctccatcattccccttctgtccccaaaagcaagcaaacaaaacaacaaaacccctaacaactcaatagaaaggtttccatgaagaaagcctgctcctatccctgttctcatccaccatgcttccctgtcgtctacatggagaccagtctagggaaactcctgtcctttctcatgcaaagttagcatgctgtctgtattattctatgcctcttctctttt

SEQ ID NO: 309733 - DNA, 1000 bp, Homo Sapiens
ccagggctaggaagtttagtttcctctgagaactgctctcttgtgcttccttctgtgatcatgagaactgtataactgtgctttctcttttgccctggctgctaggaaattctgcaggtgtcatattttcggtcttaatgtcctaaatggatgtcggtgtttcttcatatgtcctttatggccactgtctgtgtcctgttgggagaagggcaggaggggagggatgcagtgtggaagctcatgcctgtccaggccaagcacaaatccatttgctgacagccctacgtgcctcggattctgaacggcttggcctcggagaggacagcactgtctccgcagcagcagcagcagcagacctatggtgccatccacaacatcagcgggactatccctggacagtgcttggcgcagagcgccacgggcagtgtggctgctgccccccaggaggcctgaggctgggtgagctgctggctgggccaggctcaggggagcctgtggggtgagaagacaggtgaagcggcctgactcccaagttcatgacttcttcccatctgttttaggtctcactgctctgaaaagacacaaccagaatggcctggggctcaggcccttggctgagtgggaatgcgttgggactgcccagctgagctatcaggtgcccatcttttctggtcccagcagtggtgaggagagcacaggcaggcctcgcccctcccttgctcacccagtttcccctccggcacaagcttccagctctgcagctggggtgacatccccagtggtttgtcgccaagaccatgtggtggacttttcgccccccaaactgatgagtccgggagaatatatggagagagagatgtaacaaggggaaggcctcctcccttctgagcacacacacaaccgataaccaaagagatgctgcagtccaggtctgaggtcccgctggcatccagctccctgctccatggccagtccctccccagcccagcagtccctccag

SEQ ID NO: 309734 - DNA, 1000 bp, Homo Sapiens
ctggtggtcaagaaacacatttacctggtgggctgggaaggagtccctgcaccccggaggggccacgaaggcagaaatggccctgagatttgtttagtactttcataatgggatagaaagggatggaaattatgcttgcaaccagtttagagttgaaataaagtgttatttctggctactcagttccccgaggtgcagcaattatgcattgggcagatgaggaaactgtccatgagatagatgaggtggctgcttccatgtctgagctggtcaaatgcagagccagatcttattccagtctccagcagccctgggtccccagtaagtgcccaataaatggctaaagtggtgattctcaacatgtgacccccaagagcctttcagaaggcacatgaggttcaatttaaaagcttctgtaagatgccttttcctccttaacaattgtacggtaaagttttctagagtctaaaggaatgcagtgacttcatctagtcctaatgactaatgggatgtgtgcctgggtatttttgttttaaaaattcctgttttaatttctaatgtagtataacccacataaccaaaactgtttgataataatttttaaattttttttgagacagagtttcactctttcacccaggctgcagtgaagtggtgcaatcttggctcactgcaacctccaccccccgggttcaagcgattctcctgcctcagcctcccgagtacatgggattacaggcatgtgccaccacgcccgactaacttttgtatttttagtagagacggggtttcaccatgttggccaggctggtcccaaactcttgacttcaggtaatccacctgcctcggcctcccaaagtgctaggattacagacgtgagccactgcacccagccgagatcctcaaaaatttttaagagtatataagatctactcaggaggctgaagcaggaggattacttgatcccggaagttagaggttacagtgagctatgatcatg

SEQ ID NO: 309735 - DNA, 1000 bp, Homo Sapiens
gacaactatagccgagtctcatgacccaggaattctaatagtaaagattttgtaaaattgattatttttattatttttgtgacagggtttcactctgccacccaggctggagtgcggtagtgcaatcacagctcaaagcagcctcgacctcccgggctcaagcacagattttgtaaaactgattctttatactggatctctgaaagagatagttgtgctttcagccaggaaatgctaatactaaacttaatcagctggctcaagagtatgtacttaactgtgccagaaatgaaaagcaaattcaataataggctagctacaaaaattagagtagtattttatttatttatttgacagggtctcactctgttgcccaggctgtgcagtgctgcgattatgacttactgcagtctcgacctcctgggatcaagccatctttctaactcagcctccttagtagctaggaccacaggcacatgccaccatgcccggccaattaaaaaaaaaaaattttttttttttctagagatgacatctgtgttgcccaggttggtcttgaacttcggaggccaagtgatcctcccactttgggctctcaaagtgctggaattacagttgtgagccaccgcacttggcctattttaatattaatcatcttaaaactgctttacattttcatattggcgaacctaaaaaacgtttgccattgcaattcatgaatatctcatgtttgtttgagaagaaaagtcaaaggaacaagacctttaggagttactggctctcctccatactctccataactgttttgttactgcagttgccaacataggatacttttgttcctagaaggctgggctacaccaaagattaaaagcacatttcctacaagtggagtagaagctagttttaatttcgtcttcctttcagtccacttaagataacagttgtggcccctttgggccctcatatctccagccctctaggtaaaacaggagggaag

SEQ ID NO: 309736 - DNA, 1000 bp, Homo Sapiens
tggtataatggactcccatgtatctgtcacttagctttagcaattctcaacattttgctgatcttgttgatatatatatatagatatatagttatttatataaagtttatataatatttataaaaaattataagataaattgttttgctgaagttttttaaggttaatcccaggcattgtgctatttcaccctaaacttctgtttgcatctatcacgaatgcataaggaagcactgaagaataactacaccaccatgccatcattatacctagtaaaattaactagaatttcttatcagcatctgaaatggaattgggacacatgttctcaggaacttctgaggttgtgtcactggcaaaaaagttagaaagaaagaaagaaagaaagaaagaaagaaagaaagaaagaaagaaagaaagaaagaaagaaagaaaacagagcccccatttaaattttcctcatctcaaagttatcttttatacagttgatttggacctctatttgaactcagaatggtttgttgaacaaattaagattaagcggaatactaataaggagtctaacctttgataggtatgttttaagctttttgaataatttgcttacatgttaaataatgggcttgctatccaagaatctcaattttttttttttttttttttttttgagacagagtctcacctgccacccaggctggagtgcagtggcatgatctcggttcactgccacctctgcctcccgagttcaagcgattctcctgcctcagcctgccaagtagctgggattacacgcacgtgccaccatgcctggctactttttgtattttcagtagagatggggttttgctatgttggccaggcttgtctcgaactcttggtctcaagtgatccacccaccttgaccttccaaagtgctgggattataggcatgagccatcgtgcctggcccaagaatctcaattcttctggccaccaaatcagaatggaggggtacattgtg

SEQ ID NO: 309737 - DNA, 1000 bp, Homo Sapiens
gttaggatcttcctgatggagatgtccctagggagcccatggggtcaagaacagaactttgaagtgtcagggactaagggatgtttccatataacacatgggtctggaaatgtttctgtccagaccagtgtttcacagccttggcactgtgacatttggggccagatagttttttgttgggaggtgggaggggctgctattctatgtattataggatgttgtgcagcaaccctgggctctatttaccaggccagtagcacaccgcgcctccctctgggttgtgacaagcgaaaaaaaaatgtctccagacactgtcagatgtcccctgcaggggcaaaatcactctgattgagaggaccgtgatgcaagcgcatggacagaccgaaggcatgatgacagggagaagagtaagggagctggggaaggcggggcacggagagatgataaaaggatagtgttctgagatgagaagaaacggcctgcagcccgggtaagctccgagatgcattcattcattcagccagtgagtgcctaccatggattgggcactgtgctagtctctcaacaaaacaggcaaggtttttactcagctggaacttgcatttagtaggagagacaaaaataaagtctataataggtgctgataggtactttgaaaagtaaagcagggtaaagggattacagggtgtttggcaggtgttctttttggagtcaacatccaggtctcccatgggcattttggtcaactccagagccaggaaggaccaccagcagtgaccctttggtatcacttgattggggaatctaagagtttgactttgatcttaaccaaagacttttctcttcactgaggtctggacttcaacagaaagaggtcagatctctagccctgtccttgagactctgagactcgaacgttattctaaacgatgccttcaatgttactctcaccttggaatgctttatttaaaaaaagaaaaaaaagggcgggtcagactca

SEQ ID NO: 309738 - DNA, 1000 bp, Homo Sapiens
actggtggtttctaagaacctgggtcacacggctatctcaacaatgggccaagagaacactgtacatgtgacctatcaggtggaccacaaatgcccaagatgcaagtttgtcctgcctgagcagagcagaagctctacaaagcctggagtttcattctgagaagtggcctggctggctctcctgcctgtgctcatcccacaggtcccagcagcggtcagaaatcacacaacccccatgagactgtggaaatggcaagatggcagggaatccagcaccactgagcaactattctgtgctgctgggaatgctgaaccagcctgtcccgtgacgccaatctcttattgtgctttatattcctagtacctgacctacgggttgatacagcaggtatccaataagcactaaattaacaagcagttgttaattgctaagtcgtcatctgatttttatcaaaagaaaaaaaaaccggtcaggctcacgcctataatcccagcaccttgggaggccaaggtgggcggatcatgaggtcaggagatcgagaccatcctggctaacacggtgaaaccctgtctctactaaaaatacaaaaattagctgggtatggtggcatgcgcctatagtcccagctactcgggagactgaggcaggagaatcacttgaacatgggaggcggagcttgcagtgagctgagattgcaccactgcactccagcctgggcaacacagcaaggctctgtctaaaaaaaaataaaaataaaaataaagaaaaaagaaaaccacttccacctacaagtactgctaccgctttgcccatttgagggcacccagcttcataactagaaagagaagtttaccaaccataaaagtatcccgtcatatattccaaattcaaatacacgattttacttgtttttagtcattgttctttgagaaaataaccaagaaggaacacacttgcaaatgaacatgctggctgagttttacacatttgcatagttcc

SEQ ID NO: 309739 - DNA, 1000 bp, Homo Sapiens
cttgcgtacataatctccaatatcctcttaaaatattgtctgcattgtatgatattttactgtaaagccattcttcttttcttactcttcttttttcttaggctcatactatatacgctcaggttgtaagaaataacaatctgcaaggctttgcagcatgccacccacaattataaaatattttccccaaccaaatcataaacatgtagtttaaccaaaaggcattctaattttcatgctatgttgagtataaatataaattcaaggcagccaaactatccatttccaaataagaatgtatacctacactcattaaaaatcatctggaaatgtgtattagcaaatgagtaagaaatttttactagtataaaattcctgctttatataaaagccacactggccattcaagtatttgaggttttttttttcctatagtttttgtaatttgtactaaaatgatgaatttagacttgaaattatattaaaatgaaattaaaattcacttctacctatagggcattttcagagtgtgcatgtaaagagcaaagtgtccatctgcagatctgccatcaccactctctccactctaaggaaacagctcatgcttactaggttttagagaacaactaatccaatggagaagcaacaccagatttccttcagtttgtgccagtttgcaagttaaaggtcaaagggcaaagacatagaacaggactcttcaaggaaaattttcacagaagacaatgtttaagttgttgttaatgacagtcaatagatcaataatcaagttcaaggcaagctgttcattgtttcaaaagctaatcccctcaaagctggctttcacacaaagccaatgtctgactcatggggtgcattcattctgaccatctctaataagttcacagcccagtggctgtaaagcctttcactgcaagaagcagctcctaaaaatcaataaagaggtctgtcagttgctgacttttctctaggaaaaaaatat

SEQ ID NO: 309740 - DNA, 1000 bp, Homo Sapiens
aaagaataagttgcatcgtgtgcatccaaggtgcacataaactgggaatttttttaaaaaattgctctgcttagcacacatttgttcaatggatgctgaatgaataacaagtaacgggtgcatctctgcatccttaatggtgttctgccctgatttaattatcagaacacatctgtctccctgactagattgtcaatggcttgcagacagggacccagtttattcaactttaaatcctgcacacgaatcctctacagaactgctcattgcctgagtgttcaattgaattactctctaagtatgtggaatttttctccaggctccaagatcaaaaagctcccctcaccctgaactcccctcctttctctcccacctcttcatagagcatacgaattcccaaatcctggcgcagaaaggaagaaggttcccctttaatgcggttgtctggtgccaccgcacagcctggtaaataagtgtgctaggatttgggacgtgtccacatccagcagaggagcactgctctgcccagcagccatgagcctgagcttagtctgaggtttggggcagtgaggtcacgattatcgtggggtaggggtagggctggaccccaagacagatgctcaagggcaggggggctcaaggtcccttgttctgggagctactggagatttaaggtgcccaggacttggggcttcccagagatggcgcccagagtcgtggtggcattctaggacctcatggcttgggcacgtgggccggtccagcccaccaggcccttttccaggcccctttccacaccctttgctgcagcctgcttcctggctgccacaattacatgccaacattttatttttggccctcgcagcaatacttacattttctgcccgtgcactctgccttcgctgatatggattttgtctcctggcctgtgtttgtaaattattccccatgtgtctgtcctttctctgtggccagaaggtcagcagctgccactggctgg

SEQ ID NO: 309741 - DNA, 1000 bp, Homo Sapiens
ttctacctccatatcttgtcccagtggaagttcttcaagggccataacatgcagggaactgtcatctcctataacaaggtcttctttgggaagacctcctgaaggactctcctgaggctgtttacagttaccttttttcctgtaagtaggggtacagtttaaaataatgataaatagtaaacacatagccagtaacatggtattttattatcaagtatcatgtaccatacataattctatgtgtcatacttctacatgcagcctactgtgcggcttgtttacaccatcatcaccacaaacatgtgagtaatgcattgtgctaagatgttacgatgcctttgtctttagacaggaatttttcagttccattatgatcttatgggaccaccatcatatatgcagtctgtcattgaccaaagtcattatacagcgtataaactgtacagttgtcttcatttcatgtaacagaatgctttaccgtaaatggctatggcaatgcccctcaagtaatgagcagagtatttttggatgacagaagttgaaatttaagattacactaattaaaactaagtatttttggtataatttacaataacctatatggatttagaattatttccttattcaagggaatgggtcaagccataaaacttaactggccacgtaggtcatcggttattctatactaccttattccaaatctgccacatcttccctgctcacccccaacatggtgctagagagagattccatactaaagattagacaggtgaaaagaataaaaagaaagtcaaatgattccaccaactctttcaatgatcatatattccttgtttggaatttagtaaatgctattttaaaacccaggaaggctgggcatggttgttacacacctgtaatcccaacactttgggaggctaaggcggtaggattgcttgaggctaggtgtttgagtccagcctgggaaacacagtgagaccccatctctacacggaaattt

SEQ ID NO: 309742 - DNA, 1000 bp, Homo Sapiens
gtaggccggcggggctgcacccgcgtcgggtaactggaacgcgcggggtccggggggtgggcctcggtgccgccctccctcgccctcgcggcgcgctcgccgtcgggggccgcgccgtcgcgctgcgcatagagtaagaggcccagggaggcgccaaggagcagcgtgagcaatgcgtccctgcgtaggcgcagcctcctcctcatctccgcgcggcctgcgccctccctcccctgtaagggtcgcagtcggcagcagggggcagcgagccccgccctccccagctgagggggcgggaggccacgccccggggggggctccagcgaccgacggttgagccccttgcgttgttctcctcctcccggccgtgtcgcaccgccgggaccggcagcctgaagggacaagaagttcacccatgtagccaactcccccgcggcctcagctccggcccaggactgcgacccagggccgggcagggagactgggagcctcggcccctcccccgcccgcctccctcgcgctgaggccgaatcccttccaccctgccatcccctcaatgtcgggccctggggtcccgacactcacgctcggccctcggaagtggcgcagccccggacgccctggcctccggggctcagcgcagggtccgaggggccgccatggaccgggcccgagccaaatgcagcgttggcaggaagggggaccggtgccgtgccacgtgaccctccagctgtgcgcgcccagacttctggagctcagctccgccccggcgccaggagcactccggcctcagagtggggactaatccctgagagggagcctcctcactctcagtccctctgggaagggctggtctgggtgctcacaccccaaattcgcctttctggggattgggaagaagcatcaactcccctggttagctcccccaactatccactccccactcccgcgtctctggagtggggcggagcctgggctgctaggagcccctgagcaggcc

SEQ ID NO: 309743 - DNA, 1000 bp, Homo Sapiens
tggatttttgtagagatggggtttccgccatgttgcccagtctggtctcaaactcctgagctcatgcaatccacctgcctcagcctcctaccatactttatttctaacaccatcactaagtctgcctcagctggggataataccatcactttctaaatgtagcacattttgctcctctttatttagtgttagatgatagttatgttgctattcccctagacataaaaaatgagttcacttaggcaactccatttcccagacaccataaaatattacataagaaaaacatactagttccatcaatattctgggaccctgggatttcacatcatggtgtctccaatttagcaacttctccttctcaacaatgtcctgaaattttatatgacctataacttgttccattttgtgcagttttatgtatcccctgacagatatcccctggcaggaaggggccctcagaataaaataaagtactgtatcaccaggaaggcaagctctgcagaaaacgcagggataatcagcacatgcagtctgtcacaggcagggagggtaaagaaagaaccgttgcttcaactgtggtcctgtcttctaaatgccagtctcctagaggtgtggaccttgctgggtggtttgtgatttcagttcccgaggatgagattttaattttctttttcatcaagttttgaaatgatattggtccacttttcccaagagcacagagactaatatagatgcaaaagagagaacggggctgggtgtggcagctcacacctctaatcccagcactttgaaaggccaaggtgggaggatcacttgaggtcaatagttcaagaccagcctggacaacatagcaaaactctgtccctaaataaaaattttaaaactggccaggcacggttatgcacacctgtagtcccggctactcaggaggctgaggtaggacgatcccttgagtccgggaattcctggctgcagtgagacatgattacaccactgt

SEQ ID NO: 309744 - DNA, 1000 bp, Homo Sapiens; identical to SEQ ID NO: 120124

SEQ ID NO: 309745 - DNA, 1000 bp, Homo Sapiens
caaacaaatctactctgcgaaaacctcaaatcactctgtgtgataaattattttaataacataaagctataaattttctctatttttatatccaagactaaataccattgactatccttcaaaatgtttatgttccaaaatcctgtagttacacataaacccacaacaaaagacattactttagaatggtagaaaaaaatatttttaaaaattgtcaattcttaaaattggttaagtaattaaaaccattaaatcataacactgacctaacaggacaagaagtttcttttggtaatctttattagtatatgatcatcctcaagggtctcacttgctagccttttaaacaaatttctaaggcaaatttacagttcatttaaaaggtaataaataccacacactcctacaaccttagccactttacaaaacaaaggaaaaatttcttccaaatgttattataattaagagcttttctatattaattcctcttacagtctcccagtgtgtcttagattgccaagtacatcttgattgtgacatgcaaaatggattctgctttagaaatgggttaattggcatgcagatttctgcagagatccataatcccacaaacaagaggggaaatgaacattatagggctgactctgacaacatgtacttggcaggggaaggcggcagggggttggcaacttcacaatggtggatttgggggaaggaaacaggacaagagactgaggtacccagaccctcatcctgccaacagcattcacgtagttactagcttccatgtataataagacacattttcaaaatggaaaggaggttatcagagagacggattcagatcatcagttaccattagactacagtttcattcaatttaatctttaaccattaaaaatttttaaagactatatttcaaggtaatagttcatttcaaatttaacaaattacaaatgcactaatttgtatgtatgtgtatgttctctatgtgtcatct

SEQ ID NO: 309746 - DNA, 1000 bp, Homo Sapiens
tcctctaatcctcttaacctgggcctcctttggagcagcaatggtaagaatcaaggtttcctttctttccaatgaaaactcaattttgttcttggtcaaaaatgccaaactctattcaaaacatagttttccccttagtattctagcccaattcatataatctcaacaattcttaatttcattaatattttctactcagcaaataagataatggaaaacaattcagcataacaacactgcactaaaagagctttccagagaggctctccaagggatagctgcacacttacttgcaacacccttgagaacatgtactgttaccttaattaaatagattaagagatgaggctgtggtttgacagtgtatcaatgacagagccagaagaaaactcagtgctcaatgttgaattcctatcttcctaagctaatattcctttgagagaataaaataaaaatatgtgtgtattgagctctccttggggaggatgggggaagtattcataaagctttaaaaagagaatgaagcagtaactggaattagacccgataccaagaacattaataatacctaactcattagattcacttccatgccatcctaattagcttccacaattataactaaggaaggaaggaaaaggcctatttttcaagggcaaaacatatttaaggattaagtcattaggttcccagggtctacctggtgctccctgaaaatgactactccttcaattatgcattcttaaaatagaagtgaaatgacaaaataaataaagaatattcccaataagatctgtacaaataagcacaatgattgggtgggggagtagggaggaatatgtgagagaagaaaagcatgtgagaataatgtgggggtgattcacttcaaatccatagagaggagaatgcctctccctattctctacctggattgggcttaaggtggtaagggaggggaaaggtacagagaaacagccattaggaccaagccagcttttcc

SEQ ID NO: 309747 - DNA, 1000 bp, Homo Sapiens
acagacacactcgctgcctgtgcctacctcaggggtcactcctccaattcctttgctccttctttcccagacctctgcatgtcagaacaccccggcactcaatgttcaaaccctttctctctctccggtctctccctaaatgatatcagctggtcccgtggcctcaaacgccatctatatgctggggattctgaaatttctcctcctctgatcccttccaagatccagacccatgcaaccaactgccctgctccatatccccaccgggacatccgaggagcatctcaaatttgtgtggccaaaactgcacaattcatcccattacctctacctcacatccaccttcctacaagcaaatcatacccccagccaaccagttgctccggttaaaactaaatgagggagaaagtgtgtaaaaagctccaatgctgcccaattaaatagaataaactaaaaagcccattatgtcatcctatagaaggctctctgtgacctggttccacctgcctcactgagggttctctctactgatggaatagcttccacttccactagtgtattcccaacatgcttcctcctttaggtcctgcatcatttagttcaggagtccccaaccactgggccacggactggtactggtcggtggcctgctaggaaccaggcctcacagcaggaggtgagtggcaggcaagtaagcgaagcttcatttgtatttacaaccgctccctattgctcacattacctcctgagctccacctcctgtcagatcagtggtggcattagattctcataggagtgtgaaccctattgtgaacggtgcatgtgagggatctgggctgtatgctccttatgataatccaatgcctgatgatctgtcactgtctcccattgcccccagatgggaccatctagttgcaggaaaacaagctcagggctcccactgtttctacatgatgataagttgtatacttatttcattatatattacaatgtaataata

SEQ ID NO: 309748 - DNA, 447 bp, Homo Sapiens
agtcttttgatggtatttcccttctgtatgtcatccacatatttgaggaaatctaagtctagttgataaccatagggggtctccacaaagtaagggtctttctgttccttgtcctggtctccactgagaatatcacctgcttttcaacgagaagtctgctgaggaagagcagagcacagagttttcaaatccttgtaggaagggctgttttaaccctttgactggctacccagtctcttagaataatagcaacagctcgagttcttaacacagcgaatctccctgttgggtgtttattttgtatgtgtttttttctttctttcttgttggcacctataaagttggtaccaggcaaaaatccccaaccaaagggtttctttgcccagtacccaggagcaggagcacagatttttctccttcctacactcaaataggctggtactcact

SEQ ID NO: 309749 - DNA, 1000 bp, Homo Sapiens
gtaccggcccctgctggtggctgatcgtgagactgaccttgcaagtgcttggttgaatgtgaactgcttagcaacacaatacttatttttacaaaaaaaatcacctctatattttgattctctgatcaaaattaatatacagtgttttttgttttgtttttgttttttttgagatggagtctcactctgtcacccaggctggcgtgcagtggcgcgatcttggctcactgcaacctccacctcgctggttcaagcaattcccctgcctcagcctcccaagtacctgggattgcaggtgcccggcaacacggcctggctaatttttttgtatttttaatagatatggggtttcaccatgttggccagactggtcttgaactcctgacctcaggcaatccacctgcctcagcctcccaaagtgctgggattacaggtgtgagccaccgtgcccggccgatacagtgttctttaaaagaaaaagtatatcatttttcagactctcatttttctgtcgattgaaacttgactgtaaagttggtactaccctacctaggaaaatcaaagcataataaagctttggaaccactgctgaggttgaactttcgataaatgtcattctctacaactccacaatgcacgagaagctgaaagagccacgagctagtgccatcaggacaggcttacctgggggtcctcatgtgccctgcaccatggattccgtgcagcacaagcctgggacttcctttaaaaccccacattctcagttgttttgtcaaaactacattttcacttatttatcagcaattcttcatttagagagagcactggttcaaaccccattggcaatgtcaaaaccaagtgcaacaaacgtttattaagcatttaggaaatgttatgtaaaagaacctcttatccttgcatgccaggcactctttcaatcacttcagtgacatttttccaaaattctgaacatccacacttagggttttctttgaatttg

SEQ ID NO: 309750 - DNA, 1000 bp, Homo Sapiens
  misc_feature (424)..(523): n is a, c, g, or t
  misc_feature (905)..(1000): n is a, c, g, or t
gactgtatgaatcagttttattacctagtgtacaagtgtcagtcatgtatcattatatagtctgttgatctttccatttgggcaaaattaatagttttcccccacaaatgtacaaagttgtatgcttccagtcttcttttaatgtttatagtcattccaaagtaacattctattttacactttcacatacattgttatgaatcattggtttttctcttttttccacttatcaccaatttatttcattcagccagatttggtgtctatagaaaaagaaattttaagaccattattaaaaataatatatggttagaaattagtagatggttctttaaatgtattccaatttttaatgttactttactcctgattcatttatatttttctgctttttatatgtttaaaaatctctcattctattgcnnnnnnnnnnnnnnnnnnnnnnnnnnnnnnnnnnnnnnnnnnnnnnnnnnnnnnnnnnnnnnnnnnnnnnnnnnnnnnnnnnnnnnnnnnnnnnnnnnnntcataagtctctctgagaaaatattttcttcacttgtattaaaacattttcaaacagagcaagagtaattgccatggatagctcttaccttgtattggaagctatggccgtgaaaatgtacagtgtgtaagtctatttcattgcccattcccatcagataccagttgacttcatctcccacgtgcattgtgaggccttgtaggtttccaaacattcttccattaatagctagggacaccatatggttttatgttacttttcaggatattttaaaccaatagctatttcaaagaaaatatgattattaggttaatgtaaagaatctttttgatgtaataggacttattttactacaaatgagagaaatggatactttaaagtnnnnnnnnnnnnnnnnnnnnnnnnnnnnnnnnnnnnnnnnnnnnnnnnnnnnnnnnnnnnnnnnnnnnnnnnnnnnnnnnnnnnnnnnnnnnnnnn

SEQ ID NO: 309751 - DNA, 1000 bp, Homo Sapiens
atcataaacaaaaagttgctctgcattgttgaagatggttggcacaccatttctgtaggcccaggaaactcctgggagggttttcttgagaaaatgcatataatgagtttagttcttgggttgctctgactcgctgaatgtctgaaaatgtttgaattctcatctgaatttcacagcttatcacggactcttcactgaaaaatgatgctctccatactgggagctgagctttctctgagttttgtactatttttcttctaccttgacgtatttcgttagaaagaaactgatttgaaggccttcttcctattgaacttttactatatttgggaggtgtacctttgtcccctggggcatttaggtagcaaaaaaagatgatgtgttgattttactctaaaatatttttctctcacacccatgccccctacttccctacctctcaatcatgttccctaacctatgacttaggaagggtttctgatgattcttaccacctcctctggaccatcaccagaattcagacacccacagtgcaggcaacataaataagtgaagtgggctagacataaggaaaacaattgcccaagtacagtgataagtggcaaccaacagcagcctcagtagaggggcttgggcagggctggggcacagcggatggggaagagtgacccacagagcactgtcccatctgaagaaggtgcttctcagacctttgccatgcaaaagcatgaggtcaatattgtcagatagtatgattttttaaaagaagttattctggtttttatgtgatatctcctaatttttaaacattgacaacaaattttaaaaatacaactgtgtgtgccgatcatgggagactcaagtagaacatgtctgtagtccagatgttttccacctgtgagatgtcattggcagaaaccaaaaccaaacacaaaaaatctccaaggagcaataagatcaaattatattttattctattaaaaaatgtttttgaaaaaag

SEQ ID NO: 309752 - DNA, 1000 bp, Homo Sapiens
atcgctttgtatgttaagccccactgtggcccccagaacctctgccttcaactcatttccaaaacaacaaagcaggccctggtcaggtttatgaacagagtatcctcaactatattcattcttccacttctcaactccacaacacttctttaatagcagtgtttttaaattaatggaacttcttagggtacgtgttacggccttgaatttgaatctcagctctgctccctactgttatttgagccagaacttcactccttcggaccttggttttcttgtatctaaaaggggatacagccacttgattttagtgggatgcatttggaatcaaatgagatgaacaaatacaaggcagtgtcctatgaaacatggagtgtgtagtctatctctcatgccagtattgaaacccaatgggtaccctttcccttagcagctgaggttagctggagaggccagaattcctgctttcacacccctctcaggggaatgtttgataccacatctggctgtgtaatagtatctcaggtacagttaggagcaggcacaagggcaaggtgctgaatcaccataatatcaatgaatctgttatctgatcaatcactggtaggaggtagagtacagcagatacattcagtgctggagccgcaaagtgcttttctccaacagttttcaggctcccatggctttttgttcacttccattgtcctctcatccataaacctcccatgtctgacctccagacgtcttctacccacaatcctccctacccttctaaggtaacagtgagtgattccaacccagtatctaacctgacatctaatgctcacctggcagctgaagcaccaagagcggagagcatggctggaaaccatacacggggcccagatagacttataagttgtacctctccaccatgacacaggttgaagaactgtacccacttcctttagcattaagaatgctggggcaggtcaggacaacaaacaaagaaactcaagag

SEQ ID NO: 309753 - DNA, 1000 bp, Homo Sapiens
taagcagcctggaaacagagtgccaggtcactctctacatgtagggctgctgggcagccgcagtaacgtgtgcccggatgcatctgtgtacacagctctctggtttgctttctgcaaattggacggaaaacagagcctggcttcccatccagtaaatggttttcaaactgcgagtcaagaaaaccgaaaacttactccccatctgcctgctaggtggccttcctgcatttactgccacatcccttcctagccaactgctccctgtctagacggaagccacccagtgtcaacgtctgtgtctcctcacctgagtcatctccatctgctcagtgccttgtgtactgcattaagtacttgctcagaggtcaagaggaggaactgactcacgcagcattagtggatgttcactaagccttctgttgattgtaacgttagtataggggaagggcaaaagcagaattctgaccctaaagcttggccatctgaatgaactcactgcaccatgctcagtgctgtgggaagatggttaggcaacagaaatgtccttaggaaggagctctaggtatctacacctgaccaggtgttcatgccacatactaaaaggtagggggacaaaaaacagacttactgagttgtgtccctttcacaataaattgtttccctaatttatctaaatgaaaactgtcttatttaggccttatatatgtgtgtctgtgtttacaataaggacacatttaaaacagaaaactcaacacctatatcatactacacataaagttaactcaaagtggatcacagacataaatataaaacaaaaaattctgaaacttgagaagtctttacactttgggctaagtgaagatttctcttaggatagaacatcttagtgaagatatgacaaaagcataatctatgaaagaacaaactgattaaactagacttcatcaaactgaagtcaagcgaaatgaagtaacgtttacacaaaaacctgtacgcaaat

SEQ ID NO: 309754 - DNA, 1000 bp, Homo Sapiens
tatcattatccacaagggaaaaagaaaaaaacatacacattaggaaacaagaattcattgtttatttgtgcaaagaaaaaaaataagccactactgtaatttagccactgctctgtttggcagccagcctcttgtctctctcttcagcaatagtaagtcggatgccctttcccctgggcagggaaatccaaggtttattaccctgtaattgagaaggagataaaataagtacataaaaaagggatgaaaagggaggagacgaaagaaagctggagggaaagacaggaaaaaaacaacactccaccaaaacacacatgccttgtaccttcctttacattaaggggcagctaacagaacacaaccaaacaaaattcccaacaaaataaaaatttccttatacatgtttcctgagaggttgtctgtctctcactgttcctcccactccccactgctgagctgctgaatacaggtcttcctgcttctattttgtgtgaagcaatcagtcaagaagcttttcatgaacatctttttccataaggcactcagtgctgagaaaaaaaaaaaggccattaacctcagcttctcattattttgaagtggagaactgtcagctccctgtcataagctttacagagctttcacaggcatctactcagtccttcagttccttcagaaacaccagatgatatgatacacctgttttcaaaggtacagaatgaggtgtcataattcagcactgagaagagaaatggcccaactatagagctgccaagtgacacagccaaagaggcaacagcaggcttcccctctgtaccatatcatctctcacgtaccaaatagctgccagggtacaagtgttaagataccactcccaaggctgaattgcttgatgaaaagcttgcccgtccttaagtcacagggtaacagactctcatgtgaggatactgtgtgactccagaggtgctccttcactgaaaagccctcaaaagatctcagagca

SEQ ID NO: 309755 - DNA, 1000 bp, Homo Sapiens; identical to SEQ ID NO: 120125

SEQ ID NO: 309756 - DNA, 1000 bp, Homo Sapiens; identical to SEQ ID NO: 120126

SEQ ID NO: 309757 - DNA, 1000 bp, Homo Sapiens
cagaactgtgcttcagtattcaaaccttcataaaatcttacaatttttcagaataaggaattaaggtaaagaactctaatgtggaagaaagatttccaatctccaagatcataactgtcacatcgttaaccagtggtttttagcccattcctggccaaagtctagcttcttggaggtgagttaaaagggtttgattcaaatttagtttttatacgtgcatattttaaaacctaataaaaacgcacattctgatgtgttacataccctactttaccacactggagactgcttatgtattaacttccactaccaggataacttatttttgtatagaccttgaataactttagctatctctaattaaagaatttcctgagatgtatgtttaaaacctattatttttgcttacatttgtgtgaatcaaaattttcttgatagtatacaaataaaacagggcatagctataaattggctgctggtttcatcaactatgtataactccacatttgtgttattcagaaataactcagaatcttattatgcttagtaatgagccaaaatgaataagcataaatgtgaacccaaaatacatttatattgataaaattgagttttcaggctttatgtattggggttatacataaaatttcatctaaaaagattctagtgctaaaaatgtttggaaaatactgctctgtaagaaacttttaatttaattctctaatacaatgttcaatgtgatttagttttctaaagcaaactgcctttctaatacatcaccatttttaaattattcagaatgaaaaattttctgaaaatcagagtgctacagatcttcaaatatggtgacttgtaaaaagttaatgataagttagactaaaaacattcattaagtgctttagacccttgataggcagctgtaaagatttttatttttgaattaatcatgtatttattattgtgttttaaatcttaaatatattcatcctccaagtaacag

SEQ ID NO: 309758 - DNA, 1000 bp, Homo Sapiens
aaacagtcttgagtagttcatttaaccggatatcacaatctcaaatgtactttgacaaaatatttgtcctttaaatgttttctagactctatcaatctacccttccatcattcttccgttgcttccccccaccccaactttcattttaccttgtaagaattcacaagtcttaattaaaatcacatactactcatattcctgaaactttggaatccccagggtacttggtgagttaccttgagtaatcactgggcagaaagaggactgatgttgactttagataccctttgctgctggtgctgctgctgctgctgccatctgaccaagtgtaccacaaaccacaggaaaggctgaatggccaactgaaattaataggccatgtttcaagatctactaccaacttctaatcctcctctgtttggaaatttgcattttgtttgccatttgggccttatcactggtctattatttgactggtatacacagctccttatttgttttcattgtacctaaccatttctctcctcaaaccagagcataatctcagagtttattcttagtcctcagagaggctatgttaactaaatctgaagagaagagttatataatggaatattgtgcaaaaacaaaaaaaaaattggcctgttaagaatggcctatgagaacttttttaacctgattcagtttaattgaaaccagcaagggttcaaactatatcgacaagatcgtattcaaattctactgttcagcctcaaagttcctgcagaaagctaggtgaggttttcttccttgactgtttattacattttctttataatacactcattttaacgtaaaaatatttttacctatatttaagttaaactagattctaaaccctgtctgcactatagaatcacgtgatgttttgagaaaaagatgacgctagctgcacaccagaatctctaaagtagtgcccaggcatttggtactttagaaacaaagaaaaaaaaaacctctc

SEQ ID NO: 309759 - DNA, 1000 bp, Homo Sapiens
actcactaattctttcctgagctcatctctttcttgtaattctttgaggaaagtaccaataatttccaacactctttgtgacacatcttctatatgtcgtccagatccattttccaccctacgcctggaggctgatctgtaaggacggcatcaagctcccttgccctcttgctcctagttggttttggctaatggggagccactgaaggagataggaggcaagaggaacaaggtgagagtatttattttctggctccttctcagcgaagttgccttaggcttgctgtctcgctctaaatgaagatcacatcttattcataattctctccctctggtttaactgctccctcaagcttaagggaggagttaagcaggggtggtaacagccctgtaattaattggtagccccatgtactacactatttcctatggtttcctgtccataactttctaaattgtcctgttgccaaacttcttttgaattaccctaacttgaattgccaactgtttcttgctgagcccgatactcacataaataccgattatttccatgtactttttttttcttccagggatcaatttctgttttaactagaatccctttggttgaaaatcaagaaacctaatttgacctaccttaagccgaaagtggcatttgttaccttgaaaatgaaactatgcaaagaatacagttggacctcagaggagtttagaactaggactctctctagcttgtctttagaataaaagtgcttctctttcttcagtttcaattaggaaaaccctaggtaaggacctggcccagtctggatcacatgcttaagcctgcgcccagacacattcagtgcatactagcgtattggcagccctgggagaaccgcatggttgggaatgagagcagcagtccccagaattaaatggctgttagtcccagatattttcaatcactccgattgtaatgactccacagcagaaatcacacataggaattcatatctac

SEQ ID NO: 309760 - DNA, 1000 bp, Homo Sapiens
gatcacgcaatgtatgtgttagcatgattctttactgcatctgagcacccttcactccaccccatacatgtaatgacactcacctaactcataaagtatgcatgtcaccctcaggacaccacaacgcactccccttggggagccagccaagaatccttcctcctggccaacctttagggcataagacttaatacgtctcttttctgcccagcctttaggggcataagacttaataaagccttgtctgggaaacttacttggccttgtatcaacttctgtttcgtgggagaataagaacatgtagtcgggaacactgccaacatctttatttccaacttctggtctttggaactgtgagacaacaaatttctgtgattctaagctacccattttgtggcactttgttacggcagccctaggaaacaaatgcaggcatgttgtgctccatctgccgctctctccagaccacagctcctccccaagcccaccccatgagaggctgaggacagaagcaggacccttcacaggccaccatcactgctggatggtcacttccagcactgactgtctgggagctccagcctcaactctcagtttcctggagcagatgggagtatcaggacaaagaggaagaagggcgctggcctcccaggaactgtccctgagcctccaccctgctgtccctgaagctgcccctgagcctccaccctgagctcagcccagagctgtccctgagcctccaccctgagctcagcccagagctgtccctgagcctccaccctgagctcagcccagagctgtccctgagcctccaccctgctgtccctggagctgcccctgaacttccaccctgctgtctccagagctgtccctgagcctccaccctgctgtccccaaaagtgtcattgagcctccaccacgctgtccctagagcccagaaagcccagggctggccaaacctcacccctcactcctcctctggcccctcttcccatccatc

SEQ ID NO: 309761 - DNA, 1000 bp, Homo Sapiens
cattttaactatgtttattgtgcacttagtaggccagatactcttctgatatttgagaatacagtggtgaataacacaaactccatgctttcaagattcccacacccagatactaagacatattaaaatttacagcaattaaaacagtgtagtttggtacaataacacatatagcaatgatacaaattaggggaaaaaaccctggcttctataacaagtgagtatacattaaagacagtattgcagaatggcttcaggattaatttgattaatttagagagagcctatttcaggtcttcctagctcatccacacacatcacctttcagtgttctttataggtacttaaaacttaaaaaaaggcccaggcgcggtggctcctgcctgtaatcccagcactttgggaggccgaggcaggtggatcatgaggtcaggagattgagaccatcctggctaacaaagtgaaaccccgtctctattaaaaatacaaaaaaattagccgggcgtggtggcgggcgactgcagtcccagatacttgggaggccgaggcaagagaatggtgtgaacccaggaggcggagcttgcagtgagctgagatcgcgccactgcactccagcccgggtgacagagcgagactctgtctcaaaaaaacaaaacaaaacaaacttaaaaaagataatgtggcaccaaatttgtaagatactttgaaattcataatttcagatggatgtggctggtaaggatcttaacaagcccccagtttgggctgacttttactaatgaggaaaattgttaggattaagcagggtcttgaggaatcacctctaaaggctcagactttaaagtgcttcccctcccttccctaccccaacatttggagaaatctctcactagatggcctttcaaataaatgagaaacacatggttctaggacaattgattatttgagaaaaaagtatactcaaataaattccagatagaataaaggttaatgtgaataa

SEQ ID NO: 309762 - DNA, 1000 bp, Homo Sapiens
gagacggagtctcgctctattgcccaggcttgcatgcagtggtgctatctcagctcactgcaatcactgcctcctgggttcaagcgattctcctgcctcagcctcccaagtagctgggatgacaggtgcccgccaccatgcctggctaattattgtatttttagtagagacagggttttgccatgttggccaggctggtctcgaactcctgatctcaggtgatccacctgcctcggcctcccaaagtactgggattacaggcatgatctaaattctttatacccttcaagggcaggaaaccagtatctctgaaaagcttgtttgttttaatataattgaacatttcatctttccccccacagtaatcaaagcaaacattttatcattattattcttggtatatcaaagtaaattccaggaatgtaagaaagtctgacttggaaatattacatagaaaaaggctgaattaacacattacattttttagtttttccttgtaagtatacattgacatctacttatctgatagcagcactgctggttttgagtgagttttgttttgttttgtttccttccagagggaatgcagtatggcagcattttctttggaacaaattaagaagatagtaacaaataacagaagaaatacttctacacatatattttccatgggcaataaacagataagtatataattatgaaaaaatatgcctcaactatgctttttaaaatttctcaaggtatactggtttgtttttcttattcaaatataatgcactatcactactatctgtcccgggaaaaacaaaccctgaggtttgagttacctccttcagccaacagagtgatatcaagagtaaacttggattgaggtcaacctgtttgagccaatagagagttctgtagtatatctggttattttactaacgtatacatattctaggttataatcaagatactcattaaatattttctatcagagttttatatcccaaacagg

SEQ ID NO: 309763 - DNA, 1000 bp, Homo Sapiens; identical to SEQ ID NO: 120127

SEQ ID NO: 309764 - DNA, 1000 bp, Homo Sapiens
gaggttgaaaaccacaccaatttattatcttacagttctagaggtcaggagtccaaaatggttttcaccaggctgaagtcttgtcagtgcggctttgtttctccacggaggctctggggcagaatccaatgccttttccagctcctccaggggccacctcatcgcctggccccaggccttcttgccatcttcacagccagaagcttccttgcttcatgcgcagaccctcgtgactccccttcccttataagggcccccatgattactcagggcccacctcaaccatccacggtcatctccccaccacgaaatcctgaactgaagcacaggcgccgggtcccttttgccacgcaaggtaacactttcccacgtcctggggttccaaacctggacatctctgggggctgttattccacccaccgtcatcagtgaggcgccttcaggaggggctgtgaggtcacgtgaggtcggcttcagaagggctaggtttgagtgcctggaggacactggcaggaggcgcccctgggctccatccatttaccacgcacgcactcagcacccctgagaccatccctggggcctacaggagaaccctgtacctcagcagccctgaaacctgctttccacttccggacctttctgaaatcaagacgcatctttagatcaatggcatcttactgtgtcaccggcaggcctcttctttcttagtgacgtttaaaggaaggtatcttacccctgatggcttcttggagtgaatgaaattccggtgtgagcaggcactagaaggggcctcacaagagtgtcaggtgaccccactccgccctggcccccaagtctttcctagttgctcatctggccctttctgacctgggatcccaagtgtcctgcagctccagtgcccagacccccataactaacagaccccactaaagccacacacatgctcagctctccaaccacggtggggtccaggagccacccctcccgctaggtgtgccta

SEQ ID NO: 309765 - DNA, 1000 bp, Homo Sapiens
cagagtgcaaagcagcttttatttcctcttctagagatgttgaggtttctagtatacagaggtcagtcaccacagatatactcaatctcattcttcatttcagtttgatttgacatcacacataaatcagacttttatagtgattttcgtgacgtatcttcaagttccaccttgcttttcactttttcctttgttgtgagatagaaacttcttttccagacccttatgctactaaggcagtaaggtcctctctggcccagttctacagacctcagcctccatattcggctgatctctactctggactgcctttcttggtgatgatactcaccaagggctctgcccatagacatcctccctccctgtgtacacagtccgtctttgctcccctcagctgtttctaaatctgaagccacttctagctgtcttgcctctgtcaggtaacactcgctgttcatgctgttcactccagcttcctctcacaaatcatttctgtctaatccatagtctctctgaaaggctttggtaccgctgccctctcactatgaagtgtgcttgtcttattgaagctcgtgcttcagtacggctctgaaggcagcaactggagggggagagtgcggctggaagtgcacaacccacaaagcagttgtgggcagtgccactctcctgaaccaaggcttccccagctcacccagtttgggaagggaaagccttctgccctcttcctttctctatgtagcaccttatttctcctccatctgtcgatagcccctgattttcatctccattggtctatagtttccctttctatttctattaaaatcacaaacccagagtggactttaggagcttttatcctccatgtaggaaggactagattcaaaacacgtcgaactaccacctggacaactctcttccttccttcccactgcagtgttagcttctttccagttactcatcttcacagaataaaaccttaggtcacaccctagtcatattt

SEQ ID NO: 309766 - DNA, 1000 bp, Homo Sapiens
ccagaatacgtgttttattgaaactgtgcttatgacttgcatactatttcaaaaatccaacccagaaacactagttaaatctttgtatccaataattataataacctacattggaaacaatcacttcggctgttcagtaatttgtccgaatgaaatgtaacgtctgatgcccctctatgtgaaataaagcacgcttatttcaaataaatgagctttgttcacagctcttctctgctccattttccctaaaggctgccactcttggtccctttacatactgttgctatttttttcatgatagttattttaagggaatgacaatgttcccctcaaatcccacatccgtctcatacaaacataagatgacccaatgttaacgtaaagtgactgtgtaatggattttcaacccctaaatagtagagacagctcagtctgaaaaggtggatggaagagtaaaatgtctctaaagatgaagggcacttttggtttccagaaggaacagacttgctcaagagaaccacaagccttagccgatttgaccggaatccacgtgatctcttttcccaggagaactgtcactccatttaggacaccatcacatcccttgcttgatgggctgtgctcccagggctcctcagctacagcaaatccctgaagctttcagttttgcctctgtgctcaaagaaggccctccataaacgtttgcagaatgaatgatgaaaacaagattgcaaaagcgtgtcaggcagcctcacagataattacagtattttagcacaccacaaatactcccacatccgttcccactggtccagcatattattacttactttcagttcagctgctttcaggacgagaaaatacaaaacggatgggaaatggtctaagatgactggagcctaacggtttgagtttccacattatctaagggattaccaaggcaagatgtagggctgtcttaaggaatgatacggcctcagtgcaatggatgtttacaaga

SEQ ID NO: 309767 - DNA, 1000 bp, Homo Sapiens
atggctgacaggtctatgcattgcgttatgcttcacaaccagagctttcgagcctctatggctggcgacaagtcaggagatcttcaggcaaagaggggtgtgtgcagtcaaggggctgggagagaagactgagtgggtgtgcagaacagaaggacccagaggacatcaccctaaaaatgttttataggctgctccagtttaactccattaagacaaacccaaagagaaccttttatttgcattccatttttcaagctgcaagtttttaatacatcattgtaaagtaaacctgtggttgactgccaaggaagaatactgtgggctttccctttttgcccagttttccagaaatatcctcaccttggtcatagccagtcttttgacaaagtaagcagcattcgatgagggtggggggggggtgggggctctttattccagcttccaattcaagatgtagagagctacaatgtctaaacctattgaattgctcctttagtccttgagacattatttctcagaagcagccacttaatctctcaacctttgttttccctctttgactataagagtttataaatcagagggttattttgttgtggagattttgttttttgtttttactcctgcaagttttacaactcaaaataaattataaaaaacaacagacctctgaaaccgaacaagacaaaattgtgcaaaaataacaaagatatgtacatacttttcagtctgaagaaatgtacaataaaaacataattcaaagaacattttaaaaatataaacattgcttaaactttcctaagtttcatattgtttctgaaactattctggtcagttagctctgtaatatagtaaaacataaattattacaaaattaacactataaaaatttactttaagaatatcttctaaactttttttcaaagggtctaaccttgtttataatttcttaaacatttataagtcttaaaatctccttaaccttttttttttaaaaaaa

SEQ ID NO: 309768 - DNA, 1000 bp, Homo Sapiens
gtgcttgaacaaatattttatttattcatgggtagaccataaggtttgataatacagttcttcctctgttagagatgaaggagtcaaggcatgatcagctgcaatgtcagcaacaaaaccaggaggagatagggctctctcctccttcaggacacggcacagcacagcacggcagtgttaagggtgtgtctccctttggggtttccaagttgctctgtatcttctcgtgctggggctgaatgttcttcagctgtacctccactaggagaacatcagctgtgaagacagagcctcaacagtgtgaccacaggacagatctttgttctctttgtcctcaggagatgaattttcttaagctctcatggagctctttggggactcccttttgttaggctgccttcaagcaaatgagagaatgtgggaaagcaagcaacctgcacaccataaagcaccacaagcaagaggactcacccttcctgtggctcagcccacacacatttcaggtggctcattcatccagatgttgctcttgaccttatgaattatgacagcacttcctaagactcctccgcacaagttgcaatggcacctgccacgtcagaactgacagaactgcctgctctaagcatccctcccctcctcagagggctatggggatgactgctgtcctgctctgcaaatgggcccatcccaccctcattttcggaaacactggtagctggcaggtcactttctctggccatttttctcacccagttctctgctactaaatcaggcccctgctttctctaacacacacctctgctacagcaggcctctcccaccttgtgtacctcttgggaaaatgtcagcattttgccaccacagatgtggactcccatctggttggtgctatttgaagcagtgtctggggctggggtggaagaccaagcacacaactttcacaaagggcctgtcaccaccccagggagctgtaccgatccccaggacggcccagctc

SEQ ID NO: 309769 - DNA, 1000 bp, Homo Sapiens
ctggttataaatcctgcaatatattacattttttaaaatcctagtacaacaaaaacaaatcttaaataaaattgaacaaacaaacaaataaaaacagtagcagcagtggttacctgtctgagcacctacattttcttaggaggggatcgtgtctcaccagccaaatagcccataaaccttctcaaaaaaagtgagccaggagaaaagtataacacaagatttgatttcacaatgtctctaagccccacaagccccaaactggggattcactgaatgaaacaaatttgcttctccattgctttcttcttgagaaaaagagatgattttcaaagtcaatgccttcaatatgttctcaaagtctgataatgtgcttgatgaatgccaagtctcttgttgggtttttctactgttccagggtagttttcttattggtaacatatacaggaagatttcaatgttcattggagaaaagccagcagaaatgaccaatcaattataggcaccaaaaaagaaaaaaactattaaaaattttaaatagaatagttcatacttgtatgtttagatatataaagtccagttttcatcatgggtgacataaaaacaatatcagaaataatcatttttgaaatacaatttagaattacaattttaacaatatacaaaaattttacaattcagattttatcattacacatatttgatatatacattctctctcataatagcaatgaagattatacaaaagttattaaacaattatgaaaataagtttaacctaaatatctgctgctgtttgtttccttaaggtacttccagaatgatttgctcttattctctacctcaatcttgaaggaattcaagaagatatccatgtttttaaaatctaagataactactgctcttttcattctaacatgtgagtgtacgttttaatatcatgtgaatgcataatagtgaataaagctaatgaactaatttcacatatttcctataatatagt

SEQ ID NO: 309770 - DNA, 1000 bp, Homo Sapiens
aaaatttccaggaatttattggaaacacaatacaaattggttagtagatggcatctccttacagacagacaatccacactgtggtatcatgctcagaacgaattatcctgcggaaacactcatgagcacaggtgcgtgctctgggttagcttccctggcagggaaaatcagagacatagtgcagaggaacaggaggggtggacagaaaactgggacatggccttcctggggggaatggtgaggaggggctgctaactgagtaaattcccccaaaggaaaacagggacaacagtaaagaataaaggcttccccctccctccccaaagccgtttcctctctaggcagagtaaaacagaatctccaaacacccacggggcagctcctccacctcccctcgccagggacttaggacagcagtggggcataaacaccaggctcagacatgacaccgagtgcactgaggccacgcacagccccacctgcttgccctcagccccctgctctgctctgagtggcaggggactgacccggtgggtcgcctgtcccaggctcccagggcagctgcttccaactgggtttcactactgtgaggcacctgcaggactctggaggccaagaggaggggagaggctggggccccctctctctgcctggggaaatgtttctgacaagaatcatggcttctcgaggctccagcccccaccagacaggtccacagtgtggcaggtcccccagtggccttggccccaggctctggtgacgcgtcctcccctggtgcccagccagtctcaggatgggggcggcttgctgttgttgttccccacctctgggttgcccctcactcccctgttttgcctctcagcttttcttgttttgtgttaaacaaatctctggatgaaaacccccacttgaaatccattttcctgggtgggccctgagagatggaaaactgggctgtgcacaaggggaattgtgaagggcaggctgaaaccttccggcg

SEQ ID NO: 309771 - DNA, 1000 bp, Homo Sapiens
ggagacagggtctccctctgtcacccaggctggttggaatgcaggagttcgaacttggctcactgcaacctctgcctcctaggttcaagtgatcctcccgcctcagtcccccaagtacctgggaccacaggcacacgccaccatgcctggctaatttttgtatattttgtagagatggggtttcaccatattggccaggctggtctcaaattcctggactcaagcagtccatctgcctcagcctcccaaagtgatgggattacaggcgtgagctgctgtgcctggcagaacagtatgaagtgttaacgccaaaatttgttttagctatcatatataaatcataagcatattatttggttggttggtgttagttcattccttcaatcggatgatttaaaataaatgtttttcaagtatcctctgtgatgtatcccaaaggttagcttagaaagaaaagtacttggtgaaccattcctggtgcggagagccctgtttctgctgggcttctttggcttgggccgtttcaccatctggggtccttgtggcagtttttgcatctgtagactggttgggtttgtaggtccggccacagctggggcttgggtccaagctgggtgatgtagttattggaggggcattaatcctggaactcagatcgccactcagaaagttctttgcataggaggcgaggttcggcacgctgaccacgcggctgggcacgtcctccaccttctttttcttcatggaaggggtcaaatatcccgggtgaggattgaaagagaaagaccgattccggtgggacatggcactggggaatgctgcgtagtgaaatcttctctcttccgtgagctgcttgatgatgtcctctctctccttcaggcgggtctgcaggcggccaatgagctgaaggtcctcgggcctggacgctcccttccctggcttctctccggaatctttcagttcggcttccagggcagccagccgggcctggagctgggcc

SEQ ID NO: 309772 - DNA, 1000 bp, Homo Sapiens
gcagtttgtgtaaatgttttaattagagcatttgtagatacagtggttaatctgttgcccacaattccttaccaatgaggcttcatgctgggataccctccaccccaccctcttaacacaggatggtcacagaccacattcttatgttacaagattcacatctctggtaatccaaggactgtggtacaaaaggaacacttcatagctggggtcactacagtttgctagaaacatcagttactttagaatactttaactataaaatatattgaatttccatatattaaccatatacatgtgtacctattactaaatgtagtcagttgttacaaaataagacattctgagagcaggctacacacacacaccagcctaagctccccaggtgaggccttgtgctgcaaactgttcatccaagctcggctcccgactgtactggcggctaaacgtgcccacaaggcactggcaacccagcccatccaggtgccaccagctgtgtcagcacaagcccctccaattccagagtgaagactcctcctggctgcagacctggccaccccttgattggtccctgaacttgagccactggtgcctggttcccatgtcaggggtcttccaggggcctcaggaacaagtctgatggagactgatcactgcacctatgtccactgcacctccctgtgttctgtaagccctaagatcacagacccagcccagcccaggtgggccactgccaagagcagcttcacccagcccagctccagcaagcggagtatgtggacagtagtacctgaggtcatcctgtgccgaggccacagcaggctggtctcctgggccgtagggcagagttgaatgcaggtcaggaggtgtaggagctgtgtgctcaggtgctctagaggacccgagtttgcccgggccggtggcagagctgcctcttccaggtacaagggcagggcaccaaaaggcctgaagctagcattcaggccacagcagggcccac

SEQ ID NO: 309773 - DNA, 1000 bp, Homo Sapiens
aaaaccttattaaccatatatttaaaatgttggttgcctcgttttattcagcagttttgtatatgttctgtaatgagaaggtttttttttcagatatataatctaccatattgtcataaatagaagtttgcaaaaatctcttgtaaactacaaacactctgcaaacatagcacacaaaaaagcaaacccatagaccatggtcatttattaatactgatgcaaaatcttaaataaaatacccatagacataatctgctagaatcaatgcctagatcattcgatattaggaaatctgttactaaaatactatggatcacatattaattagtcgaaagagaagaatcatactttcatttccatagatgcttaagagcttcaatacaatataataatacccattctagatttttaaaatcttaaataccaaaaatagattcatcttaacaggaatcacacatatatgtctatctaaatctatctagatatacatatagaaagtgggtgtctgtctgtttgtatgtatgtatgtaagtataccagcttcttgctagcgagattgtcattgaaagccttgtttttaaaatctggaacaagaaagcaaggcttttgtaagcaatcttatactgttcctgaggcaacagtccatgcaattagacaatagaaaaacattttcttaatttaaggtggcaacattatttttataggtgatataattgtttacctgaaaaactcaagagaatcaacttaaaaatataacacaaatgatgtgagaattcagaaaaaaagactgagaaaaaattcatagtcattatatatatgaagaacaaccagttagatgatatattaacaaaaagtatctagaaataagcctaatataaaaacgttaaaattatacttagggtcataaacaaagactttaaaatatggacataaagtccaatctcaaacaggaagattcaatattataaagatgtcagttctccttaagtcaatatatttt

SEQ ID NO: 309774 - DNA, 1000 bp, Homo Sapiens; identical to SEQ ID NO: 120128

SEQ ID NO: 309775 - DNA, 1000 bp, Homo Sapiens
  misc_feature (125)..(125): n is a, c, g, or t
tactgtgtgcacctggtgtacacagtaagaggtctcctgggcttcaggcaatggtgtgctggtcagtgtttaacaatggctgtggtggccagtgcgatggctcacacctgtaatcccagcacttngggaagccgaggtaggaagattgcttaagctcaggagtttgagaccagcctgggtaacatagtgagactgtctctacaaaaaaattgtttttaattagccaggcatggtggtgcatgcctgtggtcctagctacatgggaggctaaggtgggaggattgcttgagcctgggaagttgaggctgcagtgagccacgatggcatcactgcatttcaccgggacgacagagtgagagcatgtttctacatatacattgaattaaataaaaaaataacaacggctctggtctgtggtgcttgacgtgtagcgtttgccaatttctgtggtgtaaacatttctgtcgtggtctatttcaagccaccagcaggaccccctgctaacagacaaaattcaagtggtaggagctggctccagtgatttgtccactagtgacactcagagagcaagtgacacgtcagcagtgcctctcttctccaaattcctataaccctcttgactacacctctggggcctcagtgcatcctgtgggtgcctcagtcctgggtgggtgtatcctctttcctctagacacagcctccttcgctcctattctcaggccccgtggtcagggctcaagcttctctaggctgaagagcttggagcctcaagttttccagcccgaaggtgggcagtggtcagttgctgaatggccaagcgtgtttaggtgagacaccgtgagatccccgtgcaagggcaatgcctgcccaagggatgaccctgccaggagggggctgcagggcaacgtggactcacccaaggtcccagagaggctgacgctgatcaaggctgccaggagcagcctggcccatgggctggggcgtggccctgccatcctct

SEQ ID NO: 309776 - DNA, 648 bp, Homo Sapiens
tgaacattctgtaggggccactgtcttctccacggtgctcccttcatgcgtgacctggcagctgtagcttttgtgggacttccactgctcaggcgtcaggctcaggtagctgctggccgcgtacttgttgttgctttgtttggagggtgtggtggtctccactcccgccttgacggggctgctatctgccttccacgccactgtcacggctcccgggtagaagtcacttatgagacacaccagtgtggccttgttggcttgaagctcctcagaggagggcgggaacagagtgaccgagggggcagccttgggctgacctaggacggtcagcttggtccctccgccgaacacccaaccactcaggctgtcatcccatcctgcacagtaataatcagcctcatcctcggaccggagcccactgatggccagggaggctgaggtgccagacttggagacagagaatcggtcagggacccctgagggccgctgattattcctatagaagaggagtttgggggccgttcctgggagctgctggtaccagtatacagaattaattccgatgttggagatgcttccagaacaagagatggtgaccctctgcccgggggtcccagacgctgagggtggctgagtcactacgagctc

SEQ ID NO: 309777 - DNA, 553 bp, Homo Sapiens
aaaaagacattaggcaaaaacagaacctgaataaagtgtgtactttagttaataataatgtagcagaattgattcatctattttgcaaatgcatcataccaatgcgaaatgttaataatggggaaactgggtgtagggcatacagaaagtctctgtactatctttgcagtaattctgtaaatcaaaaactattagtacatttattaaagaaaaatctactaggaaagcttccagaagtattccatgctcacaataaacaaggcaaatgcaatcaagaaaactcaaacatgagattaaatcagttaactggctgctcaactataataatgccctgtgcccagagctttacagaaactatcacacgaaatattagcttattaagcccacagcttctttaccaggataaaatggccaaagacattggtctcaaacacctcctgaagtccatcagcagtgatcttatcaccctgggtcagcaggccttcagctgtggagaacatatgaatcacttttctgaaacagcagaagataattgcatgactttttaaagctt

SEQ ID NO: 309778 - DNA, 1000 bp, Homo Sapiens
gatccagcttatcgggatcctcccacgtctctgcctcctgagtacctcggactacaggtgcatgccaccatgcctggctaatttttgtattttttgtagagacaattgtgccatgttgcccaggctggtctcaaactcctgagctcaagcaacccacccaccttgaccttctaacatgctagaattacagacatgagccactgagaccagccagagtattttcttactgtcaggtacatgagatgattcaggctcatcttgtatttctcccaatctctgactaggaatcatccctgttccccttttttgtggatagtatttaggaactaataacttggcagttggtgtgcttactgttactgaggtgtcattgtgtttaggtcctctcagtagaatgaacacaaaatatatgcatatgtgcacacacaacaatttatttatttgttcctatatatttaaaagatatgagttctattctaatgccacactccaggttttctagctctcctcattcctatttttataaataccttctctaatggagaaatcttgctgtcatcattctcaacatatttatttgctcagtgttaccaatctctcaacaatgctgcccatctcctccccctgtcccttccacacctcaccctcagccctcttggtgccagcagacacaaagccacaactcctctcatcccacgaggcaagtctaactcctccactctggggaaggaaggcaggagagatacatgaaaagtcaaaggggggaatcaaaagaaagaggaatggaagtccacactgatttttttaaaataataaatcttttgattgccctaataaacatctcttggtgatgatatagtttatggatatggctagatgtttttttcaattttaggattttgcatctaaatctatgagactttggtctatagctttatgggtttttttgttgttttttttttaggttttgttatcaaggttgtactgccctcaaaaactg

SEQ ID NO: 309779 - DNA, 1000 bp, Homo Sapiens
tttttttttttttttttttactttcaagtgatggataaaataaaaccattgtggatatcatgggatatatgtgctattggtttgaaataattttcacttttgcatttatttatctgacaaaggagtaccaatctctaaatattttaaggattatttctatgaattctctaaaaaatataaattgtaactgtctatatcatacaaaaatatttagcaatccttataacagaaaacaagatagtaaacattgtgtgtatgttcatgtgtgtgtatgtgtgtttattggtagtctcattaatccctagtctctactgacgttattagggacattagtggaacagattttgctgaacacattttcagccactctgagtgttcttaggtattttatttatttagagactgaatctgtgttgtcctgcctggtctcaaacttctgggttcaagcgatccttctgccttactttcccaagtatctgggactacagatgcacaccactgcccagctaaaatgtactttaaataaagtagataattctggggttatctcaaactcctggcttcaagtgatcctcctgtctcagcctcccaaagtcctgggattactggcttgagccactatgcttgccacctctggggttatattagcatgacaccaggacaaaaatctgcccatttttatatcaggaaaaaaaatgctactctcatttaggtgcagaaaatggcttatgcctattgaaataaaaaattcagtctaatttagacacctaagattattatttgctataacgacatggaatacatcactgtgtgtcactgaattcatggaaatgcagtacagaatgcaatacagtaatccccccttatctgcaatttcactttctgcagtttcagttacccatggtacaacacgataagatattttgagacagagaaaccaagagagagaccatattcacataacttttattacagtataattgttctgttttattatagt

SEQ ID NO: 309780 - DNA, 1000 bp, Homo Sapiens
tttttttttttttttttttttttttttttttttgaagataagtaaatgcatccagaaatgtatgcacagatttaagttttccccatagttttatctgctaggtgataggttggtgcacacaggggttccgttggtgggggagaagagccgccagcccacacacggtcactggattggtgtgagtgggttccaagcgactgccatgtgctagtccactgacatgattgacattaacattcttggggggcattaaattaaggaatgacacagggagccaagagagtggcttattcggttggattctgaatcacaatcaggaaatagtctttatctggtgcaaccataatttcatttttcttggagcgaattcgaaggaaggtgagatcgttctgggggtcgatgtcacgcacggtgctccgtgccttcaggatgaagctgtgcatgaggctggcatactgggtggtggtggggttgtccttgctctgccctccccagccctctatggccacctggtcccattggtgagtagtcgttgggcctctgttgactgttgactgaaactcactgccacataaggcagccactgtcaggctgtccctgttgtaaatgaaaacttgacactcccccagcacttctgcctttggcccttcagagatttggagccagagagatgcccctgagtcttctctccttcagactttaacaaagaaatctctgcccaccctggtgagatctccaattttttgtggtcctcactcctgaagatacctggtttggtgtggtgaccccggtgagggcaaggggaatctctaagggtttgtgctatgctatgaaccataatacacttgtcaacaccagccaagatcacattaacctgggagcagcaggtcagcctcctctttcctgtccacctctggttcccagattggttttttatgaacaaacaaaagactgagctccctaaggtgaggtattcatagttgggggtttgggcctaaag

SEQ ID NO: 309781 - DNA, 1000 bp, Homo Sapiens
tttttttttttttttttttttttttttttgagttcatttatttgatttagattcgtgtctcccaacatgccacctccctcattttttatttttgtttatttttgtttaatccccatcactcctttaggctccctcctctaccagtgccactatttccttagccaatcccgaagtctccatactaaactacccatctacactctaccagccctcagcggcatccatggctgcagtggcccagcggagcatgcccctgcagacaggaacagcccagatttgtgcccggcctgacccgttccagcaagctctcatcgtgtgtccccccggcttccaaggtaagattgagcagccacagcctctcacctgcttcttacagaacggcctctggggctccggcacctgcagttttctgtcacgctcattttcatggagaaaggccctcctcatttcttccagtgagagcgctggtatcactgaactagagggctcctctcctactgtggccaacctagaaacaatagggcttatgcctcagcaccaagtcaatcctttgtgactctcacacctgccagggactgtgtccctggccagctgtctgtaaataagtacatagtttgtgctttcattgttatgctgatgtcagctcttgcttttcctcgcatgaaatatcctctgtgtgggttatctgtagaaaactgccaatctctgacagccgacatagtcccagctcccatgaagaatatccatcagtctgaaaagtacttccctgggacccctcctcaaaacaattctttggccatgaccccagcactcctctcctgtagactctaagaagctagactgtgtactttgttacaatttacccagaaagcttaagaatttatttttgcaagcctcatggtgtaaactgtgtggttacagtcaatgcaattccaaatgggttcatacatctccccaacacccctcattttgacatacacaggtacatcttgatggtcag

SEQ ID NO: 309782 - DNA, 1000 bp, Homo Sapiens
tttttttttttttttttttttttttttttttttttttttttttttttttttttttttttttttttttttttttttttttttttttttttttttttttttttttttttcagccaacaaatatttattcaaggtttgccacgagccaggccctgtgctcggcctgggctggaacagtaagcgaggccacccaggtccttgctctctaggagctcaggttctagtggcaatgcccagcctctgctcaggggccccacacactgaatgagtgggagcacccccaggtgtgctgagccccagattgtttgctttctacctctatgatgacagcaggtcagaggtcgggccacccacgtggcagtcagagtcaggagtggggggtttgcccaaggtagctcacccactcagtggttctttgaaatgcagtgtccctggacacgtgcagggctgccagcactctgaacacgggggtctcttccaggagggtgggctctgattggatgggcagagaccaggggcagactgggtgggaggatcaactcccaccccccaaaacaaacccaaagtgctgggattacaggcatgagccactgcgcccagccagaagaggtagttctttagctgtgccttgaaagacttttttatatacgaagaaaatgagaattctagtggaggaaatagtaaaacagatatgtgttcagtagataatgtagaagtagtcagtctggttggtggttaggttgaagaaaaataactagagaggttgaagagatggtgttgtgagtcttatgctgtgttgcctataggaaatgagaagacactttaaagcaggaattacttaattattatagtttgttttttttgtggttagtgtgagtttagcagcagtttgaggcattctcttactcttattattcagttaactgttgactgttgtgtccttctaggaaccttgggttctgaatgaaacagtagtggaatatttggggaactaagtgctaaa

SEQ ID NO: 309783 - DNA, 1000 bp, Homo Sapiens
gatcaaggctccaattcctttcaatccccaacactgaaattttgtttccacttagattttaattcagctttccaaggagtagggtcattgtgttgcaccattacctattcacggagctgatgcccccagccacgtgagtaggttgtgggatcttgttcatttttgtattctcatggtctagcagggagcctgacttctgggaggctctcagtggatctgtggagtgacatgtgctggggggcatgcctctggccagttctgagcctctgggtgggtgtcttggtctttatctagatttctgcaggagtttctctgttccacacccaggctcccttgcatgggttgcctaattcatggaaccacggaacctcagactgggaggatgcctgagatggtaacttgccctgcattttagggaggagcctctgaggcttagcaagttgaagggatttgtctggggtcacacagagagttaaatgcagagttgggagtagacctcagtctagtggctatagaattcctttcacttcataggcatgcattgaattcaatttttgagtgatccctacatgtcaggcatcctgtggggaaccagagataggcaggcaagaatgaatggcactgagcatttgatatggtttggatctgtgtccccacccaaatctcatgttgaaatgtaatcttcagtgctggaggtgggcctggctggaggtgattggatcatggggggcggatttctcatgaatggtttagcaccatcccctttggtgttatttttgcaatagtaagttaccataatacctggttgttttcaaagtgtgtagcacctccttcctctctctcgctcctgctctggccatgtaagacatgcctgcttctccttcgccttctgccttgattgcaagtttcctgaggcctcctcagaggtagaagctactatacttcctgtacaacctgcagaaccgtgatccagttaaacctcttttctttataaattacc

SEQ ID NO: 309784 - DNA, 1000 bp, Homo Sapiens
  misc_feature (87)..(87): n is a, c, g, or t
  misc_feature (114)..(114): n is a, c, g, or t
  misc_feature (123)..(123): n is a, c, g, or t
  misc_feature (125)..(125): n is a, c, g, or t
  misc_feature (378)..(378): n is a, c, g, or t
atttatttttccaaggatgggtttatttcaaaattgtaaagatttatatattatttttattacatataataagcaatttttagcttnaaataagtttcacatttaaagtaaaanaaatcttananatgcagacattttttaaaagcaaaaaagtttaattatcttgcagcacaggtctacctttaaatattcacatttcaaagctgctttgaaaagatttaaaaattggctaaaaataatttacaactggcagtgattaaaaatcttatctttggaaaagtatattaatgacacataatgaatttaaagttacaagcatttaatggtttaatcaagcatgtagtttttaccagtatacaaaatgagacttagtacaanacggtcttcaactgtcacgtcagttgttcctggagtgttttatggggaaaagcaaacttcaccaaacatagagtaccaacattcaagtgctcttttccacaagtttctgattttcaacttaggagagaagaacagcatttaataactgcatcccttgcatatgggatgtacgacaggctataccaggtcattgacaagaactgcaatatgcagaataacacagccagtcctttcttatgccaccaaagagcagcacacagggtaaatatgaaacacaaaagcataacaattgttgcaagcaatcttgttgcttcacacattttcttcagttgcttcacaggtcccattaaaaagcatgtactggctaacgcagcaagattgccgagggtataaaacactgcaaaaagctttatgccgcccggaagccacagcaatccagttccaagaatagaaaagaaaacgccacatacgaagcagatggcaaaccatttcaatctggtgttgaaactaagggatgaggcatccaggacctgcgcagtcaggccctgctcctcgtcgtcctggccgctcaggactcgccgcagcttctccatggccccgttccagggccgtagcggccgcc

SEQ ID NO: 309785 - DNA, 1000 bp, Homo Sapiens
aagcttttattttacaaagaaggaaacagattgaaagaggtgaagtggtgagctaaggccaaaaagcaagaacatggatggataaggacagaaaacttttcaatctaagggtaatgtttcttctacagcatgacagcatctctcacaaactgtgcttgccacaatgactttgttttcatccacttatatgtccactgagcttttgatgacagtatacctttgttaggatgcaaatagataaaatgacttcataattatagaaactttacagtaattttgtccaaggccctatagcttccaaaacaaatatgtatcaatatatattgatatacttcttaagcctggcatagatttcttcttttccttttagtcacctagaaatgtccctatctaagcatattaaaaatcagattgaagacaaacaaaactcccttgcttgaaaatgtgatctccctccttttgaaaataataaaaactgacaaaatatttatgttctattaaaagacacagtcaacccttaaacttggttttttccttaaaaaacacatcaccaagtactaaaaggctagttcctatgaaactgtctccagctagaaagggaggtcaagatgccccacaaatgtgatttacttccttaagcatgtttagacagatctcttgcacacagaattgcctttaaataaatagccatataaaattaattttgtctgttttgcctcaagtttgttgtgcttgaggtttatttgcctggtgtttacagggctggggtataacagaaagcagaccagaaatcaacacattttatctgggctctcaatgccatgtttcagaacagtcactggcctcccaccagactgttgattggattcagattatgaccttcctattcgttccatttaaattaccctgaaggtatgacctcaacagtgctctgagacagtgttggaataagctttgcaaacagcccaagctaggaattcaaaaagccctcagcagtagc

SEQ ID NO: 309786 - DNA, 1000 bp, Homo Sapiens
gatcattacgtattatatacacatattaaaatttcataccatatcccatatatatgtacaacttacatatcatttaaaaataatgataaaattatatccagattcaagcgcctcttgtagcgcttcccacagtcctcacatttggatgagttttctccattgtggtctccttgttggtctttacagaaagaccggtgtacaagcctctttccacaatcctcacatttgaagggttttttccggcagtggagtttcttatgattcaaaatacttgaagcccggctaaagctcttcccacattccttacaattataaggtctctctccagtatggaccctctggtgcaagttaagacctgacttactaatgtagcccttcccacactcctcacatctgtatggtttttctccactgtggattcgctgatggatcaaaagatatgaggaccatctgaagctcttcccacattctttacaattgtacggtttctgtcctgtgtgaattatctgatgcttatgcaaatctaggctatcagtgaagccttttccacactcctcagatttgtacagtttctctgctgtgtggaccatgcaatgcctattaagacttgacctaaggcagaagctcttaccacatatttcacatttgaacggcttctccccagtatgaattatctgatgtttctgaagctggaaatcgtgaatgaaggccctcccacatttctcacaaatataaggtttctctcctgtgtgtaatttgcagtgaacttgaagtatcgctctacatctgaagcctttcccacattgctcacatttgaatggtttctctccagtgtggactctctcacgagtttgcagacatgagctctgactgaattccttaccacgcatgtcacacttagagagtttctctctcaagtgaactctctggtgaatacgaagagctgagatgtaacagaagctttttccacactcattgcatgtatgagacttctctcctg

SEQ ID NO: 309787 - DNA, 1000 bp, Homo Sapiens; identical to SEQ ID NO: 120131

SEQ ID NO: 309788 - DNA, 1000 bp, Homo Sapiens
aagcttcttctcacagttgggcggaggatggggggcggagggacggagggacgtgaaaagacgttacaaacggatggcacggagagaggagagggccgggagccaggcaagctcgctggggccctcggcggggtgtctaggcccggagaggatcgctgggagaccggcttcaagtgaccacctcccgagccccgggagccggaggcagcggcgggggcatccttccagcggcaggggaggagccagcccacctctccccgatgcgctcgcagccagctcaggcagcgctcagggaagtgtaagcggcggtgcagccccgcggctccgcagtaatcgcgcaccgccaggcctccgcggacagcgctgagggctccgcggcccagcgggggttgacgcagtgactgggggaacgcggcggcagcgggggccgcgagggctgcaggtgacctgtttagtccagccgccgccgctgccgtcgctgccgccgccccctccgcccgcccccagggacggggcggtgactgtggggatcggggtgggggaggctgctgccgccgtcgccgctgccgctcctgctcctgatgttgtggctgttgttccgggagttgcagcctccgccattactgtttatcccacacagcaaaggccccggaacttccgggatcacatagttccggtccggctgcggggagaggacggcgaggccaggcgaggggaggggaaggacactgaggcacccgttcggtccccgcctgctacgcgtcgcgtatctgagcgctctcgccacttcaactgcgggcccagagcatgcgcgcccgcggcccgcccacggcgccgctcattggtggaggggacgtctcctccggaaaggggcggggcaaacgggggtctgtacaggtgtgtcctaggctcgaaaccccggcgacgaaagtccatagttagcggctttcttcctagcagaggctgatatagtggagctggggctggggactagggactt

SEQ ID NO: 309789 - DNA, 1000 bp, Homo Sapiens
gatctacagtacaataagatgttttgagaaacaaaggcagaccacatttacataacttttattatagcatatttttataattgttctattttattatcattgttaatttcttaccatctaatttatgaaataaagtttgtcataggtatgtatgaataggaaaaaacactatctgcaatttcagatattcattagggtcttgaaatgtatactttgtggataagggggaactactgtatttgtccttgctgtttaagccaacttgagtgggtttctttcatatgaagctgaaaatatcctaacccctacaatgtcccatgaataccagaaaataaaacacttgccccttaagaaaatctttcaacagtaagaacaacactccatcacctgttagtcacgccccttccaaaactaaccagacatgctctgcctgttcacttttagagataccaaactccttggacaggtggttacaaagaaatcttccaggtccctctgacaaatgttaacttcaccttcttagagggatatgtgcatatctgtgactttggttcagtgcttcaccccaatctccaaaatcctgtcaaagctgttctagaatacaaccaaataaatatcaaaaataatcagatagaaatatgaaaaatactatgcttggaaaacacctatcctgacagcttacacaaaatgattcttaatgactttcctaatcttaaaatatattgacagggcttgcaaaaattaaaccatggaaaacgaggacatagctagaaccagtggactatatgttgctaactaccactacaattccatattcacaatgcaacagagaaccccagtacccttgtgagcaattattgctcatctttggtacagactcagaatgctttaaattaaacagacccagaaatttcaaaagacttcattttcaatgaaaatatccaaattcctatatagattaattgatgcttttgtttaacctctctctcttttttttttt

SEQ ID NO: 309790 - DNA, 1000 bp, Homo Sapiens
tacaaatttcaaactgttttagcaatgagtcaccatttctcaaactaatgattgtattagaactttactggctataacagaccaaagcagaattttattaataggatttattagttcaaattctttattaggatatgctaacaatgagactattatgatgaccccccacattttaaaccataggtttttatacaagtagcagtatcaaatttattgtaatattttactttgcacaaatcaaggaaatcctgattgaatctaggtagttacaaatggttttttaataattcactttgtactgtccagatattctttaattaaaatatccaaaattagaagaccagtagggcttttgtttcaaaagctaacaatacccaactactgcttgctttccttattatagacaaggcatgtgaggaacacctagacgtttttaaagccccaaaactaggatattgtgacacagaatgttttttattcagtgctgagatgggagtttatcccaagcgattgtcctggcccctcatacaactatagtggtgaccagtcaggggctgtgggtgaggagacctgccagaggtggctggaggcactttattgccagcctggcgggctggcgagcgccaatgaagtaaaatctggtgacacacttgagtttgcatgtggcattttattttattggttttttttaaaggaagagattataaaaagacatttcacattaaagatttgcagtcctgggacacagtttggaaaacactatttataaggttgcacatattacaaacagctcccaaatggtgaaactggtattctaagatgaaagcttaatgaacataatgaagtgaataaacgcgtgtgaactaatgtttaaaaagttagagcttgtctcaagtcagtacagctcttaagataataaatacagtaacactactttttatttctttgctcttttatccctttcaggttcgatttgctgctttgattactgtgttagcac

SEQ ID NO: 309791 - DNA, 1000 bp, Homo Sapiens
gaataagtgtttattttctattaataaaaatgaattgtgacaaaagtggactctggcttcccctcccccctcacccccacccctctgggataaaaattttccagcattgccaggagctttcaggtacacattaaagaataaaatgaagttaagcagctggagtataggatagtatttgattttcaagatcacccaaagctgcactatcgtcccaaagctgaccaagtagaataaaaagaaaaaaaaaaaaaacaacccatgcgcaaagatagacatttcttgtgatctgctggctcagggccaaatgtttaatttgcttctccaaagtcattcatcttcaaaagtctgattctgggaaactgatgccactagcctaaaagcccactgaccatgtagtgtgcatcagtttcctcttgtccagtaagcatttatccaacagaagctaagataacatctacaggtgttctctctttacttctgacagtcacctgcatggtcactccatcggctaaggccagcctggacctcaccaataaatcatagccacctctgaatatacctgccagatagagcgaatgggaattcttgttctcaggtactttatcggacctctcacatggctgcatgcccagaaatgtgatgatattgttgacagcctcttcaagggttttggtagaactgagggcaaaggtttcctctttctcaaaggtatctcccacctcttcccaagcagcagcaaagttaggcttcagtactttctgaatatggtcagacacagtcacttcgagatcttccagcacatactcatcatcatacccatcctcatctggaactccagtgttagggtcacagtcccggactgtaaacttcatggtgcagctaaaggagcctgcaactgctgtagggtcatcatcaggcaaacgaacaagagtgtaacatattcctggttggttataaggaaggctgggggctgggatacaagacagcacttcataggaat

SEQ ID NO: 309792 - DNA, 1000 bp, Homo Sapiens
aatcgagctcccttcagaaaaggatgcggagtgtgttggaccgtctggaagggttcagccagcagagttccattcacaatgtgctaggtatgtcccctcccccagctggccaccccaggtcagcatgggcctgtttctctctgcagtgcagagagaaataccatatggcagccaaatagcatatctcctttccttacagaggccttccgtcgagcccggcgccgcatgcaggaggcccgggaaagcctcccgcaggacctagtgagcccctctggaaccctggtctcctagctcacagcagccctggcccacagtgcaagaggacaagatgggggatatctgaggccagtgctctcctgcctcttcgtctttctgattagagaccacgttggtctgctgagaaccagaaaagctgggaaattcccggctggcccctctgcctagccttctgcagggtcttctccctaccctgtggaaataaagccagagaccctgtggccccccctttatatttgcagccactgtcaatgggcatcacagcaaggcaggctttttgatctgaagctgtttggggtgaccccatagtgagtctggccttgactcacttttctggcttgtctcacagtagcaggggatctgctgttctccaccctttaaaaatggagcctttcatcttccaagaccaaagaaggaaggaaggtggacggtgagagggtcttaaatccccagcctgtgagtctcagcctctttccagggaagcctcattctactgcttggggcttgctgaggttgagatatgagttatttctgagtaagtgaaggctgaaggcagtgctgagtcctttctgctagctgggtggtatcttttactgtgtttttttgtttgtttgtttttttgttttttgttacataaaccccttttattttgactgatgttctgttggctgtttgtctgctcaggttgctggtatggctagggtgttcttaatgtcggggcccc

SEQ ID NO: 309793 - DNA, 1000 bp, Homo Sapiens
cctccagccaggaccctgaaggaaccccaggctgcgagtatctttccaagggcaggggcaggggcagggctgcccctcagcctggagggctaggcagccttggcctgggctcgggttacgaacagcaaagcccatgtgggacatcccactgaaactgcggcaggatggaggcctgggtgcggcgggtacatcaaggcctggcgggcctgttggggctcagagtgctgcccagggaacgcaggcaggggcagcaccgcgctggtgggagggcccagcagtggctacgggcagctccctggatcactgggacgtcccaccacaatgggggcaggcccggccacccaggacccacacacatgggaggcggtgaaaatgtttttgaagccaggagaaaatcaggctgtctcggccagagtgggtgttctcttcctggggagaaaccaaatgcttccttgagccacaggatgggcacctggctcccccagggggcaggaagcaccaagaggggcgaggctggtgtggcatagcagcaggactgtgatctggactcagctgtccctgcctccccagcaccgcacacgctgtcaggcaaatgctgcgtaattgaagggaagaaggaacggacttccagcacccgcagaccacagcagcgaggtcctgaccaattcattgtgatgacccaggtcacccagaaaagatgacccatgttcagtgggcacaggcaagccgcgtgggtgacacagccgccacttgaaagagggcagggtggtacacacggtggtggtggggaaggccactgctcaaacccacagcaccatctgcaccccatatactcacccctggccggcctcctgcagtggcaccaggtgtccccacgaggagccagcaccttgatggtgagcctgagtgctggccgctctgtgggtggcagccggaggtgacatccctgaagggtacagggggccctgtgccccacttcaagggatgctcttggagccca

SEQ ID NO: 309794 - DNA, 1000 bp, Homo Sapiens
cctacttgaatgctataattgttaatactcagttttttttaacatgaaaatatttattttaaaagacttctgcacagcaaaggaaaaacatctacagattggagaaaatatttgcaaaccatatatctgaaaatctccaaaacatgtaagaaactcctacaactcaataaaagaaagcgtttaataacccaattaaaagatgggcaaaggactggaatagacctttttccaaagagaacatacaaatggaaaactggtatatgaaaaggtgctcaacatccccaatcatcaggaaactagaaattaaaaccacagtgaaatatcacctcacacctgttaggatggctactatccaaaaaaacaaaaaattaaatgtaagtaaggatttggagaaattagaacacttgtatactgttgataggaatgtaaaatagtacagccaatatgggcaacagtatgaaggctcctcaaaaaattaaaaaaataaaacttccgtatgatccaacagccccacttctgggtatgtatccaaaataactgaaatcaggatcttgaagagatatctgcactccagtgttcattgaaccattattcacaatagccaagatatgaaaataacctaaatgtccattgatagataaatggataaagaatatatggcatattcctaaatactactcagccttaaaaaaaggataccttgccatttgtgacaacatggaagaatctggaggatattatgctaagtgaaataagctagacacagaaggacaaatactacatgattccacctagatggggtgtctaaaatagcaaaactcatagaagcagaggatagaatggcaattgccagggcctggggggtaggggaaatgggaagttgttgttcaatggatataaagtttcagttacgttagatgagtaagttatagagatctgttgtacaacatagtacttatagttgtcgatagtgtattgtgaatttaaaatattaagagca

SEQ ID NO: 309795 - DNA, 240 bp, Homo Sapiens
  misc_feature (26)..(26): n is a, c, g, or t
  misc_feature (67)..(67): n is a, c, g, or t
tgaagagaacttgttagtcatctagnccagagtttgttgacctcagcgctgttgacattttgaccanataaatctttgttgtgggggtctgtgctgtgcattgtagaatgtttagcagcattcctggcctctacccacttgatgccagtagcaatcccccaactgtgacaataaaaaacatgtccaggctgagcacagtggctcacgcctgtaatcctagcactttgggagccaaggcgg

SEQ ID NO: 309796 - DNA, 1000 bp, Homo Sapiens
acacaacctgtgagctggggcgggatttggggccctcaggtctgcttctgccctcataggcaacccaccacataaccccatcctaggattgcaggagatacagctctagataagaatatccaccagtcggtgagtgagcagatcaagaagaactttgccaagagcaagtggaaggtgagtccatatccctagttctggtcccagcctccccaggactcctccccatccctacccaggctcagcttgcacagcacctggcatcacactgggcacacagtaactgcttagggatccttactgaaggacttcattcattcactctttcattcaacaaacactcccaacaccttctctattccagagagggtccctcacctccaagtctagaggaagaagtctgtaattcttcaggaggcatctgatccagcctatggggtccgagaaaggtcataaaagtggtgatgacctgacagagctgtcagttaagtaggaattagtgaggcatagcggaataatgtctatagccattccgggaagtgcaagtgctaagcctggccagactggaggggctgaggggactgagaggcaggagcccaatttagagaagcaggtaaggggccaggcctcttagggcctcatatgccacagaggagcaccaacttgatcctgagggcactgaggagccccagaagaatcttaggcaagtatttgctgcatagaaagggctctcagggccaggcatggtggctcacgcctgtaatcccagcactttgggaggccgaggtggttggatcacctgaggtcaggagttcaagaccatcctggccaacatggcaaaaccctgtctctactaaaaataaaagaattagccacacatggtggtgcgtgcctgtaatcccagctacttgggaagctgaggcaggagaattacttgaacctcggagatgggggttgcagtgagctgagatcgcgccactgcactccagcctgggcaacaaag

SEQ ID NO: 309797 - DNA, 1000 bp, Homo Sapiens
gagctcatatcagagaaaataagataatgtataaaacttatgtaaaagataatctctctatagaatatgcacattaaaaggttggaaggatacactccaaagactgattattttaggggaatggcattctcaagagtgggccatagaatggatttctttggccgggcgcggtggctcatgcctgtaatcccagcactttgggaggctgaggtgggcagatcatgaggtcaagagatcgagaccatcctggccaacatggtgaaaccccgtctgtactaaaaatacaaaaattagccaggcgtggtggcacatgcctgtaatcccagctactcgggaggctgaggcaggagaatcatttgaaccagggaggcggaggttgcagtgagctgagattgcaccactgaactccagcctgggtgacagagtgagactccatctcaaaaaaaaaaaatgtattattataattaattgtgcatttgaaaaatatgtaacacatttgtttttcatgatacaaattaaagaaaataaaagttcacaaagatctgcttgcttggtgggtcatgggttcaaaagaatttggaaacactgcttgaagagctctggaccttataagaggtttaacatgctgctcagatatgttataggcacataaatgtcagcgctaacattgccaaatggttaccacatctactttattcagcatcgtttacttttgacaataattggctcctgaatgttcaggaaggttgaagtcatgactctaaattaataagcacgagtcgtgtgtggttgtagaatcattctttattttatagctaccctaacataaaattcccttgtaactctaatgttagaagttataaataagatagtaataaaaacgcatcaactcattacattagacaaaatggtggtaagaaaaactatcagtaggttcccaagagaaaagttacacataaatgaatttcttagagaatgcacattaggtaagaatttacaa

SEQ ID NO: 309798 - DNA, 1000 bp, Homo Sapiens
tcccatggccacattcatcagatccaccaatggtaccctgaccgtcatgtcctgacctccttttagtcctcccctttctagacctctttgtgtggcctggcgctgaggacggctccaccgtcttcagaagtgacccatgtgccctggacttcctggacttttggtcaccctccttgcagtctgctctgtgcttcacccccacctctgggggccttgcagagcacacaacactgattccatttgagatcagtgaacgggctatctctggtaccactgtcaggaggcagaagcctcctggccctgcacccacctatactcaccttctccacaatgaaggctgtgatgccccgagaagctggcacagcagccagatctgtcttggcatagacaatcaggacgtcagcatcagggccattagtgatccagaacttgttgccattcaggatgtagtgatttcctaagggcaggatgttggctatttgctcaagccatcttggcctgtctcagccaggccatagaccttctgctgagcaagaagctgtccacctttgagaaagttttggaaacccagcaggggccacccacaattgttgctccattaccctgataatgtctgtacctctgcccattttggctcccaagttgagagtggcctcacctttcttttccgctttgagcttcatagagacaacatcagagcctgcattgggctcactcatggccagggctccgatgtactcaccactgatcagctgcaaggaaaacccccaacaggccttgttacaacctcagagtaccctagagcagctcactggtactgcctcttcctgtccacattaaaccccttcaaacttcgctctcagaccagggtatcggtaaagtcctagaagtctcttctaagcccaatggctacaaggctgaaaatgcctctcctttttccattccctttgcaaaggaagctagtcctactcttccatttcttagagttctcttcaaatgt

SEQ ID NO: 309799 - DNA, 1000 bp, Homo Sapiens
tgaggcttcaagtaccatgtcttaaaagatgagtgagatacatgtgtcataaggacttaacttcatttagccccatccacccaaccaaacaagtaccaagaggtggtagtttttacaaagtcattgtccttgcctctttcaaatgagatgggttgctcctcagaagaaagtagttttgtttaatcaaagtgattgaggatatctgtactcccaaactttgcataggatttaaaataccatctaggccgggcacggtggctcaggcttgtaatcccagcactttgggaggccgaggcaggtggatcatgaggtcaggaggagtttaagaccagcctagccaacacagtgaaaccccatctctactaaaaatacaaaaattagctgggcatggtggcgagcgcctgtaatcccagctacccaggaggctgaggcaggagaatcgtttgaacccaggaggcagaggtggcagtgagccaaaattgcaccactgcactccagtctgggcgacagagctagactccgtctcaaaaaaaaaaaaaaaaaaaaaaaaaaagtttggtactgtttgtttttgagctagggcttttaaagaggtggtatgtcaggatcaacaagttagatcttggtctctgagggtgctgataaatacctaggttggtttatccctgccccccgcacgccccccataacctcattcccttgattgattataatgtatactgaggtaactttatttaataattttacattctgttaaattttttttttttttttgagaggaagaagtctcactctgtcaccaggctggagtgcagtagcgcgatcttggctcactgcaacctccgcctccttggttcaagcgattctcctacctcagcctcccaagcagctgggactacaggggcatgccaccacgcctggctaatttctttttgtatttttagcagagacagggtttcactgtgttagccaggatggttgatcttctgacctcgtgatc

SEQ ID NO: 309800 - DNA, 758 bp, Homo Sapiens
  misc_feature (5)..(5): n is a, c, g, or t
  misc_feature (19)..(19): n is a, c, g, or t
  misc_feature (53)..(53): n is a, c, g, or t
  misc_feature (55)..(55): n is a, c, g, or t
  misc_feature (58)..(58): n is a, c, g, or t
  misc_feature (80)..(80): n is a, c, g, or t
  misc_feature (119)..(119): n is a, c, g, or t
  misc_feature (126)..(126): n is a, c, g, or t
  misc_feature (639)..(639): n is a, c, g, or t
  misc_feature (694)..(694): n is a, c, g, or t
  misc_feature (720)..(720): n is a, c, g, or t
  misc_feature (729)..(729): n is a, c, g, or t
gtgtngggagggagcacanccatcagggtatgctgggtttgagtttgttggtntnttngtttgttatgcctgctttcaangttcccatctaggaaggacgcctcttcccctggaatggnaaagccntacagcttgggatcctttacctcggagcccagatcccctgcttggaggtgcgggagcggcggctggcagaggccctcaagcagcagccaggtttgtccccaccctgcaatcttggacacccccacctccccatgggcctggaaggccgagtgcgcaggtctgcgggggacctcacctatatactcgcctctggcgaagggcagggctgggtgaaccggcctggtttcctgctctactggaggcggctcgtagctgtcatcagcgttctcctcggcgggcatcacgtacatctctgagtccgagtgctcatctggattttcatagtcgctgtcctgcaagtgcagatgcagacactgtgctcagcatccccgtctgtgctgcctggccgtcaggaccattcctgccttgggaggccagagcagtgacaggagacaaggcttggagaggttgacttcaaaaggctaggcagccgataagaggcaaagctggggtttgaagcaggcctttctgctncaaagtttatcgtctccaccactgcactgtccttgggggacacaggaactacttnacgctaatgggagctgacactctgtngatccacancaaataacaagaggagataataaaacata

SEQ ID NO: 309801 - DNA, 682 bp, Homo Sapiens
tatgagaaatccatttgaagcgaggcagctgaagagaactacccaggtgctttcataatgtgagatgggaagattaaagcatggaagaggaaggggaagcagggaagggctatgatacacagagatgggttgtcactgatgctgtctgcccaaccagccaaagaagcacacactgtggcccaggggagaaagtcctgggcactgtcatttctgagcctcttagtgcttactaccaaatactcttatacatcctgatcaactgctaaaaattttcaggtgcttaaggcgacaaactcttacctttttcaggtggaggtgaactgctttctgtgggatgaatatagttttcatcattatcttccacggggaccacataatcagcctaacagaaatacaaaactgaatgagaagaatgctgtacattcatagttgactgtatgggagggagtgatttttttaaaaagcattattgagacgcaattcacatatcataaaattctactatgtaaattgtacaatttggtgacttttagtatattcacagacatatacaaccatcaccacaatctaattttaggacatttttatgcaaaaagaaaccttgcacccattagtcactccccatccaccgcttccttgacctagtcgaccacaaatctactttctttctctatagattttg

SEQ ID NO: 309802 - DNA, 1000 bp, Homo Sapiens
ctccccacctggatactgggaaagatatcacagcgcgggtatacgtttcctaccctgttgggagtaatatcattcttttcctttctggatattaggaagaatatcacaggggtgctgcacgattacttcgatattgggagtaatatcatcctctattttcctggatattgggcacaaaaacacaaaagggtgtacaaccccttcgatattgggagtaatagcatactctccttccgtggattttagaaaacaatatcatcagggctgaacaccccctgcgataaagggagtcatggttactctttcacaggccatttggaataatatcacagggggtgtttacaaataggggtggtgtacacctcctgtgatattgggagtaacattctctccacctccggatattaagaacaatatcccggcgggaggtggtacacccccagtgatattgcaaataatgtcatcctctccttccctggatattaggaacaatatcacagggggttgtacaccttctgtgatattggaagcaatatcatcctctcccccgctggatattaggaaaaaaaatcacccacggtgtacacccactgtgatatgaggagtaatatcttcccagggtattatgtataatttcacagtctgtacacacatggtgtacactcactgtgatattaggagtaatatctacctagtagataacaaataacatcgcagggtgtacacccactttgatattagctgtaatatttttctaagttgttacaaatatgatcacagggtgtaccaacatggtgtacacacactgtgatatcaggagtcgtatctctgtaatatattatgaataatatcacagggtgtacacccactgtattattagaagtaatatctctgtaggatattacaattaagatcacagggtgtagagccacggtgatattaggagcaatatctttctaggatattacaaataatatcacagggtgtacgcccactctac

SEQ ID NO: 309803 - DNA, 1000 bp, Homo Sapiens
gatcattttgaccttcctccttgacctcctggggcaagggctcagatttcacactttggggttagcctgaggtgtatcatcatctgagtctggctgctattgggccaggcttggtaaaggtggatagattggtgcataggggagaggggtttctatttccgctggtggttcctgcaaaactggtttttcttgtggtttttcctttctgtttgtagctgacagtaaagctgaattctctttcacttttggctcagctcgagctaccagtgttctgcaataagctgccaggcagggctctagccatacaggtcgagtttgaattatattcagccgtgagtcaatataaggaaattggcctggaagtccaggctgtcctccgacctcagtcaccaccttaaatacacagccaattatttccccatctatagttccttcggccggccatccaatactgaaagaggaccactctatttcacagacagttctcaacctctgggggtcaacttgatcccataatcccccacataatctttcttaaagttgtttaacatgcattctaatggggtgggtttcaacaacttccctcccatttcctcccatttacagcacaattcactcactgttttactttcacttcagaccgattagactgtctccctcacaggagtatttcagacactgctaagctttaaaggagggtttgagtcccaaacccagaccaccacaatcactaaactgtggggcacctccctagcatacagtctatgctaagagacctgtggctccacacacaccattccccacgttggttccttttggaatcgtctgtttcacacacattcacacacctccccactcccggtttcgtttcttaactgacttagcaagccacttttgtgtcctgggttggttggggtgtaggtttcttccaaatttgcgagccactcttgcatcctgggtcatattactaggtataccctgggaggtgatgaggctcccc

SEQ ID NO: 309804 - DNA, 1000 bp, Homo Sapiens
tttttttttttttttttttagttcaattctagaaaaatgaatttggtgcattgctgtaggaagagatcctggatcgtaaggctaggtctgaggaaggttgtggccccaactctgcaatgaatgaactgtgcgtcattgagcaaatccactaagctatctgagcttctatctccccatctgtggaaagacatgactgaattagaggttctccattgtaacattttatgattctatcattcctgtttccacctatggggatggacttcagatccttggccagggggttttataaagtcagagcatcatttgtcataacttaaagaagactgcttgttaaacatttcttatttctgcctccctagacatgtgaccatctgcaagaatgactttctggctatttcctccctattttgattgttctacatattattattattaggtaaatattcctaatagcaacagttgtgttaatgcaattgtatggcatttttttccaagggagcccaaatgtgtctagaactttatttaattattattttttaagtcaggaggggatggtcatgcagatttgttctcatgcagaactttgttttttctaactacctggcatttggttttaatgtcttaatttgtcttctgcagcaatctgcatgtcagaagttgaacctctccaagcttatgctggtcttagaccctaaggcttgaagggaaagtagtagcagctagatgagcacctcacttatctgatatttcttccaagtagtgcctggtcttttctagaatgtgtgctgtgatagggaattcatcttgtaaggcagccccttcactattagagagtatttttttccttctgtcgtattagagtgttccttcttgactgaattttcaggctttggtcccagtctgtcctatagactttttaattgtaagtttgctgcttcgtacaaagagtaaatagttcaaatatttggaaacagctatcttgtttcatcaagacttc

SEQ ID NO: 309805 - DNA, 1000 bp, Homo Sapiens
ttttttttttttttttttttttttttttttttttttttttttttttttttttttttttttttttttttttttttttttttttttttttttttttttttttttttttttttttttttttttttttttttttttttttttttttttttttttttttttttgccttttgtcaccttttggtgtcatatcgaaaaatacattgccaaatccaaggtcatgaaattttacctctatgtgatcttctaagagttttatgttttagattatatatttaggtgattgatttcttttaattaatttttgtatgttttcagatggtgatctgacatcattttttaatatggaagtccagttttcttagtaccatttattgaaaagattatctttttactattgaatacccttggaacccatgtcaaaattagtttatctatatatgttaagggtttatatctcaaatataaattctaattcagtggtctatatatttatttctataccagtaacacactctttagataattggacctttttagtaagttttgaaattgggaaatatgaatcttccaactttgttttttttcatgattattcaggctatgtaaggccactttcaattccatatgaacttgagggttagcttatccatttctgcaaaacagttggaattttaataaacatcacattgaatctgtagattgttttgggtagcattgacatttcaatgacttacattttccaatctatgaatgcaagaagtatttctatattttaggtattctttatttttataatttttaatttttatgggtatttagtaggtgtatatatatatggagtacatgatgtgttttgatagaggtatgcaatgtataataatcacatcatggaaaatagagtatccatccccacgagcatttatatttaggtcttctttaattttttcaacaattttgttttccctttctaattttcagagtgtaagtctttcatttcttttgtt

SEQ ID NO: 309806 - DNA, 1000 bp, Homo Sapiens
ttttttttttttttttttttagtttttcatcttacaaattctttttcttagcttttcatcttacaaattgatggtgccttgtacatactgtatttcatctattctagcaacaagattgtgatctgcttgtttagttttcttaattgtaaactccttttgtatgttatttacttgtcctaaggcagttagcatttaggagctcaataaacatttgttgagtgaatgaatgacactcagatgcaatggaaacatcacattttcccaatagcaatagtttagaattgtccatcctgaatttaatagagaagtaaatgggagggaggagccatagacttagagtgaaatttaaaaaatatgattattgaaagcttgcaaaaatgaactcgtgccctatttatattcttttgtgattccatatttatatctctctgtctttattcttttaagaaatatatcttaggtggctgtgaggattaaatttgtataatgcttataaagtgcctagtacatatacatgtctagcttgtttcatttaatccttttcattcctttaattaaacagcttttccttaagcataagaaccattgttcattatatataaaaaccacttttaattgagtttttctctgttaattaactgaactatattattagctgggtttcataaaaaatggcattttagcatattatggataagtaggcttgggagtggagctactcatagaatttaccaatattttataacactgttgggagaaatgtgtcttggtattcccaccatcaactcatttttaagttggaaaatctctatactaacattttttcactgattattgggaattctaatcttttgtgggtaattagaggatttgtacttttgcctcttccctaaccagattgatgtttagtaagggtggtactttaaatttttatagcatttgatttaacaaaatcttcacgccagatatcatccttgtgaatccttttcccatctaatta

SEQ ID NO: 309807 - DNA, 1000 bp, Homo Sapiens
ttttttttattttttgcataaaacatttttttttaattaccatttttaaagttacattttgtgtcatcatctctaccaccactcaagaaatctgagatttacctttggattctacttttttccataactctaaacagcaatctgcagtcatgtccttttgatcccatctcttaatatttcctgttgacttctgttcattcctattgcaaggaacattattgctgcctttgataaggccattatcatttttctctcatatcttcctaatatgcatttttttaaccagtcttcctgcctccagtcttgcctcctccaatcgatccttgatgctgccaaagtggtatttgtgaaatgcagtttagcatgctgcttcagctttgtaattgtttctcctaatggtcaaacccaaactccttcttgtagcacggaggttcttaggtgattagcacacttcccctccccatcttcccacttaatttctccatatttcttcttccccttttaggtaaacttactggtccttgctctataaagtttctcctaaaagtcacccctttcaccactgtgtccttttacacactttgtacaagttacttctaacagtgatttgcttacatgtttgtcctccccacatctagcccagtgattggttcaaaaaaggcactaaaaaaatggataaaattaaatatattactcttaatgattagtgtaatataaatatttacaccccatatctaagttctggctctaagcaaaagggttcatctctcctcaagcccttaaaatcactttagaaactcttcaacttctaattcaacatattctgacactaaacacaaatagccagtcttaacttgcttggaaaaccacatggtttaaatgtactataaccctttcccaaataagagctgctattatgaggcattaatgtacagaccgtttcatatgtatacttggttgcttaggaacaaagataattccagttccagaatatatgaat

SEQ ID NO: 309808 - DNA, 1000 bp, Homo Sapiens
tttttttttttaagagatgaggtctcactatgttgcccaggctggtctcaaattcctggcctcaagtgatcctcctgccctggcctcccaaagtgctgggattctaggcatgagtcaccacacctggcccagtatatatagtctctatttatcctgccttgtgagagtatccacacattttgctgcagaaatatgaattcgattatgcaatattatagcagatccctctgggatattatatatggcatatgcattacattattaaagtgcagaattctaaaaccatctgatatggcatcatgaatttccaaaggaagaccaaacagcagcaggaggaggagggggaatgaggatgggggacggagaagaacacagtaccatattcatgttgcaagtaaatgttagagcttggatctcatctttgtatatttcatcttgaaattatttattagcaatgttgcagtaaaccttaccctttcagaactcgcgacttctgattccaatcacaaatgaattcaagacccatttaattctatttcaacagtgctacttccttctattattaaacccaacatctcattttgtagcagcagaacattattaattattgtgattttgaattttactactttgtatttaattggtaaatttcctttaccttgatagttgtataagagccataaacataataaatttgtacttaattttctgtttgtatatattcaattaatctcaaaatttaaaaaatataatcgtcttctaagtaaaatatttgctggaagatatttattatccaggttcattactatacactgtgggtatttatcttatgaaaaatatctgtaggaatgaaaacacctccttttccaggtagaattacagtggtaccatcttgagactagcaatcctgagactagggttcaccttcattgttccttggttttcttcaattcttccaaaatctgagtagtagctttcaatgaattattgagctcttctt

SEQ ID NO: 309809 - DNA, 1000 bp, Homo Sapiens
tttttttttttttttttcataagcaattgaattacttttcccaggaataaaaccttttttccataaaatctgcaccctatagtcgtgatagtattaattccagttttcaaaatgatgaggaaatcagcatactcaattaatttctaaaggtgttactattagaactttctgccactgtattaattctaactgtgtgaactctttctgcagtggaggttagcttccatttttaaaatagctcgataagagatctagggtgaatgcaagacccagaaatccatttatattttcagccttttaatatagttgtagtagagagatgcagcttctcagtcctagagaactaactgtaaatgacccagaatacttgtgtctgtgtctgcttcatgctctttcttgcaataatcatgaatatccttttgtattttatagacctgcctgctctgcttagtttaagttttcagacagtgcctaataaaactttttgcagtatttggtgactcactggggctactggcttgtccttgtccaaactgtcaggaaaccatcagtgcctcttcagatcagagtgtttctgcccatactccatgcaggtgatggcagttcctgtctgaggtggagtctgactggattgccacccttgtctgggcaggtgatctatctgctctgaaatctcatgaagcccaacatcctaaggagagcaaaattctgtaactgcaaacacagcttcttatctctcaaatatatccagatatttatgttaagctgcaaggaatctccatcagttaaaactagcaattacattccaatgtaacatgactgatgatttcaagagattagggccttacttgattgcatctaaatgcaacttaattctcttcttgttcaaatatcctgtgttctctatcttggtttattgcatagttcctttgcagaaattctgactcaaagcccttatttaatgtgttattttgtgaagccactctgtatcctaggtcca

SEQ ID NO: 309810 - DNA, 1000 bp, Homo Sapiens
tttttttttttttttaccacttacagcaactttctttgccaaatccacagtatcttctatcaactcaagatgttgtgatttcttcaaacttatctcagaaccacaagaattgctaaatttctctcacttagatgtaatctttttattgcgtacccaccccatcccagttaagctgagtcacacgaacataattgtcggtcataaattgaggagcaacgacatagtcacccatattagggcaattttctaacaagacataatccactacagtgaaactttctttggcaaaatcatccatggtgcacgagcaggggcttgcagcccatgagcctcagatgcaggctaccactgctgccacctccagttcttcatgtcagccagatggcaggagggagcaagtgggcctattacagttttaagagatgaggtctcactgtgttgcccaagctggccttgaaatcctggactcaagcgatcttcctgctttaacctcttgcatagctgggactgcaagcatgagccacagtgcttggctgaatgataattcatagtagctaaaatgtagcaacctaaatgtccatcagcagtgaatactttagcataatgtgctatttccattcactggattattatttagccttaaaaaggaaggaaattctgatatatactacacattacatgaatcctaaggacttatgctaagtgaaataacccagccacaaaaatataaatactgtgtaattccactgacatgaagtatatagagtaaccaaaatcatggagacaaaatagaatagtggttactgggaagaagggcaatggggacttaaaacggccatagtttcagttttataagatgaacagagttatggagatggatggtggtaatggttgcacaacattgtgaatatatttaataacactgaactgtgctcctaaaaatggttaagatagaacattttatgttttttgtattttactaccattttttacaagttga

SEQ ID NO: 309811 - DNA, 1000 bp, Homo Sapiens
caccacacccagataattttttgtattttgagatggggtttcaccatgttggtcaggctggtctcgaactcctgacctcaggtgatccacctgccttggcctcccaaagcattgggattacagatgtgagccatcgcgcccagcctttaggcttaaattctattcccttttgcttacaaacaacttcataaagactgtactccaaagcggtacagaaaaaagttacagtatctagaaaggactgtctatcctactaggaagtgctagacctctagatacagtttaaggagtttttccaaatctacagggacttaatttatgagtcatttagtgcttaggaaataaacatctatctattgaaagcttttcacttgcttgaaaaagagaaaatgatgtttaaccaactaggacagagataaaacttggaactcttccacaagccattaacctcgaaggtgatctccagagtgagtcacaaaggcaggccaggaacaggagaggaaaccacaacgctcgggcggatagccaaatgggcaactgattccagatgggaaaacagctttgactcaaaccttcagatactaaaggaaagaagctctgcaatgtatcgatagatcatgctttagtttaaaagtttatggccgggcgcagtgggaggccaagacggatggatcactaaaggtcaggagttcgagaccagccaggccaacatggtaaaaccctgtctctactaaaaatacaaaaattagctgtgcgtggtggcaggcacctgtaatcccagctacttgggaggctgaggcaggagaattgcttgaacctgggaggggaaactggggaagtggggaaccgaggggcaaccaggggaagatggggtgctggaggagagcttgtgggagccaaggagcaccttggacatctggagtctggcaggagtgatgacgggtggaggggctagctcgaggcagggctggtggggcctgaggccagtgaggagtgtgga

SEQ ID NO: 309812 - DNA, 1000 bp, Homo Sapiens
tttttttttttttttttttttttttttttttttttttttttttttttttttttttttttttttttttttttagattctttccattttttattaattgaagcacagagaaaagaggcaaaatgattaaagaaatttatgttttttagacagggtgttggctttacaccaacgaaaaagaaaaacagatgaataagcttttgatcttcattttctttctcttattctcatggtaggctgagatgcttttaaatgtgatgttataagcctaaggcagcttgacttgcagcaacaagttttttaccctcctcggcaaagcaggtctccttatcgtcagccttgcagcacttctctacaaaagctgcgaaatcatccataacagctttcagttgctcttttgttgccttgggcttgtgtttcacgagctcaacaagtgcagtttgtttcttgatttgtctctccttctcagaaagtgtgcatatatctgcatggaaggtgaatgtttcagcattaaactctttgggaacgtatgtttcatcgacttccagagctgaaaagcatggtcgcctgttcaccaaggattctgtgcagcatttggtgactctgtcacttactggcgttttctcatgcaacacacataactggttcaggaccacggatagatagtcttctgcacagggcattctttttgcttcaggatgtttacaacatttgctgcccacttttcctaggtttcttgagacctctacaagagttggagttgacacttggggtactttcttggtgtaacgaactaatagcgcattctggaatttgtactctccaagctgctcaaaaagctcacaattttgtttgattaaattctgaggctcttccacaagaggtttaaattcatcgaacactttggcatagcattcatgaggatctgcagcggcacagcacttctctagagtggtttcatatgtcttggcaagtctcagcagcagcacgacagagtaatcag

SEQ ID NO: 309813 - DNA, 722 bp, Homo Sapiens
aaaactaacctgggagtcaaaggacatggtttttatcctcttgcctgctgtgagccttggttgggtagcttggcttgtttggacttcagttcctttatctgtaaratacggaggtgtactaattgtctctgagcagctatttagctcagatggctgaggactctagcagctgcgtgcttagacatgtagaactccctgtgtcagcaggctccaaagtcctcctggtttagggaaggtataaggaccaatgagacctaaaacagcatagttcatctctgcagaccctgggagggagggatagagggagcagtgtgcatcataaggcaaaggcagtggagttaggtatgaaactcccaggattttggagccttaattctcaatgccatcagttcagcaatccagtgtttcattttgagaacatgattctaggggtttacttctgtgaggtcaaaacagtgagatttatccctgtaccccattcccagtagcactggaagactttcacaagcttgtagaggaaatagtatccttcatggaatcttagactcttgaagggccctttaaaggttgcctaacccttgctactcaaagtgtcttttttggcccagcagcgtcagcatcacctgggttcttgttagaaatgcagaatctcaggccccgccctagacctactgtaccagaatcagcattaacaagatccacgccgagccctatgcagtctc

SEQ ID NO: 309814 - DNA, 1000 bp, Homo Sapiens
ccggaagggagtgtgtgtgggtttgagacagaagaaggtgtgaaatagatcagacggtaatttactcacggtcctatttcatggatttccactttctcttcactgttgtgacaatccagaatctattatagctaacattttctccacttcagactggtatgttttatagcttgcctctaatgtcaactcaaagcaggtagaataaaccgatggtaccacatgatattctgccactccagtttattgaaatgagtaaatttatagctttatttgcatacagaaaagtgcatgagaaaataagtatgtccaaaacagttgtgtggctgatcatgactttcaaaaattcaactacctaaaaatagttccctccagtttaccacatttaggtttggcacatttaaagcactattcaagtctgtgtttatagtaactgagtaggaagctgatagaaaattatgccatatatgatcaactattccattaaacataaaaccacaggactttctacttggggctaatcaatagagggtcatgtggcccatgtcttgtttagcttctgagcatcaccctcttcttccccctcaaggtaacgttggatgtggctgattaactcccacaagaacctgagcattaagggtcaagagacaacattaaaaacccaacattaacaaaacaaaacaaaacttattttgacaataataaacccttcagaactgtgctcacaacaggactgaaaatgaactgggaacgtttccaagttgtgaggagaaaaatattgcagacattagattttcaatggtaaccccaaacatttgttctacagctttttctcccctcttatcttcctactaacgacattgagattgtggctgcaagaaaagttttccagttacttgataaaggcctagcatgaccccaaataagcacctaatgtgtttggcacaatcacatttagctttgtgatatgttgctcttcaaaatagagtcctttgttgctgag

SEQ ID NO: 309815 - DNA, 1000 bp, Homo Sapiens
ttttttttttttttttttttttttttttttggaactcacattgaatatttattggcttataagcacacaccaaatgctgtacaaatcctaggcaggaggttaagatttacaaacattttggttaaagcaaaaaacaaaaacaaacaaccccccaaaggacgatggtacgtgctgaggtgaaatgaaacaaaggcagctggttgatgaattcttgctctacttaggaacttgggccggatcaaaatagacagacacacacacacaaacacacacacacacacacacacacacacacacacacacaaaccaggacaaggaaacacaggataccccagcacaaatgggaatgtgccagggcagtgagattatccaggccagatgagtgatttaggacctgtaagatgaggcctacatctttgaagtgagttcaaaaggcaaagaggagggaagcccattaggacagatggggataatttcgccatcctgcaatttagatggggacttcacccagccttcctgggcacagtacctacagtgacacagatcccctcccgcccatcctggtcacactgaataacaaagggaagagaggagtaagaactgtagtatctagaaattctcagcacagtgaaggaaagtgatcttctactttgtattcaggcctaaaaaaggaggggacgggaccggcacagtggctccccctgtaatcccagcactctgggaggccaaggagggcagatcacctgaggttgggagtttgagaccagcctgaccaacatggagaaaccctgtctctactaaaaacacaaaattagccaggcatggtggcatgcgcctataaaccaagctactcaagaggctgaggcaggagaattgcttgaacccaggaggcagaggttgtggtgagccaagatcgagcccatcacactccagcctgggcaacaagagcaaaactctgcctcaaaaaaaaaaaacaggagaggagggagggagagacctt

SEQ ID NO: 309816 - DNA, 1000 bp, Homo Sapiens
cagagttagctctctgaccctttggcagctgccctggctagcctgggaggggtcagctggggataggcagtaaatatagatctagggcaggaagccaggcggcccagccctgcactgacctctcgttggaagtctagggagggcagatgtccagtcctggaaccctcctctcccggggtgggggacacctagcccagcaacaccctagaattgctggaagtggttgggggtaggggacagagcctccaaaggggaccaggatgagggtaagcagaaagctggccaggagacgctgtgcctgtgtggccatgtgccctctctgggcctctgttttcttctctggtcatctctgtcaaaggtgctgtccagcttcccggtaaggggtccactgatctaaagggaattgggggctcacaagtataaggagcagggggcaaggtccccttacagtccctcctcccacccccacaggtcttgcttattcaggagaggaaggagtctcagagcataatctcatctcttgctccctacccactctctgggtgctggcctcccaccctagggctcagggtcacacctcagcctggctccccttgctgcatagatgcagccctgtgccaggcccgtgccacacacaccatgcccacctagttcagccaagacccccgggacccccgactctgggaacgggaattcaggcaaggcagccactccaacacagatacgtttattggcaaaacctattcccaggcatcaaggggaagggtgctagcagagtgaataatttttgtttttcactttccttggccatgttcaaggagcaaggggagggggagacagggacatcccagtcaagataaggaggatcccagcagctcccctccgaggttgggctcttcaccaaccaaggccttttcttgcactgtctcctttaatccttataacaacactgcaaggtaggtaccattatcatccccattttacagacgaggaaactgaa

SEQ ID NO: 309817 - DNA, 1000 bp, Homo Sapiens; identical to SEQ ID NO: 120133

SEQ ID NO: 309818 - DNA, 1000 bp, Homo Sapiens
tctagaatactttgtgccaccgctaggctaagtgctttaaatgaattaccccacttaatccctagagtcacctccatgaaacagatcttattgttaccttcatgctaaagatgatgaaactgagactcatggaagttaaatcacttgcccaaggccacactgctagaaaggtggcatttaaactctagcaggctcattctacagcctgagttccataagataaaatgagagagtaaagagacaagtgtgttgagagcaagagaagcagtgaacctgaggctgtctctgtgggcagggacttgaggaggaaacaggtggggaacaaagccatctctactttgatttttgaaaagtctggctaagggtgctgaagaaatgcttgatgatttgttggttacagttagagaaaagattggccccattgccacaccagactacatccagaatgcacctggcttgcctaaaacccgctcaggtatgttcagaggcctccatggattgggatgggctgaggcctggtggtggtggggtgtgcgtggatgaaagcctttggcagggctagggtgggtcagtgctttcaccaagtaactagaggtctgtggttccccagggaaaatcatgaggcgagtgcttcggaagattgctcagaatgaccatgacctcggggacatgtctactgtggctgacccatctgtcatcagtcacctcttcagccaccgctgcctgaccatccagtgaacatgatcctgacctttacctaggattcctcctgctccaaactttgcccatcctctttgccccctcaggagtgctgagggccagtgttgacccacactaccctcccttgaccagctgtctgggaccggaaaccagctttgtctccaggtagagacaacatcctgtgactgccaggcagaaaggacagggcccaggtcagcctcagtctgctgtgcctccagactgcagagctctcagaacccagaacagagacgaaaaggct

SEQ ID NO: 309819 - DNA, 1000 bp, Homo Sapiens
cagctgaccttgaaacttggtctagcacaagccctcgatgtgagaggcactctctttcactaatagatgaaccagatttcagttttaaaagcccagtgagtagcagaattcccctgaggctgagttacaaatcaaatgccttctccttatgagttgcctgtgaattgttaaatatgcctagtgatgatgtgcgtggctcctgttggaatcccaaattttcaggggctttaacagtcatggtcttggatttcctttttgaaaatgtcaaggtatagatttcagtctttacacaatattagttggtgggcttgttgaattggggccttatatatagccactgcagttagaggaaatactgctagggacagggccaccttttgtgagagaaacgcctaaaagacttgttctccatccctccctcaaaccctatgcactgagacattttgcactgtggcgtcagctgctgtgcataacttccggacaccttctgctcacacgctgtctattctgatgcctgggtgccaggccagcctttcgcgcttgttttcctgcacctgacaagctggtgccgtgctgcagggctcctttcccatagccctctctgtttctggcataagactgggcccatcctgacacattgtattgcaccaagccccactctctctgtctaaggcacagccacccagccgggatgcccggcccacttgccgtgtgtgacaccacccatattgccgcattccgggccgcaggatgcacctgtgctcatgtgctcgttcccaggaactgtcctggtctctcctgagaatcagcagttttgctcccctcctcccccaagggcaacctgctgatttactgatgactaaattgccattacaagcttgactgctgaaataaagcttagagtaaagctgcattttcactgaagcatttattatgcaaaataggaaggctttagcatgccagtataaattaaaacagtagaaaaaaagcagagcagaga

SEQ ID NO: 309820 - DNA, 887 bp, Homo Sapiens
  misc_feature (833)..(833): n is a, c, g, or t
  misc_feature (842)..(842): n is a, c, g, or t
cagcactgccctcatcctcttttcgaaaactcctcgaaccctgacccacacatccctgaggactccctgcactgtgtcattcctcagagtatatataaaggggttgaggaatggagtcaccaaactgctcagaaccgaagggatcttgttgatctccagatattctttctgggagggagtcacatagataaacacagtgatgccactagaaatgatgactatggtcaggtgggaagcacaggtattaaaggccttcttccttccacttgcagaaggaatgcgcattatggtcaagatgatgtacgtataggaataggccacgaggactatgcagcagaggatgaccatggaagaaagcataaaatccatcagctcgatggcagtggtgtctgcacaggccagggccagcaagggtccactgtcacagaagaagtggttaatgatattggagccacagaagggcagctgggagatgaggatggttggaaagagcacagacaggaagcctcccacccaagagaacacaacggtcccaatgcagacataaggtctcatgatggtggtgtaccgcagggggcagcagatggcggcatagcagtcataggacatgaccgtcagcaggaggaactcaactgtgcccaagaaaaagtagaaatagcactgggtgatacatccggcaaaggagatggttttatccctagatcctaagttggccaacacttttggagagatgactgaggtgaagaggatgtccaggatagagaggttgcacaagaagaagtcatgggggtgtggaggcgggagcaggacagcacagtggagatgatgagcangttccccanaagactcagcaggaacgtgggcagcaggagcaccaggagcagcag

SEQ ID NO: 309821 - DNA, 1000 bp, Homo Sapiens
ggatattgaacatcagtctctgagtttttaaagaaaacataacaaaaaacccggaacaggactttaaattttctctgttctatccttgtcctttttatcaatagtttttatccctaaaataactaaaggcctgatgaaagaccctagagaatgttttcactgtagtagagaaactctttaagtctgagatgtagcacatgaagcagcagcatagggaagtgaagaagactgaagggaaaagaggggaccagtgcagaaaccctgggggcagcctgggaaggcagactaccccttggacttgagcatcagctgaattagatacacgcaaatgtgaagcttgaaaaaaaactgtacaaaaacaaaaatcacacccttcaaataacaaaccaagcaaccaatcaaactgtcattaaattttatcattaaataagtagcaaaaggtagatactatatagcaaccttctgtgcccatggatgcaaatgaatgaattgtctttaggcttgaatttcatctggctactcaactaggggaatcatctgctcaagaaagactgatacagagagccctgctgtctaagctgctcagggacactgggctgattcagtcagggccgtgctggtacctgctgctgctgctctctgctcagaggcatacagtgaacatccctttgttccttttagaccagtgattctgttctcatggtggctcacagggaggcatggattgctgcaggctctgccttgtatcacactctgcttttccaaagagacgccaggcctgggccattttgcgaagtttagtgaggttgggtttaatctatgggaagaaagaataacttcaattagcaatatgaaaaggtaggtagcatacaggctgggcgaggtgactcacacctgtaatcccagcactctgggaggccaaggcaggcggatcacaaggtcaggagtttgagaccagcctggccaatacggtgaaaccctgtctctactaaaaatacaa

SEQ ID NO: 309822 - DNA, 1000 bp, Homo Sapiens
agaaatttaattgatcacagtaagacattcaggctacaaaaaccttctatacagtggtttaaaaagtgacacccatctcccagaagccactcatacatacaacggggacatcattctcccaaaaagcgttgcacacagtccagttcgtgcaaataatctttgtacataaagaagaggcatttcagaggcaataaccccctacacagggccccgagaatagtcactgaacaaatacagcaaccagggtttgcaaaaataaatagattttatatatatgtgtgtatatatatatataagtgataacagtttcaaccaatatacaaagtgcaaacataacaaaaaatccccactatctgtacagggacgcatttacgtgctccgaaaccagaaaggcttatcacggttccctgcactgggggggacacagtgttttgtccctggggacaattgccaatcccttgtgacatcttcacgcgggagtctgacggaggctgtcactgtctctccggacatcagtgcaacagtaacacggcgatttcagaaagaacctgaagtcccgtcaaacgatccagactggaggatttatttattttttttatagttgtatttctgaaatagggtcttcatctgttgcccaggctggagtgcagtggctcgatcatggctcactgcaacctccacctcctgggctcaggcgatcctcctgcctcagcctcccaagtagctgggatcacaggcacgtgccaccatacccagctgatttttaactttttggtttttgtagagatgggatctcgctttgttgctcaggcctggtctccaactcctgaactcaagtgatccagctcagcctcccaaagtgctgggattacaggcgtgaggcacctgtgtctggccaaattcattttttaagagatggggtcttactatgttgcccaggctggaaagcagtggcataatcatagctcacgacagcctcaaatgcctgagctcaaaccat

SEQ ID NO: 309823 - DNA, 1000 bp, Homo Sapiens
gcgtggcagcagcgtggcagcagcgcggcagcggcggcggcggcggcgggcggtccagcgggtgtttctctcgggtcgcagggtctcccagcagcgtggtggactacctgatcagcggtggtaccggctacatgcccgaggacgggctcatcgcgcagcagctcttcgccagcgcctaaggcctcacctaggacgccttcctgattctcccaggactcatagacttcatagctgaggtggaccttacctcagccctgacccggaagatcacgctgaagacaccgctgatctcctcccccatggacactgtgacagaggctgacgtggccatcgcgatggctctgatgggagatactggtttcattcaccacaactgcaccccagagctccaggccaaggagctacggaaggtcaagaagtttgaacagggcttcatcacggaccccacggtgctgagcccctcccacactgtaggtgatgtgctggaggccaagatgcggcatggcttctctggcatccccatcactgagacgggcaccatgggcagcaagctggtgggcatcgtcacctcccgagacatcaactttcttgctgagaaggaccacaccaccctcctcagtgaggtgatgacgccaaggctcgagctggtggtagctccagcatgtgtgacgttgaaagaggcaaatgagatcctgcagcgtagcaagaaagggaagctgcctatcatcaatgatcgcaatgagctggtggccattatcaccggcagcgacctgaagaagaaccaagactaccctctggcctccaaggattcccaacaagcagctgctgtgcggggcagctgtgggcacccgtgaggatgacaaatatcgcctggacctgctcacccaggtgggcgtcgacatcatagtcttggactcgtcccaagggaacttggtgtatcagatcgccatggtgcattacatcaaacagaagtacccccacctccaggtgattggcagga

SEQ ID NO: 309824 - DNA, 1000 bp, Homo Sapiens
tcacctctacaccttgggctaagacatagccctagagctcctggaagaacccaggagggaagcccagccacaggaggcccccaggaagtgggggtactgctgtgggacaagcttctctttattggggaagggatgggatcacaaataatctctgcttagaagtgctctagggccatggattcatgtaagggtggggcagggtggactgaagatctgttggcagggctcacggagatgagggtaaggggagagatcatgggttcatgagatcccatcttgggcaatacggttatcccgtggtcttcatatgccacagagtcctccaatttcaggggctcccgtgggatggtggagccaatgaagaccaggtagatgatgccacctagagaggcacccagaagtggtgccaccactggcacccaccacaagttctccccatcgctgcaggcaagaggcagaggccggctgagggggctgatgcccaggacagcaccctcatccacctcgggccaagactggttgagcagaggagtcatcctcaggctaacccaggaaacacccccaacccggggccctggtcagcctcagcccgattcagggacagggttgacactcagtgcaggtgcaggatctgtatctgtactggcctggggaaatgttgggactcactcctgctccccaggccacctgggggctctgcaggaccctcctgtgctgcccctcacatcaccccccacacctcaacacacaggggccccacagaaaatctcaaaggaatgggcctgggcaggggcagtacctgaagaccagtttgccccaaccagcaatgaaggtgaagatgcgggggggcaggtcccgggacggattgatggcatatcctgtgttcatgccatggtacaccctgatgatgaccacgaggatgcctatcaccagtgcgtgtgttcctggcagtgctgggttgttctcctggtccacgatggcgaagagacacagctggagc

SEQ ID NO: 309825 - DNA, 1000 bp, Homo Sapiens
gatctagaactagaaataccatttgacccagccatctcattactgggtatatacccgagaaaccactatctgagggggatatccgtagagtaatttaaagactttatataaccactgtgctaatcactgtccttgtgcacctggagtgctgagcatcttagtgcatctgaggtgccaccacattaggaacacaagaggtcccccactacctgtggacgttatcacccaacagggcactccagacacccacaccacgggtcattcattgagaaatatttgtttccttttgtctctcactttcacttaaatggaatggctaatgtttctgacccctgactttctatgccaatctgagaaggtttctcatatttcacctgtttaagaggaagaagagaccacaaacctcctcattctgctgttctgaataaatacagtaacagaacacaagtgactggcaaatcttccgtgtcactggacattttaaatgaaggttattacctactactttggtcaaactggttactttataaaggcaataagacactagtaaataaaatacatacaaagtatgatcgaggcacaaagcacacagaatctagctcttcctatatgaaaactccaacaatattatttgtgtgaagcagcattatagcctgttgtgctgtgccatgttagagtattctatctacagccagtcactgtggctcatgcctgtaatcccggcactttgggaggccaaggcaggtggatcatctgaggttaggagttcgagactagcctgactaacatggaggagtcccatctctactaaaaatacaaaattagctgggcatggtggcacatgcctgtaatcccagcttctcgggaggctgaggcaggagaattgcttgaacccagaaggcagaggttgtggtgacaaaaaaatcagcagaaagttttcagaattgatttttgaggaaacggttatgtaggaaaattgtcattgcagtgttatgtaaaa

SEQ ID NO: 309826 - DNA, 1000 bp, Homo Sapiens
ctgaagacaccttctccgctttttattttcctataccctgtcagatccacacagccctgggaggagcttagaccactacatgaaatgaatcacagacgcagagtgtgcacgcatgtgcttggtgtgcattcagataggtaactacgcgagagcgtgcctgcaaatgcccgcgtgcacaagaatgtgggccacagtggaacggtacactgggggaagaagccacaggtgagtaactgttccagcgtgcaaagggaggtctgtgctcggcttcagctgttggcagtgggagatgcggggctggccttcctatgccagtgacaggcccagcctgggggcagaggctcataaatagctggtgtgttctctggagccatcaccattgtcatcgcctggacaattgcagcacacagcatttgaggagaggcagacaactcgggaagtgggagggcctgggcacacacccctcaggctgagcctcgggtgcggctgctgagctggaaagtggatgcggaggacgttatggggcaggagttttgaggtgtggagaggggccatggggctggggctgtgaatcccgtgcagcacgggtgacagggccacttccaaagcctgcaggctcacagcataatcctgggtctgtgtatatgagggagacgtgggggggctggatgtgtctcagaagaaagggagagccagtgggcgtcctacatcctggggtcctggctggggatcagccccttggtctgcaaacaaacagcacacatctgtttagctgaggagcagttcactgggggcagtctcccgatgaccctccacacactgggtcaccgagcagtgggggaggttgcatggaagggccaggttgtgtcctgggtcagggatgggccttcccagagtccacatcccagagtaagagctggtaacgcctaacgctgcctacagagcatctcctgggatgctccccgggctcttgactcccggggtcacaactgaacccatc

SEQ ID NO: 309827 - DNA, 1000 bp, Homo Sapiens
tttttctgacattatttctatatttttagaaacacttttcactcataaatccaaggtgacaatggcattaaatggcattaaaaatatctacaggaaggactaccacgaaatacaatattatgataacagttattgcattaaagtggttacttttctgtattcttcacatgtcccattgtatcactatacttttttataataaaaaatcgtaaattaagaaagaattcaagcaaagtattgttgactttataaaataattcttaaaacaaatgttcagaaagaaggcattcaactaagatagagaagatgctggatggagaggcttgcaaggtcccgggaggagctccagggtgaagctcatcactagcctttccagcagcactgtccctggagaccagaagcagtgggagccccttccctgtggcaccacggactcccaccaaggcacgtatcatgaacactgtacttgtacacgtttattacccttgggtgtatggggaatctaagagcacctctgaaatccatacttgattcctttttacattgaggaaagtgagattcacacacaaataccaagatgaccaatgaatggtggcctcgctggcaaaagcagccattgcaggtaaccaaattgcctccctagcattctgtaacccatgggcttagggaaagattaagtaacatttctttttcaaattcacttcaaatactcaactgtgttcatttaaaaaacagcaactatatgcacgagactaaacagatctcattcacactgccagcccacagaggggactctccgtaccctttcgggagggttttgggcaataaagccaaaatctgtgcttaaataggtgtgtctcataagacaaatttttaactcatttattaaaggtcctgatggacattccaaactagtaacttatacctagagagagaaaatacaaatgcttactgtatagttatataaaaatagaaatccatcaagagtccaatcctcaag

SEQ ID NO: 309828 - DNA, 1000 bp, Homo Sapiens
aagctttgccatgtcagctggcagggccagagcaagaagaaagagcagaaagttgagctgtttaacgggagtctccttaattaggaccaactgtgggtgaggaatgctgactcggctggccacaatttgtttgagttttctctagtttcagagatttccctttttgtctgccccaagtctttcccctcctgtacttctttcacaggagtgggaatgaaaaaacaaggcaccttcctctctttttcagatgtttccaagtcaggaaattgaaatccttcaaagagtgaaagataactgagaatctcaagaaaagcaaaaaattctcagggataccatcaaattcaccttcaaaagataaaaggcagtcctctagagcaagctctggagtactgagtatgtacttctatctctactagtcgctattactacagttgagttagtgtacttgtcttagcctcaatttccccaagtataaacaggtaattgaacacccactaatcaaaatctttagaaagtttgaacatcaaggaaaatgattttgattcttaacttggtcaagaaaacatcttgaggaaaactaaaaagtcacaaaattaaggtgtcaattgatgtgagtgaccttattttgagtttccatatttttattggagagggcctgaaggaggctctaagaatagtcagtaggattctgttcagaaccaacattttttttttctctttctaaaacccacatagatgtcccattttaaggatttttggaaagggatgaaaatgatatttgattttaaatttcatgagataattcctacttcctcaccactgtctcacccatattcttcctgcagtgtttccttaggagtccactgcacaattccaaaatccctagctaattgaaaagaaatgtagaatagtgtctgcatttctgcaccttctctaaaccaataaggaagtaagagataattgacaatactccgaaaagtaggaaaagtttggcttaagg

SEQ ID NO: 309829 - DNA, 1000 bp, Homo Sapiens
ctctggctgccgctgtttccgctcccgagcgagacaaggtccagagagccggggccaggcgatggcttcctcttctgcgcctctagactgtcgggcacagctgctgcgcaaccttctcagaagtcagccggaaaagggtctgggagtaacctttgcgccaacacccgcggctcctggtttcgtttcctgaatcttacgtacacaacacggtttccttttcccggttcccgcgctggcgctcggggacccacgagactactggagggtgaaggagctggaggagggactgcgcccaccccctggtgtgaggcccctcccctacccccgacttgctttcttgctcattggagagactccagagacgtttgtccggtggttaaggagaggaaactgggactccgacactaactggaactggaaagtcatcagctggggattggcctcccccgggaactttctttactctggctttgacctccatccctcggaagcccgtggcttttcaaggcgagggagtataggcagcttgagactacaaatgaggaggggccaaaattgtttttctttatggtgccttttctttcttgctgtcttgctctttctttccttctattaaattatgtgatattattttttaatttttaagcagttatttgaatgttttcgagctcactttatttttttataaatattgttcctttttaaactaaaatagtttttattctgtgtatttaagttatttgtatgacatatccatcaactcctataattacacatttccccccttggggcaagagcagctataatctacttatttagcataaatcctgaataccactatcattaactatagccctcatgttgtacattaggtcttcccatttgttcatcctacgtgtttgtaactttgtatacttttacctaaatttccccatttctcctgaacccactccaacctggatgaacctggataaaccagtggtccccaacctttttggca

SEQ ID NO: 309830 - DNA, 1000 bp, Homo Sapiens
acctcccaaccagggtctccagccttgtcctgcaggcgcatttgggctggcaacaggtctgtacctcgctgggccggagctcccagaggaagaggcaggctgacatctttgctgtttcacagccttcactggtgatagctccaggtactggaaaatccaaggagactaggaactggagaagaagcccagcaaagtacagcagccctacagaaacatggccagactgttaaaagaaaaaaaaaatccaaaggtcagcaacctcaaagactgaaggtagataagcccacaaagatgagaaagaatcagtgcaagaatgctgaaaactcaagaagccagagtgccctctttcctccaaatgactgcatcacctctctagcaagggttcggaattgggctgaggctgagatggctgaaatgacataagtagaattcagaatatggatagaaatgaacttcactgagttaaaagagtacattgtaacccaatgcaagcaagctaaaaatcatgataaaacattgcaggagctgacagacaaaatagcccatgtagagaagaatgtaaccaacctgacggaactgaaaaaacacactacaagaatttcataatgcaatcacaagtactaatagcagaatagacaaagcggaggaaagaatttcagagcttgaagactggctttctgaaataagactggcagacaagaatagagaaaaaagaatgaaaagcaatgaacaaaacctccgagaaatatgggatcacgtaaagagagcgaatctaagactgattggtgtccctgaaagagatggggaaaacggaaccaatttggaaaacgcatttcaggatatcatctatgagaaattccctaacctagctagagaggccaacattcaaattcaggaaatccagagaactccaggaagatactccacgaaaggaacatccccaacacacataatcatcagattctccaaggttgaaacgaaagaaaaaatgttaaaggcg

SEQ ID NO: 309831 - DNA, 1000 bp, Homo Sapiens; identical to SEQ ID NO: 120134

SEQ ID NO: 309832 - DNA, 1000 bp, Homo Sapiens
atgattacgccaagctcgaaattaaccctcactaaagggaacaaaagctggagctccaccgcggtggcggccgctctagaactagtggatcccccgggctgcaggaattccgcttttgattttaattcttttggcatatctaaatgtcagaaagtgaatatatacatacagaattcaaaacaccttcctaaaatggttattattggccagtcatttacatctttattttgaaagtctgaattgtcaaatagttctaaagtgcattcttgcagctaataaatagcagcatttgtttataaaaccttaagaaattcagaccagggctggagaagtcacaataaaaaatcagacatgatctagatatagtcttccttaatcatctaagacaaacacttgtgtgaattagtttataagtatacatgaaatatattttaaaaaaacattataaaaaattcatacagtgatgaaaaaaggagtcttcctctgctattaatattaaatatggcaaaacatacactatacaaggtttgttgaatactagttgtctttgaaccatagggaaagctttgctctgggtcagtgtatgatgtagctgaggtccgtgattttcaacaaagctggagttctacaagatgacctggaagactgcttctggcatggctttcgagaaatcatccacacaaatgaaaatgttctttcagtactgggactgtcagttcatggctttttgcgcttgggttgtgcgtgatgctgatatccaggtcccagctgggatcctgctctcatctccacagccacagaacaccttgtttctacatcggtccattcagactctgcaccatctggttgggcaggtgctactgtggaagatcttcgttttcgactaccatttggtgattcttgctttaaagtctcaatatcagtaaactgaacagattgtccaccaccccttgttttataaatatcacccttaattagtttagtttcaatctccccatcg

SEQ ID NO: 309833 - DNA, 1000 bp, Homo Sapiens
tctagattacctgtagattagataatgattctcaggataatctgcataatcagatcataatcattagaatttaaagaaccatagcactaaactgccacatgcatggcctacctcatggtatattagtgtgataaattgatttttaaaaatctgtcttggtggaaaaagaaacagctacaaatttccgagtttaatgacactcctgcctatatcctaagggaaataatgtatgaactctgtcttttcattattttgcctaccttgatacggttatttaaccacatgatgagtttgtcccaacacctgtcctactaatttactatggtcatagtttgagcttgtttgaaagattgagggtgataagccatcttgacatagagcttcctgcttttagaaatacttgacccaacgtgggtgaatttaaacattgcgtctcaggcaacccattctcaaatccagctggaaggactgagcttttgctatagggagaaatagccagtttccttgtattctagttattgtaagctctcattctttctctgttccatgagagtggaagaaaagtgacttaaccattactttcccctcttacctctttatagggctgatagccaggacttgaatattagctttggtaatatgccaatgcttgttctgtcacaaaagtccatggcttactttcaacattaaagtggttgtttgacattgagaatttaactgaccaactgtaggactaattctcagcattatagcaaaggtttctgaagtgttttggaaataatgggtagaagtaaagatgtagttgatactgcatattacttcttgttcagcttctgagcctaattccttctgtccccacttatttaacactgacaatgtgcctaggcaatggagatacataatatatgaaaatccctgcctttttgaagccaacattctagagggagagactaacaagacaaattaacttctataaggaggccatgggtactatggaggg

SEQ ID NO: 309834 - DNA, 1000 bp, Homo Sapiens; identical to SEQ ID NO: 120135

SEQ ID NO: 309835 - DNA, 1000 bp, Homo Sapiens
ctactccctgagatgttgcgaaatgctctctggggaagggattgagaagactggggtctagtgcaggctctgccgctctgctctgtgactctagatgagactctagttttgcctttacacaaagaggaggtgtcccctcctggcaccctccacagcctaggtgcccagaccagacacatcctctgtgtttccactgccaccccctcccttacctcagacaaacctggcaccaaaagccaaagcccgggacatggagatgctgagtccctgaggagcccatccctagctgggggcagacgcactcattcccctgcccccgtcagactccgaggttctacccaggaagcctccttccagtctccctggtggccccagggtctccatctccatatttcctttctttgtactaccacattcccagggcccatagctcaggggtcctacccgcaagacaggctccctcctcccagccagaaggttcgaggccctgcttaggccagcaacctcacaaactgttcctcggggatccaggctgtctctggcccctggggtccctgtactgggtggagtagtccctcttctccccttcccaccccacccaactctaccccacccacgtttccccaagcctagaagtgccccacctaggttttcagaaaaacaaaatcaagaggaaagaggaaggagggagctcattaccaggaattaaggaggaggcctgccctaggggaacacaagtgagacttggctggcaggcagagatatgcactgagtacatggaggtgtactcaaagtacactgagagaggggctcagaggaacatgcagagatgtgatctgagggtcacagtccaggatgttcactcagaggtacacaaagaaagacccagacacaaggctgggcactgtggttcatgcctgtaatcccagcactttgggtggccaaggcaggtggatcacctgaggtcaggagttcgacaccagcctgggcaacacggtga

SEQ ID NO: 309836 - DNA, 1000 bp, Homo Sapiens
tataaaaatgctacatactatatgtccttcttggagcttcagaacgcacattagaaaaattagagaactgagaaattcccaagagaagaaacctgtggaattctgctgaatttgtcatctcctaaatttatttgatcaggcagcccttttcttctttctgtactgaactaccaatgtctcacagaactatagctctctagctttttgcttttcaaagtgtaatttctagaccagcagtatctgcattgtctggaaacttcttagaaaacccaaatattaggccccatcctggaagcagagttacattttaacaggatcttcagttggtttgtatgacactaaagactgagaagtgccgcttgggaaacactgatttagagaataaagtacaactaaccttaatatccttatgtggcctatgatttcaagggcctctatataattactgtcccttaatgcctacttcacaagtcaacacacctagttcttattgaatgcttactttgtgcgaggcactatgccaagtgctatagttttataattctcaaagcacccctatgaggcaggtactattgtaatcgttaccttgtagatgagatagctagggctcagagaagttaagttgcctacccaacgtcacatagccattaagtggcagaatccttggcttaaggatttaaggatcactcaactatattggctttctaagcttttgttcccaagcactttcctgctctgtgtacttaacacacatgattccctctgcctgcaatatctccccacgtacaccttcttaaaaggtctcagctcaaaaagtcagttgttctgggaagcttttctgatctcctaccccaaagccaggtcagatcctcctggtaaacattccccaggcacatatctttacttcatacatatcagcttttataattatgtatattttgtgattctatgattagtgtatgtgtttaccaaaaaactaagctccgtgtgggctttaact

SEQ ID NO: 309837 - DNA, 1000 bp, Homo Sapiens
cttaataggcattaaagggttgggaaccaaagagaagtgatctacctgtgatcagaatgaatgagacccactggtatgttttccagtggttcctaccactgttcccagctcattgtcctaaggccacacccagaaccacagtgaagttgggtagcctcgtgtctattaaggctgctgaatgaaccagctgacttgctcatgcccacccagcctgtttagctttgacacacacctaccaaactgcccctacttcttcccgtccagagcagagctaacaaacagcctgcctcacagaattagtgtaagaaggtacataaagtagtggccaggtcctctgtatatgccaccccctgcagcctggctgagctgcctgtcacctttaccctggtttgccgacttatggcactcaaccctgtccctcccgaggactatggggcctcagctcaatttgtcaaaaactaagaagctgaagaatcctgggccctcgttccttctccaaaaaccaatctaacaccctggccctcaacccaagcactgaagggtctagcctccagctctgaccattgggcttacgaggcggcgaagcagcagtggcttcagcggcttgaggctgagggaagagggagggtggtcgtgttctcagggcctagctccacagctgccaaacaggcttccccaaggaccccagcactggtctctgggggagtccacaaggggaaggaggactgggtcccggtcccagttcagtagtggactttctgggtgttcttgcctgcatcacctgtgtcaggcctcagtttcttcagacacctacaaactgggtctgagtgacataattctaagggcccagccctacaggagatgccttgggattccaggacctcacagtctccactccttgaaattgtagtacccctgcccacctgcctctgagtgcaggtgataagaacagggacagagaagcggagacccctgtgcagccaaggccctggcttcttgc

SEQ ID NO: 309838 - DNA, 1000 bp, Homo Sapiens
cctatgacttcgtggattgctcagccatcgacaagctggacctgtcaccctgggcctcagtgaagaattaggggcccgcgctgcacaggaaagttccctttggtccacagggccatttcaagcaagttcaatgacctggtcccttagagctccatatcccagtcccagcccttctttgcagctgggcctctctatacccctggatgaacagcttgctcaggccccagggtggctgcctcggccctcccagctcttacactcagctccagtggcttctcctttctgtcaagacttagccccgctgagatgcccttctgctccagcttgctggatgttacctgtcctcttccctccacaagtcttggcccttaacctttatctttcttcctgtcctctcacctagattgtaagctccctgggccaggacttcagcctgcctccgagggtcccctgtggcacctagcatggtgcacagcacattagaagtgctcaaaaacatctgatgactgactaaagatgctaggcgtgacaccgttccctccaaaagcagacctcggaatcactgccaaataagtaactagacgtttacaggccatacatgtcttaccactgagatggcgcgtgcgtgggtcttgaggtggaaggggatggtttggtgggatttctaagagttctcagagaaaggggaggggcagggggctcctggggaaaacaagcactggccgtggagtagcaagagagaggacacgggggggacggtaggcggtggtgccaagggataaaacaggaagggaaaccaagcctgggtctcccgcagctgaagctaataccccttccagtggcccttctgagaaataccctcttctagagtggtccttagatcctgtgatgcctctgaaggggcacttccagaacattccttgagtttctgcccaatacatattcatatgttcttcttttaaaatgaccccctgggaaagattagcccaaccagggcctc

SEQ ID NO: 309839 - DNA, 1000 bp, Homo Sapiens
atcatttccactatcctccctccatggccagaaccacagattctctctggcagaaggttggatttatacagtaaaggcatgtgacagtgacacattgtccacccagcaccatgtagggattaaatcaccatttggagcaataaaagggatgtttgttcttcccttgttctctttaccaaccgcagaaacttgaggtgatctcagcagagttcattagacccaggtatcatatgacagtaagaaaaccaagccttagatagctgcagatcctttatgtaactggagttttcaggtcatatatttataggcttttaaagcagaagacgtgagacaaccctttactgcaacccttatgtttgcagtaaaatggatcacaggaaggggaattgacagtccaagatcacaaagatagagacagaagagacagagctaggatgagaacccaggcttcttggctcttctacctctggttgggcttgattttgatagcagcatttttatttctttttttttcttcagagacaagatcttgctcagtcgctcaggcaggagtgcagtggcgcaatcatagctcactgcagcctcaacctcctgagctcaaatgatctctccacctcagcctttcaagtagttgggactacaggcatgcactatcaagaccaactaattaaaaaaattttttttaaagacaggagctctctatgttgcccaggctggtctcaaactgctgggctcaagcaattctcctgccttagcctcccaaagtgctgggattataggggtgagccaccatgccaggactgatagcatcatttctaggtggaaattactttggcttcaaatgtaaagattaaacataatcttttttgtaaatactcaaagagtatttggaatacaaatattctcttcaaagaggaagggaaagaaatctagaacattgtacgtgctcaataattgagttggttggatttttgtattatagagtaatcttgctttatgc

SEQ ID NO: 309840 - DNA, 1000 bp, Homo Sapiens
aggagataacaatacaaatgtatttgttttctgttgctgctgaaacaaattactataaacttcatggcttaaaacaacacaaatgtattatcttacagatctggaggtccaaagtcctacaagggtgtcactgggctaaaatcaagatgttggcagggctgcattcctttctggatgttttaggggagaatcggttttctggcatttgccagcttctagaagcagcctgccttcctcagctcatgtccacttccctacgcaaaggcagtacaggccagtggtgtttttctcatactgtattgctctcacactgactcttctgcttcgtccacatttaagggcccttgggattccactggacccacctggataatttgggacgctcttcctatctcaaggtcagctgattagcaatcttaattccactatactttaattcacccttgccgtgtaacaacatagccataggttctagagatgaggatgtgggcatctttgggtgaccattatttgcccactacgaagtctattcaggtttggagacatgtaccctgtttcttctctggtaccctggaagctttgttagcctccataagctctgtgtactgtcatggggagacagcagtcaagtagacatgaaagtgaggctgccagtgatttctgggcctcagggatgagcatggaggtagctgcaagagctagcaggccccacagggaccgactggttaggacagtgaggcatgcgtgaaaaccaccacgaaacccatgatgggaccagatgaggatacaatgcctcagagcacgccagcgaaggccagataagattgctttcagcaatgtcatgagggagctgctgatgactgaggaggcccaccccaacattacaaaagccctcctggaagggagaaggaacaacctctgaattgatccccaaacatctaaattggctcagaaaacactgaggttactgtgaaaaccccgattcgactaagatgaagtt

SEQ ID NO: 309841 - DNA, 1000 bp, Homo Sapiens
tgtcgggatgactttctttctaatcccagggcagcatgtatgatttataaagtagaaaaaagttaattcagagttttgtttgtatgccctttctggaggtgctaagtcagtgcacctcacacagttattaattaaaccgtcaacataaacttttctctttttaaagtttgaaaagtttctttattttgacaaagcctttggctgctggctaaaatgagtgcaaactatgtacattcacagagttacattatagagggggtgatcagcatatatagaagtccttgattctagagtcaaaatttgctggaagtcacccagatcatgtgcaccactttaggtccaccaggacacaagccactctggggttccacgtttatgttttgatttttacttgcctttttagacccaccattgtcaatgtaactaggagccaatgcatggtgcagaaggctcccaggtgccactctcaccccatggaggactgtgccactctataacaacactggcagtgcccacctaatgccctcaactctaccttctcccctagcctgggaggaaggagggtgggagctggatgtcagcctctgtgtcactggcaggatttgatgaccctgttgtggggtggccatgtagaactgcttcttgtttttctggatctcacaccatcagcatcagtgtaaaagccacagagcacccagcaacaggtggtatcccatgatgttatcttagggagatgctgaaaagtgtcttgaccctgagtatctccttcagcatttttgaccaaacaatcacatgttctctacatttaggatgcccttcccagttggcaaaactctttcattaatatcatcacatttagcctcggtaaagctgtaatgggctggttgagtacttttttcaaaacaaaggatgaacaagctcagagagattgagtgacttactgaaggtcacacagtaaatgatagactattttactttatgtctagggtcttccacaata

SEQ ID NO: 309842 - DNA, 1000 bp, Homo Sapiens
ctcacttgctgaccccgagaacatcgtttgaaactttgctctgtcccgtccttcagcttggcccacacagtctcccgtggacatgggaattttattggtttcatcacatgccacatggatggatactgttcaaataaagttaccatgtgaatgtagtttctcccatgttcatccagtagaatgatagaaacttctggagaagtcacttcagcatgaagttttttaaaaatttttttatttttttgagatggagtctcctctgtcacctaggctgaagtgcagtggcgcaacctcggctcactgcaacctctgcctcctgagttcaagtgattctcatgtctcagcctctcgagtagctgggactacaggcgcgcgccaccacgcccagctaatttttgtgtttttgtggagacagggtttcactacgttgcccaggctggtctcaaactcctgagctcaagtgatctacctgcctcggcctcccgaagtgctgagattacaggcatgagccaccgcgcccggcctctttctccacgttttgactgaggccatctccatgcatcttttctcttgactggaaatgtggtggaatcaaataaaacaaattcgacaatggtttaacaaaattgtttaataaaatttataaaaatgcatctttgagaatacttttctcagcttgaattgttttccttttccacccccaaagaaaatacacaattatcagcacccacacatgtatacactcaaaactacagtgacattctctacacagaactatattcgatatagcttgaactgccgaaaaatcaagacaattccaaaaagtgattgcagggttgatttttttctccaaaacacttgagaaacagtaaagctatttcaacaaaagtcttttctttgattgtcaaaagttgaaattcacatttaaataaaaagagatccaaatcaagatcctcactaccccctacccctcaactaaccccctttagggccacatttt

SEQ ID NO: 309843 - DNA, 1000 bp, Homo Sapiens
aaacaggaaaaaccaaacttgccatctctctatatttactatcatttaaaaaattctgttaagagacaccaaaacatagtatttcgtacctccttgcaacataaaaaattggcttcccagctttggaattcccagcttggtaaaaaatacttaatgttttcaaagccttgatctcttctttttcacatacctgatgcctaaaagaaaaagaacagggtaactgtgaggctttgtgttgtctactgagtatgtaaaacagtccataattggataaacaataaaatgctaaaatgaaaaattattttaaaagcaacaggcattctaaagggtaatttgacaacatgcacaaaaaatctcaagatattactctttgaaccacaaaagcacttttaggactattctaagagaactactggatgaggatattaaccataggattgtttttactcatgacttctttgtgtcagacagaagtttatgattttttaacgaattcattttattaaccttttcctttctagtttatggattttgaatggatgaaaaaggccttgctttgcccatgtttttttttctttctgatttatgggagtctatcctcataaatggtatgaaaatattttttcagatcattactcagttttatcaacaccatttattgaaagtccatcctaatcttgatttcaaataccacttttatcatatattatgttcccatatgtattaaagcctggtttactttttatatagtctgctcaagactcagtgtgcttctttaacttcaagattaatgtcattcatcaactctagaaaacattcatcctttaccttttcaaatattacttcttcccattctcactgagctcaatttctagggaacacctactagacatattttggaacttctcattctatcttctgcatctcttaatctctttcatattttccatttctttgtctgtaatgactgtatgctaggtaatttgcttagaaactacct

SEQ ID NO: 309844 - DNA, 1000 bp, Homo Sapiens
tttgggcaggttgaggtggggcggggggactcaaagaaatagttgtttaactacagatatgtaagtatttccgtgttgtaacagctagtgtggctgagaacagccagtgacatgtcagattaccgaataaaaccacaaaagtggggtagtttatgggctccaggtttgaacatgggctctaccactgaggacctgtgtgattattctgtttaacctcttgttgcctcagtttcctcactggtaaaatgacgatattgatagtatctattttgtgaaagctattggggggattatatgaatttgtagtttgtagaatggtacctttcataaagaactctttgttatgtttgttaaatacatttctttttccccattagatggattccaaaacagatgactttccacatcttcaaatcaggcttacctttccttgattcaacctgcagacctcagtccaccagctataaacactgccagttatgaatcttacagtaatttgtggattcttattgtggtcagtggagagaatctgggacttacctaactctctagaagtagtttaaaagggctaatggtggctacaaagtcacataaacaaaatttaggttaaaagttggcacacgtataaagtgggagatacagtttaaaactcattttattctattaaaattttgtatcttttttagcctaaagagttacaattttcatttatttaaaataaaccaactttgaaacagaaacagagcacacatttcttaatttaaaaaactatactggctaacaatttagcgaacttggtgcgggaaatggcacagtaacagcttcatctcttcctaccaagagaggtaggaattataacattttaaatttctgtgttggaaaatttattcattttaagattttttgctgttacttaaattttactgaacttagtttattcctgaattatcaaaatatatgctattttagctatttagactactttgactttgtattagtt

SEQ ID NO: 309845 - DNA, 1000 bp, Homo Sapiens
tagcccagtcatttgtgtcatttttaataaactgtctttttttttgattgtttgttttttgtaactctgtaaatgttttagatttgagtctcttgtacattgtctttagagttcattcggatcaataacggttcatgcactgaactgtgtattgaatttattgtgttaactgttgttgtgtggttgaagggagatttgtatgagttatagtgatttaggtgctcatgctcgatagcaggcatgggcaggtggctttccatgggtgtgtctcccgtaatctcatcatccacattaataatttcaacagtccttgttggggcgtgatggttttgccgatggtgctgcttcctcatcctgtagaaaatgaccagcatcactgcagccatgagtgtgatggccacaaaacacccaacgatgattttggtagtcttcatgacctcatcaattcctgggatcccactgtttatatcagtcactgggatggtgaaggttttctctgtcgaccctgtgctctgtggtgtgagagaggtggtcacattggtggtctcccagtcgaccactggagtgggacccacattgttatctgtggtccgtgcctcaccctgagacggttccatagtctctactgtgacggttgaaaagtaagagaaaggagtagtggttgctgcagtaacattcagggtggctgaagcagtagtattcccaacggaattactcaccatacatgtgtacatgcctgtatcttgcacagttacatttgtgaaatttaacgtaccatcactgagcacagctatccgcactttgtacgccccatgtgtcatgactgttccatttggagtaatccaagatacagatgtcagggatgtggaggcccgacatttcagctcagctgccatgccttcagtgacattgaggtctgcagggggctccacaatcaccggagcatagcatgtgaagtaattctggtcgagctctccaatgtacctcccctttagattgg

SEQ ID NO: 309846 - DNA, 1000 bp, Homo Sapiens
tttttttttttttttttattgttaataatttgaagatgtttattgcattctatttttggtgggaaaaaaatgtaacatacatttatttagcacgacattgtgaaatacacaaaacatgtaactgagaaagcaggaattttctattcctagtccatttctgaggactaaatcatgaactgctcccaatgtaattaaatatttcttacaatagttgggcaccaagtttaagatttattaattttctcctctcagtataggcagcaattcaccattttctttcagttccttcacaatatccaatcctcccaccagctcccctttcacatacagctgagggtatgttggccaatttgagtaagcttttaatccttgccgaacttcttcatcctccaatatatcgaatgtttcatattcaacaccagtactatttagtatttccagaatttgtttgctgaatccacattttgcttcctgtttgtttcctttcataaagagcatcacagaagctttatttgtcagcactttgagcctttcctctaatttgggagctttgggacaaattgtatctagttcttcagatgcttctagctccttaattatatcaagtcctcctatgagctctccagaaacatagagctgaggataggtaggccaactggaataggctttgagtccctgtcgaacctcttcatctgagaagatatcaaaactgctaaactgaatattatgtttgtgaagaatttccaccatctgcttgctgaaaccacagcgtggttcttgaggagttcctttcataaacagcatgcagggggcagcatgagtcaatttcttcaagcgaaggttgagatcttctttaagatgttcattagcgctggataggaaggagccactagatgcatgtcgctgaacttttttggtcaactctggggcatgtgcaccatctaatcggtcgattttctgagaattcttgaaaaacagaaaagtgggaacagagctaatt

SEQ ID NO: 309847 - DNA, 1000 bp, Homo Sapiens
tttttttttttttttttttttttttttttttaggattacacactttaatctgattgacactgaggaagtagggaggacatgaaagaaatttagttttagctctgctttatgcataaccagatgctccttttctaaaaagtatattgaggttttaaaaaacacatttatcagaatacttcaggaaaccatactatgtgtaatccaggaaatacactatttgcagaataggaaaatcatcactggcaacaaaagattaaaacaaaaataaagcaccagggttctgagcagttctaaggtgagtatatcagcagaaatagtgtaaatgctcttgactggttgctatgcaaacatgctaatgaggactagtccatgtcttataatctttttttttaacatgtttctttggaaaaatggcaatattgagtggaagagaagctgtccttttagacacccagcttattggcctgggtgagaacaactttgagaactggcatgaaagcagaggtctcactgaagttgctggtgctaactatgtgggtatgcatggtcaatccttctgagtagtttcgagtttcaatgctccttgcaatgttgtgtaaaccactggtgattgttggtgaaagtgtctgttccctaagtttatcatacagaaactccaaacgtttgctggcatcatctagcttcctcttggtttgagggtctgttgctgaagaaaggcagcgctgaataagatcctcaaatgtggtctttagaatgaggtgctcatctggaataggtttcttggtaattttttttgttggcaaagactgcacatgctggaaggtatttccaataggagcccctggggcaccttcaatattgggctttgaaaagatggtggcatgcctgtttgaccaagaggttgctgtacgccatggaagggctggccacctggaagatgtggctgtgggaatgaagactggcttgacagtggtactggagctgaaggctgttgctgcag

SEQ ID NO: 309848 - DNA, 1000 bp, Homo Sapiens
gtagcagcatctatttaatataatttttatatagaaaatacaggcatatttaaaaatggaaacatgtaagaaagtatgtcacaaggaataacaaaatatatcacaaaataaaaaaagtaaccccaagtaacaagtttactaaacaagacccagcaccatgttggactttctttgcataagttccaggatgcccaggcactaccgaggagagatgatcctgcttttgggagagccagatggtcgtgcagtggttaaaacccagtcctccttttcctggaacagttatgtcccgtccaagaagaaagacagtgacatcggtttggtcttacacattttccaccatttaagcagggagactggcaaacagctgtatgacagcgagaccccgtccagccaggcgggcagtcacactggtaaggggccacacagcgacctccgttcagacagggaagaatgcagattggttcttcacagaggcgccccatccagccctctggacaggaacaagcatttgggcgttggcagatgcccccattctgacatggaaatcgacagacagctctgcaaataggaggtgatgtccatgttccattttctaaacaaacactcctcaggaaaccctccaacatgtatccactgtaacatgagtaggtgatcatgtctccatattgataatgtacgcctcgagcaattgcattttctacgtgagccggtggaccacatgagattttttcacatttggcgcttgtctgtgtccacgtctcgtcggggttgtaggtaatgatgccgtggccctgcagcagaaaaccttccctacatttgatggacacattctgatcaacataaaactccttttcagacagcagagcattctcgggaatcacaaaaggaacagggcatggatttggtttgcagagagggactgggtggctccaggttccattttctgtgcagtgtgcctcagatggcccttcaagactgtagcctctgttgcaggaat

SEQ ID NO: 309849 - DNA, 1000 bp, Homo Sapiens
tgtagggacatggatgaagctagaaaccatcattctcagcaaactattgcaaggacagaaaaccaaacaccacgtgttctcactcataggtgggaattgaacaatgagaacacttggacacaggatggggaacgtcacacaccagggcctgtcatgtggtagggggagggaggagggatagcattaggagatatacctaatgtaaatgacgagctaacgggtgcagcacaccaacatggcacatgtatacacatgtaacaaacctgcacattgtgcacatgtaccctagaatttaaagtataataataataaaaaagaaaaaaagaatgagggcgtggagaaaagagaatccttggacagtgggcttgtttttgagaggtgaagccatagcccctcccagtgcaaactgcagtggacagtccccaggcttcctgctctctgatttagactatcccagataagtgcttcaccctacagcaggaacattctctgttgaagctgtagttatgtgttgtttttctagtgtggtgagcctttggctatccctcttggctttttgtgtacttagctaagagtttctctgatctgttatcaaggagaattgtctctttcttgctttctctgacaacctttctcagtcccccacactagtgagcattttaccaggaaggccaccatgcacgtatgcctttgcatgtttgcttatgttttacttctcccactcacatgccctaatttgcaaggggcccccacatccggcaccaaacctctgttttatccaagtattcctggatctgcctgtattctgtgctctcatctggggtaggggtagggatgagggtggaggtgacctgttaccaaaccatttgaagttctttgttctcataactgtcaatatttgaaggctccgccccacatcatatcaaacatgttaacatacatccctggcatatataacttttgccataaaacatttgaatttttataattgcttttgaaa

SEQ ID NO: 309850 - DNA, 1000 bp, Homo Sapiens
ctttcatgagatacatttgagaccttagttatgtgctagttaccatagttgcataaactcattgaaatatatgagttttatttgaagacttttttatgctttgcaaacagtggttctgccatatggtgaaagtacttttcccagcttaaattgtaaatgtttgataatatcttttttttaattggtggtaaaatataactttaccattcagtgtacagtgtataattcagtggcactaaatacattcatcttgttaggcagctgtcaccaccaaccatctgaactttttcatcatcctgaactgaaactctgtgtccattaaacagtatctgcctcctatgacaccttttgttgtgtggtttttcgtatttgcaaagtcagatatgcatgttttcctttatgagtttatttttatgctgcgaaaggcctttcctacacttggttcagataaatgtgcgcatcttcttattcctttattcattgatttcagtttagttccttagttcagttggaattttatttcaatatgtgggagctaatttttttttttttattccaaactatcaccatcttgtttcaatattggttatggatgtccattctcgtgctatgattttgaaatgctcttttatcatctactaaattctttgacatacttaggttgatctctggtcattctattctgttctggtgctctgtcttctttcattattctttttcaaaatttccttgactagccatgcatttgccatttatttttatagatgtgttttgtaatatttttatcaagttccaaaaactaagcttggtttttgtttgaaattgcattcaattgataactgaaacataattgtcattttaacagcactgtgtcttcctgtttagggactgttatgtttgtcgttttacttatgtctcttgataaaattttaccgttttttgttgttttgtttttaatacagagccttcatattagccattgaagttttgatgttatttt

SEQ ID NO: 309851 - DNA, 1000 bp, Homo Sapiens; identical to SEQ ID NO: 120136

SEQ ID NO: 309852 - DNA, 1000 bp, Homo Sapiens
gatcatgatattcatcccctgccccagaacaaatgggaggaacacattgcccaaaactcacgtctggagctctttcaacatgtctccctgatgaccctggacagcatcatgaagtgtgccttcagccaccagggcagcatccagttggacaggtcagtgacaaaaggaaggtaattgtttgccaataactgtgtcacccactaacatgttgttccatcttccctattccagtaccctggactcatacctgaaagcagtgttcaaccttagcaaaatctccaaccagcgcatgaacaattttctacatcacaacgacctggttttcaaattcagctctcaaggccaaatcttttctaaatttaaccaagaacttcatcagttcacaggttagtcctgggatttacatggccagagtccactatgagacatctcattgtctgagacattgactctggttatggctgcttctactatggacatatggcatggtcatcattcagaaatgctaatttgtacctcttaaatgaatgtgctacataaatgctatgtagagggtattatattattgactatatatagctgtattttaatgtttggtgttagaactaatacaataagcaaaacatctgtctattttgcttcatttcttatggagcagcttcagatgtgaagaaaagtaaaagtgaaaggaagtacatttctgtaggaagacagagcaggacatctgagcaagtactgaacatgagtgggtactgcctactatgcacagttcatcaaacaacacagcacaccactgagtattccttttgcatgggtttttggggacttaggacatagataactttgagggaccataaatctacctatgacaatagccatttacaattggaatatatttctgatttatcattttatcttgataaaattggcctctttttctctaataatgcttctagtcttaagatctactctatctgctactagtatgataacctctgct

SEQ ID NO: 309853 - DNA, 1000 bp, Homo Sapiens; identical to SEQ ID NO: 120138

SEQ ID NO: 309854 - DNA, 998 bp, Homo Sapiens
cagtggctgggcttggcctggcaggggctgaatggacgaggtcagctggggccggtgagaggctggggaccctcagggtgagagcagcagctggatgagcttctggaactcctcgcggtgctcatagatgtagacctcggtctcccagagggcgttgaccagcactgtgtcactgacctcatccagcatgatgtccgtccccagctgggggttcaatctgttcgggccagggaggagggggtcaccctaggatgctcaggctgggcaggggacgccagctaggaccagggtgggcttggggaacagagcagacccttggggaagggaaagtccacactagggctgggaggggaaggtcggtgagtccgaccacgccagggcacggggccaagggctggggcggctgagccctcacctgaagtactggatgccgaccatctcgcaccaggcccgtgcccggtccacagcccgcccgtctggatccgtgcactggtgagaagcagccttggtgagtgccgggcccacaccccgcccggcccgcaccccgcccggccctgccctgcactctcggagccccagcctggggagccccaggctctttcgagtcaggctgagccacacagcagcagagcggctcgggcaaaaccccttcctgggactgcagggactgtcccagctgtgcaatcagaggggcagaggtctcagcagtgccctttcagggatgatgagtgggggaaagggtagcggctgagtcgacaggcctccatgtcccctctccctgaagtttccctccctccctcctctctctctctctctctctttctttctttctttttgagacaaggtctccttctgttgctcaggctggagtgcagtggcatgatcacagctcactgcagcctctgcctcttgggcttaagcaatcctcccacctcagcctcctgagtagctgggaccacaggcacacaccaccatgtccagctagtttttaatttttt

SEQ ID NO: 309855 - DNA, 1000 bp, Homo Sapiens
ttttttttttttttttccactccaagcaacatttattgagggtggcgggagccgcgctggacaggggtcggggctgccctcggcgtccagacgccaggctctatagaacacgtatgtacaggcacggggcggcaagggcggcaagggccgagacgctagctggggactgcgctccagcctcagacggcagacgccagcttccgcttggtgctctcgctgcagcggttcaggatgaggtcggcgctcggccgcgggggcaccgccggctgcggtttagagcgctgcgtctgccgctcctcctctgcgggcagagagcggggccgagtcagacgccccgccccgcacactggccccgcccacagcgctctctggcctcgccccgccgcggtctccaactcctgctccgcgctctggcctcgcctcccgcttgtgcctctccctctgactccgcctcttagggatcgctccgccccctaagcgctggctcctcctctgaccccgcctccagtccccgcctctccctctgattccgccctctggtcccgccccgctactctggccctacctctggccccgcctctcccgctgactccgcctctacggcttgcccttcctgccctctccgctgcactcaccgagcgggctcccggggctctgcggtcccggccgcgcctggcggcgtcgctgctgcagaaaacggacgctgttgcggcgataggcgtcctggctgaggcgcttccgcgaccgctggtggatgctgtgcacgttgcggatggacgacctggcccagcgggagggggcgtcgtcaaagcccgagggcgcccctgcccccagggactcagatgggcacccctggtccgaggaagtggggggcagtagggggccggtagtctgcacgaccccggcgggacaagaggcggctgcccccgtcacgacaaggacccttgccctgcagcagagcctgggcggttttccacgcccctcaccagccttcggtctg

SEQ ID NO: 309856 - DNA, 1000 bp, Homo Sapiens
atgactgataatgacttagtgtaatattcatccaggaaatagttttcaagggttcatgatgtcttcagacactgccatggtaatgcatgtgggtttcagtccccagcaggagactgtgattagtttgggagattctcacatcctcaaattctttcactgctcaatcaaccccaaagcagacccggctccaggaacggaaccaatttggagcacatttctaagtggcttggggaacagaagccccagtcctctggatctcttcctggcaatacctgctttgatagaaagctcgctttgctatagattccctagactgcgaaacctggaggaaaagcagcaacaagggtattttatggggacactgatgactgtgatacctcttactccttagccaccagataattcttttactaataaactttattttttagaccagtgttaggtttcttaaaaagttgagcagaaaatacagtgagttctcagatagctccttcccccaccctaaacctcaccccacagaatttcctctaccattaacatctcgcacgagtgtggagtattagggtgtgcgctctgtgtcacacatcctccgggttttcacagtgcataatgtcatgcatctcccatttcagtatcatacagagcagtttcactgtcctgaaagtcccctgagctccatggatgatttttcaaaattaaaatcagaaataggccgggtgcggtggctcacacctgtaatcccagcactttgggagggcggatcacgaggtcaggagatcgagaccatcctggctaacacggtaaaaccctgtctctactgaaaatacaaaaaaattaggcaggtgtggtggcacacgcctgtagtcccagctactcgggaggctgaggcaggagaatggcatgaacctgggaggcagagcttgcagtgagccgagattgcaccattgcactccagcctgagtgacagagcgagactccgtctcaagaaaacaaacaaaga

SEQ ID NO: 309857 - DNA, 1000 bp, Homo Sapiens
gaaaggaaaggagagagaagagatagacacagggagagagaaagggagaaagaggaaggagggaggtgaggaggaagggtggaaggagaaagaaggaacccaaagggcgtctctgtttgctgagctctggtttcttccatggatccagggctaataaaggctgagcaccagcatagctggatcacaaggttcagatccacagagcaaatttgtctactttctgcctgtcttttggttacagacaggtcccagacttaacaatggtttgacttacgattttatgactttttgactttatgatgggtttatcaaggtattaagtgcacttttgacttataatgggtttatcaggacataaccccattgtaagtggagaagcatgtgtatttcatttccatccactgttgctaccttggcaaaagtgtggcatataaatgctttttaattcaaatttacttactatggatctatgaaaacttggtaccaagcctcctgaatagatgattgacagaggagaagtcagatgagctatttaaaggcttagtaacaaaacaatcaggaaagggccaaaactgtgagctatgggcgtgatttggggaaaggaattacattctgctggtggagggaccaaaatcgtccttggcccacacgctgtgtgcatatgttgctcatcattcaagatgtgcatttggctaggcagtaaaggaaggcggggccaaatggtggctttgaccttcccagatcaaaactgggatggagaagaatgctaaggactgcttgcatcaatcaggcctgagaggtttgctcatctgtgagcatatatgcacttcctgagcatatatggtctccatatactggggaggtaaaattccccctgctactgtggtcgctggcagcagtggtggaggggcaggagcttcaggacctaaaggaagagaacaagaatgttgctttttggcagccctgctcctgtagcaggacctgtctgtgggattacgat

SEQ ID NO: 309858 - DNA, 1000 bp, Homo Sapiens; identical to SEQ ID NO: 120139

SEQ ID NO: 309859 - DNA, 1000 bp, Homo Sapiens
tagagaacgcacaccaacatacatgcagtggtactcccaaaaggagatgagagaggggcaggaaaaaaatttgttgaaatgatgagtaaaaactctccaaatttggtaaaacaaaacaaaacattaatctatgaatctaagaggcttactgaagcccaaatacgatgcacaccaagagatccacacctagatacatcacaaactactaaaggccaaagacaaagagaaaatcttgaaaacatcaagagaaaaaaagataattcttcaagtacaaagggacaatttgacagatgacttctcatcagaaacaatggaacccagaaggtagcatgatgacacttttaaacactgaaaagaatgatcaattaataattctatagccagctaaactatccttcaaaaaatgaagctgaaataaagacattcccaaataaacactgaattggttgctagcaagcctgtcctacaagaaattctagccgggcgcggtggctcacgcctgtaatcccagcactttgggaggccaaggcgggcggatcacgaggtcaggagatcaagaccatcctggctaacatggtgaaaccccatctctcctaaaaatacaaaaaattaggtgggcgtggtggcaggcgcctgtaatcccagctactcgggaggctgaggcaggagaatggcgtgaacccgggaggcggagctcgcagtgagccgagatcgtgccactgcactccagcctgggaaacaagagcgagaccccatctcaaaaaaaaaaaaaaaaaagaaattctaaatgggctgggcgtggtggctcatggtaatcccagcattttgggaggccaggacaggcagatcatgaggtcatgaattcgagaccagcctggccaacatagtgaaaccctgtctctactaaaaataccaaaaaaattggctgggggtggtggcaggtgcctgcagtctcagctacttgggaggctgaggcaggaaaatcactctaaccagggag

SEQ ID NO: 309860 - DNA, 1000 bp, Homo Sapiens
atgggaaccccaacttgaagccggtaggtaggccagaagttctggaggcccagacttgcaactggtgtggggagggcagtcttggggactgatcccccaacctgtaggatctgacactatctttttggagaatcagaggatacccagctggtgtccactgttggtgtgtggggaaacctccctctacatttggtcacagaagttttctgtgttgatgattttggtggtggtgagagtagaggaagaacacagtttgtggagagtttttccttacgtaactcccaataaatagatgttaccacaagctaaacttctctttcaaagggaaaatggtcccaaggggcagaagtaatttgaactttttgattgctataggaatccagttggattccaaataagttacagttttattagagaaattgatgaagtcttatttcatgttgttgccttttcctggtaactttttttgttgttgttctgaagcagtcttacgatgtctgcatgaatgagtcattttttgccatgtggttttttgttgagatctactcataacatggaacagctcagctgtaatgagtccattctttccgaggctccatatgacctcttcaatggtcttcaaacagttttagaggaacagctgataaatttctgttttattgtcatccttttctccatttttattctcaatgtatttccaaattacagaaggacattcttctcataccgcactttgaaattatggttttatggcaggctgacattttaacattttttttcctatggctggcaacaatgatagatattgtaggcacctgttaaggaggctatctcctcccatttctataaagtaaaaaaaaactcactacatacttctgcatattttgaagaaattaaaaagtcatcaaaaactttcattataaaacctttaattttatagataagcagaatgtatctgtctttagcaggattgtgtacaaggtgtgcatgacatttagca

SEQ ID NO: 309861 - DNA, 1000 bp, Homo Sapiens
tacatttagaaaggcatctcactactatgtataagagaagatgtttgtgctctgtgtccatctcacagagctgtgcaaacagacatgagttaaggacatgtactttaatgtggttgacaactgaaaagcactgttaagttcaggtgaattgttttggctagccagcatttctctatggatgacacagtgcatagactcgcattcagaagtgaccgctttgacctgagtattgaaatcagaaagctgtccagtcatggcagctgctccgtgtgtgggcacatactgacacaaaatgaccagttcagtttttctgagatgtaatcattaaaagacttgaatagttttgcaactgtggtgttggttggcaacaaaagtggttgtaacatatcctcatgcacatcctcctgaaaaatatatcccagaaaacaagcactgttgctttgtagttgacattagtagactcatcaacctggattgcatacgacggtaacacattaatcctaacaattgtgcccaatatcctctgctatttcatcaatttgtctagttatggtgctagccaaaagagaaacatgtgctgccctttgaactgcagcctctcctaaaagttcatgacaaatgtcctaagcatcaggcagggtcaattcttcatcttacaaaagagcttcttagctttagcaatgtggttagccacttacaataatgttctcaatgcagacacattcgatgaagtggtagccttcaataattggttcttttcatgttcacgttttttttttcttttgaaaaaacttcaaaggcttgtcttttaatgtggggtgctttgtctccacgtagtgaagcaattttgaaggtttcattacttcgttagataaccggtggccacatgttatacaaagcagacttggagaatgtgaatcacttgttacaatgaactcataatttaagtatgattcttggtattttcttttaaaggaagctttctttttgttttcagtct

SEQ ID NO: 309862 - DNA, 1000 bp, Homo Sapiens
ttttttttttttttttttttttagagacggagtctcgctctgtcgcccaggctggagtgcagtggcgcgatctcggctcactgcaagctccgcctcccgggttcmcgccattctcctgcctcagcctcccgagtagctgggactacaggcgcccgctgccacgcccggctaattttttgtatttttagtagagacggggtttcaccttgttagccaggatggtctcgatctcctgacctcgtgatccgcccgcctcggcctcccaaagtgctgggattacaggcgtgagccaccgcgcccggcagacatctgtattttaacaagtcctccaagtgattctgatgcatactcaagttggagaaccactggcttagaactatgttgcttaggtaagttctttgccttccctgagcctcaacttcatcaactatcaaataggaaaaccatcacctccttgtaattataacaattacagataatcatgtagagcccctactatgtgttaggcagaaaatgaatggtaggtgccattgagatttttaggtcatttcctaaaacaaatagttccagaacccatgaaaataagtgaattattttataatctttcctaaataaaacacaaaacataaaagccataaacagaatgctaaattctatttttgtagagcagagactccattaaaaactcccaaatgacaaactagaaaaaaaatttacaacactgtgtgaaaatcagagtgtgattttccttaatatacaaagagctcttgcaaaccaacaagaaaaacacaaatacccaaatggaaaaatcaacaaaggacaggaatagttagttttcagaaaaagaaatatgaattaccaataagtgtgaaaatggtgctcaatgccatcatgattaaagaaatgtaaccaaaacagtggtgagcccatttttcatgtggcagattactcaattttagtaatttattctgaaaacaatctcccacaagtgtatacttcc

SEQ ID NO: 309863 - DNA, 383 bp, Homo Sapiens
ctctgtctcaaataaaataaaataaaataaaataaaataaaataaaataaaataaaataaataaaatatttacttacttgttctgtctcccctaccacatacactggaatacaaattccacaaggagagtaggactttgtcttctcactgttatatactcagtaccgagaccagtggttctcaagctcgagtgtgcactggaatcacctggaggatttgttaaaacacagattgctgggctccaacctcagagtttctaattcagtagatctggggtgggcctactgaaatagagtttatatttctaataagtttctaactgctgctactgctcctggtccagggactgcattttgagagctaccagtcttgacgatgcctgg

SEQ ID NO: 309864 - DNA, 338 bp, Homo Sapiens
ttgatctccaccttggtccctccgccgaaagttggaggagtggtataatattgctgacagtaataaactgccacatcttcagcctgcaggctgctgatggtgagagtgaaatctgtcccagacccgctgccactgaatcggtcagggaccccggagtcccgggtagacgtccagtaaatgagcgacttaggaggctgtcctggtctctgctggtaccaagctaagtagtacttgttgttggcgctgtttaaaacactctggctagacttgcagttgatggtggccctctcgcccagagacacagccagggagtctggagactgggtcatcacgatgtc

SEQ ID NO: 309865 - DNA, 1000 bp, Homo Sapiens
gagaatagtttaaattagaatcttagctttgggtgctaatggtggagttaaagactttttctctgatttgtccttggaaaaaggttttcatctccggtttacaagactggtgtattagtttatactacaaggacaggcccatttgagtattttgttttcaattagggagatagttggtattaggattaggattgttgtgaagtatagtacggatgctacttgtccaatgatggtaaaagggtagcttactggttgtcctccgattcaggttagaatgaggaggtctgcggctaggagtcaataaagtgattggcttagtgggcgaaatattatgctttgttgtttggatatatggaggatggggattattgctaggatgaggatggatagtaatagggcaaggacgcctcctagtttgttagggacggatcggagaattgtgtaggcgaataggaaatatcattcgggcttgatgtggggaggggtgtttaaggggttggctagggtataattgtctgggtcgcctaggaggtctggtgagaatagtgttaatgtcattaaggagagaaggaagagaagtaagccgagggcgtctttgattgtgtagtaagggtggaaggtgattttgtcggaatgggaggtgattcctagggggttgtttgatcccgtttcgtgcaagaataggaggtggagtgctgctagggctgcaataatgaagggtaagatgaagtgaaaggtaaagaatcgtgtgagggtgggactgtctactgagtagcctcctcagattcattgaactaggtctgttccaatgtatgggatggcggatagtaagtttgtaattactgtggcccctcagaatgatatttggcctcacgggaggacatagcctatgaaggctgttgctatagttgtaagcaggaggataatgccgatgtttcaggtttctgagtagagaaatgatccgtaatataggcctcgcccgatgtgtaggaagaggcag

SEQ ID NO: 309866 - DNA, 1000 bp, Homo Sapiens
gagaatagtttaaattagaatcttagctttgggtgctaatggtggagttaaagactttttctctgatttgtccttggaaaaaggttttcatctccggcttacaagactggtgtattagtttatactacaaggacaggcccatttgagtattttgttttcaattagggagatagttggtattaggattaggattgttgtgaagtatagtacggatgctacttgtccaatgatggtaaaagggtagcttactggttgtcctccgattcaggttagaatgaggaggtctgcggctaggagtcaataaagtgattggcttagtgggcgaaatattatgctttgttgtttggatatatggaggatggggattattgctaggatgaggatggatagtaatagggcaaggacgcctcctagtttgttagggacggatcggagaattgtgtaggcgaataggaaatatcattcgggcttgatgtggggaggggtgtttaaggggttggctagggtataattgtctgggtcgcctaggaggtctggtgagaatagtgttaatgtcattaaggagagaaggaagagaagtaagccgagggcgtctttgattgtgtagtaagggtggaaggtgattttatcggaatgggaggtgattcctagggggttgtttgatcccgtttcgtgcaagaataggaggtggagtgctgctagggctgcaataatgaagggtaagatgaagtgaaaggtaaagaatcgtgtgagggtgggactgtctactgagtagcctcctcagattcattgaactaggtctgtcccaatgtatgggatggcggatagtaagtttgtaattactgtggcccctcagaatgatatttggcctcacgggaggacatagcctatgaaggctgttgctatagttgcaagcaggaggataatgccgatgtttcaggtttctgagtagagaaatgatccgtaatataggcctcgcccgatgtgtaggaagaggcag

SEQ ID NO: 309867 - DNA, 1000 bp, Homo Sapiens
gagaatagtttaaattagaatcttagctttgggtgctaatggtggagttaaagactttttctctgatttgtccttggaaaaaggttttcatctccggtttacaagactggtgtattagtttatactacaaggacaggcccatttgagtattttgttttcaattagggagatagttggtattaggattaggattgttgtgaagtatagtacggatgctacttgtccaatgatggtaaaagggtagcttactggttgtcctccgattcaggttagaatgaggaggtctgcggctaggagtcaataaagtgattggcttagtgggcgaaatattatgctttgttgtttggatatatggaggatggggattattgctaggatgaggatggatagtaatagggcaaggacgcctcctagtttgttagggacggatcggagaattgtgtaggcgaataggaaatatcattcgggcttgatgtggggaggggtgtttaaggggttggctagggtataattgtctgggtcgcctaggaggtctggtgagaatagtgttaatgtcattaaggagagaaggaagagaagtaagccgagggcgtctttgattgtgtagtaagggtggaaggtgattttatcggaatgggaggtgattcctagggggttgtttgatcccgtttcgtgcaagaataggaggtggagtgctgctagggctgcaataatgaagggtaagatgaagtgaaaggtaaagaatcgtgtgagggtgggactgtctactgagtagcctcctcagattcattgaactaggtctgtcccaatgtatgggatggcggatagtaagtttgtaattactgtggcccctcagaatgatatttggcctcacgggaggacatagcctatgaaggctgttgctatagttgcaagcaggaggataatgccgatgtttcaggtttctgagtagagaaatgatccgtaatataggcctcgtccgatgtgtaggaagaggcag

SEQ ID NO: 309868 - DNA, 1000 bp, Homo Sapiens
cttgcagcctttgttccccagaaggttccagtacatggtgatctcaccctccagttgggccctgatatccagctgctcctggtactcctggctctgccactctaggtcagcctaactcttggacagctgctcttctacactgctgatgaggctctgcagctgggccagctccatgccgtagtggtcctcagcttcacacagggagtgctacagacagtccttctgtaataccaaggaaagggagaagcaagctaaaattcgtggatctctgccctcagcctcttaagattgtgacaccccaagactgtgccaggtccaggagcaatctaactccctttggctgtctttagccagaagaaccaatgctgtgttacttgtcttcacagtagacctttaagatcagagccccctcacctgagttaatgttgattcactcaccatccacatctgcaagaaagtgcctccaaaggagatgaaaccaaggtttaagctgactccctggttggtatctaagtgaggcctgtactgaccccaaggaactgctcatgggcagtgggaaccaagctggggctcccatacatgcagagggactcaccagcgtgtgctgagcctgaagctccacctccagggtgttcaccgagcagctcagctccaggatctccaaatgacagcactgcagctcctagagcaggacatggcctgcaggctgatgccttcagactggagcacagagagacacaattacctccctgcccaggtggatgccgagtcctccctactctgcagcctcccttcatctgggcttggaaccactgctccacatcctggcagctggtctccaccacggcctcatactggccccacatctcctctgactgctcaggtccgcagtgggctcagtccccaactcaatccggagcttgtcctctgcactcctcagagtgcaggcttcctatgtacacaaaaagagcagactctgcattcattcagccctccacca

SEQ ID NO: 309869 - DNA, 1000 bp, Homo Sapiens; identical to SEQ ID NO: 120140

SEQ ID NO: 309870 - DNA, 1000 bp, Homo Sapiens
agcttttagtcaacagttttatgaaacagctacaaaaccagtggtgcagaaatttcctgaagagcagaaataatctcatttaatattcatggaactatatcaagatgaggatgataatgaaagagcctagaaataaaagttaagattttgttatataaatccttaatagtgtttgctagcttatgactataaaagacagcctttttatgaagtgagtttacaagatacatgaaatctcaacagtttcctaagagagatgctcttttcttttttttctttttgagacagagttttgctcttgttgcccagactggagtgcaatggcgcgatctcggctcaccgcaacccctgcctcttggattcaagcaattctcgtgcctcagcctccgagtagctgggattataaacatccaccaccttgcatggccaattttgtatttttagtagagatggggtttctccatgttggttaggctggtcttgaactcctgacctcaggtgatctgcccgccttggactcccaaagtgctgggattacaggcatgagacactgtgctcagttgagatgctcttactttcttcattagaatcagttaagagtgcggcgctattacctccatttttcatcatttagtgaacaacgtttggaatactgttaaaagttaaccaattttttagattgctaaaagaaaagttgtgtggaaaaataattttaaagtaaattaaaatttcactagcaattggcttatgaaaatgccacagctagatgacactgaacatatttttcatgaggcttatatatcatataatctagtcaagcaagctccatcaagtagtgctatcaggcaaactcttctggaatctttaaaccacaaagtacatgaaaaaaacccacacatttctttcagataattactacagaagaattaagtaacctacatgtacaaaggttttataagttatgtaagtaacataaaaactaaaaaatattctaaaaaca

SEQ ID NO: 309871 - DNA, 873 bp, Homo Sapiens
acaatttgacttgtttttaagtgttcaaacttctttgatttgaaaatacctaagattcaaggatatgtcaagggatttgtgacttcttccattactttaaaactttgtaagaacttttcttagtaatgaaaatgaatacaggtatgttatagcatttttataataaagaaaacctgtaacagcacacacaatataaaattaaaccatgtttataaataatgacacagataaatgctccttacatgtcaggtgggaaaaaaagcagaagagattattgtaatctgatcccaagtttgtaaaataaatgagtgtaacattctgaagttctttcccatctagaaaccggataacataaccgaattttctactatttttatgggtttctttaatccataggaactatcctttggtccaagttgagaggtgaatatctcactgtttttattttaccaataattaaccagttgtcccagtactatgttattagtaatcctcccttcctatgcaatttctttctttctttttttttttcttttttttttttttttttttgagatggcgtctcgcgaggcaggtaagggctgcagctgagtcaggatccactcaggcttacgtggtctggtcctcagcagacccttcctagaagacacgaaaacacattccgccttccaagtttctaaaccagaaacacctgcgttttgaaacaggtggtcaggtactaaacggagagggtgtgtttagtctaggtcaacttaggtcagttttgcccatctgagtccatttctgaaagctggatggagttgtcatggccagaaatggtcagcccaccagacctgcttgtctcaggtaaagccatctcattgccaggttcct

SEQ ID NO: 309872 - DNA, 1000 bp, Homo Sapiens
tttttttttttttttttcagtagagatggggttttaccatacgggccaggctggtctcaaactcttgagcttaagcgatccacctgccttagcctcccaaagtgctgagattacaggtgtgagccactgctcccaacccatacatcttagtttctaaataccattaatactaaaaggagctagggtaccctggagaatggctgcttccagatctgaggcaaaaaaaaaaaaaaaaaggcacaatgagagcttggaacatcttacgatacaataaaccaaaaatactcaaagacaaagacacaggaattggcttgagaagtttctcttgttaaatttgaaacaatttgtgcatcaaaatgaataatgacaataataaattataatatatttattttaaaaatgcgtaagttcacagccataatcggaaaaaaagaaaaaaggtggtggtggggaataaaaagctcttctttatatataaaaaagccagttaataaatgtttaagaaataatagaatttcttaaatcaacatcttgtaaatccaatataataacggattaaggcaagaatgataaaactactgggtgaaaacctgttaggaaacaggacccacatattacttattaattgcaaagagaaaaatataccttttcaaaagacatctggtagacttccccttaaccaaatgatcaaatttagcataacctaaggacaacatgactttataagcctcctgatgtcatgcaatgtgaggtatcacttatgctatactcttgccaaaaccttttaacttgaatctaaacatgaagaaacaactagataaatccaaaatgccctggtctacaagagaactgacctgcactcttccatgaaaaaaacaaagaacaggaggactgttctagattaaaagggacaaaagaacatatacaaatcaatgttttcagggagggaaaaagacgtaagacattttggggatagttgagaaaatgtgagtataaatat

SEQ ID NO: 309873 - DNA, 1000 bp, Homo Sapiens; identical to SEQ ID NO: 120141

SEQ ID NO: 309874 - DNA, 1000 bp, Homo Sapiens
agcctgatgcccaggaaagtgatagacaagatgtctcagttcatcaaagacccaaccacaatgcagtgaggaagggcagctgccaaaggttttattctccaggaggaggggctctcgggggctgtgagcagcaggcacgaggactttattgcacgtgtggttaggtgatgacgacctacagctgcactgggaactgggactcagagtgccccgacctcctgctctatctctctctgtccctctctccctctctgtctctctgcctctctccctctctgcctctctccctctctgcctctctccttctctgcctgtctctttccttctctgcctctttccctctctgcctctcttcccctctgtctctctctccctctgtctctctctccctctctgtctcctctgtttctctccctctctgcctcctctgtctctctctcctcatatctctctcccctctccccacctctctttctctctcccctcctctccatctctctccctcctcctttccctccctgacccccatttatgcacctgggcccccctcctgggcaggcacacacacaatgccaaggccactgtctgggatgtgtgggcaaggctgcaggactgtggtcctggtgtggcacccccaccttccagcacaagtggggtcgggggtcccaggcgtgactgcgctctcctgcgtgggcgccctgcactcagggaagcagaagctgcaggtctccactggctcgggggatgtgctcacagggctgccggcttccatcgcgtgatctgcagaggcgagagtggagggcgtgggccaggcctggccctgcactagggtaggggtgacggtgtgggcagccgcactctcccccgacccaggagctaagggcaatcaccagcgtagaacgcccccagacaggtgtcagtgtccgccagttgctgaccagaacctgtgccggggcaggggtgggcaggcaattcttggctctcacttctgtccagcacc

SEQ ID NO: 309875 - DNA, 1000 bp, Homo Sapiens
aattgacgctttatgttttattttttatttttttgagatggagtcttgctctctcacccaggctggagtccagtggctcagtctcagctcactgcaagctctgcctcccaggttcatgccattctcctgcctcagcctcccgagtagctgtgactacaggcacgtgccaccatgcccggctaattttttgtatttttagtagaggtggggtttcaccatattagccaggatggtctcgatttcctgacctcttgatccacccaccttggcctcccaaagtcctgggattacagatgtgaaccaccgcgcctggctcccaattgacacttttaaagtaagctacctgtgcttctggaagggcagcctgttatcatgggatggccatttggtccaacccaccctgtaggtgtgtctggtctgatctgaggactgttggcatcagaatcaccctggagtttgtaacatgagcagtgaatctctgaggggcagagcctaggagttttcaatttacaagcttcctataccattctaatgtatataacaatttaaatattgctgctttctgagtcctaaaatccctccccagcatcctgatacatcactagccccattgcaatgcccgcaaatgaacagcagcaggcagtagatgatgcttctggccagcagctccagaggaaagcctcctctcctctctctctccttgcagtgtagttatgtcagtccctcagcttgaccaaatgccccagcaatgcccttgctagctgccaggagtgctctgtatcaatatctatcaacaccaagaggggatcccccctttcccctcccctggcatcctgcccacaggcccctcaggtcctttgctttgtccaggtcttcccagcacagctgcagaaatgtaagatggccccacaagttccctgaatagctgagggggtccagccacttgccttgctcccggaaagtctcttccctggctgtgctcttttccattttcccactg

SEQ ID NO: 309876 - DNA, 1000 bp, Homo Sapiens
  misc_feature (9)..(9): n is a, c, g, or t
  misc_feature (13)..(13): n is a, c, g, or t
  misc_feature (19)..(19): n is a, c, g, or t
  misc_feature (28)..(28): n is a, c, g, or t
  misc_feature (49)..(49): n is a, c, g, or t
  misc_feature (79)..(79): n is a, c, g, or t
  misc_feature (113)..(113): n is a, c, g, or t
  misc_feature (160)..(160): n is a, c, g, or t
  misc_feature (178)..(178): n is a, c, g, or t
  misc_feature (208)..(208): n is a, c, g, or t
  misc_feature (216)..(216): n is a, c, g, or t
tagcttaanaaanataagnactgttcanaaaccagttgtctctccaganatgccctgccacttcccatcatgttctaanttagtcttttctgattatgtcatttactgtttgnttttttttttgagacagagttttgctcttgttgcccaggttggagtncagtggtgcaatctcgcnccactacaacctccgtcttccggtttcaanctattctnctgcctcagcctcccgagtagctgggattacaggtgcccaccaccacgccaggctaatttttgtattttttagtagagatggggtttcaccacgttggccaggctggtcttgaattcctgacctcgtgatccgcccaccttgctctcccaaagtgctggattacaggcgtgagccactgcgcccggccctgtcatttacctttttagcctgagtgtcaagggcaatacctggtctatagtaggcatgatatatttgtgcaatagataagataggacttagactcatagatgcggtgaaacagatacagtgggacattccagccatattcaggaaaagtagcagtccggactggctaaagcaaaaaggagataaaaggttatggtagacaatccagtcagaaaagcaggatgaagccaaatatcaattgctgttaattctatgctaaaaagtgcactttagcataggttgaactcaaaagacatcaacaattctgagtgtgacatgttcagaagtgtcctataactggtgagatttgaaaaacagaaggtgaggtgggggccagtgaaccccattaagaagttatcacagtagtctgacaaaggagactcaattagagaagtcggaggaggaatagactagaagaacatgtcaaagggaaatgaacatacaggctctacctgagtgtgcacagtaatacaaagaagccagagatgaccccaacattttaaaccagtcaaatgtaacaataaagccattaatcgagaagaaaaactgaaatgacag

SEQ ID NO: 309877 - DNA, 1000 bp, Homo Sapiens
ggcaaacacagggaaagcagagaactcccctgcatcttcttaattgcctttagcttgataaaatatttatgtcaggctgggcacggtggctcacaccagaatctcaacactttcgaaggccaaggcaggtgggccacttgagctcaggagttcaagaccagcttgggcaacatggcaaaaccccatctgatatggtttggttgtgtctccacccaaatctcatcttgaattgtagttcctataatctctatatgtcatgggagggacctggtgagaagtgattggatcactggggcagtttcccacatgctgatctcgtgaagatgagtgagttctcatgagatctgatggttttataagcatctggcatctcccctgctgacacttctacttcctgccaccttgtgaaaaaggtgccttgcttccccttcacgttctgtcatgattgtaagtttcctgaggcctccccagccatgatgaactatgagttgattaaacctctttcctttataaattacctactctcacgtatgtctttagagtagcaagagaacggactaatacactatcactacgaaaaaaaatagaaaaaaattagccaggtgtggtggtacacacctgtagacctagctactcaggaggctgaggtgggaggatggcttgagcccaggaggtcaaggctgcagtgagccatgatcacaccactgcactctagcctgggtgacagagtgagaccctgtctcaaagaaaagatatatatttatgtcaaagatacatattttgaggtgacacattctggttccttcactatggtgaggataataagactgccactctgacaagtctggcgtaaggaatgattccactcaagacttgtcaattggctccctctttgtagctgtgcagctgtaaatgaatggaaccacttccttggtatttccaccctcagagctaaaaaattcgtcccactggcaaacctcagagtctcccttcagggcca

SEQ ID NO: 309878 - DNA, 1000 bp, Homo Sapiens
cacctctctgaaatccctatgaccgcagtcccctcttgcgagcacatagtaaacagggcctgctgatccccactcaccacccttggacagactgcgacagtctcagaagcccaagagttaggaacacattcgaaaatggcactatctccaccttctcagcagccgaaaaagaagaaagatatccttggccttaagttggagagccccgagaaggtaatgtgtgcaccccgggatgcccgcccacctgtaagtctccattctggccgcctaggtaggttgcggcagcctgaacggggctctgtgagcttcgggctggacagcggttcctcagcagccactagagggcgcaatggcgccgtaggcaggcaccgaagtccttgtttgccgagctcaggcgtgaccttgtttgtcctgtgtctcaagagaggaaatgttcatctctttctcaaggtccttcacccagtgagctgctttcttttcctcttgatgtcatccttttacacaggcaggaaattatgttcacttctactatcctgtggtcatttaaaaccacaaacaaagctgattgaccaggaagtcagataattaaaagagccataagttcttgataaagccttgttgattgaagaaagcaaagtagccaaagtatcgtgattgacagggggaccagcagcctgagaggctgagctctccagattgcagtggaaaggcataagttggttattaaaacaagttggcgagctgtgaccagcattttgaaaaattgagctagacttgaacaaaatagaacaaataacatagaacagagctttttccattccgtgtgtgcatactgagttgcttactaaattatgtttctcactgtacttcaaagttttaaaaatatgaaagccttgaccgggctcggtggctcatgcttgtaatcccagcctcggtgacaaaagcgaaactctgtctcaaaaaaaaaaaaaaaaaaaaaaaaaaaggaggagaagaagaa

SEQ ID NO: 309879 - DNA, 1000 bp, Homo Sapiens
cagctcttacctgcttcgccaccagcgcactcactctggccagaagccctacaagtgcccacattgtggcaaggccttcggcgacagctcctacctcctgcgacaccagcgcacccacagccacgagcggccctacagctgcaccgagtgcggcaagtgctatagccagaactcgtccctgcgcagccatcagagggtgcacaccggtcagaggcccttcagctgtggcatctgcggcaagagcttctcccagcggtcggcccttatcccccatgcccgcagccacgcccgggagaagcccttcaagtgccctgagtgcggcaagcgctttggccagagctcggtgctggccatccacgcccgcacccacctgccaggccgcacctacagctgccccgactgcggcaagaccttcaatcgctcctccactctcatccagcaccagcgctcccacacgggcgagcggccctacaggtgcgccgtgtgcggcaagggcttctgccgctcctccacgcttctgcagcatcaccgggtccacagtggcgagcggccttacaagtgcgatgactgcggaaaggccttctcccagagctccgacctcatccgccaccagcggacccacgcggcgggccggcgctgacctggggccccagcaggggtgggaggtgtgggcagaagataaggggccagggagctagaggaacctttagggaggatagtggagaagccgcaggagaatggaggagctgaggatgctggaagaagagaaccagggtggaggaagtgacatgccctggagacttgtgggaagtgggttggagggaggccaggccggcagcgggaggccctgggagaaatggagagaggtcagcggagggctggcctcagccgcggctccttggtgggtgcctggcttggcaactgctagagcagggaggggggagggcaggggattacctaattagagtgggttagcttagattggtagctgctgaaactc

SEQ ID NO: 309880 - DNA, 1000 bp, Homo Sapiens
gcaccaatgtcttgacttaggctttgcttttgaagaatctcaacctaagataaacatgaatctcattgtttaaattctagcttaggcagggtggcatggtggctcaagcctgtaatcccagcgctttgggaggccgaggcaggaggatcacttgagcccaggagtttgagacaagcctgggaaatgtagtgggaccccacctttacaaaagaaaataactgagtgtggtggtgtgtgcctgtagtcccaaatacttgaaaggctaaggtggggcattgcttgaggccaggggtttgaggctgcagtgagttgtgattgcaccactgtacaccagcctgggtgacagagcaagaccctgtctcaaaaataaataaataaacaaaaaataaataaatgcattctaagcttaggtctttatatctcttgtgcccattcaaaatatcaatgtaatagctggaaaatactacatgttgtcaacaagataatttttttaaaaggaataactctgaattctttattacacttcatattacagttcactgtctatgactctgtcaaatgtggttaaaaaatagtatgagatcagttctcatctcaaagatgtatagatgaggtttgagccaagagtctatcatagccagcacaactagcaggtgttctgagaagataagacactcattttcatgcctgcattttcctaaaactttcataactggcattatagaaagttttaggaaacatgatagtctgaaattgatgctactattaaaaatggaatattcaattcttatagatccttttgcatttgttacgttgatatgatgaatcgcttatacatctctctcacttttcttagcacagtccctgaaacataattaatagtaggtaggtagttaattcttgctgaataaatcaatgaatggaatgataatatatacttgtttcagttttcttattttgtaaaataatttgagaataatgtattaacatacttgaggaa

SEQ ID NO: 309881 - DNA, 1000 bp, Homo Sapiens
gcatttgagggttgttatttcagctaacagtgtttttgaacaacggccactgctttaccaacctgaattcaaaattaagtgaaacagagttgaatgctttgcatcagtccttcagggaatttcttagacagattaaaacagacaaacacaactgtttgtgaggaaggtcatctctgcttcccatggaaccagggcccaagggcccaagctacgaatgtagactgcctaccactacctcaagacaaaaaaaaaaaaaaaaaaaaaacattgctgcatccaggaggaggtagggggaaggcaggtaaaaatatcacaaactttactgttgtttcaaagttgcctttttcttgactcaacatttgcttagttgctgtaaaattctgaattttttcagagtcctgaaaaagttgattctgacagtttctatttattttttgatatttctctaaaagaatgaattcatgaagctgcctactccaccattttgttaatattgctctttgtttttgtttgtttgtttaagtaaatgtactcaataataacatatacataagttcttgttaagatattaacattttaaaaacataaattctaagagttttaaatataaattactctgcaaaggaaaatagctgataaataacagaaaggaatacatatttcagtatgttatgtaaccagaagattggtgtggttaaagaaaaacattttaaaatgtattacctaccattcaataaagaaaaagtgcaaagaaaatgcatagttgaaaaaaatcaggctatattatggttttatgtgtgattaaaagccaaaaccacatctagtgccaaacacatgttcctaaaattcctatatactgtctcaatgaattaaaaaaatctcaacgtaatcatctcctaattgtgcttttctgagggaacattgttaattgtctacctgacaaacattgactttttcctcctctctgccataatcttgattttatttagttaacatgaga

SEQ ID NO: 309882 - DNA, 1000 bp, Homo Sapiens
ttcaaccggcaaggaaattgggggccccagcctggttttgtccctgtgaaatgagagggggagaatcttgtgcctggcactgctcgcagtgggctccaccagccccggcccggctggagttccacctgtcacccaccgcacagcagtctcgctccaggtctctcgagtggagcttcaccaagctgtgatcttcatatgctctgctgagcaggatgtgcacccctgacaaacctgctggcctgatcagtatcattatcagagggtgctactcacttcccaaccgcccctttccaagctgtcagctcggtggggactgagctgggaaagggcggtggggctcagtctgggatggccttcccaggccctgaaggcccagcacacctcacacctccgctcctcctcatccacacaaagacctaagacacctggctcaaggaacatgagtgagtaagggcacctgggggcttagggcggaaaggtggagagagaacaggcgcacgtggggagggatttgccctcagccagcaagaagcacgggacgtgacctcctcaccccacttccacgtcgctgcgacagcctgataccgccagtcagatgtggcttgtatggtggcacagcccactcccagtgatgccggtggggccaggctgccagcaggtaagcgccaagggtacagaaagggtccgagcatagcagggcaagtgcctgaaagatggctgtgggcacccaggccgcagaggccctgggcagctgggggcaacctgccaccgttctgctctgtaagacctgatgccgggccccagccccgtcgggaaaccagaacccactacatcccggccccgccaccgcacaggctcagaacaacagggcaggatcacaggccgaagcaatctgccaagaattctaatgtaaacactgatttatttaaaaaatactacagaggacagatttggattcaaaaaaaaccacagagaatcatatacagaaacaaaatgcact

SEQ ID NO: 309883 - DNA, 1000 bp, Homo Sapiens
tacaccctcaagaagcagtaccagatgataatctccctttattaggaaaacgaggttttcttgaggtattttctagaaaaacctcaagaggtttcaatttactggctagaactctcttgcagttaggtcatatggcttaactgcaagagactaggaaagtatggaagaggattttctatgtcttagaccaattatgaccaaccacgtgggactgggcattggcagaggaggtggtagtggtggtgagtacagggctgaggataaatgatatttgccacacaaaatctcagaattttcagatacagcctcactgaacatctgctcacaaactgaaacactacaaaggaaacaatcttccaagagcaacagtcagcacagtatacagccaagtttagacctgcatgtattaagtggacagagtagaaatgcttaaaaaaattaagacaaagcggtgaaaaattaaagtagaagctccggaacaactactgtctggatatttccgcttctctaactggccttgctttgtctcttcaagtcctactactttcagcatgtaaaaaactaacttcaatctggaaggcacagaaagctcatcacaatctgcccatatccatcaatcatttccttccattaatctcttaaatgcccatgttcctttctgcctctcaccagacatgtattttgctttaggtagattatctcacttatccttttaacaactcagtaagatgggtgctgttactctttcctgggacctaattcctttatgtagtcctttctgacattccaactcagaatgattactttctcttctgaaccactcactgagtgctcacagcagactaggcactggggttaaggacttgacatacctgtatccaagtatattgatgaacatgaaggaaattatacaacacagcagttttgtagtcttcctactttctctgtggcatgcaggttcattccttcaatacagtaggccactacatgccagacacca

SEQ ID NO: 309884 - DNA, 1000 bp, Homo Sapiens
tgtcccctgggacctgcatcttttctacaccctttctgtggcttgcccacctcctgtcagcagcatgcattcctggaaatctgcagtttcccaaagcactcttagcagcatcctagctccacccatccctctcgaagtcttcagggccagaccccacagcgatgtcccctctgcctgtctggtgattagtcacgtgcagctcgtgactgctttgctgttgaactgtgaggctggagggactgtcctgtctttacagcagtgttgtaaacctgagggctaagcctctctaaggcttagcttgtaaaagatgactgcagaaatacttgacactgggtaatgaactgctcttcctccacaggtggtacagaagttggtcctgccctttgggcgactgaactacctgcccctggaacagcagtttatgccctgccttgagaggatcctggctcgggaagcaggggtggcacccctggctacagtcaacatcttgatgtcactgtgccaactgcggtgcctgcccttcagagccctgcactttgttttttcccctggcttcatcaactacatcagtggtacgcagccaggatggctggctgggcccctgagggctggagaggcaggggagcagggtggcctgcagcccagagccccagtccccgcctccccacaggcacccctcatgctctgattgtgcgtcgctacctctccctgctggacacggccgtggagctggagctcccaggataccggggtccccgccttccccgaaggcagcaagtgcccatctttccccagcctctcatcaccgaccgtgcccgctgcaagtacaggtggatggggcagcctggggcaaggggaggggccagcctgggaccagcagagtggaaaagccagagggaccatgaagcgccaaagctaaggagctctcggccaccataaaactgggccctgaagcagcagagggctttgcccagggtggtggcactagactgggacagat

SEQ ID NO: 309885 - DNA, 1000 bp, Homo Sapiens
aaagttttaatctcagacacggactattaaaaggctcacctagttgttcaattcatattgaatatattgcgaaaatacactgggattgaatttctcttacagttttgctgactcaaggaatcatcatggtttgatactttccatgtgaaggaattacttcctctgatactgctcaggatggataggaatgtttcattatgtatgttctgcagtcagttcacaaacagtgacctaacaacactgaccaaagctctcccagcgctaaacccacctgctaatgggagttcttattcattcccccagttggtgctgatttcctctttcaacacctttggtagtagcattttctttatttaaagtctttgacactcaatatactttatgatcactgaacacctttaccttaaagtccactctgatcctgtggactccatctgctggaattttttgcttagaactattgccattggagagagtgctgaggatgttcaaagtgcctgcattctcctgcttattgaccggaggtggtttttcctaaggagacaaaagatgaatatagaacaaaatcacaccctatttgccttcacatttgcaacagataataatgcaaatgacaaatcttttaattacaattaacttacaattagttttgttttactgaactacaaaaaaagattctaaagagcctaaattacatctattatttccaaggcatactgattcaatcaagtctgccagaaagtgggatactatccacagaaacaatgatactgtgaaacactgcttctgcctaaagccagatgtaaatcacctatagaaatatgattccactcttacagagttacattaaaaatacattcatttatgacaagagcaaatgtacatttttacttctggataaactgaggcaaacaggatttccctaatgtctccaagataaatgagtggtgtctggtgagtgactcaggagtccctggccctctactttagcctttcccat

SEQ ID NO: 309886 - DNA, 990 bp, Homo Sapiens
acacggagaaaccccatcctgctaaaaatacaaaattagccaggattggtggtgcatgcttattatcccagctacttgggaaggctgaggcaggagaatcgcttgaacctgggaggtggaggttgcagtgagccaagatcatgccattgcactccagcctgggcaacaagagcaaaactctgtctcaaaaaaaaaaaaaaaaaaaaaaaaaaaagaggtgaatctactatgcttatacatttagacaacgttaaaataactgctataattatgatgtagatacagcagctattacatacttactatatgccagacatcgatataaaggtttaacatacattttcttacttaaacctatctccttacaaagaactgtctaccattgctattttacagaaaagaaattgagacttgaacaggttaagtagttttcttgtcttataacggcctcgagaaggtaaaatagtgaatacagggaagggtgatttttcagccaaataattgctaaaggatgttggggtcaaaaaataattacgccaaatggcctttagaataagcagattcctaggctagaacatgtggggccacaaagaaggaaaagcaacaaggaagaaaccaaaaaagaaacaggctaaagcctaaactttttatttttttttgagacggagtctcggtgtcacccaagctggagtgcagtggcgcgatctcggctcactgcaggctccgcccccgggttcacgccattctcctgcctcactctcctgagtagctgggactacaggcgcccgcacctcgccgggctaattttttgtatttttagtagagacagggtttcaccgtgttagccaggatggtctcgatctcctgccctcatgatccgcccgcctcggcctcccaaagtgctgggattacaggcgtgagccacgtgcccggctacttttttttttttttttgggatggagtctagctctgttgtccaggctagagtgc

SEQ ID NO: 309887 - DNA, 1000 bp, Homo Sapiens
tcagggtaaatttttagaaatggccttattgcattatagtatatgaatatttttgagattcttgatacatagtatcagatggtcttccagaaagtatatattccttgtgttttgttcaaaaaaggtggtgggaggtagtgcggtgtggtggtggcagcgacatccatggagctagaagtgggcagtgacgccatctgtctccagcaagtcatccaggatgatgtcggatatggtgctgatcttcttggccagcttgctgctccatggtgctcaggtacaggtagcggttgagcagctccccgtgcagcttgcagcacagcattctggagggtgcggaggtccacacgcagcatccggaaggtgcggaggttgaggcctgtgtggtgtggcagcacgttcagcagcatcagcagcctccagtaggttttctcctgcatgggcagcagcagcccgatgccaccatcctgggtggcgaaccacgcgatatgcttattctcccaccactgactttttgctgagcccctcagtggctccctggcacagggtcctatagaatgcgttcatgtgggcacccacatggaagtctgcccagcgcagcaggcacatgcccccaaaactctccttggcttcaggcaggtacatgtacaccatgaggctgcagtcgtggtcagacaccagaaaacccagctgggtgttgtctaccatgaagtccacgctgtacacctccagggtcttggcatcacatgacgaggctcagcgtcttgctctcctcctggtaacagcagccagatgctcttcatgaggtcggctgccaggatgaagttcctgacgctgatcatctggtggatgtagagctgcctgtcgaccatgaaggccatgcccgtcagctcgctggcccgcaggcttcacaggaaaatcttctggctgatggccgacaccaggtggccttgcagtgcacagggcagtcacgggccccttctgctccttctcgtaaaggact

SEQ ID NO: 309888 - DNA, 1000 bp, Homo Sapiens
caagaaaatagccgtttatagaagttacacaatgctttcaacaaatcccaaacaaattttgggaaacagataaagccattgggtaaaaataaatatacatactagctaatataaaacaatttatggttacgaattgtcatcaattctcttaggacacaaggagaaatatggtgatataaatctgatgagggctacatatattacatggaattaaaaaacaactgattaaaacatcctaacaatgatacaaatatttaaaagaatgtcttaaaagtcagacatttaccactggaaatagcacgactttaatatgtactccagagttgtaatgtgtatacaggtcactttcgctgtgtctcatcaggtatccacctctcctgcatttactagtcagttttttaagagttcatgtttcctgtgtgagctgaaggggctgggcacatttcaatttaaaaaatacacacctccgattaactaaatggaagttttttacatctaccaacagataaagaaaagagaggataatgggaagacaaaacattgtattaaggtagaaggaagctggataaattgtctctgtaaattatcttaaattttgtattaacaaatttaaaatgactcaaataaaataacaaagaaaaatatattaatttggcctcaaggaattttctcaagccataaaaaattttcttagtttatttctttacggaagtatcttatgcttgatcagctgacttaaaggaactctcctagtgtgggactgaaaacaactttatcattgataaaagatgattagtttaaaaagttggtttttattattgaagtgcccacaggcacaagagtataggtgcttacatttccctttagattatgggaaagcccttttgagaatgcactaaatcaggaaatctttcagcaatcagaatgcatgctgaaagttcagatcttttaagttttgggtttcgctgtttgagcataaaaaggaagggagcagggagaa

SEQ ID NO: 309889 - DNA, 1000 bp, Homo Sapiens
ttttttttttttttttgttttttcacacttgtaataaactgaaaaaatatttcaattaaaacaaccatatgccacaaaaagccactcccatcatccacaatactaaagtccttatacaacactagataaatttttatataaaacagtagaaactagcataccattaattagaaacctcaaaatattcagaaaacagtatcaagtactcaagagaaagctcaagaagccaaaacctcaagaatccatacatcctggttgttaccctaaattgtaattaactacccacacatttaatcataatcaactttttcaaagatatacaaatcaatgcatctatttaaaaggactactctttatagttcagaactttacattaacttttatattctactcagcagggtgtctgtctgtactccaaattagctctcatgttccaggaaataaatacaaactcatatgccttgtgatcactgatggcctgcttatgtaattctagtccactaaatgttaattccatagaatatgctcttgattatgtaaaaactctaatttcttgatgaaatactgtaattctccaaaggttacaattttgtaaagatatgcaataactgagtatcactcccatgaaagacaaaaaaagtataattttgttccaagattaacttagtctcatgtatctctattaagtctttcaaggattccagagaatcttttcatatctccatttctggaaagtgaaatcagtatagaagtaatttgggaacttgaaaatggcattcatttttttcagcagatgccaaatttttgaccgacatggttctcacaattactttgttaccaacagtccagtcagttaacaggttgtaggaaaagattcgtttttgcagacactgctaagctgttcaaagagaagagagagagattaatttagtgattataaaatgcacaaatatttaaaatattttgaacacttcttgttggattatatcagaggtgtgac

SEQ ID NO: 309890 - DNA, 1000 bp, Homo Sapiens
catgttaaaatgtgaactttaattgtaaaaatcattttctgtaaatatagttatatcaacctctctgcacacaacttggttcagatatatacagatatgatattcatagatgttatttgtaccacagaacaaaatcaattcaagaaacatttacttttagcttcaggattaaccccagctttctttaggccttaaaattaccaccactggaaacagagagagagcacggcatacctgggcacaccagtattcagggcaaaatctatgcagtgtcttactaatttcatactatgaggtaaagacccgaaacaaaaatagattcagtctctcgtattgctataactcttaggctggggtattaatcaaaataggatttttacatttaaggcgacagggaggctatgctgattctaactcagaaagaaatgggaaaacagtttttctaaggctacaactatttgtttaggcttattttcccggacctatacaaaaattcagtcaacaagttttgggtaaataaaggaaattcattttgctttcctctgctctgtccctgaagtcactcatccaggttggctgctcaaacaccaagaatctccaccattcttcacttgacagtctttgtggacacgttagacccaaacttttttttgtataacacatcttaaaattttttagtatactttatctttctttagtttacccaaaggaaggagttttcactctaatgtcaatatatttgcaaccatccaactcaaagacctctgtgtcgactgttcactttgtggatcatctctggctcatttaaaacatcctgcctcatccccacattcgctgactggccttagaaagcaaagtaaatttattgttagtctaaataagcattctatagcaaacataagtaattcacacctggcctactatgaaaattaaattttctgaatttagatcatattagctctaaaagccccacagtatgctaaaaatcgaaaataaattc

SEQ ID NO: 309891 - DNA, 1000 bp, Homo Sapiens
ttctagatcgcgagcggtcgcccttttttttttttttttcatgttccattggtttttatgattaaaatttttaacaattcagtattgatacaaagtaaacacttaacaacagtggcaggtaacgccatttcccagacaccttttgggttctgaaaagtggtttccagaaccttcctttacctactcgggctctgtgtggcccaacaccctgctgtcactgcggggcccctgggtctcggagggtggagaccatggctaggaaggtcagccaaggtctgggcccctgcagcctccctctctcttactgttttcccttcttttggagaggggtggtcctcttggggttcccattccagcaggaccactcagcacaggttgggtcagactcaggcccagctctggcgccgccgtcccaacctggggccacggctctgggctccttacaggaaatgccatgacaaacaggcgttctttctcagacctaactcaagtgctgtcctgctaactacatgggacctgctgaaaccgaaatgaaccgagattccagttctgtgcagagatggctggacctgcgttggggacatgcctggaccacccagcccactggccttcactggtctgaaaggttgtgaggtacactggtcctaggatggctcaccacggctctgagacactgtgagcccggccatgggcggtggacacggggtgagggggtctggtgttcccaccctgggtcaccccatgacctttggagggcaggagggttccaggctgcaggagcatgggggtctgcagctggcaggcactgctgagtccctgctggaccaggggtagaggaaccatccaggaggaaagcaaaagaggccaggcctaaggggcagggcccattatgggcgactgcaggccccgaacggcaatgctgaccatcggtgtgcgcagcccctgcctgagaccttcatttccaggcccgtgcacaagtctggctctcgaggactggggc

SEQ ID NO: 309892 - DNA, 1000 bp, Homo Sapiens
actctccaatatttactttttgattatataaattccttttaaaaagtagtattaaaaacaaaaccattcaggttaatttgtatggaaagagatttaagtggctgatttcaaatgaaaaatcagtgtcagtccccctcctgcctcttgagaggccccaagaaatgacagcagacccgatcactctgacaaccccaggctccgaattcattaagcagttttcttcacccaaaggttaatcagaattcagggtgaggcatactccttgcagcacccagtgagaaatgtgcctcgtggtaaagagatcagcttcaaaaaccaagccgactcccatggcgttccttctcatggaggtggtgtagacgggggtccggaaagtattctgcagcttgaggcgatgggcttcaatggggatgatcttcaggatcggcaggtccacaaccagcaccttgggtttgctcttgataagacatcctttttctatatcccagtcagcaccttccaggtacagtcctgagacaaagcatccttgtcccgcccgctcattcacttcatctgcatcctggaacttggtcacttgtgtgaacaaggtggagcggtccagtggccagccgttcttccggcaggtggcctgcaccagcgccgtgaggtaggactcagggatgtgcagccccgagagccacatcacgctgggctcgctctcggtcacccacaacatgtactggctgaaccgccgcaggaagtagaccatccagtttccaagggactttaaggtgtcaggagcaagccttctccagatattagggatatgcccgataaaaagagacctggccacatcatctaactcattgctcattccaacttctccagccaaggccctttgaagttcagccagagacttcgtcatccggaccacaagcttgttgaagcgttccagttcctgcaggagcaccaccgaagtgggggagagtcctgttccgaggcgcttcctcacctggtccaa

SEQ ID NO: 309893 - DNA, 1000 bp, Homo Sapiens
aagtggttcaaagagtttgagcgggtacactctggtactagagaaaatctgaagcaattcacctaggtggatgaaaagggacttacgtacccttgatttattaaaattcattgttcttttatatacatttctctttaaaactctgaaatgaacatttgtttatgcagtatgacatgattgaataatttatatgacaagcttaataaggctgacattcaatgaacagaaaagtaatttaccttttagtaatcagaaaaactttcaatccatttttatcttatttttaagtgtctgttattaaagcttgtgatttttattaatgtaaataagccaaagggtgattgtttttgacacacggcattgtgccatagtgtaatgggtagtttccttctcagttaaccttcaatactctgtacacactattctgaaatactggcatcttcgagcctggcatcttcgagcaggatgctacgtaagggagggttagctgcattggaagggtcttccacatcccagatttcaagcatactgcaaccaggcctgaaaaaaagacatatatatccatattagaaatgtattcctgtctagagaaaatagatacataacacacatctagattttcagagacaaatttatttaatgttaaatattttaaagcgtcatttcaaaaaacataatttcaatgtttagaaatttaaaaaatagaatgaaattaagtatgttgccttttcacatctcatttaaccaaatgaaagacatatcctaataataaagcttcaatatacattcataaatacgtatttaaaagctcactttcaagatgaaacaaacataaaaatactttccaagtgccatcaccatctaaacataaggcccatttgcagtaaaataagataaattaaaacctaattcaattcctgatgaatttcatatttttttagcataaactgccttggattagcatgaaatcatccaaggcagggacaggagactcttatgg

SEQ ID NO: 309894 - DNA, 1000 bp, Homo Sapiens; identical to SEQ ID NO: 120142

SEQ ID NO: 309895 - DNA, 1000 bp, Homo Sapiens
aatttagagatgtgtttctacagcataagctagtttttcctaactaaagcagtatgtacccatctatgttccaaatccttggaaattgttatacaggtgttttaagaatattagagaaatattcaaagaaactttttttggatggactaagaatgccttattattttcccacgtaaaataatggaacacagtctcctgctatcaaaaatttcactgtaatacagtattagaaactaagtattggattccagtaataaaagatgcctgcgttttccctcttccatcagaaactttttcacaaggaggaaagggtatacggaaacaaagcaatataaaatagatcacataaataagaagccaaaaaattaattttattgagtaaagaagttcattcagagcttacacagatcataagaatactttagattataacagctggaaagaccaatagctgactggaaagaagaaaggaagcagtttctattttcaatgtagaaaaaaaatctaatcgctacaaaggtcttgtaaaatcctcaaaacaaggtctagccaagtttattgtttggtaatttttttctttttttaaggggaaaaaaagcaagatttaatgtgaatactactggttacaactaatataacagcttgaaaaaatcatgacacagaagcataaatataatataaaaagacaattttaaaattgtattgtaggaatataactataataagtggaaaagatacattaaaaccatcagtgtgttacacttgttcaaaacagaactcataaggcagaccaaaactgatgcaagttaaggaaaatggtctgtttttaggaagcatgtccagacagacaccacaaagaaatgccaacagagactatgtggtcccctcttgttactagtaatgtgtcaaaggtggagtgactgggttaacagcctaagctttctccaaggatttgtagtattctgtcagcacggtccaagccttgggagccatgaaacct

SEQ ID NO: 309896 - DNA, 1000 bp, Homo Sapiens
gaaacagcacaggaaaagtgactgctttaatgtattaggcaaaattttacataaaatcagaaatctatgatctgtccctgctccaatttgtaaaaaacgcaagattcatcagaagccacgtgcagtcagatcccagctggccggcggtgcagatctggagtccagcctcagggatgcgctactttccattctctgcattgaacattcgttcctagaaacaaacagagcacgagctgtgtctccccaccctaccttgtgcaccttgaagcctcacaaggcaccatgtggaaggagggaggcccttgtggggtctgcactctgtgtgggggccacggccacagggtggccaataccacagtcaccacacaggccagagaggagccaggacccaccaagcatcctgggggcacccctgggtgccatgcaccctccaccctgggatggcctcaacaggccccacttgctggacagcacgtgaatgagacctggggtctcaccaaagttttaactctgcccagcttgaaccccgacgcccaggcccgggctctcatagggcttggcatatgtaggtacccacacacaacactcactgtcagcatccgctccagcttcactgcatcagcggcaaacttgcggatcccgtcagagagcttctccacagccatctggtcctcgttgtgcaaccaacggaaagacttctcatccaggtggattttttccaggtcactggcttgggctgggggacaagaaccagccttccatgcctgctccatgtccctgcccaccttggccccttgggttcagggcttgaactgctgcacccaagcatttcccaccagggccaggccttggccccagcaaggctcacgttggaagtgggttcagcccacagagccttggttgatgacttgagtgagatgtgttaggaaagccaagccttccgttgagttttatttcaccttcatgtttcccaagatgagttcgccccacaggtgggagg

SEQ ID NO: 309897 - DNA, 875 bp, Homo Sapiens
  misc_feature (865)..(865): n is a, c, g, or t
tttcctttcccttctagctgattttaagtttaaaactgaagaagctacccagatcaaaataagggctcaagggcactttgattctcaactctaacttatgcctgggacagcagcagcagtacccccctcttccattagaacatcagtggatctggaatccggtttgttgtttgatgatatgggcagtccccgagagcagttcttacccctccccagttgagagttcgagccaggtcattcccagtccccagaggaaggacccccacaggaggctgagggctcagctgcagttcatccaggatggaaaggatccagcccacctacaggcgtatcgggggccagaagagatataagaaagataaataagttacaaagaaaacagtttgagaaacagaggcttccaagagctaaacagaatggttttatttttctttaaaacatgtatgttttcattcagtgagtagggaacagaaaggtcgcttatcacaggcagttacaaaatggttaaaggaaaaaggaccattttgcacatgttctatcacacaagcaaaactaaacccattcatgcgtgcgtttaactagaaacacccttgtaaatttctcagagtttaagactttggtagtataacagggcataggagggaatataaaactcagaataagactgaatttcaattctgactcatgctggctgcataaccttgactaaattatttaacctcactgagactcatttacttgattttcaaaatggggataataatacgtacctcacacgattgtttactaattaaactaaaatgtacataaagcacttaacatggtacatggcccatataagtacttattaaatgggttgcccccnatagtatcat

SEQ ID NO: 309898 - DNA, 1000 bp, Homo Sapiens
tgcaatgagggcagacatattttctccagaagttcaaaatatgagagtacattgaagtaaatatacacaaggaactactaaacaagcactgagcaagtccaagaatgtcttgctagctgagtgccttgtgcaaggagggatctcagaaaacatttcctgaatttttgggaaagtaagggaatggtgacagaaaattgtgtcctgagctatcttatttggaggcatgatgtcaagaagaaattactcatatttcttcaagaatttctagaagacttcatgtagaatggggaactttaatcacaaaagagctgtttttaaaattgcatgtttaattaagtagggctatttattatcaactatgataccactctgaccattcttcctccaggttaattcaaattttttacatccttcataaaatgctaagcccaaaatcgatcctagctttgtaaatgtcttgatcaaatctcacacacttattcagtggatattttttaaactaagaaaagatcttttaaaaagatctatgtttataacttcattgacagctttttttttcacgtggttgtccagtttcatctggacgtaaatttagtttcattagagaaggaactatgtccctttttatgatctcatagaactttcaacattgtaagaatcctacaatcactggtaataaatctagaaatcatgttagagatcaaatggtgaagggtaaaacaggtgctagagagtgacttgtgatatttatgtctgaataaagacaaaaacaatttaataaactaaaacataaatgagagttcttggtttataatctaatattatttttattgcataaaattgctgaaatactgattgatgatgtgtagcccagctgactgattcaatgtcataaaaattcttagatgtctaccaatgactttcttcacagaattggaaaaaactactttaaagttcatatggaaccaaaaaagagcccgcatcaccaaggcaatgctaa

SEQ ID NO: 309899 - DNA, 1000 bp, Homo Sapiens
ccaggaatattttaccagctctctgggcatcccttagcccagtcaagttgacacataaaattaaccatccaggctaggacagtggctcatgcctgtaatcctagcactttgggaagccaaggcagggtgatcacttgagcccaggagttcaagaccagcctgggcaatagagcaaaaaacccaatctccacaaaaacttaaaaaattagctgggcatggtggtgcatgcctgtagtcccagctacttgggaggctgaggtaggaggatggcttgagcccagaaggtcagaggctgcagcgagctgtgttcgcaccactgcactccagcctgggaaacagaacaagaccctgtctcaaagaaaaaaaaaaagtagccactcacagtgggtataaaatggtatctcacttcagcttgatttgcatttcactgcaatttaatttgcattccccctcactagtgaggctgactttttttctgtttaggccctttctactttcattaacatttaaatcaatggctcctgacataacaggaagaaattaaaaggcttcctatatggccatctctgatagttatggctctacctgtcaatccaattacaccaatgttctaagtgcttctgtagtgccagaccttgtgctagaagctgtggggcacacagaggtaaagaaccctcattatctagtggtggtgacagaaacacacactacactccatgcagagtaattcaaagagctctagagacaatacagagtaccctgggagtagaggtagagaaccagctggaagttacgcagagcaggtgacctttgagggaggctagtagttatatggggacatagagcaggtgtagccagaacaggcaagggaaagcgcaggctagagctgcagataacaggttcagggtctggcaggggactgtgggtctagttacaggccttgggaaaacctcaaaggcttgagacagggaagttcaggcaataagagcctggctctagt

SEQ ID NO: 309900 - DNA, 1000 bp, Homo Sapiens
gtatagaggagtggccagatgtgaggagagaagtcttggccccggggccacagacaatgggaaatttccttggtgagaaatgttttaattatcgtaagaaagcatccccaaagttggcagcattaggcaaaaattatttcttacatttctggtttacagggcctaaattggggtctgttgcagagttgtctggcattgtctgaaggctccctctccctttcagacactgagtgtggcagcttacagtacgactgcactcagtttttcattccccattctgtggaacaatacattcctgcatgctgcaacatcacttgcagttacttcctgcaagagaaatatacttccccacctcagtgacactgggcttggcaagggattcatctcagccagtggatgtattaatatatgccactgtgcttccaccagctttttaatttccttctataagaacagcatgttccaaacgggctgcccatcagcctggatcctggaatgaaaaagacatagagcagggttgcagccaaccactgccatgcaactgagtgaaaacattggttgtcatcaagtctgagatttgggcgttactgtagcatttgtgacccttagcaaagctaactaatgtgctaaaagtcacaaactcaacacctgcagacaaggaaagcaagtgaggcagagggtgtgtgaaactatggggatggcagggctaaggcagatgggaccaaatcagcccaaggataagctccagtattaaacgttgttatatgagttaaaatttttaaagctgctgatttggttaaacaccaggtcatgattttaataacacagctaatatttacttcctgaaagcttaatatagttgaaaacaaaaaatataatgacccaatctcttaatgttttcctaatcatttaactttgtaggttcttttaggcaccaatcttcagttcaaaagaaacaatcttctgaaacttgtttgttttttttttgttttttggtctt

SEQ ID NO: 309901 - DNA, 1000 bp, Homo Sapiens
cacaactttctccgactctgattctcctgcctccctcctagaaggacttttgtgattacactggggctttacagcccagccaggacagccctgggggcttctgggatgggagaggcctccttgggaggctcccagcattccctgcagtctcgccacttctcccctctgcctgcctcaacgtccccctgagtccctgcggctcgcccatgccaccgttttcggggcctccctcatagaaggacccttgtgatttcactgagcccacctagataatccaggataacccccccatctcatgatccttaatttattaactcacatctacgaagtcccttttgccataaaaggcaacatattcacaggttctggggattaggacgtggccttctttggggggccattattctgcctacgatagcagatggagaggtgggaatttcagccgttataggtgtattgaagccatgggcttggaagggatcactagggagagtgtgccggcaaggaagacagtgacccagcccccagatcctggtggcagatagaggtcagaccgcgaaggcaccagcgaagccttgaggaatgaggagagagtaggcagaaatctagaaaaaagtgttcgaaggagatggttactcatgtttggggcttctgagaggttgaggaagatgaggacagagagcggtccgttggatgtggcattgtgggggcccctggtgaccttcacaggaactgactcagagggtgggaagtcagcttggggtgggttcagttgtgggtgggcggatggacgcacaggtgcagactttcttattattctgtaagccatgccgatacgtgaatatatttcataatgtattaaaatgtagagtgataggagttgaggaagtggagacggtatctcatttctgccccaccttcctgtgctctttagtctgtcccaacccactgtagccacatcatgaccttttttttttttttttttttttgagacagagtc

SEQ ID NO: 309902 - DNA, 1000 bp, Homo Sapiens
tcagcaaatataataggcagctgatttactccctcctgacactaatgagagccttgataacatgtgtttggttcacgcagagtcaccgtgaccttaagtaacctccatttatttcagctgagccaaaaagcaaaagccatttgtttctgtctgctctggcactttattcaaatttaatcaaacagagagtgacagtcattcaatgtcactggttggagctatgaagggtttctctgatgggtagcagagtgagatggtctggggttggggcgggaagtgagaggggtggaatttggccaggtttggcagcccccggaagaagtctgaatgcctggcagtagcaggctcctgctcctgaacaaagaagttgacagaaagggcaaggttactactgtcaccatcgagacagcagcaccatcactgtccacctgggtatcagtgaccactgaagtgcattgctgttcccccctccctaggagtgcatgcacacacatgaagcacagacgctcatgtgacactcacagaacagcgcagaccataccttccttcctggtcggccaagctccccctatggatggagaagacaggtaaggagaggctgctttggaagagatgttctggaagcagaagccttagtagagctgatgactgggcatggccatgtggctcagttgcttggctgctgctcacggcccctctgccatgtcgataggccacgtcaaaatacaccagtgttatcccatatgtgctgcagcagcccagccatcatggaacccagcctctcaccaaggcagagttagcacatgtttggaaatctcaactaggaaattctcagtgggatgcccagaaaacaggctggaattgccaaggaaagaagggttgaagaaagtagtggtccataccttttctccctttggtcctgtcttgccaggaagccccggtggaccctaatcaatcaagataaaaagtgaagaaagtatatatcagtctgaagctggat

SEQ ID NO: 309903 - DNA, 1000 bp, Homo Sapiens
gtaaggtatgtttttattttacaaaaaaaaaaaagtgacatgcaataacccatcttctaacaaactattaacgcttggattacagggtaaaaaggaaatccaaccagccctgatgaaaaaaaattcgatttcacaaagctgaaaaaatctattacaaagtttctgttgtataaatatagtcagtcttatctttaatgtagtcagacaaaaaaaagttttgttggcactaaaacaaaaacaaaagcaaaaaccctactgcttgaatacaccacaatcttcatttgtattcccagccaaatacagatgatgactatagcatgacagttactgcgtgttccaggactcaaggtaaccaaatgagatttaaacattttatcatactccctctaccaacaacagcttggacagaccactttagccctgggtcaaggactaaagcctttgttcatagaaaattgaacacgtaggccaggcacggtggctcacacctgcaatcccagcactttgggaggccgaggtgggtggatcacttgagtccaggagtttgagaccagcctggccaacacggtgaaaccccatctctactaaaaacacaaaaattagctaggcgtggtggcgcatgcctgtaatcccagctactggggaggctgaagcagaaggatcacttgaacccaggatggggaggctgcagtgagccaagatcatggcactgcactccagcctgggcgacaaagctgactctgtctcaaaaaaaaaaaggaaaagaaaattgaacatgtgtttgctctcaagtgggcggacaactctgtgagtttgctgaaaaccattgaatcgtatgttttaaaggtgaattgtataatatgtgaattatatctcaataaagctgttaaaaatatatgacatgcctaacttgctaggggagcaacaggtgaccccagtagcgtaactcaggagttcctgacaggtcacagggcagacctgcagaagtcagcacggtaag

SEQ ID NO: 309904 - DNA, 1000 bp, Homo Sapiens
aaaattattaaaacatttaatcactgaaaacacaaatccacattaggaaattatcttttaggatacttatacaaaacttaacacaggattattgacttcactgttaagcaatgtgcatattgctactctttctccttcactaatttttctatccttggaattaaagatgtgactgcaagtcttagggcagggccagaacccaacagatttttttgttttgactcagtcaaagctgaaaaggcagcatcacataaataaacagttgaaaagggtaataaaaatttcattgccctttcatggagttctgggtaacttgtctttgcatttatccaaaactgagttacagacactgatttaaatagtgcttgtaatcctaaatctgaagatagctctgttagcttttcttcttcgaagtcggtgagattattattttggtgattcataaaagggtgaattatccacaaatttcctgaacgcaagtcttgttctggtggaaaacagtcactgaacacttgagaaagtccttccaggtgctcaaaaataatccttgtgatgtctgtcatatttaagcctgatgaatttgagaattcagaaaatgaagggaacatgtcataatcattctcttgtgtgcgcttcaaccacatttttaactttctcttaaatacatcaattttattacacaaattgaagaaagtagtcaaagttccttggagacttaaatttaattcatttataagtgaaaatatatctgataagtaggccagctttccaacccattcctcatcatgaaaatacttggccaaatctgaatgcttttgacttaaaaatatttcaatctcatgtcgtaattcaaataatctttttaacattctccctcttgatatccaacgtacttcagcatgaagcggtaaactcacatgctcagatcccatctcttcacacaaaattgttaacatacgtgaatttaatgcattgctctttataaaacttaaaatttgtg

SEQ ID NO: 309905 - DNA, 1000 bp, Homo Sapiens
acaattaaaagtttttatttaaaaatctctcataacaacacattacttagtataatcaattataattcaggattttgatgacttgtacctgtgttatttcttttcttttctttttttttgagacggagtcttggtctgtcccaggctggagtgcagtggtgtgatctcagcttactgcaacgtccgcctcccaggttcaagcaattctcctacctcaccctcctcagtagctgggattataggcgcctaccaccacacctggctaatttttgtagttttaatagagacgggggtttcaccatgttggccaggctggtctcgaactcctgaccataaatgatctgcttgccttggcctcccaaaattctgggattacaggcatgagccaccacacctggcctgttatttcttttttctttctttcttttttttttttttttttgagacggagttttgctcttcttgcccaggttggagtgcagtggcgcgatctcagctcactgcaacctccgcctcctgggctcaagcaattctcctgcctcagccttccaagtagctgggactgcaggcacccaccaccatgcctggcttatttttgtatttttagtagagacggggtttcaccattttggtcaggctggtctcaaactcctacctcagatgatccacgcgcctcatcctcccaaagcgctgggattacaggcatgagccactgtgcctggcctgttatttctaaactgaacctttcattactttctttagccaaaaaacaggcctgctgcatgtacaggaggaagatagcaatgtttcagcctaagggtccaaccggagaaactaatatgcagagatggggctgtgagatggccctattgggttggaatcagaactagaagtcacacaaccttgaaccctatcagagcctcatcagctcagtttagggatagggcaggtatatcctccttggatattcactaacttgaaagttaaaagcagttttcct

SEQ ID NO: 309906 - DNA, 1000 bp, Homo Sapiens
aagcaaaccaaagaactttatttggagtaatagctaagaaaacagctttttatggaaactgaaaaagagagcagaggaagtataagagctaccccttaagaaataactttaatagttaaaaaactttcgtagaatcttactaaaaaggaggcaacattagtttaaaaaataactgaacaagaatctggcctaataaccagacctcggattagcatactttctagttatagatgtaaatcttcaaagtacatatattcagtacaagtcaaaaaaaaataaaataaaatagtgccagaccatcctttactttttcatgtccttgaaaatgagaagagtaatgtacttaagtaattccttcttaagaatgtcccttaaactataacaacttcatagcatcttgacttagaatataccacattttccaagtcctatttgtctatttatattcattatatataagtaaccatgacaacagaattgaagttccgcttaaaagactcttgccctttccaacttttactttaagttggatccctgttatcagtaatacttagatgaacctcccttcaaagtagtaaaaactaaagcattaaattagtacctaaaatcaaagtacagttgttatttataaaactattgtgttgtatcctgacatgtagcaacaaagataatataaaatgtactcagagactaatgccattatgaacagaaaagactatatataaatatatagtctttatatatatataaaaatcttttttaaaagatttttaaaataaaatttataaaaaagattttttatatatataaaaagattatatatataaaacatatatatatatttttttctggaacaacttaaaaatcaattttaaaaaaactgattaattcactattggacagatgttcaaatgctaaatttaaaattcagcattatcttctctctcttgaaatataggttatataaacagtaaaagtacagtaagttaaaaaacaaaag

SEQ ID NO: 309907 - DNA, 1000 bp, Homo Sapiens
gagacaaggtttcattcacccaggcttgaggcttgagtgcagtggcatgatcccagcctactgcagccccaacctcctggactcaggtgagaggaactacaggtacatgccaccatgcctggctagttttcatattttctgtagagacagggtttcaccatgttgcccagcctgatcttcaactcctgcctgcctcggcctcccaaagtgctaagattacaggtgtgagccgccatgcccggcctggaggatatttctgaaacgggtcacttacacagccattggcaggccttggttccttacttggtgggcttccctgtaaggctgcttgagtgttctcttgacatgacagctggcttcctccagagtgagtaatttgagaagagtcaaggtggggggccataatgccttttatgacctagtcttagaaaatgacaacactttcatctccacaatgtcctactggctacacaggtaaaaccctattcaatgcaggaagggacaagaaagttgtgaataccaggagataagaatcactgggggccattttggagcctagctgacacaatgagtaaactttcactacatataaataagaaagtgacagaaaaataattttgctcctgagaaaaattttctaatgaatacacatatatttgttcaaattctcaagttatttgactctgccaaattttcctctttctttataggtcacgttatcatactccagagattggaaaggggagatatttatttagtaagttggagactatagattaatttcttaccgaccaccatcagtgtgaactcaaaaccttttttcactgattttcggtgaacttgattggggaggtttgcaaatccaacatagccaggtgtttctggatttataaactgagttggctgttgctaaataagattaaaaaacaaacaaactaataaacaccttagtagttgcttttaagatataatcagttagacatgaaacaaacataggtta

SEQ ID NO: 309908 - DNA, 1000 bp, Homo Sapiens
gatctgaaactcatttatgcaaagcataaattaccaaaacacattctacaaaaaagagaaatgaaaccattagggtatatttggaattgtgtgttgaagttgtcatcacctgggaagaccagattcctgtagttctctaacatcacgttcctatataaattccactgtgcagtgtccaagaattgccactccatcagagagaattctatggccacatctgtaaatgtcaacagtccctgaaaaacacaaacactcacacatagacacatacacacacacacacacacacacacacacacacacacacacacacacacacacacaccaggtagccagcaaaatttataacttgactaaaggcaaaatgagagagtaaaaagaactggttctgacttacaggagtgactgaaattatccaataaaatatttatttacacagaaatatttcctaatatctctaatcctgagaaaagagaatggcataagatccacaacaccagtgtatctataatacttttctggatgataaagtataaacacaaatgtgtacacttttcagtgttctacttgcatcatagagaatcagttatgtatatgtttcagatgtaaaagatatgttgagttagaagttacctcgaaaatttgtcatttttagtagtgattttaaatagtctgtctttaacactctaatagcaagtatctcctaataaattttttagaagtttttgtgtaataaataccatcttgtttaaatcagcattttctaaacagtgttctgcatagagctaagggggagctcagatggaatctcaacattagatgttcttcatctttactaaggaccccagcttttcccaataggaatcttcagtatccgtgacttcccatgttcaacaccacaaggggaacatttttaatattgcagaccataaattcctggtgagaattttgcatggcatataagaagccatgatgtagagaatgtagagaaagctctggt

SEQ ID NO: 309909 - DNA, 1000 bp, Homo Sapiens
gcctgctcctttaccttcctaggtttacatggtaccggagccagcagcctggtgagcccgcaggagcctgcagacctgaatcagggtttctggggattgggcaggagatgacaggcagcttccagctgatcccagggctgcagcgggcatgtgcagtggcccataaatacctttacataaatacgggctgggcgacttccagtcccagggcctagcaccaaaaagcctgcctggaggacagtggccctgtgcctgcacctgcgcctgcacccacactggcgcccacacctgtcctcagtccaactcagagccgcggggagagcgggacttcctcagcccaggcccagagcgtgcccctgggttctgcagagccaggccaggaggcgcctctcttccagcggccatgcgaggcttccctcctcaaggccacaccagcctccaagagcgacaggttgctgggctgtccacagccctccacggccctcaaaggaagggcagtaccaggagctctgggcccgtgaagtgtccttctcagtggtcaccaaaggccagggtcccctctggctgggactggagaggcgggctccacgggactgcctctactagtgcctcgctggtccaccgctccgggatgtgggtctgctggaggcgggcagtgtgcccgctgagcccctgggctaaggacgggttctcggggagccggaggggcccaccttcccggcacgtgggccccatgtagccatccacacagtgacactgcccactgacagggtcgcagtcagccccacccccgcagtcacagtgcagggtgcagctgggcccaaactggccccttctgcaatccaggttacaggtggctcctgagcgccctggtgggcaaaggcagagaccggtgacagggtcacagggtgcccccccgtcacagtcacagcgctggtggcagccctctccaaatgaacctggctcacaccccctctcacagaagtggccgtggaagccg

SEQ ID NO: 309910 - DNA, 1000 bp, Homo Sapiens
gatcattaaggcatgagattatcccaagttttcaaaagtgttttctaaaatgaaaatcatgtcttcatgattagctgattaacttaggtcccctgaaaattatgtataagaattaaatgcctttgtaagagttgttcttaaaatttaccaaagtttgaaaccagtgtgctgttttacatagcctgtttccaaaagacctttgaagtcttggaacatttgatttattagatgtattatttcccattttaatcttgagtgccatgcataatggctttgggatatttttgttttatatttgtaactatgcctgtttaatgtataaaatatttaaaagactgaatatcacaaattaatagtacatttttagaatctaagaatattttctaaatatgagctattcaggggaatgtgattagtcaatgatgtctttgatgccctgccccaccacaaaccaatagggtcaactctgtgactgggcacacatcaaagattcaggcctgactctcagctgtggggtttgttaaaacaatgtggaaagttttcttttatgagcaagatataatgttcaaaaaaaagggtgttgatatgtttttccaagcagagatgtactcgactctgtcctatttagccttcccatacctgacttctaatcacttttcctggtgccctcccatctccctaaccccccctcacagggatgcctcctcccaaggctccagaaactctgaccctcgcactgctggagggagcccatgaattgctagtcaatatcgctcatcctctagactccatcctgcgtgtgcttcttcctacaagagctagagaggcactgactgataaatacctgtcacctgcccctttcccagagggtgaaactccacccactcccactgcagaaatgaatcttaaatggttgttaacatcttccaaccccggccctaaacgtataggcaaatcacaatttaggggcactagtgtgtcagaaggaaagaaaacatag

SEQ ID NO: 309911 - DNA, 1000 bp, Homo Sapiens
gggagccttcttatgtgtgggtctgtttctagtgctctgttgatatcttgtaccaacaccacactattttatttaccctagctttctaaaaataactggtaaataagtcatcctacttcttcagggtgtgactattctggctctatatgccatataaattatgaaatcagcctcaaaaaattctctgggatttttattgggattgcattggatctatagattgccttctggagaactgacatttttacgatactgatttttcccatctgtgaacatgatatatctcttcattcatgtagatcattagctactctcaaaagtgttttatagttttgtacgttgagattttacacatctttagtttgaattactactaggtatttaatatttaaatgcaatcataggtattattttaaaatttttattttctgttgcttattgtataaaaatacaattgattttggtatttttcatcttgtattcagtgactttgctgaattcacttattctaataagttttctgtggactcctttggattttctacctgtacagtcatatcattcatgaataatgatagtttcatttgctcttttgtaatccttataccttttctttctttttcttatgtaagttagaacctccagtatagtgttgaatggaagtggtgatagtgatcattactggcatgttcccagccccaaaggaaaagctttcaaccttttaccaccaagtgtgatgtttgctatagaatttttgtaggtactttatgagattaagcatgtgtccttccattccaggttttctaagagttgttattgtgacagaatgttgaattttatgaaatgcctttactgcatgtattgaggttttatcagacttttttattgcattgatatgacacattacactgagtccatttctaatggactacattagactactacattataatgtagtagtatcattatattatgtgtatgtagtagtatcatactacta

SEQ ID NO: 309912 - DNA, 423 bp, Homo Sapiens
  misc_feature (197)..(197): n is a, c, g, or t
  misc_feature (216)..(216): n is a, c, g, or t
  misc_feature (239)..(239): n is a, c, g, or t
  misc_feature (325)..(325): n is a, c, g, or t
  misc_feature (356)..(356): n is a, c, g, or t
  misc_feature (368)..(368): n is a, c, g, or t
  misc_feature (395)..(395): n is a, c, g, or t
  misc_feature (399)..(399): n is a, c, g, or t
tataccactaggggtatccaagccataggccattaaacagagatgaaacttgccttcccattctttaatatagtgttctcagaaagggagaaatgtgggcctgaatgttattgtgacttgaatagtgacatttccacccctcctcctgttaagccccagagccttacatggtggacatgggcaagataggaactcangttacttccaggtctccgnaagtttaggactgtgaggagggnatcctaatagtcaaaaaacataagtgttgggccgggggcacggtgggctcacgcctgttaatcccagcccttttgggaggcccgangggggggaggatcacgaatgttcaaggagtnccggggaccagncctggggcaaacaatgggtggaaggcnccancttcttacttaaaaatacaaaaaa

SEQ ID NO: 309913 - DNA, 1000 bp, Homo Sapiens
aagcttttaggctgggcgtggttgctcatgcctgtaatcccagtactttgggaggccaaggctggtggattgcctgagctcagttcgaggccagccttggcaacacggtgaaaccctgtctctactaaaatactaaaaattagctgggcatggtggcatgcacctgtagtcccagctactcgggaggctgagccaggagaattacttgaacccaggagggagaggttgcagtgagctgagatcatagcactgtactccagcctgggcgacagagtgagattctgtctcaaaaaaaaaaaaaaaaaaaaaaaaaagatcaagacatccattacttaaagacctaggttaggttaattaatttgtactccacgcagtagagtactaagcagctactcaaatgaatggggcaggtctatgtatactgattcagaaaggtgtccaagatgtattttcatttatttttattttttgagacagagtcttgctctgttgcccaggctggaatgcagtggtggaatctcggctcactgcaagctccgccttccaggttcattccattctcctgcttcagcctccagagtagctgggactacaggtgcccgccaccatgcccagctaattttttttgcatttttagtagagatggggttccactgtgttagccaggatagtctcgatctcctgatctcgtgatctgtccgcctcagcctcccaaagtgctgggattacaggcatgagccaccatgcccagccccgagacgtattgttaaatgaagaaagtagaatttaagaaatcaaagccaagcatggtgctcacgcctgtaatcccagcactttgggaggccgaggcaggtggatcacaaggtcaggagttcgagaccagcctgatcaacatggtgaaaccctgtctctactaaaaatacaacaattagccaggcgtggtggtgggtgcctgtaatcccagctactcagtaggctgaggcaggagaatcgcttgaac

SEQ ID NO: 309914 - DNA, 1000 bp, Homo Sapiens
ataaatggaattacagcattcaaacatgaaaattaatttaatttctggaaattaaatgcagatgtcactatattagaaaaccattcaaaaccctaggactgaatacatacaaatgagtagcaaaaaacactgatattttaaaatcactgatatgtgaaagcctcaataatcccatggctaaggaaccaataaaactatatgccagattctattacttttgaatattcacagagtatgaaatgagttagaccatcccctgaactcagtggcattatgaaaaggatgcaaatttataactgaaagctcaaatcttttggggattgctttatattaaaacaaagcttgtttgcataatatgcttcagtgtcaagctgagcaatctatgctaaaagtggtagctccaactttaagggtggtagaatagttcacatttgtctgttggattcaggatctatttgacaagttaaatcacattttcaaagagctgcatggagcgcattatgttttcatctttttggcagctttcaatgaactcatctatggtaacaaccccatctttatttttgtccattttctgaaaaaatgtttcaacgtgttgtctgggagcatcttctttgaggacaggatatgtacatttacccatcatatcgtatattgctttcattatatcaagcatttcctctttagtgatgtagccatctttatttatgtcatacagattaaatgcccaattgagtttttcttgtactgtcccccggagcaaaatggaaagacctttgatgaaatcctcgaaactcacagctccattgtggtctgtatcaaatgcattgaacagaaaatgtgcatatgttgtagagtctccctgtggaaagaactgcgagtaaatctctttgaaggtttcttcattaacaacaccactggggcattcattcttaaatcctctgtaaaggatctgaagctctttcttggtaaatttgctctgggcttccagaagctcaag

SEQ ID NO: 309915 - DNA, 1000 bp, Homo Sapiens
aatatcttgagaggtttagacaatagatgaaagttcacagctgaggccgcgcacagtggcttatacctgtaatcccagcactttgggaggctgaggtggaatggtggcttcaggccaggagttcaagaccagcctaggcaacacagggagaccccccccccccaactctactaaacattttaaaaattagccgggcatggttgcacacacctgtggtcccagctactcaggaggctagggcaggaggatcacttgagcctaggagctgtgatggcaccactgcactccaacctgggtgacagagcaagacccttccttaaaaaaaaaaaaaaaaaaagttcacaattgaattcagtacataagaaagtaagcaaagtactaattatcccaaagaaaaccagaagttctgcaggaaacacagttttgttgctacatggcaaggccagtgagtagtttatgtagtagtgatcatgccggcactaaactgagtccaccaaaaccatcagattgaggggatgagaaaggttttgggtggagagggctacaagcgggaaagcaagcctctcatcgtccatgctgggaatgtcgatgagaatggctgaactcagaagttacactggaacaaaaagcctaatttaagacacagcaggtaaaataccaaaaatcaggtaagcaaacaaagtattccttctggagaggctacgaagggggaagtgtttttctttagaaaccactaaaacttttacttttaaaaactgcatattgacaggtatggtggctcacacctggagtcccagcactttgggaggtcgaggctggtggctcacacctggagtcccagcactttgggaggtcgaggctggtggattgcttgagctcaggagttcaagaccagcctggccaacatggcaaaaccctacaaaaaatacacacaaaattagctgggtgtggtggtgcgcacctgtggtcccagctactccagaggctgaagtgggaggat

SEQ ID NO: 309916 - DNA, 480 bp, Homo Sapiens
ccatagaaaagaaggggaaagaaaacatcaagggtcccatagactcaccctgaagttctcaggatccacgtgcagcttgtcacagtgcagctcactcagtgtggcaaaggtgcccttgaggttgtccaggtgagccaggccatcactaaaggcaccgagcactttcttgccatgagccttcaccttagggttgcccataacagcatcaggagtggacagatccccaaaggactcaaagaacctctgggtccaatggtagaccaccagcagcctaagggtgggaaaatagaccaataggcagagagagtcagtgcctatcagaaacccaagagtcttctctgtctccacatgcccagtttctattggtctccttaaacctgtcttgtaaccttgataccaacctgcccagggcctcaccaccaacttcatccacgttcaccttgccccacagggcagtaacggcagacttctcctcaggag

SEQ ID NO: 309917 - DNA, 1000 bp, Homo Sapiens; identical to SEQ ID NO: 120144

SEQ ID NO: 309918 - DNA, 1000 bp, Homo Sapiens
ggatcagtagtgttgttttattttgtagtaatttttttttttttttggtgatttagcaaagtttctagttgttatccatgaggatgatgggcatttccccccaggtattgactgcagtggcccttctcttctgagccaggatgttatggtggttgtacatcccatggcagatggggtggcctgactttcaagtgggcctctttggaggcccctggatgctaggctagggatgctgagctgctgaccagacacttcctggcaacattgggagggacccatgaggaaacaatctcctgtttgaagatacaggaagatattgccggaatcaggcgtctattctttctcctgaccagcaggccaatctcaggggaccaggtcttcctgggcttggcctcgacacttcctagcaacatcctttgctgagtgtgtgaaaatgctgcttctccaaataaacaaggacaatggggaccaaagcctgtcttggacaggatttccagcctcccctggtttctgccaatgagatgtatataatatacaaggttaaaaaaaacacagacaacagttctcatttaaattgtttattatttatttccatggaattttgtttttctttattaagaccaaaaatgtgtttctcattaaaaaatggcaacttttatgggccattagtggcctgtgacttcacgaatttgcagtgtttctgaactgttcacagagtctacacttgtaatctgaggagccttcctactcctcctcatcgtcagagggctcatttggagacatgactgagagggaggccaacagagcatagtaacagatattgtacaaagacattacactaccattatctgagtaaaccagactactaagaatccctgtgccttccatccaggtagtagccgaagatgtaaatgtgacattcccagaggtgccctcccaacttgggccatttggttcctgagggggcccatttcccaggggatgcctagtggcactcttc

SEQ ID NO: 309919 - DNA, 948 bp, Homo Sapiens
tcaggcatgtttataaaaatgagagattatgtcctttttggcatacttcatcttcttcaggacacagagagaagcttgcttcagtttgctgtcccgtaaaattagaagaaatgaatggccagatggatggaaaaataccagcacactactaaaagtccttgccgcaacgaagtctagaagaggacaggccaatgttagtatgatactgatgaaataatgcacaataaagaggagtagaaatgaaattatagcttttataggttttacatgggcttctgtgctgggatccctggaataaataccatgtagcttcatctgcctggtgtggctccataaggagaggattaagagaagaatggaagccagtgtttccacaaaaggaaggatgaacatcatctgaaggagaaacagagaagtgaaatcatgcatggtatccatataattaaatgtcaagttgccttttattgttacccgttcttagattaaactattaattattatttccttcagaatggaagttgtgcagaaagagatcgttgcctctagtacaataaagagaagcaccttgtgaattttccatttcatccagaggaaaatgggattggagaagttggctaccttgaggaaatagaagacactgaggcaagtggtacaggacaggcagaaatagctggatcctgtccagagaatgtcaaaacttactgcaagattcttagaatcaggcattttctcatagcctatattgaaagaggtagctaaaattgttatctacaggaaacatatcctggagatggccaagcagttgagaataaaatcaatcagggagacctttcagttcctgattcagtcaatgatattaaccaatacaatgaatcaatttcccacagtccccattatgaattacactacaagaattcttataaacagtgtctcccaaatgcttgacat

SEQ ID NO: 309920 - DNA, 1000 bp, Homo Sapiens
aaaaacacaaatgccatcggcagagggtacagctgagaacgcctgggtcccacctgaggggcagcaccagggaatccatggtccaccaacctcccccaatccagagcaggtagggggtggaacccccgggtcctggttgggcctcaggctctcctcccatctggggaggaggtgggagagagagctgtctccccgcaataaataagtgcagccccaaccctcaagagtcagattcaggctcagctggaatatggagaggccaattcagcagcttgtcagcaactttgtccaggggagggaaggattcctttccaaaggtgggaggtgacactcctttgggctgggctgcggagttctgctctctgctccctaagaggccagaggcagcccctggatcctaggctggtgatgggggtccggccccctatggtgggagaagctggggcagtttcccactggttggtctagccacatctgagttctgagaattgggacataggagaagaaagcctctcatggactcctggagatggtcccagaatggagtctagctggtgcagtttcctgctgtaggtaaggctggactggatgagctcctgccttcttcctcctcctccatagccaagtcctgagagcttgaagccttggccccgccttgggcctcctcgcagccctctccctcaccactgccgccaccgctgctgccctgctcgcctccaccctcttccatgggctccagccccagtccatccagctctgagaagagtgggtcatcagggtgaccaggatcttgggtgctgctcccacagtccacacaggccttggtgagagaaatggacatgagagagtcagacagggttctcactgctaacctgccagcgcagcttcccacccccagcccactgtgcttcccgaaatgtactcccaagaagcaccagtccacacagatgcacctgcggtccaacaaggttggacagtgccttgtgccctctacccagat

SEQ ID NO: 309921 - DNA, 1000 bp, Homo Sapiens
gatcccaacacccacaacccagacccaggaaactaggatttttcaggatggggggtgtggtctgaaatctgcatttttaaaacctaagtatttcaggagattaagatgcacagcagaatttaacattcactgtactgggcaggttcccgaatttatccatttcagtttccacaatgcccagcactaatattggttatttcagtgagggaagggactcctaattggtcttcctgcttctggacttgcctccttctgtctgttctccaacatcatccagaatgatgctatgaaaacacaagtcagattctggtcacttctctgctcaaaacccctcagtggctctccatttcactgagttaagctgaagcctttaaaatgggcccagagataccttctatccccctgagctgtctgtctcttctcttcctggggctcactcagctctagccactctggtctctttgttgtttcaggaactcaccagatactctccttcctcagagccttttcactgactgtttcctgggccttaaacactcttcccccaagttatccacgattccctccctaacctcctttcattcgttcaacacattattactgagagcttacaatgagccaggccctgttctagttgctggggacacaacttcaaacaaaacagatacaagtccttgccctcaaggagctgacattctttaggtctttactcaaatggcaccttctcagtgaagtctgtgaccacaatatctaaaattgcaccatctgtctggcgtggtagtgagcctgtaatctcacctactccagaggctgaggcaagaggatagcttgaggccaggagtctgaggctgcagtgcactatgatcgcacctgtgaatagccacaacactccagcctggtcaacatagtgaaaccttgtctcttaaaaaaaaaaaaactaaaattgctcacacacacacacacacacacacacacacacacacacacacagagtcttcat

SEQ ID NO: 309922 - DNA, 1000 bp, Homo Sapiens
aagaccagcggggaggcttacagatcacctgcccgttccgcggccgggagagggcgctcgccctttacggtctccctcccgccctgtccctgctgccacccgggtttctcacctggctgcagtgtccaggtccccttgggcggagaaggcgaggagcaacagcaggatgaggatgtggatagtcatcgtgggcagggcgggtcaggatccgtggcccgtagttgcggccaccccgccccgttcccgcaccgggctgatcgcctctgggtgcagctctggagccaggtaccagggccagtccccacttcccaggcggggaacactgaggccaaaagtctgtgggaagaggccgcaccacaccagaggggcaggattcaaacccgggtccccgcttcccgcaccgcggctccagagacctcactgggtgtgtggggtcacaccagctgctgtctatccccctaggaggtctgtggagactcgcccccttcaaagcgtggggaaatggggcggggccaatgacacccgcaggtagctaagcagcgggattccaagaaaaggggtggcggcggggaagcgctggctctggttgtagatgcgacctcaccctcaccctgtcgggaagccggttagtagacagttgggaccctggaacctcgggggccaggcaatgcagggcaagtgcacatgcggccccctggagggcgtggagcgagggagaccccaaacacactgaggagcgcccctccggaagagaaaaggccgaggtgtcaggcactcgccggtgagggctccagttgcactgaagcaggtgtagccagggctgttcaacgaggagggtgtcctgggtcaaccaggtcgagtgcacagtattgtgggggacccaggaccccgtggccaggccctgagggtggaagggtgggtgcagacgccatgtctgcagcagaggcagagggacctcgtcttcacctctgtaagatgggtaggccctgccaccttacag

SEQ ID NO: 309923 - DNA, 1000 bp, Homo Sapiens
gatcttaaaatcctttttatcagtatttgtaccagtcaggaccaataaaaggtaataaactcattaaaattttggtctattttaaccactgagtggaatgaagaaggcagggtacaagttacaactcccacttcaacaaatagaaaaaaatgcatacatcccaaagtcaagtttgtaagacatcgaagtagggaggatgcaaagaggactaaatgaactgtttccagagatggaatatttcttgggaaagatgagaccaacagttttcttcatggcagcatttgccaaatctgtgcacatagtaaagattaagcttgatttaagcaaagaactcctctaggagaaacagaaaccctcagagctttcggtggacactggcaggggaatctaaaggagccccagacatgagtgctaaggtggtgcaaagcagagaaggaactcctgtttcttgaaatgcttaaaagataaagtccctctagagggaggggtctgcaacaaacacagggcatgtctgtactttagagaaggactaactttttacttgcggtggaatccaacccctatgtggctaaattcccagttgtactgagatgattcgttctcagtctacctgcataagagaaaagggaaaatcttgtttgagaggaaagtaacatcaacctctctctctctatagttctaacatgtatagaaacgaggcatctgaataaactggaaaacgtaacgaaagaaaatgaaaaaaaattagatgatataaggacacttcctcttctccctagctatggatatcattggactaaacagataaaagctttaaaataactaacgaataaatttaaataaaagagaataaacgatgagcggaatgaaagaaaagacaattttaacatacaattagaatcaatataaaaatcaaatgaaacattctagaactgaaaaatataaaatacatgaattaaaaactctagaatgtgtttaatagctgactagacacagtaaa

SEQ ID NO: 309924 - DNA, 710 bp, Homo Sapiens
cacaaacttccatcaacattgattagcaggaaagataaattaaaaacacagatacccaataaataaacataaaataagcaaattgaatatactaatttttgacttcctggaataaataaattccatcaaaaacatttcatggacaaaaagtgacatgcttaatgagaagctaaacagaaactgctattattattgctgttactattattatgtcagagacagggtctcactctgttgtccaggctacagtgcagtggagcgatcataagtcagtcactggagcctccaactcctaggctcaagtgatcctcccacctcagcctcccaagtagctaggactacaggtgtgcaacaccatgcctggctaatttttaaaatttttgtagagatggggtctcactatgttgcccaggccagtcccaaattcctggcctcaagtgatgctcttgccttggcttcctaaagtgctgcgattacaggtgtgaaccactatgcctggctaaacagaaattattacctatagagattaatacctgctgccaataacgagctacttctggcaaattcagagcctcacagagataaaccaaattcagaacatccttttggaagcagctcccaccaaaccctgcagaaagaaaaaaatgaacaatattttcatgtaagaacgagaaaactcaatcatgtgacaaatttctttatactaaatc

SEQ ID NO: 309925 - DNA, 1000 bp, Homo Sapiens
ccactgaatgagtctctttttattctcttggtaatctcttccagttaactacttccgttgtaggtgatgaaatgggtaaggctccacacttcagatgttggcactgctatgagcatggtctttccctttattgcaactcaaaatcagaacctttgattcttttttatattccagtcccagaagtagtctccactgtagaagttaattgatgagtagtagcctacaatcaggctctagcttctccaggaacactacaggatcaatttagtttaaatatgcattaaactaaaaggcattctctcaaatgagtttaaatgcattttatttttagacaacctacatgacatgtttttcttaaaaacaatgcctccactccaaataaatcacagtcaaaataaatgaagagctcaagatgacatcagtcccatttgtcttaagtcctggtgttgtgtggatgacaagcagaagccagttatgatgacaggtgatagatccaaaataattgccacatttgttactgtaaaagcaaaaactacattaatatttttcaaacattacactgcaaaagttacattaccattaacatgcagcctacatttccaggctaaagatgtattccccaattcaatctgggccgccacaaagacagacagaaagcgcagggatttctttcttttgcatcctagtgcaaaccaaaagaacaacagtaaattgttcaaggtctatcagtggatgcagaacacccttaccaaatcagcggtagctcatttttcagaaggctgtggcatgtaccacccacaccctgctctaccaacaaaaacctcagatactgtctgaataacccctttggtaagtcatcttatactgttctaagtaatttctgtctactgttgactctaatcttgttcagtatagctttatgtttctcttcttccttatacagaagcctatgaaaacataggaagacaccaagttatttattattagtaaaacaatttgc

SEQ ID NO: 309926 - DNA, 1000 bp, Homo Sapiens
gatcctggattctcttctgactcttaaggacattactgcaaagtcagaatagggtctgtagatttgattttatcagcgtgaatttctgattttgataacttgatacaaaaattccttgtctgggggaaatacacactgaaggagaggtaaagggatgtcatgtctgccacacactgacagtttaggaagaagtgcagggaaagagaatgagaggaaaggattaaaggcaaagcagggaatgtcgccacatgggggtcctgggtgaaaggtgtctgggaattcttcctattattcttgcaattttggggtcagtctgaaattatgtccaaaaaaattttattaaaacaaaaacaacaaaaaagggaagtgtttgggtgaagagccaagaaaacccaggacagacacaggcttggtcacctggcacttccttctggaaccttccacacaaagggaggtgcagcccacctacatctttgccaggcactcaacagggtctggggagcactacgggcaaaggccacctgtccgtccactgcccccaggcgaggggatggagccacacagagcggggatgccagcagacttgggcccccaagcaggctcccacccagtcaggaggcaacccctggcagacacaagaggaccagtccatgtttcacacttatttataggtatctgatgttccataattaaccatttaaaaccataatcattaactaaataatctatgcatctacaaacctgccttgtaatttcatggttgtctgggagccccaaggcctgggtggagagggacagcagtgcagagtggcacgtccgcccctcactcctggccctggggcccgccaggtctagcaacctcctggagtgtcaccgtctttctggggcctgcggcctttggaacagaccagacagtaaggatgaagaggctgatgacgaggtcctggagcccccatgcaggcatgactctgagtgcctggcatggctgaccagcccacca

SEQ ID NO: 309927 - DNA, 1000 bp, Homo Sapiens
cccctctacctcggtgctgccttctcttttcatcacagtggaagggcatcttggggaccaccgagcaactttgctaggccagagccacaggtaccctctctgcccctgcactcaccttgctgcctaagctgaaggcagagggcactttgggctggcccccggagtatacccaggggtgcggggtcaggggccagtcacatggatgctctgggggcaggccagacactaggtagggtggcaagcaggtgggcacccagaagggagctcgctccaggatcttggtctccagaaggaaagggcagtgccagggccggaaggccacagggtcactcttgagatggccaccactatgctcaggcatcagggggccacagcgaggtgggcacgctggcccgcagaatgccagcggatgggtaagcatggcctccttccagcgcagtccctctttgctgcccagccagttgaccttcctctccccattctgggggccctcgccctccacaagtgggagcatgtccttggggccctgggggaagccagggggaagccaggagtctggggtgctcaggacgcccctccaaaagggagcaggctctcccaggcacagcggcccatggtgcagtccatctcgaggcgggctgccgggctcctgtctcacgatgccgttctctggggccgtcttctcccaggttggggtgcccttcaggaagctgggcgtactctccatcactctcctgccctcatggggctctcccagaggggggtccctggagcataaccatcaaagcatgagcttctggggcacatgtcccaagcaccttacagcctggcacagagtgggcaccgccctggcaacactgaggcagctcaaaccagtaaggcaagtgccagcccacaactgggcaccatgctgcctctccacatgcaaccagacacatcttgctcctccagtgtggggatgttaccccttccccaaattccacctgggccagtgcccctc

SEQ ID NO: 309928 - DNA, 1000 bp, Homo Sapiens
tttttttttttttttttttttttttctccagttctgacacctttttaatagaaatcactgtttttaggaaacaaatagcacttttgtaatttttttttacaatgtttcttaccttgatcttaatttaagtaacactaggaagacctcaatatcttttattttcctttttaatttaaaaaaaagttttttttccccagatacaaagatttttgcccttgcataaaaaaacagtgcccgaacgatgacacaaggactcacaaagactcacgggacctcactgacactatgattcctactctaccatgcaaggtcttggctacccttaattggactgtcagcctgaaaaacagcttttctattccttattttagtttttgttaccaagaaagtaaaatgaacagtaaaataaaactttccttaaagaaaaaaagaacaaaaacaaaaattaaagaaagagaaaagaaacgtctccattcaattcacacacacctgggtcgcgtgctgcttcactcaagatcttctcttcttataaatatagaaaagggatggagcttgttttcaagtaaaatcactgatccacctttttttccttcctggacacacacatccttcttccctgccttgggaaaagggccagtggcccgggctctgcttgttcttggagaggagacagcggggataaccacggagatgcgcgactcaccaagcagggaaggaaggagattgggcaggcttcaggagtggtggggttaccgcgcagggagcagagtgcaggggagaagaacctactggctgttcttggtgtcagtctccccttgcacgaggcccccgccagaggtgattaaatactgcttatttgatacactgtcccaccccctgctccctccagccactccccttccctcttctgggcactggggttggtgaaatctcaattcctttttttggttttatagtagcgaaagtttagaaacaggaaagcccacacactctttggact

SEQ ID NO: 309929 - DNA, 816 bp, Homo Sapiens
ttttattaatcatattgttttattaactgaaatagtccactcagtcagtaggattaatgatcagagattatgacacaactaaaaccaaagctggggcaatgggctctcagaatggaaccacccattatgaactatccatctgaccaactctttaactttcttcctaaatatgagatcaccaaggcgtttcaatgcagcctgcacaattcatggggcagggtcctcagattaaagactttacatttatgtagaattcagtatcattttttactaagcaaactctatttgctcactctcttctacatgtaattgtccaactttggttgactgctgagtcctcatggaaggattcccattctgcccctgagcctctcctttagggacttggaaacggaaggtagtgcagttctttctggccatctgccaggcatggaaccccaggcttcttggggtaagttcgacgagcaagcttaaagaactcttctgcagcatcaagtgcaatgagacggtccacaacaaagagatatctctctgagagctcccaacttgttgggagaatattggtttcttcagccagttttaacaacatctctcgagctttccttgtgtttttagaatcactgatggtgctgagtttagtcactgacaacaaagagtcagcttccttttgaaaacctaaatcttctaagatgcacttccatctgtttcttacttcccttcgaacctgccgcagggtatggatatcatagttgagcttctgccactcctctgagtctttggcctgctgattacgaatgactatcaaattgtacaggg

SEQ ID NO: 309930 - DNA, 1000 bp, Homo Sapiens
tttttttttttttttttcagtgtgtcaatttttattataacatatagcacatagtgggaatatttggttgaaagtaaattagaaataaaaaagggggaaagtaggaagaaaaatcccttcttccaggtctgaaaatcagacaaaaatccttaaaacttgtagccttgccatgctacaccacatctgccaatacatgaaactgacccattagtgctctgctggatcagcctgcccaggcactgctgcctgctggggctgctgtcatcctctggccgctcctccaaagagggacaatgggttttactcagggctaccactgttgctcctgactggggccaccatggtgcccaggcttcaggcacagggccctgcctccttccccgcaccgccctccaggtggtccacctcgtggctgtcagttcctgttggacctggagctgctccggcttcctgaggcctgttgcttttacatgcatcatccaaatgcttgtgccacagtattgcatgaaatcgggaaccagtctgaaacttgtaaacattgcctttgtcagggttgttcagctggaagatatctgggtgctcggggtcatcgggcagctgcaccatccagcccacgatggaaacgtgttttctgtctgtgccccgcaaggacttggctccgtagtacaggagggtggatcctgagagtatgacccagtacctggtccacgaggacagcgcaggcttccgcccttccttgagcagggtttttcttctcagaggcccctccatggtgggcacagctgcggagttccccagagaacagatgcacgggccggtggggctgtagacacagctccgggttctgggagaattcctaactggaacccgccagttgggccccagggtggcatagagacgtcccctgttgttgcctaggctgtggctcttcctgtgtctggggactggaggtgtggggaggctgccagcaacagatgtgtcaggacaggtgggcctccgg

SEQ ID NO: 309931 - DNA, 1000 bp, Homo Sapiens
atgcattatgatggtttccttcagtcaatacaaatatgttgtgtgagtttttttttcatatgtaataatcttcatcatagccaatgttcatggttttaacaggaaaaaattttatcaaaatgttttccatattttttttgttttgcattcaactggaacattatgttcaacgatttatgttatttattttattaaaaaagagttctgatcataagaagcatcagtaggcggcatttcattgtgctcattcacaaagtcaaagggccacagaatattactctgtataacaggtcaaactgtctagaaatgccatttggtggttttattcacatccttaagattggaagctttgtgtttcactaccaaccttctttctttgctgcattaatctgcagaatatttattgtttcttctttcttctatgttgagattcttttcacagccagggctcgaattctcttagaccttattccaattgtcttacaaagcagaaactctgacaatatttcctcctgagtactcaggggattctggcctatcgtctccttctggtgtggttactggaggtgttgggatgcttattattgctgtagtcacataaggttgttcacagtttagtttaacacactcttccattttggcatttaaactggatcggctgatagaaaaaaaaatatttaggaaagtaagttgtttacttaaaatgtttttcatacaactgaagaatatgtgttgtaatgcttataaaaatattttaattgtctaaggaaagttattataattaaaaatatgaaacaccaaatcttaatctatgttaaagatgaacatagtaattaacattaaataaatttctaaaagacagtttgacttggttccatcaagtatttatcaaactaaatgtattataaaaaaatgtaagaaagaaagagcttcaagtaagatttggacagcctgggctgagcaaagaagttttatttaagacagacctctgagaggtttg

SEQ ID NO: 309932 - DNA, 1000 bp, Homo Sapiens
gatctgcccaccttggcctcccaaagtgctgggattacaggtgtgagccactgcacctggctgacgtttcacagtttggtttggacaaaaattaaggtgactgagcaaccacatagtgccaaacaaattttcaatgcccccttgaaaattgagtgatggctattcctataccaattacagctgtatccttactctactctgcattcacaaaagataaaatttattgatactctcagtggtagtgtatgcaaggagctgagcctgagatgttaggcggcacctggcatcaaaggtccctgctgttgcccacgtccctgtgctctgggcctctgatgggaggagcagcctccaagatctgtgaaatacttctggggtcattcttccattgtcttggacaataggtcctggtttgagtcaacatggtcaatccatactaatctcataaatcagttgttcagccacacccttgttttctccaggacagggttttgcatgttttccaaagtagataagctgcaaattttaaaagtatttagttctctttaccttttaattagtaattccggctttcagtcacttctcactttctacattttactataggtagtcaagattattcaagatgcaacttcaacacattgttaagaaatagtgtcagctaaatattcaattacattgctcacaagttctacctaccaaaaaacactaggacctgaatataattcagccaaattatttacccctttataacaagaaccccgctttcttcagtttccagtaacatgttccacatttctgactgaggtctcatcataatggcctttactgtccatatttctatcaacattctgatcgtgaccacataggtttactctaagaagactgatgctttctctagctctcattctgtccttctgagccctaaccagaattgtctttaacagtccaatcatgacaatgtaggtttttcctagcatgcatttcagaagtctcccagcct

SEQ ID NO: 309933 - DNA, 1000 bp, Homo Sapiens
gatcctcccgtcttagccttccaagttgggaccacaggcatgcaccaccatacccagctaattttttaaacagtttttttgtagagacaaggtctcattatgttttctaggctggtcttgaactcctgggctcaagcgatcctcccacctcagcctcccaaagtatcgagattacaggcatgagtcatcgtgcctggctagtattttattttattttatattttattgtattattttattttatttttgagagagtctcactctgttgcccatgctggagtgcagtggtgcaatctcggctcactgcaacctccgcctcccgggttcaagcgattctcctgcctcagcctcccgagtagctgggaatacaggcatgcaccaccatgcctagctaatttttgtatttttatttcttttttttgagacagaatttcgctcttgtcacccaggctggagtgcaatgacgcgatcttggctcacagcaacctccccctcctgggttcaagtgattctcttgcctcagcctcccaagtagctgggacttcaggcataggccaccatgcctagctaatttttgtattttttgtagggacagggtttggtttcgccatgttgcccaggctgctctctgtccctcttgttcccatttttcagcctttccatttactgtcccctttgcctgggacaccacagcctcgctgagtcatatggtatctttcaactctcagcttcgctgtcccctcctgcagaaggccttccgccaccagccggtttacagggcttaccacaccctgctcactcccacacccttcagaccacagattataacctgcaattacttcgtgtatttcgttatttgcatctgccccttcccactggactatcagcccccacagtgggctctctgttttgttcactgctgtaccttcaggaccagggcagtgcctgacacacagtaggtactcatactcatttgtcaagtgaaggaagcatcatgaaa

SEQ ID NO: 309934 - DNA, 1000 bp, Homo Sapiens
ctagatccgacggacggggtgcctatggaagacccgattaacggacgaaacgtggacaaggaagagccctccgggaccgtgggatcgtggaccacggacacggtagaggggagagacagtcctgtgggtctccgggaacacttatcgttaagggtgaattgccgactcccgtccacccccataaaggaagagttaagacgagttccgggcaacgacaagaaactcctacaacgtttaggtcccaaacctcccgacccggagaaccaccggaccaacagatagactatcccgcctcgaagtgggaacgtcgctcgagagagtgtggtctacacgagacgcaccttaggatccggtagtcccctaaggaatcgttcgggacgtcctgggtttaggattgagtctgggagtaggaggatgagtcttacacctctgaacactaggagtcaaacctgcttaaggttctctggaaggttaagggtctccggtagaaaccaagacaagtgtgtatcgagggagagggaggatccggaagagggaaacttaaagaggggatgtggtagtcggacataaatgaagaggaagaacgaattacgtactgatataatagggtcaattcccccagacgtccaaaatagtctttcaagtctccgagtgtactggacctaaccttgaaccgagtcggtgactgatcggtctgtttgagtttattgcatgtgtcgaagagtcgtggagtgggggagtaagtattttttgtccctgttaccatgggtgaaacgtcccaacaactcacctaatttaatttgttgtgttcctttctcgaaaggattcaaggttacgatacattgtgtgtgtcataacagaatgggtcgttattaaagccacgtgcctagactagtagagaattaatttataacttaagaggattgtgccaagaaaaaaacttggggagtcccagacttgtcaatattcacgtgtcttcaacccagaaatactcgactta

SEQ ID NO: 309935 - DNA, 1000 bp, Homo Sapiens
gatccattctctctgggcttcagggagagggacatgcacttctggggtttggaaacatctgttctaggtgacatgcgggaccctggaggggcttccagtctgggggacacgtacattcagccctgtggggttagggttggggttggaggaggccagaagggttaagggaggcattctagagaatgagttatttgaaaagggttttgaaggatgagcagttgttgggaagcggcattccaggcagagggaacaacttggctaaagatctggaggctggattgagtctagggttcactgtaactcaccaaatgccgacatgccccaccccccgccacaggtgggtttcattgactacattgctcacccactgtgggagacttgggctgacctggtccacccagatgcacaggacctgctggacacgctggaggacaatcgagagtggtaccagagcaagatcccccgaagtccctcagacctcaccaaccccgagcgggacgggcctgacagattccagtttgaactgactctggaggaggcagaggaagaggatgaggaggaagaagaggagggggaagagacagctttagccaaagaggccttggagttgcctgacactgaactcctgtcccctgaagccggcccagaccctggggacttacccctcgacaaccagaggacttagggccagccctgcgtgaactgcaggggcaatggatggtaaagccctttggctcttggcaggcagactttccaggaagaggctccatgtggctcctgcttcactttcccacccatttagggagacaatcaagctcttagttataggtggctcccagggtctaattggaggcacctggctggggtccactctgaccctagacttgcctaaaagagctctctaaggggcagcctcttacgatgccctggtgtctttctcctgggcttctatccctgtgaggagaggtgctgtctgctggagcctctagtccaccctctc

SEQ ID NO: 309936 - DNA, 613 bp, Homo Sapiens
tttttttttttgattctggctcaggatgaacggcactcaaggaatgtttaataaggaataaattaatgaaatcagattagcgtggttccactactttgtgaccctaggcaagtctgaaattcctcttctaaaaaagggagataaaaaatacctacttcatagggttattatgaagattttaaaaaccatcccaacattctctccagttattctctatcacctaaatctggtttgctgtctttaaggccatctgaaattacattatttattgatttttatacttattacctgtcacctccactaaaattcatattccatgtttcatccattattctatcattcattcattcatttaacaaatgtttctctgtgctactatgttctaagcactattctaggcactggggatacaacaataaacataaacaaaaagctcctgctattatggcaaattaaaattagttaagtaaataaatgaatatattacaaaaattgatgcaaactctgcatctagtatacattccatcatcaaaatgaaatctgagaaacaaatatttagactctgaaattagaaatttgcatttcaagcttacagtgtacattagcctgacca

SEQ ID NO: 309937 - DNA, 1000 bp, Homo Sapiens; identical to SEQ ID NO: 120146

SEQ ID NO: 309938 - DNA, 1000 bp, Homo Sapiens; identical to SEQ ID NO: 120147

SEQ ID NO: 309939 - DNA, 1000 bp, Homo Sapiens
acttgctcttttgtctgttacttcctgcaatgttttacaatgatttttagcttccttgtattggattacaacatacttctttcacgcaatgaactttgttcctacccatatcctgaactctgcttgtatcatttcagacatctcagcctcagcccagttctgaacacttgctggagagttgatgcagtcatttggagaaaagaaggcatgctgaatttttgagtttttagtgttcttgcacagagtctttttctcatctttatgggcttatccatcttcaatctttgaggttgctgacgtttggacagggtatttttcctttattatatctgatgaccttgaggatttgattgtggtgtaaggtggattcagccaacaggttttgtttttggaggattttaaggggccaacatgcagctcccaattcttggactgtgtgctttaactctggggaacttgtattgggccacaactttgttctctggctcctcgaggtttggagtccactgcactgaggggaccaaagtgcggcagctgtggcagaatgctaccagatgcaaaagtccctgcctccctgtgggcattcacccagtggtggaggcaaaacagctggggtgtgggccagggggcccctgctgtgtgtgctgttgcactggaggtagtgctggtttggggtgggtggctggccagtgaaggtgccttctttgatcccccccaagcaacagtggtcactcagggtataagaaggtcccttttcctctgcacagcattacctcaagggtgagatgctagcaggggtggggtttttggttctgtgcccaccatggcttcatcttcagtggcagttggtgtgggttggggtgtgtgctgcattcccatatgctgttagggcaagtacaacaaaacccacctgtgtaaacacacacagcaaagtgatgtaggaagtttccatataaagggctgcagtatggagaggtaatgtgcaggctagtgcgtggct

SEQ ID NO: 309940 - DNA, 1000 bp, Homo Sapiens
acactgcccgcgacagggggcgggttagggccgctactgtggttacactgccggcggcgccggggtggggggactggtcggggtgctgactggtctggcttcattgcccatagtggggtgggggggtggtttgggggctgcaccgcccgcggcgggggacttgttgggggcgctatctggggctgcaatgccccccgcaggggataggttaggggcagtatccggtggtacactgcaggtggggggggggcgggaaaggggggtacagggaggtgattggagggggtggtttcaggccctatcgcgggccagactactcatgatagaggggggcgttgggtgcgctattgggggctacactgccagcggcaaggggcagtttgggggcgataccccaccggtggcaggtggggaggtgtggtgggttgtgtgcatcattagggggctgtactgtggtcagtgggagcgagttaggggagctatcagctgctgcactgcctgtggcgggagtcaggtttggtgcgctatcgggaccatattctcggtagtggcatacgggttaggggagctgtcgggggctaagctgtccacggggcggggggtgcgggttgggtgcgctatccagggcatcataccccgcggctgggggatggttgggagtgctatccgctatctgggagggcactgcccatcgtggggagcgggttgggggccttaaggatccgtggctgcactattcacggcggggatcaggttgcagcgctttctggggcgtcactgccagcggcgagggagttggttgggggtccaatccgtggctgcatggcccacggcagggggcaggttgggggagttatctggtgctgcaacgtctgaggcggggacgggttcgggacgctattgggtttctacactgcagcggcgaggggagggtgttaggggcgccatcccgggtccaatagctggcggcgggttaggggcgctatcagggggtgccctg

SEQ ID NO: 309941 - DNA, 1000 bp, Homo Sapiens
gtttgagttaggaaagatgaaatggttctggagattcatggtggtgacagttgcccaacaatgtagaggtacttaatgttactgaactgtttacttaaaaatggttaaagtggtacattttagatttatgcactttgcatatcttgccatttaaaaatgtgtttatctctatatcttgtcatgtagcgaatcaaacgttttgttaattgttgaaagagaaaataggaatgggagatgggaagaaatatgagatggacccttgacctaccacttttaagaggaagatgttacttttaacctgaagaataatattttctccaggtttgcctgtagttgtttccaatgcattttcactgcaggttttaggactatcattgccacctttgaaatctgtttacacagatcgtggtaagtctcattctctcatgttatgcatcagcgttcttcattaatttaggaaattgtttgttcaacaaaagcctatattatttgataatggtctctgaatcccctggattatggcagggattttactttgtaataatctcccatgagaactggccaaacagctgtgaaggcaagagagagctacaagaggcaatcatatttttcaaagcagggcaacaagagagtgaagctggtcaaaatgaatcttttctgcatttcgctggtaagttcctttatttgcagcatttatgttctcattttaattttactgtgtcaaaaggaatgaaattaggatatattctaaacttcttatgtgatgatattcatacacttagcatctcagaaagttcacatcacaaagaacagtgagaaaggatgctttcattaaagcacttaagccaactctactcaaagacaagtattaaaaagagttctgcaacaattactattatttatcattttgatgttgaatttttaagtataatgttctgggaacagtatttttgagaaataattttcttctatttgttatgagacaaaattttgcaaaata

SEQ ID NO: 309942 - DNA, 1000 bp, Homo Sapiens
gataattaaatgctgacttttcaagaaattcaagaaatattctaattcagattgttcatggagagattagactcctgggattggagctgtggtttgcagataggtcccagcggtacatgtcagataaatattcaggttaaagactgagaaggtccatccaaaattcacatgcctagttcagggtgctgacagacttagctgtaggtgggtcaggccttcaaccacatgggctactcatgacttggttttatttccagtagagaaatgaacaaggaactagagaaatgatcagaaagccaaattgaccaaacacagagatactggagaagctgctagacagtagcagtgtggtttggagacgtggctgtctcatgctcaaaattaagtttataagcttacaagtcatagggatggtggtaaagtgtttctaaccctttccttccaattactggaaaataaatctccaggcctggttctttagttcaacagttgggcaaagtgtgcaagcaaattatttcacctctttacaccacagtttccccatctgcaaaatggggattattttagtgtcttcctctttaggttatgaggattaaatgagaagacaaatgtataatacctggagtatatacaaattatatataaattgtatatataaatatatttatgtgtatatatataaatataaaaatatattttttcatatatattcaaggataatataaatgatatatataatgattatttttgtgggtttgtgtgtctacgtgtaagattaccatgtcttctactgacgtatttttttatcctgctgttaataacagacgacttgactaggtaaccataatatgggagctgtatccaaccatttatgtctattttttacctattaatttattctcagtttttaacctagataatggtctgtcactttagtcatattttttcctctcccaaagtatatattctttgtcatgatcagttatgtgatttttatttg

SEQ ID NO: 309943 - DNA, 1000 bp, Homo Sapiens; identical to SEQ ID NO: 120148

SEQ ID NO: 309944 - DNA, 1000 bp, Homo Sapiens
aattctgtgattttatgctattccttttggagatagataagtcaatgctgaagacccctcgtgaacatgcatttctaatcaaatgaccctcttggtaggccatcttttggctgagggacacttgagcttacccagatttgtaagagggaaggaagtgtcctccccaggagtttcagaggcagcatggccttgccaactccttggtttcaggctgccagtctcaagacctgtgagagaacagatttctgttgttttaaacgagctaatttctggtactttgttataggagccctaggacactaagacactacctgccttagtcagttcgggctgccataatagaataatatagactggatggcttacaaacaacagaaatacatttttcacaattctggagctggaaagcccaagatcacggttacagattcattgtctgttgagggccctcttcctggttcctagagtgccatcttcttactgtgtcctcacatggcagaaggggtgaggtatctctctgggatctcttttataaggacactcattcaaaggccctgcctacaaataccatcacattgggagttatgtttcaaagcatgaattttagggaggggacacataaacattcaatctgtaaaataccaacaagtataaaacctgaatgaactaatgttaaattttactttctcctcttcatgtcaacatgtaaaaaaaaatccttgaaagttttcactcactattggtgttaatacaactgatttaagcttaaatttcctatcttcttgttacagtatagatatcccaaaagagacccatgaagatctcatttatttagttaactgcaaggaaaatattagagctcagtagttaataatttggtgatcaactttgttttatttatatgcatgcatattatacactatggattgtggatctctgaatataaattacatttctcagaaaattgtctgttacaatgtgctatatctgtccactaaga

SEQ ID NO: 309945 - DNA, 1000 bp, Homo Sapiens
tagaactagaaataccatttgacccagccatcccattactgggtatatacccaaaggattataaaccatgctgctataaagacacatgcacacatatgtttattgtggaactattcacaatagcaaagacttgcaaccaacccaaatgtccaacaatgatagagtggattaagaaaatgtggcacatatacaccatggaatactatgcagccataaaaaaggatgagttcatgttctttatagagacatggatgaagctggaaaccatcattctcagtaaactatcacaaggacaaaaaaccaaacaccgcatgttctcattcataggtgggaattgaacaatgagaacacatggacacaggaaggggaacatcacacagcagggcctgttgtggggtggggggaggggggagggatagcattaggagatatacttaatgctaaatgacgagttaatgggtgcagcacaccaacatggcacatgtatacatatgcaacaaacctgcacattgtgcacatgtaccctaaaacttaaagtataatttaaaaaaaaaagaaaaaaaattatcttgacaaagagttgtcctcaatgcaatattacaatagtccctactaatcctaggaggatgtgttccaagacccccagtatatacctaaaaccacagagagtaccaaacctgatacatactgtgtttttcgatctgatgatgagacagaaactaagtgactgaggacggagtagcctccacaatgtggatatgctagacaaaaggatgtttcatgtcctgggctggacagaacaggatagcacaagattccatcacgttattcagaatggtgcgcaatttaaacttctaaattgtttgtttctggaattttccgtttaatatttttggatcgcagttgactgtgggtaaaactgaaacctcagaaagcaaaaccacggataagagaggactactgaattacactgagaatttgtgggatgccgtgaaaaaga

SEQ ID NO: 309946 - DNA, 1000 bp, Homo Sapiens; identical to SEQ ID NO: 120149

SEQ ID NO: 309947 - DNA, 1000 bp, Homo Sapiens
aatattttataatgactgtcaaataatgtacttcatcagtgtagagatacttccctctggtggtagctgagctgccattaaatcagaagtgagtttttgaaaagtgcaatgcaaaggaatttcataaaaacgtctgttagataaatcacattgttgctcttttgggagacctagaagaggaggatagaaaaaggaaatcaggagcaggagagagagtaacaatgaaacacttaggattactttaccttaaataatcacctacaaatatacgtattccactcataggaaacagtagaagactcattattaactttataaattattttaatttaaaaatccaattgataaaatcagaaacagaaataactgagttctcacctaacagtacctacgtcaactgtatatctataaatcctttaaaatacctatttacatttttgttatagattttaattaaactcacaccatgtatgtgtatatgatcaaattctagcactccaatactagatttagtcattgaactattttctcttactttcacaatatttaatgccaatctctgccacttactaacttgtatgattttggggtgtgtgtgcgtgtgtgtgtgtgtgtgtgtgtgtgtgtgtgtgtgtgtatgtgtgtgtgtgtgtagctactcttcagggtaagccaatggtttggtctatttggggaatactttcattcattctgctttgtggaaagtgctttcaccagaacatttagcatttgattattttaataaagaactatttaccctttgtggcaacatgcagtttcttttgccctttgagcacagataagccacaaagttaggaaaggaaagacttgtttactcagcagccctaaaggttaccaatatcattaaggaatatatgagataactaatattttgctctattatactcaagctttctgtaccatagtaggatttctctgccttagagaaaaactgttattttacaaggactagtacttt

SEQ ID NO: 309948 - DNA, 1000 bp, Homo Sapiens
gataaaattcagcagttaagccatcaggttctgggcttttctttgatgggagacttattactgcttcaattttgttacttcttattgatctgttcaaatttttaatttctttatgcaatcctggtaggttatgtgtatctaggaatttatccattttctttagattttccaatttgttagcatatagtgcttcataacagtttttaatgatattttttatttttctgataccagtttaatgtctcctttttaatttttacttttacttttttatgtcttctctctctttttcttggttagtcaaactatcagtttattgatcttgtttatcttttttcaaaaaaacactttttgtttcatggatactttgtaaatttttagtctctattttatccagttctgctctgatttttatgatttattttcttctactaattttgagtttgggttgagtgcagtggctgtcacctataatcacagtgctttgggaggccaaaacgggaggatcacttgagggccagcctggacaacagagggagacccagtctctaaaaaataactaaattaaataaaaatttaaatttaaaaaattaataattttgagtttgattatttgctttttttgtttgttttcctagctttttgaggtggcaagtaatcaggttgtttatttgaaatatttctactctttgtgaggtaggtatttataactacaaacttccatcttaccactgcctttgctctaccccctaggttttggtatttgtgtttctattttcatttgtttcaaaaaatgttttaatttatttttaatttctttattgaaccagtggtcactcaggagcatgttgcttaatttccatgtatttgtacagtttccaaagttctacttggtattgatttctaattttactctattatgatgtgggaagatgtttgatatgattttaatttatttaaatttatgaagattcatttttcggcccctagacagcatgct

SEQ ID NO: 309949 - DNA, 1000 bp, Homo Sapiens
atcatgctgactttaaaagcatggtttcattccctggcatgatttgttttttttctttatctcagagatgaaaagttttagaatctctctcagaagggtgagaaactattgtacacatctatataaaaaatcaagagatttcttctgtgagaagttcatatccaatttgtttaacttactttatgttataaacttcaatagcttatttgcttttttggattctgtggccctttctgtttgtgaaaaaacctcttggcaaccaggaatacatgacagtattcctcagctgacaacgtgccaaggatcatcacatctagaaaaagcgctatctggcgggacataaatacagggtcataccataaaaacgactaaagcaactgctgaagaatatagaatggatgtaaacctcagctgactcattcagtataaatggaatatgtgtgactgaaatataattgctttttaacttattcatttgcattttagaccaagagataaatatgaattggattttattctctcaactgaatgtaaacagacacatcataaaccacattcaaattggaactttaagtgcactgtatagttaggatcctttcctcatccttctccccttccagcttctgccctcaactaggacagtactttgctcaatatagtagccgctccttcatcctggttcctggaaagagggagacacgaaaactttggtccaagccagccccacaaagcccagctgcagaataagcatttccttcacttaacatcaggaagcacgtggtatatatataatctattatactttgaaggttgttttttggaatccaaagcttattaattattaatatacaatttaaagtagggaagattttattgaatatatgtcttatagtatacaaaataaatttaaaaatataactcccaaggaaaaaaaataattaaaagatccgtgtcatttgggagaagttgttaaatcagtgtcatggttcatatgaaagtg

SEQ ID NO: 309950 - DNA, 1000 bp, Homo Sapiens; identical to SEQ ID NO: 120150

SEQ ID NO: 309951 - DNA, 1000 bp, Homo Sapiens; identical to SEQ ID NO: 120151

SEQ ID NO: 309952 - DNA, 1000 bp, Homo Sapiens
gtataaccctacttaaacatttccatctgaccctctccccctgctttccttcctcctttcaattagccatccttcctgtggctctccattacacttttaagttcaaatttcttgtcttgacatacaaggctctgcatgatctggtccctgcttccctatctaatctcttcacccagcactccccaacacataacttgattgtagtacctcatttaggttcttccattcttcatttctcaggtgtaccaagcgtgtttttctagagagagggtttgtagctttaatcatatgctcaaatggagttttctaacccatctgtagcataagaatcattggttgatttaaaatgccaagttataaacgttacaagagtgaagtgtcatgagtttggacgctaagagctttaggaaatggattttgagacaactagtttggctcttcataggctttagaaaataaatttgttcttggctttgtcatggatggataactaatcattgaacattgggttatttcttccattttattttccctttagttggctatgttacagttcattacagctgttggcattgaactgtctccagttccaaacccatgtattagagaggagttaggcaaatgaaaatcaaaatgtcagcattatagatagtatatcatactgtctataagacatgggctctgggtcacaccattggttctagtcccactctgccatcagctagcaactaggtgtgtgaccttgggcaagtttctgtgccttcatttcataatctataaagcaggaattaacttgtacttcatggagttctgaggattgatttagttaatgcctaaaatgtgctcaaagcaatacctggcacatgcaaaagctcaataagtgttagttattgttattgctgataaagcagttactggaacagtggactcccttgcactgcaccccaggaggaaacagacttccgtatatttgaaaacctcataccttcctctgtgatgg

SEQ ID NO: 309953 - DNA, 1000 bp, Homo Sapiens; identical to SEQ ID NO: 120152

SEQ ID NO: 309954 - DNA, 1000 bp, Homo Sapiens
aggtgatattttctgataacatattgacacagaagccctggagaagtgctggtgttatttttacttgtttacatacaggaaatatactgtatagcccgtggaacatcagttgagatgggatagatttctgagttttgaggaaaaaaaatcaccttttgctgaaatattgacacagttttaatgtggttttgactttttattttaattatatttaaatacagcattttatcaaataaaatgaagcctgacacatttttcaaactatttcatattttgatactttatgtaggaagagcttccagtgctttcaatatgtagaaaatgtgcataacattgataattatatctactcaaagttttcagtgaccattggaaagagccgaaacagccctgtgatttatcaggtgctttggataatgtaaggatcataaacctacaactcagtccataaagcactatatctgtctggcccagataattgtttctaaagtatttctaaaacgcttgtttaaaaccctcccaagacattgatatatttttgaatatcatattcgttttatttttaatattatgacgttaatttagactttactagtagttcaataccttattttaaattgattggcagatgaaaagggcacttaaatacttattaaacaacgttgtacttttcaaagtacgtcttggctccatatacacaaagctatgccaattcttgagcccaagtctggcctgaggcatggactgctctgaatggccaggctgctgtcagggcccataggaaaatagggataagtgggatcagtcccagccaatgtggttagtctgagggtgggtgagaggtggtttctaaaggaaaatatttgcattaaaacaacaacaacaacaacaaggaaatgggtgctgagtaggcaaaaccaacaggtgtccatttggtcagaaaaagttttttatttattttatttatttagtttttgagacggagtctcgctcttttacc

SEQ ID NO: 309955 - DNA, 1000 bp, Homo Sapiens
gctcccactgcagggagcccattctgtttcttgtataattcaattataagcatgtctgatgcaaattctggggtcagacactttgctgggctctgtcctctgatcatgggattctatgatctcaccctctgcctagtcctggcttccaaagtggggtatactcagggaccccagcaacacacctgtgctctttgtctccctattctttgtccagacatcctttaattccatctctggggatgggaagaactggttcaggctgatcttgtatttctcatctttctgagtagaccaagacctcacatcttgggactgtaagtgcccagagtttaactcctattctccagactttggggtgtcatctgtttacatggcatggggatcggggatttatgaggaaaacaggcctcagtcaccactgcaaacgctgtgggcaaaaaaacattgaaagaatatttgcttaaattttagtcgttgtttttaggtgatagggaactcattaaacaggagcaaaagatgtaagaagtcagaagttaaaaaaagctttggtagttttttgtttttacttttttttaaaaaaagttttcaatattgagagtggattacttacatacttagggggaaaagactctgatacggtttggctctgtgtccccacctaaatctcatgtcaaattgtaaaccctaggtgttgaagaatagacctggtgggaggtgattgaatcatggggatggacttcccccttactgttctcatgatagtgagtgacttctcatgagatctggttgtttgaaagtatgtagcacttcccccttctccctctttctctctttcccctgctccaccatggtaagacatgctttcttcccctgcaccttctgccatgattgtaagtttcttgaggcctcccagccatgcttcctgtatagcctgtggaactatgagtcaattaaacctcttttcttcataaattaacctgtcataggtagttctttatag

SEQ ID NO: 309956 - DNA, 1000 bp, Homo Sapiens
agtcgacgtctacatttgttttcttccagacagatggcaaattatgtctatattatatataaatcatcatttcccattacattcagattatatatttgtcatttactataatatatataaattgatgtttctacactatcctatatataaatactgatacaatgaaaataaaaattaaaatattttatataaacatataaatataaatatattctcagatatacatataaatacatgtattagttccaagaccaatatactgcttttatcactgtagcttagaggacatattttaatatttggaaagtcaagttgttacacaaagtatttttcaaaattttcttggctcctctcagacaattattattccaaatacattttaagataatgtttcttagttccaaaaattaaaaaatagaattttgattgaaatagcactaaacatttattaatttagaaaattttcattccttattgttaaatcattccatccaggaacactgcaggtttatttcttcagtatttgttagtgtccttcagaataaaattaaactatgttcttcacagaggccctgtatgtttcttgataaatttattcctaaacattttacagatttttatcactaccatgaatgggatacttttccttcttacattttaacttactacttataattattgatgtaaacaaaacctacaaatttttgtatatttttctttcatctagaaacttaagaaaccatcttatcaattctaatgcatttcactggaattttaaagatttttaggcatgcaattatatcatatgcaaataaagataatttttttttttttttttttttttgagacggagtctcgctctgtcgcccaggccggactgcggactgcggtggcgcaatctcggctcactgcaagctccgcttcctgggttcacgccattctcctgcctcagcctcccgagtagctgggactacaggtgcccgccaccgcacccggctaa

SEQ ID NO: 309957 - DNA, 1000 bp, Homo Sapiens; identical to SEQ ID NO: 120153

SEQ ID NO: 309958 - DNA, 1000 bp, Homo Sapiens
gctggattaaacccacagtgaaattctgaagggtgccctggtctgaatgttcatgccttccctttcaaatgaatatcctgaaacctaattcctaatgcaataatattaagaagtggggcctttaggaagtgagggtggacccatcattaatagcatcagtatgcccttatacaataggcccaaggcccaataagatcacttaccccttctgccccgggaggacatgggaagaaggcactatctatgaaccagaagaatgagccctgaccagacaccaaatctggcatcttgatcttggaattgtcagcctctagaaataaatttctgtaagaaataaacttctgagccaggcacggtagttcacgcctataatcccaacactttgggaggctgaggcagggggatcacttgaggtcaggagttcgagaccagcctggccgacatggctaaactccgtctctactaaaaatacaaaaaaaaattagccatgcattgtggcacatgcctgtaatcccagctacttgggaggctgagacaggagaatcgcttgaaccctggaggcggaggttgcagtgagccaaggtcgtgccactgcactccagcctgggcaacagagtgagactccttgtcaaaaaaagaaacagaaataaataaacttctgtggtgtataagtcatgcagtttagagtactttgttatagcagccccaaaagactaagacaaggacttcatgcagaaaagtagagaaaggtgaaagataggacaggaaggctgagaggaaagaagatggggaaagaatacagcccccatcagagctccagtgaccacccatgaaatggctgcatctggagcttgaggtgccctccccgcatcctgatggaatagggcatgtcccaggccataagctgcagcccacgacagaccaggcctgtggatgtgagtcggctcagtgttgtgcgaaacttttaaattcgatgttaatttttaaaatctggaaattt

SEQ ID NO: 309959 - DNA, 1000 bp, Homo Sapiens; identical to SEQ ID NO: 120154

SEQ ID NO: 309960 - DNA, 1000 bp, Homo Sapiens
aagctgatttgacatctaagaagtgttttttttttaaattcccttccatctgggttttttttttttttctatcacaattctatgtctcccaaggtgtgaaatgcaggagatgtcactaagggtctctgtgccttgcctcatgcaacactttttttttttttttgatctagtctctttcataattcagcagatattcattgagcatttactatacgctaagcattattctaggtgtggtgagtgcagaagtgaacagaaagacaaaatctcagctttcatctaagaagataagcccgtaaataattacatacatttataaatcaatatagtgaaaataaagctcagcggatacacactggtagggtggagaatgctattggtgtgggggtttgtcagggaaaggctctccgaaaagaaggtgtctgcataaccagtgatggcagtgggagggtggcccctggggtgcctgagggaagagtgtgcgcttgtgctgagtgtgcctgcacaaaatgcaggaagccagcgctgggtgtgtgagcaggaaggtggcaggggcaggggatctaccctacaggagctggtgctggagaacacagggctcatggccatggtgaggacttcggatttcaccttgcatgatacagggaggcaatggagagtttgatcagggcttccaatgatattgtgtgtgtgtgtgtgtgtgtgtgtgtgtgtgtgtgcgtgcattgcaggatcaaggtggctgctttacagagaccaggctgtgtgtgagagagtagaagtggggagaaatgtaaaagcccatgggagatgatggggttcctgttcttggtcagaggctcctctgtccacacaagcatccaccatggatctgtaggagtcatcttgccatcctccccgtccctccccacatgccccaactcttccctcttcagaaggggactgatcattactggacctctgggtgttgtgcttgggttcagaccaagctctgccccca

SEQ ID NO: 309961 - DNA, 1000 bp, Homo Sapiens; identical to SEQ ID NO: 120155

SEQ ID NO: 309962 - DNA, 1000 bp, Homo Sapiens
ctgcaccccaaccaccttggacatatgttctcaggacctcctgagggctgtgtcatgggccatggtcactcagatttggctcagaataaaattcttcaaatattttatagcgtttcactttttttgttgacacatggctgtgtttttatgtatttatcaacaatggaagcaaaagaagagggtacagggggctcacagaccatctcacagcgggtgaccttcaggcagaggcacctagggctgggtgtgtagggaggggtggcctgggcccaccccctaggtaaggctgtcatagacaacaggggatgccccctagaagtcacaatgcagagctgcttctcactcttccaggctgagatctgacttctcagcccaccagaggcaaaaagaggacagtctcacggtccccaagcccagagaccactgggaggggagcaagtggggtctggaccaccgaccttagcttcacctcaacccccaagaacacctgccccgttggaggtaaggcctggaaatttgcatttttttttaaaaagtctggctttctcaataactcttatatggaatgacatttgagaatcactggagatattacctatacacccccaacacacacacatacacacacacacacgcacacgcatacacacacacatgtgattgttctgaccagaaccttgagcattctgtcccttatatgaggtgcttctgtctctaatcacagcctccctggccaggagacccctgcttcccatctgggtcccctttccctcactgacagcaggcccgactagcactgatccccgtgatggcattttgtaaactcctgtggccagccaaccctgctcgttagtggcacattcttctgtttttgtttgtatgtttagttgtatgccgtacttttgattcatgaagataagatctcactggcattaagctatttttatcttttaaacatgaccttgaatacctatgctctgatcctgtgtgagctgccttt

SEQ ID NO: 309963 - DNA, 1000 bp, Homo Sapiens
atcacgaggtcaagagatcgagaccatcctgctaacacggtgaaaccccatctctactaaaaatacaaaaaaattagccgggcacggtggcgggtgcctgtagtcccggctactcagaaggctgaggcagaagaatcgcttgaacccaggaggtgttgcttgcagtgagccaagatcgcaccactgcactccagcctggcgacagagcaagactctatctcaaaaaaaaaaaaaaagaaagaaaatgaacaggcaagtcacagtctgggaaaaacatctgtaaaacacatatccaaccaaagactggactctaggacaaagaactcttagagctcaataataaaaagacaaaaagcctcatgaaaaatgaatttcactgacgctgaaacacaaatggacagtaagcacatgtaaatgctcttttggtggcaacggaaatgagtaccaccgtgagataccatttcatgattaccagacggccgaggctgaggagacggcaggccatgtgttggcaaagctgagggccaggagaactctcacaggctctggtgggagtgtgagtgtacaaccactctagaaaagcgtctggcagctgcttataaaactaaacatacacctaccctatgacccagcattccattcctcagcacttacccaagagaaacgaaaacatgtccacaaaaagacttgtaaagaatgttcagagcagccttattcacagtagctaaaaatggaaaaaagcccaggtgcccatcagcaggaaagtgagtaacaaatggtgtattcatacaatgaaatacttctcagcaatcaaaaggcatggactgctgctacatgcagcctggatgggtttcaaaaccattacgctgagcaaaagcagccagatgcagaaagagtgcatcctacatgattccatttatacagagtctaaggcaagaaaagctcaactgtggacgacaaagggtgacacagcagttgttacctctggggccagtgggag

SEQ ID NO: 309964 - DNA, 1000 bp, Homo Sapiens
gaaaccgcaacccggacctcgccgtcagagccgggcctgcatttcccagtcagcacgtgtgtcccttctcctcagcaaccgccagccctgggacaagccccacaccaccctggttaccctcagctgcgagatgggaggtgccgggcacagccaggactgcatctggtccgtgctgcagggatgcagccccgcatggggccggggcttagatcagcctcttgttgggttgagcggggaggcgcacacctgccccagactgcagctcaaaagaggcagaggcgagggtcaagcgttccataccccgaggtccccgggggccccgtcagaaaaggtgggggtctcagggagctttgggttttgctctgcctcctgggcctgaccctggccagagctgaaccttcgagaagccaggaaaagtcggtaccaattcctggactagactccctgccgagcctgcccctgagtgccctgtggcctgggtgtgggaacccagagggagactgtgctggtgtcaccgggggccttctggcggtcaggatggctcacagggaggcactggggggctgtggccaacctgtgggacccgtccacccccagggctgctgtgaggcctaaacgtggcaggggctccccgatgtgagtcctacaacgctcagtgtcggatggggggcaggacccacaggcccctctcaatgcaacctacagaggcccctgcaggtgacctcgagggaggccacagagagcaggacccacgtgggggaagagagcacctgccccacaaaagacaaatcaagttgctgccaaggagccggcgagtttggggcggatgaagtcacaggatcacccacagcgaaaacagggaggcggccacatgccccccacctggggagcctcaggggcggccggggccacgggggtggcacgaggcgggtgacaccgggcagcaggcgggggcggcgctccgggaagcagggtccgactggagacgtggggatctcgg

SEQ ID NO: 309965 - DNA, 1000 bp, Homo Sapiens; identical to SEQ ID NO: 120156

SEQ ID NO: 309966 - DNA, 1000 bp, Homo Sapiens; identical to SEQ ID NO: 120157

SEQ ID NO: 309967 - DNA, 1000 bp, Homo Sapiens
tgaggaattacctcgcttcccaattcccatccttcacaccccgcaggtctcccttttctacaagaggcgatagtttgggtggcagaaaaagggcttggaactccaatgtctggattcaaattctggttccagcagtcattcgcttgccatgtgaccttgagcaattcaagtcccctttctgaacgtccccccccccgcacccttagctgtaaaaaattgcccgtgccctaactcacaagctgctgcgaggcgcagaaacataacttgacagggatgctcgaagccaaaccaaagcactgcaccagggggaggaggtcctccatctccctgaggccttgccctatgcttcctcagtctctccgcagccccatcagctccaggcagtctctgtggctttcctgacttttccctctctgaggctccaggactcacctgcaggcaggctccgccaagggttgtggccggcaaccggcgcctcaaggagagtgcgaccaccgccgccatcttggctcctgacgtccagccccaccccttaaccccgaggtcgctctccgccggtgtcccgtcgaacatcgcggcgcccagcctacatccactgaggacccactagccgcgtacgagcaaccaagtgggaggcggcttccggtttcccgggtgggcggagggaaggcggggcaagcacagcgagcgtgcgcaatagcgcagtagcggcgcatgcccattttggcttcccccgtgaccttctcagaaaggggaggagtctgagaggcagggcgacttttcagggggtggggbtaaagattagatggggggagcatcctatccgggtccctgccccgatttcaacctctttattcctggaatttttgtttgtttgtttgagatggagtctcgcactgtttcccgggctggagtgcaatggcgcgatcttggctcactgcaacctccacctcccgggttcacgcgattctcctgcctcagcctcccgagtagctgggat

SEQ ID NO: 309968 - DNA, 1000 bp, Homo Sapiens; identical to SEQ ID NO: 120158

SEQ ID NO: 309969 - DNA, 1000 bp, Homo Sapiens
ttttttttttttttttttttttgaaaaggtaaaatagcttaaagcatttaatatctaaacaaatcaatctgttaatagtagtcacaaaatatgcttaatatagaaacccacattcatgtttttaagaaaaaagtgtaaattgtattccacctcaaaacataaattaacccgcttaaagaatcttcagcggtcaaagtcatggtgaattttaaacaacttcagagtaaaataacaagtactttatactgctttatatctaaaaaatgcttacaacttctcataaaaatagtttgaagcaactattttttcttttattttttaacagacacgttcaacattacgggcaacatttttaaaaccttaagctttacagactttcaaacattcaaatactgtggtccctttcctttgatgtggtttattcagctagaaaagaaaacatggtagacaacttaatacattttcaccaaattgaaagtagtacaaaaattttaggactctaccgaactacacatcgtacctaatgtatcattaaaaatagaagacagtattttcttcagcaaataaaacagcatactaatatgctgctaatgcataccttttaatgtgtactgtcattcataaattatttacaactgctactgtgtgaagagaactagaatgtaaattttctgcaaaactggaaaaaaagcaatacaaaatttgtgaaagcctgtgttttatactatacaaaagtcagtttttctcttcaaataccagatattgtatgcagtgatattttggacacattatagtaattcttgaggatgttttagtgctggaggtaagtttacaggcctcgattcttcatcaaggagtactagatcttctatttcactgcctctgtatttccttttacatatttttaccaccacctttttcttgagaaataacttcaatgcttctcttgatgcaactgcttttgcattttctttgctttttccacagccagtgcccaaat

SEQ ID NO: 309970 - DNA, 1000 bp, Homo Sapiens
atctgtcacttacaaaagagctcaaggcaaatgttcccggttggcaagagcagctgtccaccctgagcacccaggctaacaaagtttctgccaccttcaccatgaggccccaaggttgtcactgtcctctcatggcactcagctggaagaggggaaagagaacagaggacaactcattaaaggctcttatggggaagtcctatatgtcacacacatcacctccattcacattctactaactagaatacagtctcagggtaaatattaggggcttcaggcttatgaaagagaatttggccaatggagtccaagaaaagatataaaggaaactggttgtaacaagagaaagatattcccaagaaaattaaattattaaacaataattaaaagtcatataggaaggagtaaatgagtgaaatggacatggcagaaaactaaggaatatcttagatggcaaactggaggaacactttcagaatgccaagaaagagcaccaagaattaaaactatttccttaattctaagatgtctgtgttgccacatcatcacttctgaaatcaggccaagtcttgcaatcactggcatcttataatcaccctgggccagggagctgccatggtgaggtcatcaagacctgggcatgggtgaacttggtctcagttgttcatgttgttagcactttaattgagttgtatacattgttgcaattacatgtgagtttaattgccatttaaaatgtcttttaaaagattacactatggtttggcattgaaacgagaagttattatgtatgcagaaaggcatggaattcaagcagcaggatgtaatttgatattactgaagcaaatgtctattattggaccaaccactgcaattctttttttttttttaaactaagtgcttgacaggacccaagaaaagaaggtatccttaagtagaaactgtgttatgttttgtaactgagactcatgcaaaaagaattgcctgtcacatgccaaac

SEQ ID NO: 309971 - DNA, 1000 bp, Homo Sapiens
tgaatctaatgatggtaatattaatagcttcagtttgtagctttcaatgcactctacaagctgacaaaatccaagtatatatctccagcagggactcctctcctaaattccacactccaagtaaatgcctactaaaaattgccagataccctaacatgcccagatatggtttgtgattctccacagcccttaagcctgcattactgcgttcacccttgtattaatctcttttcattctgctgataaagacctgagatggggaagaaaaagaggtttaactagactcacagttccacgtggctggggaggcctcaaaatcatggcagaaggcaaaggacacttcttacatggcaggggcaagagaaaaatgaggaagaagcaaaagcagcaaactctgataaacccatcagatctcgtgagacttagtcactaccaggagaatagcacgggaaagaccggcccccacgattcaattacctcacactgggtcactcccacaacacatagcaattctgggacataaaattcaagttgagatgtgggtggggcacagccaaaccatatcaatcctcaacttagataactgcaactctatattcccagttactcaggctaaaaagtttgcagtcatacctaaccccacctcatccactagtaaaaactttggctctatctccaaaatttatttcttgcttttcaacacctgcactgctaacaacctgggtcaatacatcaccatcttacatgttgaaaagcagatttccaacatgtcttactaaaactgccctgctttccgaccgcatattctcaacttagcagctaagctaatgcttttaagatggaaattacggccgggcgcggtggctcacgcctgtaatctcagcactttcgggggccgaggcaggcagatcacgaggtcaggagacagagaccatcctggctaacacggtgaaaccccgtctctactaaaaaatacaaaaaattagccgggcgcggtggt

SEQ ID NO: 309972 - DNA, 1000 bp, Homo Sapiens
tgagaagtttaagatcaaggtgctggcagatttgatgtctggtgaaggctcacgtcctggttaacaatggctgttttctcactgtaacctcacgtggaggaaagagtgaatgcgctttctggggtttccttgtaagggcattatttccattcatgagggatccgacctcatgacctaataatctaacaccatcaccttaggaatttgaatttcaacagataaattttggggggacaaaaactttcagaccacagcagagttatttagcaagagttgttacacaggctccagttgttgccttctccattgataagagttgtctctggtgattaacagcatccttctcttcctggtgtgggagggggagacacttttataaatggatatttacattgcctttacaaagggaaatttacaccctgcttttagacagaaaggaggaaggcagagagcttttcctgcacctgctattgcttaattatcttcagctcaaaataatccttatgataaagtggtatattttggagtggcatactctaattcctgccaccagcatatatttatagaatatttttacctgtgacttctcatcagggccagcttcatggccatgtgacctgtgtagtctcacgaggctccacatggggaaggaccttgtgcttataattgtttcactgctgtgccttcgttgttttgaaattcttaataatttatcagtaaggaactttgcttttcattttgcagtggggctcaaactatgtggctacaagccatgtgaccagttctctctgtgatgctgctaagcctgtttagcaacctctaggtggaaaccccaaactgccatcacggccgggccactcctggttttccactctgagcacaggctttgcttcctacttcatcaggtgtggtaagcctgagttcccaacacatgtctaaaagttacctgggctgggtgtagtggcttacacctctaatcccagcactttgggaggccttg

SEQ ID NO: 309973 - DNA, 1000 bp, Homo Sapiens; identical to SEQ ID NO: 120159

SEQ ID NO: 309974 - DNA, 1000 bp, Homo Sapiens
ttgatggattaggagataaatctgtatatttaacattgttgttctctgaaaaatggcagaattttcactttactacctttttgcaaactggtgtaaaaatatgttagtatttattgtattattagttctatatatttgaatcataaatattaactcaaaagtttttttaaaaagtccttagtatctttattattggtgcaggatttctttttggtgctgctttgtcagctggaggccaatgtggctggcaacgtgtccgctcaggactcactcaggccgtggcttgccacaagaggtgccttgctgactcggccccccagactgtgcccatcttgcgctccagcatggatcctgtggccactacaactgtgcgctcagcctgtggtggtagtgggtgtgtgagcatgtgagtgcagggtccagtcggccactccaagcactggcataggagtgggctctgtgcaggacttgtggctggatcaggcatgccacaagcaactcccatgggggatgctggcatccagacaaggggaacacagcagcacccgaacagggatgccagtgacctcaaagccccaaagtgggtgttacaacatgctaactgctctttcagtcccactgctccactctggcccacgactccaggattggcctggaaccactgctgcttcccatcatgtggagtggctgctgggttctggcagaggacagagagccacagtgttacagccttttttgtacctgcactcgatgggtctcaagttcttgtcctgtgtccaaaaagaatgaggttacactgacaattgaaaggtgagaagggcagagaagagttttattgagtgacagaacagctcacagtggagaagcaggtggtcccttgatcaaaggcagctagtctctctccaagtatggctgagtctggggcttttatgggctcataatgagagagtgtgtgctgattgttctgtgagtatgcaagaaagacaccactgaaaggagg

SEQ ID NO: 309975 - DNA, 1000 bp, Homo Sapiens; identical to SEQ ID NO: 120160

SEQ ID NO: 309976 - DNA, 1000 bp, Homo Sapiens; identical to SEQ ID NO: 120161

SEQ ID NO: 309977 - DNA, 1000 bp, Homo Sapiens; identical to SEQ ID NO: 120162

SEQ ID NO: 309978 - DNA, 1000 bp, Homo Sapiens; identical to SEQ ID NO: 120163

SEQ ID NO: 309979 - DNA, 1000 bp, Homo Sapiens
atggaacagaacagaggcctcagaaataacaccacacatctacaaccatctgatctttgacaaacctgacaaaaacaagcaatagggaaagaattccctatttaataaatggtgttgggaaaactggctagctatatgcagaaagctgaaactggatctcttccttatacgttataaaaaattaactcaagatggattaaagacttaaacataagacttaaaaccataaaaaccctagaaaaaaaccaaacctaggtaataccattcaggacatatgcatgggcaaagacttcatgactaaaataccaaaagcaatggtaacaaaagccaaaattgacaaatgggatctaattaaattaaagagcttctgcacagcaaaagaaattatcatcagggtgaacaggcaacctacagaatgggagaaaatttctgcaatctatccatctgacgaatggctaagatctagaatctacaaagaatgtaaacaaatttacaagaaaaaacaaacaaccccacaaaaaagtgggtgaaggatatgaacagacacttctcaaaacaagacatttatgcagctaacaaacatgaaaaaaagctcatcatcactggtcataagagaaatgcaaatcaaaaccacaatgagacaccatctcacaccagttggaatggcgatcattaaaaaataaggaaacagatgctagagaggatttggagaaatagagatgcttttacactgttggtgggagtgtaaattagttcaaccattgtggaagacagtgtggcgatccctcaaggatctagacccagaaaataccatttgacccagcaatcccattactgggtatatacccaaaggattataaatcattctactacaaagacacatgcacacgtatgtttattgcggcactgttcacagtagcaaagacttggaaccaacccaaatgcccatcaatgatagactggataaagaaaatgtggcacatatacaccatggaatgct

SEQ ID NO: 309980 - DNA, 1000 bp, Homo Sapiens
acaaagtagatttcatagaagagaaggcatctcagaaccctgagagaatagtcaagctacacaggtaagtaaaagtctaaaaactggctgctatgttagagtaaggcttagctttattgttatctgaatgaagcatatgaccaaaaaagatgaatttgtgtcttattttgttcttattaccttatttttggttgcttcgttcattgttttgttatggtggtaaatggaagctttaaattatcttcaggaacacttgtggtttctataatcctcattttattgtttgctatttttatttaattttgagttgaaaaccactgtttaagaatgtaatttttaggtgttttgaaactgggcaagatagtcattgtgatgaattgaacatcgtaattcatatgaatactgactaactagtaattacttaagatacatgtaagttaagccagaatgtgctttctcaagcatggatgagaaaggtccactgcttatgatgacgttctcccatggggagcaagtcccaagacaatgcattctgcagaaatgacttcatgacctggatccattttctcagcctcctgtttttatgaattggacttcacttttttcctctagaaactgccctttgtttctgaacacaatctgtcctacacactgaattctcagcttcgttacatgggttattgtaaggttgtagatgatcggttttaggcaattggatcagcttgatagcatgatgtgttgcgtgactcttaaagaccttaaaacctatatcaatgctaattaagaaaatggttcatttgatttaattttcaaagttttagcctctttacttgagatcattatgtcaggggtcattagaaactgaattgaaccatatataatgttcttgattagggatgttagcagcaaagagaaggaagagatttctttttcaagctcttacaaattatttgatgttgcagttttgtttatttatttttaaatcaatcagaataggtga

SEQ ID NO: 309981 - DNA, 1000 bp, Homo Sapiens
ggaatccatttatttttcccctcagtcaacacatcaaatggaactccacatgtgactctagttgtgggtcatggggcaggtgacactttatgcatcaggatgtatactggcagtgagaacaacttatttctattatttgtgtgttctgggctggttattgtctaataccatatatgccattttcgtgtgatgattaagtgatgctggtcaggccctactttattgattaggaggtcagataacacccagatcatgaagagcaatatggtcttctagtgtcagacccagtctccatcttccagatccaagtactagggaaagagctgttccttcaaaggaaacaagttatttgatcaggcaggcatgactttgctcatatatcttagagaagtagtgtttgaaatttatggcctgaggactctgtaagaaatgtattttaatttctaagccagtacaagacacttagaagatcttgaacaaaataaacaagtttcaataaatgttgccctcactacaggctatggaagctgatattttccttcctattctatcctctttcacattttttttaaaacgttgctccagacctgttaaatggatttcataatcagtaatgggtcacaacacacagtttgaaacatgctgccctagagggctcacagtaattctcatactgagatttgctagaggaaacacagagcaatgcagtcagctacagaaagttcaagcaaaattgattctgttgcttcaaaaggtccaaatgcttgccctgcaggacctgctgaggaagtttctgtaggtcacacttaggcctagcagcccacagagtcacctggcatgtgggtctgagcagtaacccctaatgtcctccccattcccatcagatttaaaggggcccgccaggcacatttccttctccatcacacaagacgcagccaggcagatttcacttttgagattacatgctttaggagtgggaaggttgtgatttcaataactc

SEQ ID NO: 309982 - DNA, 1000 bp, Homo Sapiens; identical to SEQ ID NO: 120164

SEQ ID NO: 309983 - DNA, 1000 bp, Homo Sapiens
ggccaacatagtgaaactccatctctactaaaaatacaaaaattagctgggcgtggtggtgcgtgcctgtaatcccagctactcaggaggctgaggcaggagaatcacttgaaccagggagtcggaggttgcagtgagccaagattgtgccacagcactccagcctggcgacagagcgagactccgtctcagggaaaaaaaaaaaaaaaaaagagaaatccatatattgctcatgtcaccttcaatgtttgaggtacaggtagaagtagtttaaagaacgagttggggatgatgtaggacagaaaaaacaatagatgtctatgacctatctttaagagagataagctgcctttaggtgttggctgtcatttcagtggcctataaacacatgcatgttcagtcacagaaagtaaatacaaaagaatgagtatattatctatactgcttccctttcctcactgttttctctcttctctatttcttgcaatctagtgtctgcttcagtcaccctgaagaaattcccttaagggttgctgtgaatgacgtcatacttctcaaattcaactgcttcttttcttcccccaatagctgattttgttaatggcctatttttgttattatttttgttagtatttgttattattatttttattattattatttttgttataatggctaaaacattttttcctagctcagattccaactgcccgtctttatctggttttcttcctacctcccagataatgcttttttgttttctttgctaattttgctttctccttttgctccttaattgtaggtaaccatcacatttctgacttaatccattcttctctactctcggtctcatggtagttcaaagacttcggtagcttttttattttctaaagcataaaaccgaagatattgaaagaatcaaagagctagtacaaagttaacattccataaaaacaatgtgatgaatgataatgagaacagcaagagttgacagttattg

SEQ ID NO: 309984 - DNA, 1000 bp, Homo Sapiens
ctaaattacttgtgaaatacaccaatagaaaatagaaagcactgtacttacaattgaggaaggaaaacagaatgaaaacactgtgtgttttccaaactggcatctgtgtaaaaattgtttatatctacaaaccaaggtcctgaggggcataagggaaaataagattgtgcttgacaatgtgggtttctagatggtggtaaacatcccttgttttcataaagttttttgtgcagtgaatcagtctaaattttaaaatgaaatattgacataattattccagaagttgcttgatagatttgactatgatgatgagccagaagctgtggaagaatcaaagaaagaggataccactgccgtcaccacgacagcacctgctgccgcagtaccccctgcacccaccgccaccgtgcctgctgctgctgcacccgctgctgcctctcctcctcctccacaggcaccattgttagtttttttttttattcctcagcagatagaaaattggtaatagttgtaaggcataacctaagtaacatttagcaatgacaacaatgttctatgaagttgttttgtaaaatttgtggtattagttttctcttgaatgaggaagggatcctcttaagatttaaaaccaaaaaatggcttttatgttgggaataatactgagtttataaattaaatttaatatataggtaaatatatggttcagtaaaatgttaatgactcatgaacaacactctgtttctgtaatttaagtgtggctgagaagcttgtgcttttgaatgggtaaaagattatccacctttttttagtggctttcctggagatggcatgcagcagccagcatacacacagcatcaaaatatggatcagtttcagccacgaatgatgggaatacaacaggatccaatgcaccatcaggtacaagcatttttcttgcagttcaaagaaagatctattcattatagagcgtatggtttgcattccacagagcactctgcag

SEQ ID NO: 309985 - DNA, 1000 bp, Homo Sapiens
gcttgatatattattatagaatgaacatacccttattaccacaactgggttgagaaatagaatattattactagcataccagagagctttccagagaataatcccctcatgctccttcccagttatctttattatgatctgcaaagataatcactattcagacctcttacatcatggaatagttttaagtgtttttcagcttaacataaatggagtcattctctgtgtattctttggtatctagctcctttcactcaatgaaatcatccatgttgacatatgggaaatcatccatgttgacatatgggaaatcatccatgttgatatatgggaaatcatccatgttgatatatgggaaatcatccatgttgatatatgggaaatcatccatgttgatatatgggaaatcatccatgttgacatatgggaaatcatccatgttgacatatgggaaatcatccatgttgacatatgggaaatcatccatgttgacatatgggaaatcatctatgttgatatatgggaaatcatccatgttgatatatgggaaatcatccatgttgacatatgggaaatcatccatgttgacatatgggaaatcatccatgttgacatatgggaaatcatccatgttgacatatgggaaatcatccatgttgacatatgggaaatcatccatgttgatatatgggaaatcatccatgttgacatatgggaaatcatccatgttgacatgggaaatcatccatgttgatatatgggaaatcatccatgttgacatatgggaaatcatccatgttgatatatgggaaatcatccatgttgacatatgggaaatcatccatgttgacatatgggaaatcatccatgttgatatatgggaaatcatccatgttgacatatgggaaatcatccatgttgacatatgggaaatcatccatgttgtagcaagtggcagtagtttactcatatttgttgcagtgtagtccattttatgaat

SEQ ID NO: 309986 - DNA, 1000 bp, Homo Sapiens
ggaatccctggtaatgaaaattctaagaaatttatggaaatatggtagttacggctgggcgcggtggctcatgcctctaatcccagcactttgggaggccgaggcaggtggatcacctgaggtcaggagttcgagaccagtctgaccaacaaggtgaaaccctgtctctactaaaaacacaaaaattggctgggcacgcgggcgcctgtagtcccagctatttgggagactgaggcatgagaattgcttgaacctgggagacggaggttgcagtgacctaagatagcacctccagcctgggtgacggagcaagactccatctcaaacaaaaacaaaaacaaaaaaacaggctgggcacggtggctcacgcctgtaatcccagcactttgggaggccgagaagggtggatcatgaggtcaggagttcaagaccagcctggccaagatggtgaaaccccatctctactaaaaatacaaaaaattagctgggcatggtggcacgtgcctgtaatcccagctactcaggaggctgaggcagagagttgcttaaacctaggagatggaggttgcagtgagccgagatcacgtcactgcactccagcctgggtgacagagcaagactctgtctccagaaaaaaaaaaaaaaaaaaaaaaaaaaaagaacagagagcatttatagcaggttaccttaatgtaaggaggaaaggaagtaatttaaatatgaatacatacacgttatatacattatgtacctgcttttttccaacaaaaataaatgaaggataacaggaaactaatacaatgggtggaaacagggtaaagggatagaagagggagtgaccttgtctgagcacacctttttgttagtttcggtttttagaacctttttaatctgttatgtatttaaataataaaattaagtccacaaagatgaggaggcatatctaaattaaataaaaatgaaaataaacctaatcatattataaataactaacatatcc

SEQ ID NO: 309987 - DNA, 1000 bp, Homo Sapiens
tttaaatgactgcaaaaaaaatcttttgaaacattaaaaactaacactttaccaaaaaaaaaaaatccatgctaaagaaagcaacaaatctaacatagcaactgaaataatggtcgcttatacaaaatactcacaaacatgtttaagtttgagcaaatgcaatttaaaaagtttatcttcatgactatggctgcaggatccttcctgacttaattggcacttgacctaatgctcccaaatatttatgaatatatatatttttaatttgcatacaagtattctcaagcccactcactccagtcctttgcgggaaaaaaacgaaacttatttctgatcaaagtttaattttagatgactcactggacagccctgcagagacacagagaagaatgccttttaggctagcagaatccatataacaacacaagaaacaacaaaccagatgacagctgctgaagcagccctgtcaggcagtatcatgtctcaatacgaaaacagaacgttacatagaaatcagaatttcaattacataaatttcttcctagcagggtattagaataacattatttattcagcaggtaactaatcaggctaaactgaaaacatgccccctaaataattaaataaacaaaatctaccaccactgtgagacagaaagtactttcaaaaatctacaagatctacacaggacagtgatgattactccatcgggcatccaggttagtagccctaaagaaaatgaacaaatatttggggtcctaattagactgcttatataaatgctaaccacttatttaattaaaggattcatactttcactgcagtcattcagccttcagtaagtttaactttcataaatacataaagatttcacaagttttacaaaaatggctcaagtcattccaactgacactacagtgattataacagaggaactaattctttcaagcaagctaataaaatgattgtccatcaaagatggtaagccagatcctgagag

SEQ ID NO: 309988 - DNA, 1000 bp, Homo Sapiens; identical to SEQ ID NO: 120165

SEQ ID NO: 309989 - DNA, 1000 bp, Homo Sapiens
gtctgtcacacaggctagagtgcagtggtgagaccaccgctcattgcagcctcaacttccccgggctcaggtgattctccatgtcagcctcctgagcagctggaattacaggcacaccaccatgcccagctaatttttgtatttttagtagacacagggtctcactgtgttgcccaggctggtcttgaactcctgggctcaagtgatccacctgccttggcctctcaaagtgctggagttacaggcatgagcaacctcgcccagcctcaattcattttaaactattaaaaagctgtcaaggccaggcaaccactgcactccaacctgggtgacagactgagaccctaactcaaaaaaaaaaaaaaaaaaaagctgcccagataaattttgtagatactcaccctcaaggagggaaacgtaactcccctctccttaagtgtagaccacacatagccacttcctcccaaagagtgcaataaagaaaaggagggaaagagccactttattgtggagaaaactggcagactccacctcagccaagtgacgcaggtcagcctcacagttatagtcgaggtgacagtgtgtgtccctgatgtgatggggtgacagtggcacttcacccctagatgcttcctttctgtaacctgcagtcccagtctaaccaggagataatagacacattttaattgagggacattcttcaaaatatctgcccagtactcttcgaaactgtcaaggtcatcaaaaacgaggaaagtctgagaaggagcctaaagacacataactcaatgtaatggggtgttctgatggataccacattagggacatgaggcaaacctaaggaaactgtcaaagtgtggacttcagttacttgtgtctcaatattggttcattaatcataacaaatgggccaggtgcactggctttcactcaaaaattagctgggcatgatggcacgtacctgtagtcccagctactcgagaggctgaggcagaagaat

SEQ ID NO: 309990 - DNA, 1000 bp, Homo Sapiens; identical to SEQ ID NO: 120166

SEQ ID NO: 309991 - DNA, 1000 bp, Homo Sapiens
ccctaaccctaaccctaaccctaacccaaccctaaccctaaccctaaccctaaccctaaccctaaccctaaccctaaccctaaccctaaccctaaccctaaccctaacccctaaccctcaccctcaccctcaccctcaccctccatgagtaatatgtctgttatattttgggtgtcatgtgtgcattaggaatgctgcatttgagttgcgacgctgcagttgaaccgtgcaatacagcccctcgccttgccttgggagaatctcggtgcgcaggattcagagaggcttttcgtttcccgctttccacactaaaccattctaactggtctgtgaccttgattattcagggcagcaaccgggaaagattttattcaccgtcgatgcagccccgagttgtcccaaagccatgcagtacccccaacgtctgtgctgagaagaatgctgctccgcctttacggtaccccccaggtctgtgctgaacagaacacagctccgccctcgcagtgccctcagcccgcccgcccaggtctgacctgagaagaactctgctccgccttcgcaatacccccgaagtctgtgcagagaagaacgcagctccgccctggcgatgctctccgggtgtgtgctaaagagaacgcaactccgccctcgcaaaggcggcgcgccggcggaggcgcagagaggcgcggcgcgccggcggaggcgcagagaggcgcggcgcgccggcgcaggcgcagagaggcgcggcgcgccggcgcaggcgcagagaggcgcggcgcgccggcgcaggcgcagagaggcgcggcgcgccggcgcaggcgcagagaggcgcggcgcgccggcgcaggcgcagagaggcgcggcgcgccggcgcaggcgcagagaggcgcggcgcgccggcgcaggcgcagagaggcgcggcgcgccggcgcaggcgcagagaggcgcggcgcgccggcgcaggcgcagagaggcgcggcgcgccggcgcaggcgcagag

SEQ ID NO: 309992 - DNA, 1000 bp, Homo Sapiens
tgcaaatattagaaatgaggaaaactcaattgtaatgtggctatgtatgccatctttcttctgtcagtaactaaattttaaaatctagtcactgcctcaatgttacactgtgatagactgcattaatggtcctaattcttcctccctaactatatttgtaccctttgtcatgtgatcctgcaatcctttccaaaaaagagatggggcatattcactcacctcttcatcctaaacttggacatacacattgctttgatctatagggtgatttttaagagaaggtgcctagtatgaacctagaccttaaggggtctgacatatttcaatgtattctttcttgtgtctccgcagttagcctgggtcactgggcctgtgtcacattacagttgtccagttgccctggtcactctggcagaagccagcctacctccctcaacagccctctgagctccaggtatctaagcaagcataaacaatgtcaggggatccccttaactgacccccacttgattacagacacatgcacaatgactaattattgttaattatacatacacttttgtggttgtttgttctatggtgttatcactgcagtattgttgtgacaataaataactggcacataagttcttccaaagacaatatatccagattatttaatatcaaaaaagtccgttgataatttctcacttctttttttctcaccgatattaaaatattttcatatactaatcagtttgcagtagaaagtttagttgaggctctgtttgttctctaggtatacaaactaagaatattattttgtctttcacggtttgggtcttattcttaaggagtccttatgctccattctttgtgttttcatgtagagtgatattcattagtgtaaaactcatgatctttctttactaattcactggcatcctccaggagtaggagaattgaattccagttggagaatttttagtaagaactgatcatggagttattgcctgtagga

SEQ ID NO: 309993 - DNA, 1000 bp, Homo Sapiens
aaactcctgtgcagcaaaggaaacaactagtaaagtaaaaaggcatcctgaagaatgggagaaaaagaaaaaaaaaaagaatgggagaaaatatttgcaaatgatatatctgataaggggttaatatctagaatatataagaactcctacaactcaacatcaaaaaaacacaaaaacgtgatttaaaagtgagcaaaggacttgaatagacatttctctaaagaagatatacaaaggaccaacaagcaaatgaaaagatgctcaatgtcactaatcattggagaaatgcaaatcaaaaaccacagtgagatatcacctcctaactattagaatggccattatccaaaaattagaaaataacaaatgctggtgagagtgtggagaaattggaaaccctgtgcactgatggtgggaatgtaaaatggtgcagctgctaaagaaaacagtatggagatttctcaaaacattaacagtagaattattatgtgattcagcaatcctactcctgggtatttacccaaaacaattgaaaacaggatctggaagagattatgcacactcatattaattgcaataatattcacgatagccaagaggtgggagcaaacaacctaaatatccattgacagttaactagataaagaaaatgtggtatatacatacaatggagtattattcagtttttaaaaagaaggaaatcctgtcatatactagaagtgcatgaaccttgaggacattatgctaagtgaaataagccagtcacaaaaaaagacaaatactgcatgattccatgtatataaggtatctaaagtagtcagactcatagaaacagaaagttaatgtggtcactagaggctggagggaaggggaaataagtagtcattcctcaatggggtatagactttcagttttgcaagatgaaaaggttctagagatctgctgtacaacaatatgcatatagttaacactactgtagcatacacttaaaaatagttaagat

SEQ ID NO: 309994 - DNA, 1000 bp, Homo Sapiens; identical to SEQ ID NO: 120167

SEQ ID NO: 309995 - DNA, 1000 bp, Homo Sapiens
ttacctttgttttcttctagtatttgaatagttcatttccttttgaattgatctattaaatgatcaattgatctatcttatgattagatttctttttctttcaataaatgagttagattcattaacatatgtagataagctgatatattgtgtcttaaattttacattagtttacattatacttactatgcttattatacatgatttaatctttatttctctatgtcatgtgctttcttctgtaattttaaagttacatcaacatttaagaaagtttctattttcattccagttgtaacctctgttcttacggcttttaaaattgcccttaagtccctattttctcaattagtcttttaatacctgattatcaatatttaattgcactatttgccatttattttctatatatcagaaaatgagattaatctgcttttttgtttctcttatcttcttttttattatattgattcttctttgtcaaaacataatatttgtatattttcttctatccatgtatccactttttaaaaaaatttgggactatttttttaaatgccaactattaatccttttgccagtgtttcttaaattatatcttatttttttattttttattttattattcttatactttaagttttagggtacatgtgcacaatgtgcaggttagttacgtatgtatacatgtgccatgctggtgtgctgcactctttaactcgtcatttagcattaggtatatctcctaaagctatccctccccctccccccaccccacagcagtccccagagtgtgatgttccccttcctgtgtccatgtgttctcattgttcaattcctgcctatgagtgagaatatgcggtgtttggttttttgttcttgcaatagtttactgagaatgatgatttccaatttcatccatgtccctacaagggacatgaactcatcattttttatggctgcataggattccatggtgtatatgtgccacattttctta

SEQ ID NO: 309996 - DNA, 1000 bp, Homo Sapiens
ttattaagtcctacaaatatatgttggagaaagataaggagaaactgacattgttaatcaaagtttaagtgactgtgaaagtgagaaggctgccttgaaaaagatatttatttttggtacttaaagggcagaaactttaaaataaggcacaaaatttaattataagtgtagaatatttccaggacatgttgggttctcaacctaataattccactctttctgtagagtttttgtttttgtttttttttttaattctgcaattcagataagaacaccaattgggatgatacacaattttcagagttggagtgggcactaatacactttggctgtgtccccacccaaatctcatcttgaattgtagttctcataatccccacatgtcatgggagaggccttgtgggaggtaactgaatcatgggagtggttttcctccttgctgttctcatgatagtgagtgtgttctcatgagatctgatggttttatcaggtgctctcccttagctcagcactcattctttcccttcctgccgccatgagaagtaggatgtgtttgcttccccttttaccatgatcgtaagttttctgatgtctccccagccctgcagggagtcaattaaacctctttcctttacagattacccagtctttggaagttgtttatagcagtatgaaaatggactaatacaggtactaagcaaccatgtaaacagaatggcatagttgacaggcatcagcaaacctctgtcattgcatattggctaaataattcataacagagtagccatagtagcagaaatcatagctatttactgcccaagcctaatgttcaaatatctaatagaataaatcaatgttgaacccccaaaacctgttggcacatttattaggtattactacttttaatctgaaaggtcagtgattcttcttgatgagatcagtatctattccggctaagggtttgtctttcctgcccacagggctttagccatataaaatt

SEQ ID NO: 309997 - DNA, 1000 bp, Homo Sapiens
aattaaaatgctcactcaaggatttaaaagttaaaatatgaaacaaaaattaaggatgacatttccttactttatgttttaaatacctcctattgtctaggatttatgtatcttagtgttaacacacaagtctcttcttatatacttcaagtctctaaaatttttatcctttctctcttctacgctttttcatgtgatttctcctctggcagaagtgacttcccctcccacatccccaatgtgaggtaccatctggtaaaatcctactcaaccttaaataatcaactcaattatgacctcctcacagaagctttcttgcaacactgcagaaagagttggcacactctccctgtctgaaattattttctgtagccgtttttttctttatattttacttgttcacttaattgtctctactttagactcatatcctctgatttttaaattcatagcagagtgttcagcccagatagatcagattataaatatttctaaagtgaataaaggcataaatgaacacatctatttctaaaacaaatgaatttttgaactattcattagagaaaacacatcgactcctaagcattttcttattcttataaatgaattatctctgactacagctagtcctagattacttaggatgtaaagagactaccacaaaagtattgtcattgacatgcttgacacaatcaaggtcgctttaaggaaattctacaatgctgctgtatgaatgtgcttgtgtctgttgccagaaacgaaggtgaaatattggcaagcagggaaaatatgtttgggagagaaggacagaaaatagggaacatgaaaataagactctagattttctgagggaagaaagacatcttgatcattttttctgtcaccagtatctgacagaagaaatagttaaagataaatggtacaaagatggcactattgactttcatatctcttagtacttccaaagcaaaatactgtctttccactatctatcaaacta

SEQ ID NO: 309998 - DNA, 1000 bp, Homo Sapiens; identical to SEQ ID NO: 120168

SEQ ID NO: 309999 - DNA, 1000 bp, Homo Sapiens; identical to SEQ ID NO: 120169

SEQ ID NO: 310000 - DNA, 1000 bp, Homo Sapiens; identical to SEQ ID NO: 120170

SEQ ID NO: 310001 - DNA, 1000 bp, Homo Sapiens
agagttcctaaagaaagaaaaaagagaggtgaaaaaggaaaaaaaaaagaataacagaaaacattccaaatttggtgaaaactacaaagtttcaaatgcttcaaaaaaaaacccaattgcaagaaaatattttaaataatgaatgtaaagcacattgaaatgaaattgtgcaaggtagtgataaagagaaattttttaaattcagaaaaaaagactgatatacatagaactagatcacagcagatttctaatgagaaataacgtcagacagacggtggtggaataaaacttttaagttactgaatggaaaaataaactatcagtatagacttctatatcaaaaaactgttcaacaaacatgaaacaaaggcagtattagatatgtaaaagaggaaagaattcattaccagaagacttgtcacacaataaatgtcacaagaaatccttcagacaaaaagaaaatgatactgtatagaaatatggattcatataaatgaatcaagagcacagaaaatactacctatatgtatacaattctaaatcattatctcagtctccttaaagcataattggctgttgaaatgaaaataacaacaatggagagaaattttcataacacactgaaaataataattatgacaaaaataacacaatttttggtaatggaaacacaaaagggtaccttgaaaagttcttatactctaattgaaataacgtaatcctgaaagatagactgtgataattaataacataagctagtaaagagaaaacaacaaattagaaatactgcagtattaaatatggcatagaaattagtaaaatgtaaagcaaaaactagtagaattgataaatctagaaggtttttatttaaaagtttttaaaaaattcttataattcagctaaggaaatcagggagaaaaaatattgttatacgcacaatacagacacattaaaattttaagagaatgctataaatatatgtgaacaaatctgaaaactt

SEQ ID NO: 310002 - DNA, 1000 bp, Homo Sapiens; identical to SEQ ID NO: 120171

SEQ ID NO: 310003 - DNA, 1000 bp, Homo Sapiens; identical to SEQ ID NO: 120172

SEQ ID NO: 310004 - DNA, 1000 bp, Homo Sapiens
tccttaagtcttgtttacctaactataactcccaaagcccagaaagtagcagtttaattagtggcttatcttcagcacataaaggattttcaacaattcctcttgagaaagaaaggctgtccatcttagttcttatgttgaatcaactatgttcatgtttatagggtctgtcacttgaaaaagcctatgtcaagtatcaccatctgtgaacaatttcactgtttgaattgaaaatgataaatttttgtagttttgtttatatctgttctaatttgttttctgctgccataacagaataccacaggctaagtaatttataaagaaaataaatttatttctcacagttttggaggatggaaagtctaatatcaagatgctggagtcttgaaagggccttcatgctgtggcttctcatagcagaaggcaagcaaatgcacttcatcctttcaacagtaactcactcctgacataactaatctactttggtgatatcacattaatccatttatagggcagagccttcatgacttaatcatctcctaaaggtaccacctctcaacactgttctgatgtcaattaacttgtaatatgaattttgaaggggacatgagaaccacggcattttcccccagacctctgcctcctgcctttcatcaggaacccactctccccatgacagcattaatccatttgagggcagagccttatgactaaatgacctcttaaaggtcatgcttctcaacactgttacaatgacaattaagttttaacatgatttttggagaagacatttaaaccatagcaaaatcatttgcaaagcacacagtaaaatctaatatagattatgttaaatgctatcagactattaaacatttcaggcataaaaagaaaataataataaataacacaatacaattctaaggtaacaaatatataaattagtttcagaaatggttggatacagagccttggcaatattgtcagagtttttaatcttcgt

SEQ ID NO: 310005 - DNA, 1000 bp, Homo Sapiens
gaagctgattcaaatggatgacagacagctgtaatgcagttctaccaattgattttttgtcagggaatgattcaaaaaggccaaggaaagcgctaatccgatttgacagtgggagatccatttgcgctgcaaactgtaggtgattgttaatgggctggaaatcctcagctgaggttaactttgttggagcaaatcagataattaccattgtcaactccctacatagcaagaaaggcatctgcaaagcctggcccatatgattgtgtttcaaattaaatgattaaatacaaataaggataaactttatattggcttgctcatcatgtaaagtggattagccatatcattagggttcatctaaataagctgtatgtatagtgcgtgtgtatgtgtatgtataaaagcttagcaaattttgagtggtcgaggaaaacaaaagacaaaataaaacacaaggaaatatcttcatataaaatagcttctgaattatctttgttttcagagaagacatgtttgtaaattttttctcttttttcttttaattgctgaagagatgatggcataaaggaaatgacatctagctcaatcagaaaaatctgtgttcgagtcctacctcctgaatttacatggttcatttaatacagtatttttcaacttttttcattgttgctcttctaagaagtagtctttctagatgtttttcctaattagctaaatgtcattaaaattttgatcgtactgtatacctacttatggactgtaagacattcatagttgtatattgtgtatgttgtgtttttttgttttggtttgtttgttttgtttttttgagatggagtcttgctctgtcacccaggctggagtgcagtggtgagatcttggctcactgcaacctcctcctcctgggttcaagcaattctcctgcctcagcctcctgagtagctgggattacaggtgcctgccaccacgcccggctaattttgtgtgtttttatagagac

SEQ ID NO: 310006 - DNA, 1000 bp, Homo Sapiens
atgttggagcactatggtacttaacgtagaggctctgacttttgaggtacattcattacctgttactgaagttgagtatgctttaatattgtatgtttagaaaaggtagttacatttttaaatctgattgtgtaagaagaaaagagtagaaatgtttggggccaagtcaataattatttagtatatcataatttgagatgaaatgtgtttttttttttcttttttagtttcaagttgaaacattttaagaacagataaggaaaggctaactgtgctgagatgaaaataacatttttaaagtaactatcttaaagaaaatacatttctagaattttgtgtaaattttcaacaaagactcagaagcctggatgaggtcttgtgccaagactggaaagtgtggggattagaaaaagtttgaagagattgttgtgagatcctctcgtatgaggcctgaagctgtacatccatggaaagcagttaccccaggcgggaaaacaggttatccattctcgagtgagtggccgggtgggaaatagtccatcatgtcgaatggatcgtactttccagcaccaagatttgtggttctctaggtgaataagatgacaccccttcacttcacttcacttcaccattgtctgcatggagtacgtatctaaaaacaaattagcaaaaaggttgggtctactttacttttcatctcctacactattttcttctttgttctcggcaggaaaagatgaagttgcattttattattatctcataggattcttattctaaaatgatttgatttaaaacccattgcactttatttggataaaaaatgcttcactctctagttcttaacaataacaccagcctgattttattacgttaagcactgcaattagacaatacaaagaatttgcagcaacaacatgttattttatcatgggtggaactgttcattgtctagcagaatttattaccagataaatcccttttggggaatctaatgtgg

SEQ ID NO: 310007 - DNA, 1000 bp, Homo Sapiens
gggggctagagtagctgggagtcctcacatggttcaaaagcccctttgtccattgtgcttgagagaaatcctccaatgcactgtccctactgttcttcaagcatggtaacttaagatcaaagccctcccacaggaactgtaaaagttgggcactatacatgtggtacaagactcccaaccttctggaagaagctgggagttggagtttccttcctaattataaggcgttgtgctcatggtaggattagtgcaagtgtgtctctgcttttcctacctgtttggatgtgggtattttctcagtcttccagtgtgtgggagactttcaactggattctagcttcctcttggagagaactaattcatgtgtaggtgtttacttgtatgtctgtgagagatggaatagtcaggagtctcctgttctgccatgttgctgacatccccaggagaaggattttgagtggagactaaagtattttgagtaacaatatttaagcacaaattctctggagtgattaatctagcaatcatgggtcagacagatttgcgtagggagaaagtgtaggtataagctatagaaattttttaagtaagaggtcataaagggctaaaataaggcaatgagaatgaaaatggaaagacagagtaggaagagctgtgagccaggaaaacagaatgaacaagagttggaataaattggagcaaaagagacattaattgggactcatgaattttagagcctgtgtgactagaaataccacagtctttgaaagaagacagagaagagctactgagacatgatttcatgaggaagacactgtcataaataaataatgccaatgaaggttgcttgtgggagaaatgttacaacaccactgaatgcatgaacagtgatggtttacacgtacacacacacacacacacacaaccatgattgagtggaagtagatattaacagaaagagtcataacttgctttcaacaagaaactgtgcagcttatct

SEQ ID NO: 310008 - DNA, 1000 bp, Homo Sapiens
ccgcaaacccattgctttaatcaacaagcagtttggaggaaagccacactatgtctttcttggcccccaaataaaatgtgggaataagtttttgctatatgttgaggaatattgagagattttgtgtctattgtcagtttttaaaaacttaatcccaattcatgtttctctagggagaaacctatagattatctagcacatgtgtggaaaccagcaaattgaaggtggcataaaaagtaactctaacacacacttgctgagtgattttttttcttttatgtttaggaagtttcctcttccctcccacataaagagtgtctagtaatatcaaagcttgttggctggtgtggtggctcatgcttgtaatcccaacagtttgagacaagccctggcatcatagtgagaccctgtctctacaaaaagtaaaaaaataaataaataagtaataaataaataaattagccaagggtggtggtgtgcacctgtagtcccagctagtcagaaggtatgaggatcatttgaacccaagagatggaggcttcagtgggctttgatagcatgactgcacaccagcctgggtgatacagcaagactctctctctctctctctctctctccatatatatatatatgtgtgatatatatatatggatatatgtgtgatatatatatatatatatcactgattactagaatactcataagtaaaagtatataacaatcccagaatatcaatgaggacaataaagttagctaacaatcactggtcctttgatatatgtcaagcacatattctaatcactttgcatgttttatatcatttaattcttacaaaatgccatgaggtaagtaccattagtgggtcacccaagagagagaatgaagctaacacacagggtactttctaaacccgtctaaggtcaacaactaatatactgctaaagtgagattaaaacccaatccatctggctccagagctcaagatgtttatatgcttcta

SEQ ID NO: 310009 - DNA, 1000 bp, Homo Sapiens
aaacttagccaacaataatgtgaaagaaatgtttaaatatatgctataaaatataaacagagtggaattccttagtccatttttaagtgaaagagaaaatcagggaagggataagagctcagctggaaggtgaaagaataaatggagttcattcataatcaaaatacatatgtgcacacagctacagaggaaagggaaaagaataggggagagaacaaacattttctgatcgtgaacaatttgacattttctatgtacatatgcatgctatctgatatggtttggctctgtgtccctactcaaatctaccttgataatccccatatgtcttaggagggacctggtgggaggtaattgaatcatgggggcgggtttttcccatgctgttcttgtgatagtgaataagtctcatgagatctgatggttttataaatgggagttcccctgcacatgccctcttgcctgccgccatgtaagatgtgcctttgctcttcctttgccttccaccatgattgtgaggccttcccagtcatgtggaactgtgagtccattaaacctctttcctttataaattacccagtctctggtatgtctttattagcagcatgagaacaaactaaaacactatcttattgattttttatgagccttatgaactaggttcattttcacctttattttaaggataacaaaatgaaggtcagaaagatttggtaatttctccaagattagattaagtactaagcaaatttagtcatatctgtctctccaaatggtgtgatgtctctaccacatgagtttctgattgttttgactccctttttacaatctcaacaattttttaatttacttgacctggcatagacagcaaatgtggttaagtccagacacataatttcttattagaagacagttatagtctggcaactatctaaactattatttaatggagaaccagaaaaatgccaagaaacatctttctttgtttgtttctttgtta

SEQ ID NO: 310010 - DNA, 1000 bp, Homo Sapiens
cctcacagcctctgggtcagcatgtgtgacagtcatttcaataatataaacctgttattaaaaatatacacattagtttctctatgaaggaatagttctgactgcaatagaaagatgtttaagcaaaactctggccatctgtgcgtgtgtgtgtgtgtgtgtgtgtgtgtggaaatatttgctaacgttgttcccaattggttaactagtcttatacaggattctagaaggttttagaagcaaaatgagtataacatatcagaacactgcataaaactgatttattgagattcaacttttaagacattctatattcccaaggaaacaaataaaatatatggatctacctctgttaatttagtaatacacgtttgtcctctgttttgcggggtgaattggatacccttttcttgtggattttgtgttttgtgaactactttgggacaatttgctcatagttcctgttttactgactccagaacatatgtgccagacatgttttttctcaaaattttcacatatgtgtcaaagaaaatttaatccttattatttttttatttacatttacacttaaactcatcaaaacattattatgcaaaagcttttgaattccaagagacattacagggcctaaaagtcccaagataacactcttctaaaattaaaatattttatcattagaatgttcatttaaaatttttaacatatatttgaagaaaccaaaataacgaacagattatgttccccttttttgactgccattctctataattcaaaactagcaaattgtgtataaatattgtgtacaggttactaacatttattaagtcctttccttttaaggagtgcaaaacgatgtgaattgagatttgtcaattttggatcccattatcttggctccagtattctcatggttgtaattcagaaaatgcatacataaaacctattgcacaggacaattagctatacacacacaatcatcacagagccctgtgaaata

SEQ ID NO: 310011 - DNA, 1000 bp, Homo Sapiens; identical to SEQ ID NO: 120173

SEQ ID NO: 310012 - DNA, 1000 bp, Homo Sapiens; identical to SEQ ID NO: 120174

SEQ ID NO: 310013 - DNA, 1000 bp, Homo Sapiens
tgctggtcctccgccctccaaggttgatgtaacagccttcagcatcttacatctgtgctcactttcttttctctattccttaacctaacagagggcccctcctttatcttcccaagcccatttagcatctgatatgcagaaaaacccagaatcatatagaaaaaccttccccaaactaggagggagccaaaagaacacagaatgactcagacacaagtcattcttagtgagtagattagtttattagaacttacatgtgaggctctcctggatggcagcagaatagctttagagatctgcactgcctcccatccttaagctaattttctggctctttgcccgctgtgtgtgtgatgggactgttttccttgatgggttctcagatacactacaagatgtttgggttatcagggacgtctgctgtttggctgggcatgatggctttggctcatcaactggccttcagagttcaggcagtggacatacaccctgaagtaacctggtggggggcctgccacactgcacagacaagcatggggtaacctggttgttggtcttgcccagtactagctgggtgacattaggaacctactgtctctatctgagtcaacttccttgtgtgtctgtcggtgatggcaatacctgcttcccaggactattgtgagtgttaaatgaagtaatgcacgtaaggggacaaatagtatatacacaataaatggtggctgccatgatatcagcctgcacagacatcagccacgggcagaacaacctaacacacaactgaccagacaaggcaccgtcactcaacagctctatatcaatgcaagcgcccacagtggttgatcacaagcacttgaagcataaccagcggtttctttgtgtggcctggctgttattaataacagccaatttattaataatgctgatgttggcctctgggctttggcaaacacttttggtcaaagcatgaatcgactcggcaaccataatgaactgttca

SEQ ID NO: 310014 - DNA, 1000 bp, Homo Sapiens; identical to SEQ ID NO: 120175

SEQ ID NO: 310015 - DNA, 1000 bp, Homo Sapiens
gtcacacagctagcaagagtttcaggaagctagatctaacagattccaaggcccatgtaatgtttccatcaggtatttgtccaaaaaacacttttccttcaaggtaaggagtgggaaggctactcgtatgggggcatggtgtcccagcagcccacagctcagtgccagactgtgagtgagaagacgaatgtgtgtcccatctctgccacttctgtctgtgtggcctcaagaccctcacctagaaggatggctgaagtatcactccaggcctggtgtcctgacttcttgaacaactgtctagggtgtgcaagccagcacatccccttttctgctccctagttagatggatttagctaggctattgctttgtgagaatagagggacccaagagcctcattctccatctatataactcaaagactttgtataagtcagggtgagctggttttgtcatgagaaacaaccaccccaaactctcagtggctgcagacagctggctttctttctttcccccgccacatgcgtgcagcaggtctgctggtggctgtgctctgagactcaggttgctcctgcagaccctctggaaacatggccattctcagctctggagggacgagtccctgagtatctcacctggacaattaaatgctccagcctggaagagacacgagtcacgtccatccaccattcattggctagaataagcccatggctcctctcaaccgtgggggcagggaagtctcatcccaccggggcctggaaggctgagaaccaaaagttgggcgaacagtactcatggctatcatagagtggaaccagttccaagactctcaaaccattttttgagagcaaggggaagcctaatctcattctctattttctatcatcttttttacttatataaacccaaacctctctttattaaaacatctctctatatatatgtctattttaaaaagtctctctctatatgtctttgtgagaaaaaaaaatgtgttac

SEQ ID NO: 310016 - DNA, 1000 bp, Homo Sapiens
caaacaaccacctttttttctcccctgagtattttcagtcctaaattggtttaatccatagacgcagaacccaccattagggaggtctgactgtacttcacgggtttcagctgggttaataactaggctcttctcctttggcaggctttgaaccacatttttttcactgcagtatcatgagatatccaagaattctgcatcaagtttttggcctcttagcaactgatttctactcagtttatctacctttcagcaggaacaatttaataatcaaccaaaaactttacgagaaaagcagctcagggtgttggtctcatttctctctgcttccctttcctttggaattttggcccctcaagtcctggttgccttagcagggctgaacatcaatttttgtctccctggggccacgagactcacaaaagctctgctcagagtctcttcctctttgccactgagttattcctgactcacttgctcagcctctttgcccaggatatggacaggaaaaagccttaggggaaaatcagcatagaatggcaggtttctctttccctcaatgagcaggctttctctttaagatactgaaccctcaaatctagtccattttagtgagtctttactcagattgtgtgtgtgtgtgtgtgtgtgtgtgtgtgtgtatgtgtgcatactctactcagcttttcgttttgttattgatagcaggttttgtccacctctggctggtccttcagagctgttagctgaagcagtgtctgatagattgaaaaagcaaaaaataaaggactcataataacctttctagtaaatatccttttttgcccctttaacatagcctgaaagaaggaatgtgaaaaaaaatctcagaattatcaaatttccccatagaatttcatgccactgataatatttcaggcacaaaatgttttctgtttttaaagtttttccatatattggactataaattcttaaattatcatatatatggtagtcctta

SEQ ID NO: 310017 - DNA, 1000 bp, Homo Sapiens; identical to SEQ ID NO: 120176

SEQ ID NO: 310018 - DNA, 1000 bp, Homo Sapiens
ttggcagaaatttttttttagtcttcctcagaaggagtacttcagtggaaaaaggatgggctcatcaaaaatgaaggaaaattttcaaattcatttcaatgaagtaaataatattgatacttaaatctgttaaagacagtataaaaattacaggccagtatcactaatgagcatcaatgcagaaattctaaataaatattaactaacagaatctaacattaagacaaatgtgatttttttttctaggaatgcaagattggtttaatattaaaaaaattaatagatctcttaactcattaatatgttaatagatcaaaaaagaaaaatgtatgattatttccatagatactgagaaaacactttataaaattcaacaccctgtcctgatttttaaaaattccaaaaataggacttagtggataatttactgacttgtaagtgtctgtgagtcctagatagcatcttatatagcagggaaacactaagaaacatggcaaggaggcccactgtctccacctctgtttggcattgtactaaaggtattagccaatccaaacagacaagagaagtcaattaaaggtatcattgaaaaagaagtaaaactatctgtttgcagaggaaatgagaaaccttaaagaatcagtgattctctaactcaaacaataagagaattcagtaatagagcaggatataaaattattatacagaaatcaatagtttttatatacaacaagcaataactagttaaaggaaattatgggatatattcataatagcaacaaataagataaaatacgtaagatagtgcataagaaatatgcacaatcaacacaagatcactttaaaacaatctgaaagacacaaaagtatatttgaacaaatgtaagtcatcctttgctcataggtaggacaactcaaaatcacaaagatggtcagttctccccaagttaatttatacatttaatgcacttagactaaaaataccatcaaggcttttttt

SEQ ID NO: 310019 - DNA, 1000 bp, Homo Sapiens
caatgataagggttttttgctacagaaccaaaatctttgctggtccatttacatattttggaaatcttctatattaagtataaactttttaatctacaaagctaacagtaccaaaacctgaagctaactgaaccaaccctgcttctagctcctcccaaaccaaattcccattttaggcacagtactactggcaaggtgatttactagtgaaagaggctagaggctagaaactggcctaatatcacacttacttaagaggcaaaccaaagaaccctgatttttatgacacctggtccaaagctctttcctcttcactacacatttcacaaagaacactgtgattcagtgaaaatctaggagaaaatataaaaaacaaacaacgcttttaagaaggatcagcttttcactacaagaagccagaaacaattacgtgggtacgtgtttatgcaggtttaccataagtaatcctgctctggggtaccgtgtggctctaaaggttctggagtttttttagacagactatttgggcttagctcagactccaattcatatggcatttcattaaactctgttttgctgaaagggtataggccatgcttcctgacacctaaagtataagaagacaaaggcatctctcagataggctacaaggtcaaatcctatcccctaagcatttacggacttcaaagtttaaataactgcattaaaaaacccacagctagcataagaaataatgatagatcataaaccaaatctactaaatttgcagagaactttatttctttctcttttctccatacttttctcaccttttattggatccttttccctgaaccctataaaacataatgtaactcctgttagttgagaaaagacttaattcagacctccctactgaagttatttcaatgaagcttaaattaaaggtatctcagagtttctgaaacccaattacaataaaagggtcttttcactatctcattctctatcacacatgtgg

SEQ ID NO: 310020 - DNA, 1000 bp, Homo Sapiens
tactgcgtgttctcacttgtaagtgggagttacatgaagagaatgcatggacatgtagaggggaatggcacacactggggcctagtggagagtggagcatgggaggagggagaggatcaggaaaaataaccaataggtactatgtttaatacctgggtaacaaaatattcggtacaacaaacccccgtgacacaagtttacctatataacaaacctgcacatgtgtacccttgaatttaaaagttaaaatccttattgagataattcacatgccgtacgattcacccatttaaattgtacaattcagtggtttaggtgtattcaaagatatgtgtaactatcaccgagatcaattttagaacctttctatcacctcaaaaagaagccttgtgttcttaaactatcaccttcccacaccttttccccggccccaaacaaccacagatctactttctgtctcaacagatgccctattatgaatggaatcacaccatctatggtctttcctatctggcttgtttcactaggcatgttttcaaggttcatctatgttgtagcacagatcagtacttcattccttttatggctgaatcatattccgtcctggacagaccacattttgtttatccactgatcggttgatgtacatttgagttgttttcaccttttggttattgtgagcaacactgccttggacgtttttgtgtgagcatatgttttctttctcttggggcagcactacagggtaactgcactcaaatgcacagctccccaaaagccttcctaaggaaatactaggagtgagactcatgggacatgaggctagtgggaaggaggactcaaagcagagctagtgcccttcctgggcttctccagagcccatgtggaggggctgcttgctccgctgtgccccaggcacagaggaatttgaaagcacaggctcaagtcctgcctcaaccacccaccaaccacgtgttccaaggccagatacttcccatct

SEQ ID NO: 310021 - DNA, 1000 bp, Homo Sapiens
catatagaataagttgaggacttctcccagttttttttctaggcttagaacgagtttgtatataatattttgacaattagtagtttattcacatttttatttcttcttgagttagttttgtaaaattataattgctagaaaattgtctaaactaagatttaaatttatcaaaattatgttctcttgtgatattaaaaatctttactaatcctgtattagataacttttttcattcttaatattatttctttatgtcctattttttttctgggataatcacaccaagggcttgtgcattttgttaatcttttaaaaaaaacagctttttcttgatctttcatttttttatttttgtttcttggattaatctgagtttatctattgtgtcttgtttgtaacacagaatatgaaaaaatatctctttgcaccttaaagtatgttctacttaaatctcattatgcaaacatgatataagctcaaggtcaacaaatatttagaagaggattcttttcattttgattaatattaaagtacagtttgatgaaaattacacattcagcaaatgatggtttcagtagggcaaggcttgcattggaaatgtcatatctcacaagataaataataaaagcaagtgggtattaactgaaattgtgaatacatattcaacttagaaacataaatgcccattttctgaatttatttacttgacattcattctacatgtatttatggagtgttatcagtccaccagaggctcactggtaagcaagaccaaatgagtccccaccctcctcaggtatgcattttaggaagggatgataaaccagaaaattttaaatgtgtaatataatctcagattgagataggtggcttagcagaaaatacagctgggtaaaagaatgggggataagttgctttagattctctcccaatgttgatggatatctagtaatgaatatacttttacatgtttatggaatttttttttttttttttgaga

SEQ ID NO: 310022 - DNA, 1000 bp, Homo Sapiens
tgcccccgtgaagcttacagttccactgcttccaaacctgcacgcttccccagggtgtgggaagtctccagggctgtgggagtctgggatggggaacacatgtgcccaagaactttgaaagggaaaaggtttgtgcactgtgtatgcatacttactacgaatatattacaaagtgcacgtccacccggaaacccaaatacacacaaactcacaggcccgaggaatggtaaaacaggcccaatttgccaataaacagatcaccagaaacttggtagaaaagccctgtccaagttcagaagaaatgagggtctttaaaaatgagtttccctggccctcagacgccgtaactaaaaaaagttagctgttgaatcctaggtgttttcgagattctgagtctacagttgatgctgaaattcagtgtgtttaaaatcagtcaggtgaggactagttccctgaattctataaacatgcttattttcttatatttttttaacctaaataatccctactgtattttatttctttccctccctccctccctccctccctcccctccctccctccctccctccctcccctccctccctccctctttctttccttccttccttccctccctccctccttccttccttccttccttccttccttccttccttccttccttccttccttccttccttccttccttccttcctttcaacagagtctcactcccacaggctggagtgcagtggtgtgatctcgactcactgcaacctctgcctcccgggctcaagggattctcctgcctcaggcttccgagtatctgggattacaggcatgtgccactatgcccagctaatatttttattttttgtatttttagtagagacagggtttcaccatattggctaggctggtcttgaactcctaacctcaagtaatctgcccgcctccgcctcccaaagtgctgggattacaggtgtgagccaccgcacctggccctcttttctttttt

SEQ ID NO: 310023 - DNA, 1000 bp, Homo Sapiens; identical to SEQ ID NO: 120177

SEQ ID NO: 310024 - DNA, 1000 bp, Homo Sapiens
ttatggaccagacaatctcagtcacgatggctcgactcttcttccattgttgttagaagccagccatagtcactatgcaaatgatgagtgtgcctgggttctgttgtaaaacaaatgcaacttcatttgtagatgttgaaagttgaatttcatataatttttatgtgtcccaacatattttttcttttgactttttaaccatttaagaacagaaaaaccattgttagcttgcagcccatataataacgggtagtgggtgagctttagcccacgggctataatttgctgacccctgacataggaggagggcatgtgggcatttcttgtacaattctttcaacttttctgtgtatttaaaacattttcatagtaaaatattggggaaaatacaaaaagaaattgaatacattacaacagttattttctttaaagtctcctattagtatcgtggccctacacgtacctcactgtatctcccacaattttcaccctatgcatggtgaagcacctttttggtacataaatatttgtagttgggacatatctgttgtcagttgcattctttattattctaaagaacctattctggtcttccttggtgtgtttctccctgaactcagccttacctgacattaaggatataaacccagcttcgtttctgtttgaggctgtccatccgttcttcgcccatcgtttcattttacaagctctctcagtcacagagctttaggactctctcctggacaggcacgggattgagtttttgattcttctgtttatctcgtttatattaaatgacctgacgcgtttgatcttggttctctcgtacgtgtacatgggacgctttctctttttctaatgaaaaggtacaacatcaacacacggcttcctcgtcgtatggtttgctgggtaattcttcattcagccacacatcctccacttctcagaaccaacacaggtgcaggtgcccctctgcctgcgcacggacctcatctccctg

SEQ ID NO: 310025 - DNA, 1000 bp, Homo Sapiens
ccactttaaattcaagagtatcaacattgaacgaggcctgcgatgccagtactcatgttcaccgtgcaagtatacaagggaatcctcttactgcctgcccagcctccacttcaacaacattagccttattaaatgtgtcacatgggggaacattcaaccaatttgtgctccagtttcttctcctctaatgtagggtcattgaatgttttcatctgtaagacactgtccctattacaaagatgaataggagaggtcctcattcttaggaaatgaacaatctagttggtacaaaactacagagaacctcacatcacataacttaaaaattcccctaaatccttaacctgtcagaaatcagaaattttctggttttaacttttagaaaacaaaatttaaaaagctcttttagaaaaaaaatcatgttttggatactgtaattttcacaagccaatgttttgcacataccagtagccttggctgtgtctctgctgtagagttgaagcttggtgggctccctacctgctgggggctgaagccacaaggatctaggttgactctgaggggtcatgcctctccagccttccaactctctgacagtgatggagtgtagagggttacttcaggggctacccacctgggagacacagtcacctggaggatactgtggacaagggttggggataaagcctgcctatggggttgtgtaagtgacagctgagctgagacctggagaaggcatcgagttacccaaaagaagagtggaaggtgttccaagcagagaacaaacagcataggcaaaggcccagcaatcctacagaaagttgggtttggggaactgaaagtcattatggccacagcagagagtgtggtgtgtgaacataaggcaagagaagaggctggggagggacttagtggccacatcattcagagcctaataatcgaatgagggagtctggacttcactactgaaagattttaaactgaagaacaacgtgattag

SEQ ID NO: 310026 - DNA, 1000 bp, Homo Sapiens; identical to SEQ ID NO: 120178

SEQ ID NO: 310027 - DNA, 1000 bp, Homo Sapiens; identical to SEQ ID NO: 120179

SEQ ID NO: 310028 - DNA, 1000 bp, Homo Sapiens
ttacccaaagacatcacaggattcgactctaaacatgggacaaaatgtcgttcaggatgctggctcgggaacctcttgcacctggtcacaagtggagctggacagaggctggtggaagtggcctctcaacgctacacagtggggcgcagggctgcgatcaaagagccactgaggaacgctgtgtccgcgcccaagagcttcgtcccaggtctgggacagaaaacgtcaactctgtctcccatgttaacagcagatcaccaacaacacaaaaagtcatctcaaaacaccccagagattcacacgtcccacccccgcagagccgggggcaggtagctctgctgctttccctgcccagagtcaccaggcaggctgggatgcctgtctcctggaggggaaattgagccgtagatggggaggccgcgtgaagctaagtccacatagcaaacagcagggccaggatggcccagggtcatctgagaccttacctatgggcctcccactgtccgcacttcctgccgtcggtccaggtgacgcatttactcctaagttgcagtcacagcagggcctacccttacttctcaccgcctgtctctgcgtgacactcaggtctgacttcatgacaccagactggtcaacatccaaagccgtgggcatgagtgacagttctcccaggggtgacccccaggtcctgaaggagcagctcagcttcgatgggaatcttgctcatcgttggaggtcaaggatagaagagcagaaagtttgagacccagatgcttatggcaagatgataattattgactctctggttgagaaaacaagacacctgtttctcagaagaggttttcacccatctggcaggtgaaacattcttgggacaagactctcaaagattcttaaatgtcatgaaccagacctctcctccccatctttcccacccactctacatccctgatccaggtcactcaattgaccaccaccccagccccttctctgaccccag

SEQ ID NO: 310029 - DNA, 1000 bp, Homo Sapiens
gtattcctaggtttttgtgtgtgtgtgtggctgttgtaaataggattgtgttgttgatttggctctcagcttgaacctttttttttttttttgagacagggtctcacccttttacccaggctggagtgcagtggcataatcacggctcactgcagcctcgacctgctgatctcaagcgattctcctgcctgagcatcctgagtagctgggactacaggtgtgtgccaccacacctgactaatttctgtagttttttgtagagacagggtttcgccatgttgcacaagctggtcttgaactcctgagctcaagtgatccgccttccttggctcttcccaaagtgctgggactacaggcttgagccaccacacctggcctccagttctgtgttgaataggtgcggtaagagtggatatctctatgtcttattccagttcttaggggaagtgtttcttctagctgcccatttttatttttaatgaaatgtcccagaatgctcatttttaaaaggctgtttctcttccaatctcatgcgaatttttttcctccttgaaaattcaagcaaccagttgctctcttcacatccagcctttctcatcactgtacttttctgaccatccaggcatttcccttgttcactgagtactggcttgttggtgtccccctccccatttcctgctatcttgaatgacttgaacatgtttaggggtgattcattcaacaatctaatttcaaggccacctgcctttctcagctcccaagatttgctgtgcccttcactgtggcagtagtctgccttgggccagaccctgcacattgtcatcaggtggactgtctggtaaacattgctgtagcactcaggccatacctcctctcctccctgcctccttttcctaccattgttccctctaaactgcaagacctcctgctcctcctccctcctctttcctcctgctcacaccattgcctccatggcctcccctccctccagctcacccag

SEQ ID NO: 310030 - DNA, 1000 bp, Homo Sapiens
gtgacccacccacctcggcttcccaaagtgctgggattataggcgtgagccactgtgcctggcctcatgcacttttcattatattttgcaatttacaaagttatgtaggaggtggaattctggtttctgctggggatgtacagagcttgtcactcccactctcacaagaataaagccagacaaaccgtaagttctcgactttgcttcatcccatcagagacctgaggctgcaggacaaccaactggaagctggggagagacagggcctgcaggggaatggcattgagccctcccgtccctggggcagtcacggggcatcgttggtaagaggagcttggctggaacccctgagtcctggtggaggctgagtgtgtctgggcagagaggggagtcctgcggggacaaggtggagggcccaccaccctcctgctggcttctcctcgtgacccctgtccagcccccaccaggtgcccacagggctgcctggggatgagttctgacaaagccacgctcctgtgcaagcatgagatgatgtaggcattccacaatgttctaaacaaagagtgcctggaccttaaaggtgtactcattatttaccgattgaaatgccacatctgtcattctacaggcaccctgaggcacggacttgaaaaaatgcattgattcaagatggaataaaccgagtaggtttcagaacagccacccttggcctggacagtgcaagagctgcagagtgtcacctcacagggccagcggcgacccaagacacgggtgcctggaaagggggctctctgcggggacagggctcagaaaggctggacctgtcctgaaccacagaaacagggttccctgaacctcggccatcgtctaccattacggcgccctgtccagatataaagtcagaaaatctcagatgcacaaacattttgaagtaaaagatagtttctaaaccattactcaaaccaataaaacgtgaagtgaaatgaaatgtgtaatgtga

SEQ ID NO: 310031 - DNA, 1000 bp, Homo Sapiens; identical to SEQ ID NO: 120180

SEQ ID NO: 310032 - DNA, 1000 bp, Homo Sapiens
agtgggagggtgattgtatgtgcacgtgcagatatgtgtggcccccacacggtatctccagctatccgtgtcttgcctctccgtgcccagtgcacccttctcagccctgccgtgtgaccctgggctgggccctccctgtaccctcctttgcaggttggcacagtgtttggctctgtcactggaaggagctggagggactccacaggagggaggggcctgccctcctggttccagtgtgcttgcttttcctggcttccgtggtgtgtgcctgccagcctcatggtgggggcgggggctctcagtgacagtctgcaggagtttagcaacacccaggttcattcaccacggtgggaaggattcctgctaagcttccttgcctctgtccagctcccagggcgtctgcctccctcctgccccagggagagcttctgggtgagtctcgctggcactcctgccccgggcttcctgctctcaggccttggcctgctgcaccttggccaactgcaccacccggcacatcatagccccactcaggtcagagctgcgtctcagccgacgtggggttccgaggttctcaccaagatccagactcaacgcttgtgggtttgttgtctcagtcctggcggtggaggttctcccgaggcctcagcgcctccgttctcggaagtctctttacatgttagtggaaccctctgttcctgttgaatcattcttcgtgttaaatgtttctatctcttgactgatacatgatagtcatcatgtatgtattctgcggctgcttttgtttttttctctttatccctggttttctgtaatttgataagctttagggtatgtgtgtgtgttttgggggtttgtcaagatttgtaggctttgtcatttttatgcaatttggaaatattctagctattcggtctcttcccctgcctcctgcagtcccaggtactcgaatgggctgcttgctgtggactcatgggtccgtgagtctgctcatcttctt

SEQ ID NO: 310033 - DNA, 1000 bp, Homo Sapiens
aggctcagtctgatgcaggagacggtacggcagcctgggtgttgccagggagctcctgacctcaccatcttaggctagctgtgtgacgccaggcaagtcctttccttctctgagcctcggttccctcatctttaaaaggggcacactcgcctggggattgaggctcgcattgaccccctccttccttcctccaggtgctttagaaggaaggcggccagccccacaacgggggtcctgagtgtggccctgagtgagagctcccaaagggtcttcctaggaccagtgacagaggctgagggatgctgtggcctggacaggagcttccgggggcatctgggaaggtgtccgggaggggagctgcagtggacaggagccgagggtcccaggtggacgtgagtggggacagtgcccccagtaaaacaagaccaggtgcagaggcctggggcctgcaatgatgctgaggctgtggtggccccgcaggcatggcctggagggggggtggcctcagtgggaggccttggtaacagtccccttgtctgtgcggtcaagccagggaagcaggccctgtgtgcaggctgcagagaaccacgagaggtctctgggcacgagtgttcccactgagccagagaacgagatgacctggccagcatggattagggctgaagggtggacgaaggtaccaggaagcctgaatccaggcagcactgggctgggggctaactgatgcagtgagagacgccaccaagattcccacgtgggcaggcgtgccgtttgcttttgggcagccagagtccaggatggagagcggcagacacctctcctctagaccaggggtcggtctcggtttctcctaccgccttcaggcccagggtccccctgagcgttctgcacgtctgagattgctccggaaaagactctaggggtgtttgggaacaaacctggggaggaaggtggggccagaggtggtggccgaggtggtcagcctggggtcaggtgctgg

SEQ ID NO: 310034 - DNA, 1000 bp, Homo Sapiens
taatgctgattagcttgctcaaaaaaccagaggacaaatggagaatttcagtgtcaaactagatttatgaaatggaatcaaacagaaattctggaaatgaacataatagctgaaattaagaactaagtagattagctagacaacatattagacaaaaccaaagagaagattagtgaagaaagggagatgaggaaattcagccctgagtacagagatgggaaagaaaagagggaaatgaagaaagtggagtagtaagcatgcccttatgttgtaaataattatgaatataaatggttgaaatcataggaggagatgagtaaaataagggtagtaaaatatttgaaggtttaatagacaagaagtttaaagtgatgaaaaacattaacccatagatgcaaaaagcatttaagaatgtttagcaaggtgaatacaaaggaaaccatgcctgtgcatattggggctgaaatccaaagacagagaaaaatttaaaaacagccaagggaaaaaaaaagaaatattacctttaaagaagcaacaatagcatttacagatgacttctcagtagaaatgatggcagccagaggatgatggaatgatatatttactgtctgaaagaaaagaagcaccaagctagaattctacacctgggaagaagatcctcaaaaatgaggacaggaaaatgatgttctctggatgctgagaggttgtgtcaccagtaggatctgcactacagaaaataaaaagataattaggcagaatgaaaatgatcacagatggaagcaagaagtcgaaaaggaaatgaagtgtaacaaaaggaggacaacatggggaaatctaaatgaatatttactgtataagatgtcttagaagttgtaaaatatttatagaaatgaaatacatggcaagaagatcacaaaattcaggagggggctacatgaagttaaagcagtcttagtacactatactatctgggaaataatataagatctaatttacatta

SEQ ID NO: 310035 - DNA, 1000 bp, Homo Sapiens
atcttctttttttaatttgcttctatctgcaattttctataattccaaaataagcctaagtagacaactttattcagaggggcttaggaaattactttggataacattgcttaaaaggaaaaaaatgaaacaaattcaattattttgaaaaattattccatatttcttatttaaagcatcttaagtataagagaaagtaagtgaatgtatattagtcaatatctaagtttaaatagaaaacattaaaatgggaaatgttaaaataattaaaatcaatatgatttagacctatgcattacataatctattaatctactttgaaatagccattttgtaacatatggctttaataatatacagaaaagttctcatgcataaaactagctgagaaaatttgaaatatgtgcttttattcagtaactagaggaaagagaatgtgaacttcctgtaccacaacttattttagaagataagtggcacttggagatttatcacgtaaatgtgtttaacaaagatttcacattaaacactcagatggagtaatagaagtctattagaagatgattatatgttaatcatctaagtttaaaaatcttatcaagtttaaaatccatttcttatctaggccaataaattgctgttttgaaaagcaggccattcttcactttttttgttctcattacttcttaaaatgtgtcgcatcaagtgcttcctcaaagacttgggattttttttaaaaaaaggtaatcgttacttttcacaaactttaaaataagttcaaagggcactctgataacataatagacttttctatttgaatgcatttcataaaatgtggtcttaaatttactggaattcgcttatagtaatgtcaatgaagcaaaaccaatttgatttattcagtaaacatccattcaaattagagagaaacatttgctaaagaaaatatcttaaaggtgtatataaaaataagttgaaaataaaaactttctcacttttt

SEQ ID NO: 310036 - DNA, 1000 bp, Homo Sapiens; identical to SEQ ID NO: 120181

SEQ ID NO: 310037 - DNA, 1000 bp, Homo Sapiens; identical to SEQ ID NO: 120182

SEQ ID NO: 310038 - DNA, 1000 bp, Homo Sapiens
ttttttttttttttttttttttttgtgttttccgtgtagtcgacagaggtacgttcttggagacacagcaatgcagaagatggccaagtcccatgttttcttaagtgggatgggtggtcttggtttggaaattggtaagcaatatttatattcctaatttttgacacttttgagcaatgaagatagtttaaataacttaacttcatccccttatatttcctataaaggaagttagatccaaaatgttgatcagattgagtttttaatctttgtcaagactatttcgtgatgttatattcttccacaaagaaccaataatgactcattgcttctttttgtgatgttaatagccattaattatcattctctatatccattaattcattataagcacacatacatatactgtattcataaaaacatatctggaagaatacgttgaaattttaggagtgattatctctgggtgttgtgattatgcacattttaattttttcacttttaacctgtattttgtaacttttttaagacaaggaacttgtattaagtagtaaaaaaagaagttaaaagtatgcagtcagatatgtgactaagctctgtgaagacatatctagtgtgtattcccaatattgagctattcctttttcttttgcctttctagcaaagaatcttgttcttgcagggattaaggtaagtaaatgtcctctgtaagaaaaattgttatgagccttttttttggctcatttgttatggtaatattgtttatactttgttttaattattgtctttaatgctctactttttaaaaaaaatcatggaaatttaaaaaatatacaaagaaagaattgtgtaacaaaaccccacatacccatcagaaagcatcagttaccaactcttggggacatttgtttcatatatcttcttcccattccttattgcccccaactgccaaattattttgatgtaaatttcagacattgtattatatcatccttaaata

SEQ ID NO: 310039 - DNA, 1000 bp, Homo Sapiens
ttttttttttttttttttttttcattctttagatttctttatcacatttttcaaaaataaacaaatcgaaccatatttgtagcaactcaaagtgcagcatagatttaaatgatgtatttgttcagctcactgatagggggcaaatactacattaatatattttcttcctgtcaagagttatttacatatgtacagtatttcagttaaaaatataacaccataaactatattttataggaaatcataagggaaggaaatatgcaggtctattaaagacttaagagcttctaataaactactttacttggagagggttggggggacttcagatcatacagtctgccatggagaaaagaacttgctggcagacagcctgatggttcagaggctccagtgcccagttagccacctggtctgcaatctttccacagacttactgatcaggcttgatcaggatggcctagccatccagaaaaagcccccatcaggttcagtcccttcggggtacagatggaaaaggcgtcaatcactgagtgcacagtatgaaaggttccaaaatctcccccagctggtataatacaatcagttccccttcaagttatggtaagccatatgtgccaagcatgaaataatcagattgcaactcatcacggaagtagttaattctgtttttctagtacagcagtgtctatgatattccgccgctttggttctagggctgcaaaaaaggaaacatcttggtcccggtctgactgcaatgctaagatggtctcttcaatgacttcaagatgagggttaccagcatttctaaaatacgccttttccaacagcatctgccttagggccttggctagcagaaccctcacgttgggcacaggatctgatgcgaggctcaggaggctgggaagcaggtgctccatgaactggtccacggggacacactccttgctcaccactgcctgctccaagaaagtcacagccaaagaaatgatgttttccg

SEQ ID NO: 310040 - DNA, 1000 bp, Homo Sapiens
tttttttttttttttcaatgttcagtttcctttaatgacccccatctccctgaagggcaggtgcaggcagctaggtgatggcaagagatgttcacttgaagatcttgccctgattgaaggctttgcccacatgctggaaggccccctcccaggaaaagtactctcgaaccagcgtctgggtctcctcgctgccaggatccagtttccgccatgtgtatgactcgtagtccacctgccaatctggactcagcggaaaggcaagctcctggcctcggaagacccagactccagaaatggagctgctattgttggttccaaaaaggatgacactggcgaaggcattcttcctcagcttgtccagtcgctggaacattccagtgatgagattgcagctcatgaaggtctgagtgagttcttcagggaagcgatactctgagtaccacagggaccagccgtccttatcaaagtgctcccagaaatatggcagtgccacagagagtgtgtcctcattggagtacttgcgcttaaattcatccaacacaaaggtactcttgggcaggtgagcgaaggggtccttggccttgggctcagcagccagcgcctgctcacattcatccatctcctcctcaggagcaggggcagccgcctttttctcctccttccgctcagcctggggcttctgcttctcttcccgtgaacccttctctttccgtggtgtgtcctttttaggttgggtctctgcaaactttttagcatcaaactgggccatcttctcacacagtttcacttcgcccaagacagcccggaactggggctggttaatgcaggtgaggaaccagcggttggtattgggaaaggcctggcggaaagaaggctctagaacctgcttatagagccacaacagggtgcagacaactgtgatgtcagccaatgtcactcgttcgcccaccagaaaagtcctcgtcttcaagtaagcatccagcagccccagaattcgcct

SEQ ID NO: 310041 - DNA, 1000 bp, Homo Sapiens
gaatgaaccaaaaaatttatgttgggtggtgggatgaaattaaagaataagtcaactgacttcacaaaactgctgagcagaggagccactatttacagcaagcagctcttcccaccaagtctcacacatacaccaacatttactggggccaccatcttattaataatctacccatgcatacagcattccttgaacaaagtgggacctaaccctgaaagggcacccaaatattacccacgttacactctctatgggagggctttatccactagccctttcctcaaagaaagaaaaatacgtccaatttctcagactaaagaaaccaggtcaagtcaacaggagaagagaagggaaaggcaaaaagatccaaccctgacgcacaagaatgactcacattagaccgatgataaaaaccaaagaagcacaaatcactgcctgtcacttaacgggaagatacctgctaaagctttactctgtattttctcaacctctccttatttccttactagatccaaaggcatacaagacaagcaggaaatatataaggaactccattatggcagataaggaggcacgtcaggcaatgacacaccattcctagtaactccatttcataaaggcactgatctgtcacccactgatccccagggctgattaaaggcaatgagttctgcgaccaattactagaggtatctacagagactgtggaccatttctgaaacctgtcccacaaaaagacaaaagattttcttggcaaaatatttctatattattaatagtaaaaacaaccaagattcaggtgatagcagctttggctgatcaggacaacttaaaagattttgcagatgagctggcaaaggtccaagccccaaccaaggggattcttcgatcgtgcaagtcctagggacactgtgctcagtttatcttcctaggacaaggtactcattacccaaatgttcagactcctgacctttgccaagtgagtcatatatcctatctc

SEQ ID NO: 310042 - DNA, 1000 bp, Homo Sapiens
ttttttttttttttttttttttttgaattcgatattttggaacttatttataggctagacaataagttactcagattaacccagatcaatagcaccttgacttggtgacccagagaattctaattagcttttagacacatttttctttatcttgatattcaatacatcatgtaagtcagtaaccatgttaaacaaaattaaaaggacaagttatagtttacttcacagtctatttcaaattcagtttgtgcactaggtcagttttacaggaaatggtcttttaacatatgaagagtatagataatctgtcaggtctcttctctcccaattaagaaaacaagaattattttggctagcttgacaattttgtaaatgaaaaacatgaagtgagtaaataaatcacaaagatggacaaaaagcaatatgatataatacacatcactttttccatttgtattcggtaagtttttacatttcaagtaattgaaatatatatatgtttttcttttatatatatatatacacacacatacatatatagtaccttccagttctagattactaaagtttattctgcaaaagtacaaaaataaacctcttaagaagtaaacaggacagggcatggcaaaagcgaatggctgcatgttaagattttttcttgccttatattgatgggtgtattttaggtgataaattttcttcactatttagcacttaaaatgaacattttcttacaaacattagttgtaagaaactgatttttattaattagcaaacacattgagaggtatctgttgatctgttattctttaaatccagataaatatttttaaaaaataatttcacacatgaggctttaatgtgtttatttaggaaaagatagaatctgaggctacaatggttcaacctaaagcatccctttttcaatagtggagccaaactctgcaaaatgtttttccttgtctctaaaaattaaattaagtagtatttttactataag

SEQ ID NO: 310043 - DNA, 1000 bp, Homo Sapiens
ttttttttttttttttgatccattgctggtaagctaatgtgatttttttgggggtgttaaagaatcttgttttgtcatattaccagaactgttttttctggttccttctcatttgggtagattatgtcagggggaagatatttgacttaagggctgctgttcacattcttgtgtcccatagggtgctcctttgatgtggtgctctccctcttcccctagggatagggcttcctgagagctggactgcagtgattgttactgctcttctcagtctagccacctagtggagatactgggctctgggctggtactggggagtgtctgcaaagagtcctgtgatatgatccatttcctgtgatgtgatccattttcaggactctcagcagtggataccagcacctgctctggtgcaggtagcaggggagtgaagtggactctgtgagggtccttggttgtatttttatttagcatactcgttttctgttggttggcctccagccaggaagtggtgctttcaagagagcatcagctgcagtagtatagggagaatacaagcttgccctagggttgcttggataagtatttgggtgtctcaggctgtggtttggggcatagagttcccaagagactatgttctttgtctttggctaccagggcaggtagagagagaccttcaggtgagggcagggttaggcatgttttagctcagactcttcttgggcagggcctgcttcagcccctgtggggtatggggttgtggttctcagcccagtggagttgtgttctcagggggattatggctgcctcttctgcatcatacaggtggccagggaagtgggaaaggccgcagtgacaggcctcatccagctccaacgcagcctgaaaggctggtctcactttcactgtgcaccccaatagcactgagtttatttccaggcagccggtgagcagggctgaaaacttgtctcaggctccaagcctctccactgagaaagcaagc

SEQ ID NO: 310044 - DNA, 1000 bp, Homo Sapiens
ttttttttttttttaatatttatattaacggattccgattacttaaaatttggtgttctgctccgccctcattatgtttaggcaagattcccacttccactcaaacttattattcgaacatacaatggctgcattaagatacttcctaaatcgacaaaagaagaaaactaatcaacccagaaagctcccaagctaccaaagcgaaccttttatttgaaatcatactaggtaccacactacacattacgtgaagcccacagagtgataattgaagttatttctgcaacatgatgaaatttatttcttagcaaaatctgacaagacttaattttcaactgtcaaaagggaaatcgttttccaagattctaggaaaccttgcttactgaagcagtctcaaagtagtttgcttaatcctttcaaacccctaagaatctaacacaagccacagaacagtgaatgagacttgcactgaaataaatgtctgtgttcaaacccctaaaggttacttcccatgtgtttggcaagctgaaggccatatgtccgcccaacccataagtgtctttcctcaataaagctaacattacacttcccaactcaaatcaaaataccagagaatccaaaagcctccaactaaattttacctgaaccatttgggagaaaaagtcaacaaaccagatcagttattcacgccttgaaagagtgttaagagtcagaaagctccaattctgccacttttaggagctaggtgtacattacttctgtctgcctatagcatgggactcagatattacatcaccccatgctgcctgaatactgacccattacccagaaagcaccagggtatctgagacactgcaccaaggtatccctttcttcctctcttatgcatagcccttgaatgctactggccactgggcctggtctcttgcagtttcacaaagacatctgccctgcacctgctgcaatcccatttccattcactcttggtgcgctcctcgtg

SEQ ID NO: 310045 - DNA, 1000 bp, Homo Sapiens
ttttttttttttttatattttctcttcagattactttcttgaaagagtgctgttaatgtcatttttttaggtaaatacgagttcacagtataccagcaaaagtaggatttacatattattttgaagattctgggtgcacagcaacacctgtccctggtatacacccaagggagaggaaatcaccaccttgtgaagatatctgcactctcgcgttcattgcagcattattcacagtagccaagatagggaagcaacctaaatgtccatcgatgggtgaggaatggctaaagaaattatgtgtgtgtgtatacgtttatgtgtgtgtatagacaatgtacaatggaacattattcagccttaaaaaaggagatcctactgtttaccacaacatagatggacctgaaggacgttatgttaaatgagataagccagacaccaaggaaaatattgcataatctcactcatatgtagaatatttttttaaggagctaaaatacacagaacgaaacagtggttactactggtggtggggaaggagaggaaatggggagatataggtcaaggatacaaaatagcagatatgtaggatgaacaagtttagagatacagggggaccaatgttagtaaaattgtattagagatttttgttaaataagtggattttagcagctcttgttaaagtatgtgaaatgatagctatattaatctgcttcaccattttgctgtctatattccatagcatcatgttgtaaacctcagttgcacaatgaaatttattttttaaaaaattagggtgcaataaaatgtgtaaattctttacactcataagtatgagtataggtgttaactttgaaatcgtatcagaaaaagtatatgatatttgatttatacattttaatttctacggagcatattttatttaaatttattgaacttgaagcaattttcgttcttttcagccttcaccttcagcctataccagaagttcccagacatacaa

SEQ ID NO: 310046 - DNA, 1000 bp, Homo Sapiens
cggggtagtggagagaactgggaacaggggtcctggggtgtgggatgcggcccctggggtgggggtgccggactgtgtggttcttgttcttagcaaagtagtagggcagccacgtttttcactaggtcctcgtagcccgaggacctaataagacacaatagaaatgggctgatgtcaaggggatagtgtttggaggtgggtaggggctttgccttgcccgtattgggtagaacagggacatctttttctttgggccgaatgattggaattgtttccgtagtcgctggagccccagcggaaatgatcagagaggacgatattattcgtaaatttaggcgaaagggtcacatttcaccccaatctggatgtgtgcttgccgtaatcgattggttgcagctattaactctgggactgggtggtttgaggcgaggctacagcccctccttcagttcagacacggctgattttagtatagtgggggtggggggtgggggatggatgtcactagggcgagatctaggcctgtcattaatcacccacaagaacgccactttggctgagtcaagacctgtttccctagcagggtcaacaacaaagaaaatgctcttcccgagtactgtaatatgatcacactataagtctagaccttgagaaatgttgaacttttaataagcatattgcattgaaaattggggctgaggagttgcttttatttggaaacgttttatttttgcccaacaaagtatgctgggggaaaacaacctagccttgagaataatgaagaaatcaacccaagattccaagggacttcagacttttgcttttcatcttgaaacatttcctgagagagactggggaatgtcttttggctgctttgtagggcatgtgtatgcccagttttttctgtactttgaaatccttgtgtgcccctggcacaatcctaggataggcttttgtggactagaagtgtaaatgtttcctttgtgtgtagcatgcaaag

SEQ ID NO: 310047 - DNA, 1000 bp, Homo Sapiens
tttttttttttttttttttttttttttttttttttttttttttttttttttttttttttttttttttttttttttttttttttttttttttttggtttacagcactttattagcacagccttagcaaacaaatacagttgatttctgctacttaccactgaggatcatggctggtattattttgtactgagtaaataattatgagacaacccagaacttggcaaatctgacagctcaggcagagatgggtgtctttaaatgacaggtcggcatggtcttcaaattctcacaaaagtagtcctgccttgcaggcctgtcgagcagtctttggtagcattcaagtcctcctcccaaggcaagttggagtggttcgatgctcagtaggttccttaggtgggtgggagaatccctgcccttgagcctgcagcctcttcctggccactcccttttcctggtggctgaggtgtttggaactctctgtccaccacaactagctcaagatgtcttggctgttggtcttcaaagtggttaaaaagacactgcgcctcctccctgatgaggatctgcctcacagtcatatggctctttaattttttctcctgtggctagatctagaaggcaactgccacctaatctctggcagtccccaaaacaggtcactgtaacacttgctttattaaaaaaatgccatgatagtctttgtttctttattctaagccaacactgtcacttacgtaggttatgtcagatgtttggggtcaatctgttccctagaacccaaagtcaatggcagaaagttaagccaaagaagcacaaatgacccatcttgcagtgcatgcctggctgaggatagctcaggagagtactcatgggctgagagttttagcaacatagtacatttaccctcattggctgaagcaaacagtacagctgtcttaccagctctaattggtcgtgaccataggtggcactatgaacaagattgtaagagattattata

SEQ ID NO: 310048 - DNA, 1000 bp, Homo Sapiens
ttttttttttttttagctgatagtcgaagtcctcataggactattagcgtatcaaaggcagtattgaattagagcagttgtttgctttgggtcttagaaattcccagagtttagcagcagaacatagaatagtgaaagtgggttcttagatggggacagccaggacagggtgttctaaatcacattcaagttttgcgtatatgactggagtagatggagatgggggaataatgaagttatgactcaatcagtcctttcatttcattctgcttagtgaattttgaataaaagaaaacctgtgaaaaaggaagatttaggaagatttgtactggacccttgctgctattatgcagaatggtacatgggaagaaaggatggaaaaataaatcaagagcatcgcttcacttaggttttcagcaaacattgggatagctgagacattttttcattaaaggttagcttgccagaaaggtggttgagagtgagtgaattattagtatgtaggtactatgattgttagattatcattaaacaggaagtagatgactggatggagccttgaagaattactagagtaggaaaggtaatttagtcattgatgtgcaatctataaattccttgttatttgaaatttgagtgttatttatatagggatttgagtaaagtaggtttatgggaactaaaatgtaatctaatgaggtaatggtatttatcagaaggtgatataattctcacaacaatcttattacctggatacttgtataattcccactatacaagcaaggaaactgagttacggggaagctaataaacttggccaacaatatacataaacacatggcatggcagggttttagatcgaggcattctgattctacaggcgaccttcttagctgctctgctgtgatgccatgggcagagaaccacagtttcagaaatacatttaccagcagggacactcgaggtgatctaattcatggccctcattttagaaataata

SEQ ID NO: 310049 - DNA, 1000 bp, Homo Sapiens
tttttttttttttttttttccagctcaacccttctttaatgtcatccagggagggggccagggatggaggggaggggttgaggagcgagaggcagttatttttgggtgggattcaccacttttcccatgaagaggggagacttggtattttgttcaatcattaagaagacaaagggtttgttgaacttgacctcgggggggatagacatgggtatggcctctaaaaacatggccccagcagcttcagtccctttctcgtcgatggtcagcacagccttatgcacggccttggagagcttcaggggtgcctcctctgtgaccccggagaggtcagccccattgctgaagaccttagtgatgcccagttgacccaggacgctcttcagatcataggttccagtaatggacaatttaaaaaatgtaagctggcttacccaaaaagggaaattagttcccattaggcaaagatgctggagttttcacagtacccgatgatagaagtacagccaagactcatgaaggggaagggaaaccaggaactggaaatttataacccaggcagctattttctttttttctttctttattttgagacagcgtcttactctgtcgcccaggctggagtgcagtggtgctatctcagctcacagcatcctccgcttcccgggttcaggtgattctcctgcctcagcctcctgagtagctgggattacaggcacatgccaccatggctggctcatttttgtatttttagtagagatggggtttcaccgtgttgtccaggctggcctcgaactcctggcctcaagtgatcctcctgcctcgtccttccaacttgctgggattacaggccaccgtgcccagccccatgcagctattttcttactaccctggggtagcatgatttctctgagtcttcctgcttttccacttcatttttcttactttgcatgttgtctttcaccactgcacgtggatggacatgtcttctaactcttaa

SEQ ID NO: 310050 - DNA, 1000 bp, Homo Sapiens
caggaaggattcagacaactctgcctgggagtgagggctctgctcagcggcctagacctgggcacaacggagcaggccactccgtttctcatcacagacctgaaggcagatggcctgggcgtcgggcttcctctgctctctggcggggcgattttcacggtcaccaggctgcggacaggctgtgggggtggcgggcggtccaaagccaccgcttcacgtaggccaggggagccttggagaaatcaggcctgatgttgctcagcagcggcagcctgttgggaaagcacctccaggcctcggggaccatctctctcaggacgcggatgcgggcggggaccatctctctctggatgcagatgcgggtgtagtcccagctgggaggagtggtgcggaggggccggatgcggacccagtgcttcctgtggaagtaggtgaccttgcagttctcctggacctgggagctgaggaagggcctggactgcagaacccagtgcttttgggcggggcgcagctttctggcaagcggcttgggccttccagtagacactgggctgccagaagtttccgaaatctgcggtcaaggccagagatcaaatgtcagggctcagtgactagcgacggttggcatcaaaatgttggaaagtgcacaaggcgccgtgtgccaggtacggtctgtccaccaactgttgcatggggcaggaggccacggccaggccacagctttgccgcgcgcagctgcagaaggggcaagtagcgccccatgctgtctggaggaccaaggaggctcaagcctgtccttcccactcatggtcccagacacttagctctgggcagaggggcctggcagctgtctctgcttttgtacctgacctttaaaggcagaacatagaagaatttctgccaggtcctgaaaactgcagatacctgttgacagaagggtgctctctttgatcagtgtgaaaatgatcacaatacacttggaggctcttttaaggaaaaa

SEQ ID NO: 310051 - DNA, 1000 bp, Homo Sapiens
ttttttttttttttttttttataacataatgggtttatatttactggcacagcactttgataaacttggacagtattctttggctttggattatattaatgctgcaattgctagtactccaactctaatagaattattctatatgaaagcaaaaatttacaaggtaaaatctgaatcctgttttttgagtagttgaagaattcagctactttaagaatccttggagttttttctttgtggaaacaagttctagggcaccctgataatctttttctaataatcctgtgtagtttcatgttatattaattgtataatcaatgtgtaattagatgtgtaatcatttgagctcttagtaaatgtgaactgtaattttgatttctaaataaatttgacagaaatggtgacagatttcttttttgtctgtgtaaattattttccattttattgtactcatattctcttgattataaattgtggttcctttaattatcttttatagcatataggtaatctcaaagaagctgcaaagtggatggatgaagcacagtctttggacacagctgatagattcatcaattccaaatgtgcaaaatacatgcttcgagcaaatatgataaaagaagcagaggaaatgtgctccaagttcacaagggtaggaaatagcatgcatgagcatgtaattgtctaaattaagacagtttgtgaagtttgtctaaattaagacagtttgtgaagaacttcagtggaagttcataaaaattcatttttattattgttttttaaatcccatttaacccatatcctaagaatggtttcttactgtggttgtgtatctgtgtatatgtttctggcaggggatggttaaaaaacaatagcaagagcaaaatatcttggtacatatataaagagtatgctatactttagcacttacgtgtaaaatttgatttatatctcaaatcctttgtccccctagtaatttgtgactgctttttaattctgt

SEQ ID NO: 310052 - DNA, 1000 bp, Homo Sapiens
tttttttttttttttgcttgtaatgccctttttcctattctttgcctgataaccccgttagtcgttgaggattcagcttaaatgtcatttccttagagataccttctttgaccataacccagtgtaaatcgggtttccttgttatattcctgtagcatctttagaagcactcaccattatatatttatttaaaggattatatgattaatagttgtctcttctagacctagtggggtgggagtgggggctttgtccatcttgttcactcttatatctctaatggcatctagcctagaaccaagcatatgataggtactcagtatctagaaaatgacaaggtatttattactttgtaggtcttgggcaaatattttcatgtagtaattctttagtttagattattttaatacttcaggcaaaaatattttcatttcttcattactttcaagtatgcgtatttgtgtgtgtgtgtgtttgtgtgtgtgtgtgtagattgtgccattttgtgacatttaaaaaaattcttgccccattatttactttggtgttatttaaatacattcttaacaaattgtttttaaaactcttttctataaataggcattcaagtcagcagaaaagaaaacaaagcaaacattaaaagaagttcagactgttacctctattcaaaaagcaagaaaagtatattggtaagtgttctgtctctttcaaatacagtttttgtttttattaaaattatccatgcacattgtttagaaaagtcaaacagttctacaaagcttgttacaaaaccagtagctctgcaattttttgttggtttgtttgagacaggttctctgtcacccagggtggaatacagtggcatgaacatggctcactgtagcattgacctcctgggctctgacagttctcccacctcagcctcccaagtagctgagactacaggcacatgccactgtgcccagctaattttttaattttttgtagaggcagggtctcg

SEQ ID NO: 310053 - DNA, 986 bp, Homo Sapiens
ggaaaagggatcatttgctttcctttcatggtgttaatgtgtgcctgaatctatagccgctaaaatgtaaggctgtccacctgacttatttaaatattatcagagaatagaaagtaatcactttttaagtgtacctatgtgctgccccttaaaacattcatggcatctggcaaatagacccttgtaggctggcctggcatattcagatgttgccgcatcatcacagagaaggtcaaatgaagatgtaaccattgctgctcatgtgtcttctctaagcaacaaggggagcgggatgtaagagagaagttgctaatgatcctgtacaaaggatggattaaataatgaagtcaatttcattgatagaaaatgcaaattttaagattctcagtgtataggtctcagcctcgggagcatttattttttactttcctgctaaaaatccactggggaggtataaaattcaccccaaagaagtttgcctgggccaaaagcctccaggttccttctgagaacaaaatactaatgatttttttttttttttggctgcttgggagagactttcagcattctttcacgatatccagatatgtcccttcagcacacacactcaactttctcatctggttcgtttcatcctcccgaaagaacggtgctctcccactcttactctatttcaaagagctactctgtctcaaccacagcagccctgccaagaaaaggcaagatgaaaggctagagcatgtgctaccttgagatttcaagaagtgtcctacctcagctgaagatggagaaacggggagtggagaggggatcagcccagggtaccatgtgatgactaatatgccactcattaagggcttttacctcggctgtccacatccagtcatgcatttggggccaggcatgcctgcgaaatgattgacattcctgtaggtgccccatagaggtgtggcattgagaaattatgtctggaaaatacagccagt

SEQ ID NO: 310054 - DNA, 1000 bp, Homo Sapiens
tttttttttttttttttttttttgacacagaatctcgctctgtctccccaggctggagggcagtggcgtgatctcggctaaccgcaacttctgcctcctgagttcaagtgattctcctgcttcagcctcctgagtagctgggactacaagtgcccgccaccatgcccagctgatttttgtatttttagtagagacgggacttcaccatgttggccagggtggtcttggactgctgacctcaggtgatctgcccacctcggcctcccaaagtgctgggattacaggcatgagccaccacgccctgccaacaaattcttaatttacactttcatttgaaacaaaaaacacaaaacattactttcagtttcatatccagtaggattttaaacatttttctttcatcaaagcaaaaacacttgcttaagtggttaatttcacaaatgttaatcacatgcaaaagaatggttaaggaatataatgtccatgtggcattaaaaataaattggagaaataaattgaaaattgcataaaatgtgatggaatttccaccagaagtttaatcaagtttgtagtaacattttatcgtaataacactgttagacgaattcctagtgggctgagacaccaaattcaacttctgagcaatatcgaggaagagaatggtctctacaggcaacctcagaaatctgtcatcagtattaacctgcttaaaatgttttgtcattgacgaaatgaaggcatggaatacatacaccatcaattctgtggatgacaatcaattaggaaataccattaatcagataaatagccatcaagattttcaaaagatctcagtagttaaaagaacaactttaaaccaaggatgaaattcaacagatgtaaaatcttttccctgaaaagaataagacaggataaatatgaaaactctatcttagtttcaccttggggaaagggacttagggattttagttcagggcaaatgcccaaagtgaacagccta

SEQ ID NO: 310055 - DNA, 1000 bp, Homo Sapiens
cactacgcccggctaatttttttgtattttttgtagagatggggtttcaccgtgttagccaggatgatctcggtctcctgacctcgtgatccgcccgtctcggcctcccaaagtgctgggattacaggcatgagccaccgcgcccagctgttttgcatttttgtatgatttccatccttcactttatgaaggacattatttatcacattaatgatcaaatatatttatcacaataatgataatagaaaattaaatatttacatttttgtatgtgtgtcttttgggagaaagatacatattctgcattatcttactagtatgaagccttctttatctatgtctgctgattgtgtacacctcggtgccagacataaggaaaaccagcataggccccagagcctgatgtgtaagttctggtcccagatccatcgaaggccatttaaagtctctgaaaatccactctctcatatgtaaaatgtgatcattaagaattgttatgcctacctcataaagttttggttagaatcacatgagatacatgtgaaaatgctttgtcaactaagaacgtgttacacaaagacaagatatgtattattatggttattttctatttctctagtttgactagtttcattctttgcaggacattttcatttttagatgttcttagctattttgcctgtggtgatcagaaggcagatgaaccatggggttctatttctctgactctagatccttttaaaaagctggtgacctttttgtctttcttttcttgttttatcgtttttttttttttttttttgaaaagtggaaaaatattctcagggtatattgaattgattgagcctcccttggatttctttgacttatttgacttactctatatcttgcttctttactcctctaatttaacattttcctctaaaccatcatcagaatgtttttgcactatcattattcatttttttcagttacagaatgtgggaaaaaggagagaagg

SEQ ID NO: 310056 - DNA, 1000 bp, Homo Sapiens
gatctgaggcagcggtgccaggcatttctacccagtgaggtccatcaggaagagacagctaggtcggggtgtggtgtatccatagcactttgtgtgtgtctgagtgttccggacacacgtcttcagcttgttgggggtgatggtatcttctagaggccccaggttgaggcaaatcaggaatcttgacgttgaactgccttgaatgatggagtggcccagctatacactgaatggctgtagagtccagggcagctctgctgtgagctggtgagtctggctgaaaacttggttctaccaccatatggctggggtattttgtggcacacgacttcacctctctgggcctcagcctcctcccctggagaatggggataagcatcaccacctcacagggatgttgggagaactgtatgcaagaggcccagccaacaagcaacaaatgcctgtcattgttattattattattgctgttgaccttgtctttggatttgccccacctcccacattgcccccacccctcgtgaccctgctcaagagaagtgtattttccctggagggatttccaatcctccacatcctcaatgttccttaatgcctggaagatttcatgctgggttcgtggggtcagagtaccctcagaatccacctgacagattctcactctgtcgcccaagtctggagtgcagtggcacgatctcagctcactgcaacctccacctcccaggttcaagcgattctcttgcctcagcctcccgagtagctgggactataggcgcacgccaccacgcccggcttatttttgtatttctagcagagacgaggtttcaccatgttggccaggctggtctcgaactcctgatctcaggtgatccaatccacctcggcctcccaaagtgttgggattacaggcgtgagccactgtgcccggcccttcaatccttcctgcagttttgtagtttccttggtctgtctccgggagagaagttgttgcaaacccagc

SEQ ID NO: 310057 - DNA, 1000 bp, Homo Sapiens
tgcctgcaggtcttggtggggagcacttttaccaaaaaaatacaaaattagatacagagccttagaagggatatatgccaatgaggatctctgatgccataggttactttttaaatctgccctcagcagaaaggagacattccactatatatacttttgtatatattaaatatatggagctttaatcatataaatgcattgtctattcaaaaagatacagtttttaaaaaatttatattttttgttttgccaggcacagtggctcatgcctataatcccagcactttaggaggctgaggccggcagataacttgaggtcaggagtttgagaccagcctggccaacatggtgaaaccccatctctactaaaaatacaaaattagccaggcgtggtggtgcacgcctgtaatcccagctacttgggaggctgaggcaggagaattgcttgaacctgggaggcagaggttgcagtaagccaagatcgtgccaccgcactccagcctgggcaacaagaacaaaactctcaaagaaaaaaaaaaaagcaaaaagcaaatccaaagctaaaaaggcatttcagaggcaatatttctctccttctcacatggtaactcacatggtaactcaatggttcgaagcactgccaaaatggtgagtaactcttctgataactcacatggcccagccaaggtgagttattagaacctaagaaagttatgcattgcaacgtaaatccatcagataatgagaaaggtgacatttttaaccagaaagcataatagattagactgaaatagaccaaccaaccacataccatggcgtgacacttgctaacatagtctttttccaacctagaagaaggaaaaaagcattagcctcccatagcctgcacactgaattctcccctcacattcacccctttttatcattcctggcaaatcagtctgcctgtggctcagtgcaagccagagcagctggccttaggacctgacttccaacacaa

SEQ ID NO: 310058 - DNA, 1000 bp, Homo Sapiens
atttcagtcttatacttttctagatgaatttttttttttagacagagtctctgtctgttgcccaggttggagtacagtgtcacgatctcggctcactgcaacctccgcctcccgggttcaagcaattctcctgcctcagcctcctgagtagctgggattacaggcgcccgtcaccatgcccagctaatttttttgcatgtttagtagagatgggttttcaccatgttggccaggctggtctcaaactcctgacctcagttcatctgccgccttggcctcccaaagtgctgggattacaggcgtgagccactgcgcccagccttagatgtatttttacatccagttcataatattggaaagaaggcactgcagagcagtaggtggaaggaccgtcttttccataagtggtgccgagctaactgcatattcatatggaaaaaattaaccttggccttacctcaccccatatacaaaaataaactgcaggtggattgtagatctaaacattaacggcaaaacacaaaagcttctgcaacatactattttctttttctttttttctttctttctttcttttttttttttttgagacggagtcttgctctgttgcccaggcagtctcgccctgtcgcccaggctagagtgcagtggcacgatctcggctcactgcaacctctgcctcccgggttcaagtgattcttctgcctcagcctcccaagtagctgggactataggcatgcaccaccacacccagctaatttttgtattttttttttttttagtggagatggggtttcaccgtgttggtcaggttggtctcgaactcccgacctcaggtgatccacttgcctcggcctcccaaagtgctgggattacaggcgtgagccaccacacccggcctcacaacatactattttcataaccttggggtcatggttacatggatgtgtattttaaaatattttgttaacctaaattgttttatgaactgttctgtatc

SEQ ID NO: 310059 - DNA, 1000 bp, Homo Sapiens
gaagaggaaactttgcaggaaagaaaggatgtgtgacattcagaagggagtagttaatgagacgaatggctagggtgctaggggtgaggaaatacaaagtggatttacttcttcaagggagttggtgataaaaaaggaaaggatgcagagaaggaagggaatgatctgtgagatggagtgaagtctgggactgcatggagtccagaggagaaatgttccaagggacaaaggactttttgaatcaaaggtaatccctaatgacatagcatgttagtgtgctgttgagtgtgtgtgtgtgtgtgtgtgtgtgtgtgtgtgtaattggagctgtttcacatggaatacggcatcttacagccatggaataatatggcatcttacagtgtggagtagtgagatcataatctctaaactgaactggaaaggcagatggcaaaaactaaaggagaccacgaacacataagctcctcaggcttctgtggaaatttctggagatcttgcactgtttcagggagtctaagcctatcttatctaaggtttcagtggacccagaggtccccattgacatcataaggacattgctgtgcctgtcaagtacaccattgggtgactcttatctcacagtgctggatacccttacatcaccaagcttcattgaattggtgtcatgctcttgggttttaagaagaacattccgagaacaaccaactaagaatcaggctgaaataaaaaatgatgcttaaaaacgatccctctgtgactctatgtctctatccacagtccaacgtgagaaatttccttaggaattcaatgtcgaaaagactgctccatatggggacctgttctgcacttgttttgataaaaagaactggagttttagtgatgccttttcaacctggctgcaagaagttgtgaacccaatattcttatctgtcacaacacctttttgtctgtacagtcaatggttttgcttcttcctttttgtgattcatctgtctgg

SEQ ID NO: 310060 - DNA, 1000 bp, Homo Sapiens
ccagcgtggccaagatcgtgtctgaccgcaacctgcccttcgtggcccgccagatggccctgcacgcaaatgtgagtgggggtgggtccaggcgtgagctggtgggacaggcccaggtgccacctgatagtgagctcaccccctgcctacgtccccagatggcctcacaggtgcatcatagccgctccaaccccaccgatatctacccctccaagtggattgcccgctccgccacatcaagcgctccgccagcgggtagggaatatggggctccctcagcggggtgtgctggctgcccaagctgtggggcgggtgtgtgggcagagcggttgccacgcctcccagacttactgcccaagccgcctctgccttcagatctgcgaggaagccgcctactccaaccccagcctacctctggtgcaccctccgtcccatagcaaagcccctgcacagactccagccgagcccacacctggctatgaggtgggccagcggaagcgcctcatctcctcggtggaggacttcaccgagtttgtgtgaggccggggccctccctcctgcactggccttggacggtattgcctgtcagtgaaataaataaagtcctgaccccagtgcacagacatagaggcacagattgcagtcagacagctcttttattgactttgtctgcttggtgcgggggttgggggggtgtcgaggctctagaagcggccatgcccacagaagtggtacacagaagcaggcacagccagctccgagggccttgaggctgcctgggccatacagcacactcgcgcgtgcgcgcgcgcacacacacacacacacagtcaccttcctccaccctgggagccagcccccaggaggagtcttttcctctaaccaccctggggtcctctgacatgcctagtcctgctacttgcccagacctgatgccagcaggcctgggcgctgctctcttgctacctggcctggggcaagggaggatgacaaggcctct

SEQ ID NO: 310061 - DNA, 1000 bp, Homo Sapiens
cagatggcagtgcaagatagttcttcccctcaagggacttaaaattcagtactcccctcccccaggcctagcaacagggtaaggcagggtcagcgtgaagaaacagggatctccaaagggaggtctattcagagaagtaactttctttctgtcttctctttcttctctttctctctttcttttccttccttccttccttccttccttccttccttccttccttcctctctttctctttccttccctccatccttccttcctttctttctctttctttctttctttctttctttctttctttctttctttctttctttctctttctttctctcttttttctttcattccttctttcttctttctctctttttctttctttctttccttctttcttctgtctctttctctctctccttctttcttttttttttgagacagggtctcactctgtcacgcaggatgagtgcagcagtgcagtcacggctcactgcggcctcaacctcatgggctcaagcaatcctcccacttcagcctcccaagtgcctgggaccacaggcatatgcaaccatgccggctactttttaaattttttaaaaattaatttaaaatttaaaattaatttattggccgggcgcagtggctcacgcctataatcccagcactttgggaggccgaggcgtgtggatcacgaggtcaggagatagagaccatcctgaccaacatggtgaaactccgtttttactaaaaatataaaaattagccgggcgtggtggcgcgtgcctgtaatcccagctactcaggaggctgaggcaggagaattgctcaaaccagggagtcagaagttgcagtgagccaagatcgcaccacagcattccagcctggtgacagagcgagactccgtctcaaaaaatatatatatatataataataaataatgtattattatttttttaaagacacagggcctcactatgttgcccaggctggtctcaaactccca

SEQ ID NO: 310062 - DNA, 1000 bp, Homo Sapiens
gcatgaactttaggaaatcattttggtcggttttatacaatgtgtaagttaatgtctggaaagatgttttgaacaggatgcaggaattagaaggcacagaaatgataatataaaaatttagatcatatatgaattttttctaaatgttcaagctaattgctttcattagtcatcctgaactgctgcaggtttcatttcccaccaggacagctgtgccttttaaagtaaaaatagtcatttgtattaactataaggaaaaagtggcttcagctggaagaacttaccaaccgaaacactcttgagcttatagaaataactttggtaagtggcctctcttaaaaaggctgctgaaagctctaaaatataaggataaaacatacggtttcagactgtacactttgctgctacaaactacatcttgatgggattaagaggctacattgattcttgggtttattgcaccaacaatccatctctgacctacccatggctgcatctgaaacaaggtaaactccaagaagaaatgaaaacagtgggtccctaaagcactcttcccaacaagcaattcttacatgttttatgtcaaacagtcactgctaaagccactggagctgaagatggcacaatgtggctttctttgctttaccttgtctaaaaagcaaactgtgacctggaatccaaagtctgtattctgattgttgtctcagaatagcaaaatatgttttctccagtttggggagctcatgcttaaacttggaagcagtttcctactggaatattatgtacactgctgaccaccccgctcaagtcacttgtctttattctgcccaaacagcacaaggcaatctgttgcaacagcttagtgtttagtgcttatgtttcctcctaccaaaaaggtcagtttctttgttgattcatgggtaacaaatggcctaaagtgttcacgacaatcacaaatgctattatgtcaagtaaacctaagtcttcaatgaagcatcag

SEQ ID NO: 310063 - DNA, 1000 bp, Homo Sapiens
cctggtgtttcaaatatttattttaggtagtaaaggcttttgtcgttctaaatcctgattacaagtcacatgatcaagaacaactaataaaggagattcaggagcatgttaaaaaaactacagcaccttacaaatatcccagaaaggtaggcatcctaattataacgaatatttgctcagtgttgtggacaatttcaagtgtttatttttacattttaatgaatattttcttcacacatgctgcaccacatgtcccaaactgaactgatgacatatgggtaagaatcagaatctttgagattaaaatgaaaccctgaacctattttgtttggtcctttggcttactggactcacagtaaatacttaatatcaagacaactttcctaacaatacccttttccctattttggctgttacccaaaacccattccaaagactattctaattcttccacctagaattcataatcaaactgctatataattggctttatgtaaagataaaaatttccaggctaattttcttccccttgatgccaacaggtagaatttattcaagagctgccaaagactatcagtgggaagacaaaaagaaatgaactgaggaagaaagaatggaagacaatttaaagttgtttcattaattaccatatctataaaacaaacatagtatctgtcaatctctagaaaccacaagatgatggagaggtcataaaaactgtggtagtatgcttagaaactgttgatttaaaatatcttgtggttatgatatcagaggctaaattttgaaataaaatatttggcaaattcctccacattagtgtcaatgttcctatcatttcttaatataaaaataataccatcaattgctgattaatttttaaatgtatagtatagaagcagtttctgaaccagatctctgctacataggttttcaaactttagttgactaattcttctgatatgttgatatacaaatcagaaccaatgttcaagcctga

SEQ ID NO: 310064 - DNA, 1000 bp, Homo Sapiens
ccatttccgtacttcattgagaacagatttatttttagtgcatttttatagcaccttgcctactacaaatttctggaatgtactcaatataaagagtgaaaaagaaaatataagcgattcaaatatatactttgacataaatgtaggacagttctatgtcccattcaacgtcatgaaaggtatagtagttggtgggtaaatagaaaccctgttgtactctgttgctgactaattgtggttaccttacttatcaataatattagaagtattatgctcacatttttcacctgtgggtacaaggaagcctggttgaagtcttttccttgagaggcctggatttgttcacatattcagatttcaactggctttataacaggtttccttatgtgcctcatattggctccaggttcactgggtttaaaaggagccaaagcaccataaggttttggcaaaggaagagtggcatctgcttctgggatgtaggcattcggacgctgctctgcagttgtgtaaacaccattgggcagctggcgattatctgcttccaagaactcctgagacttttcagcgatggccaaggcgtgcatttcttcatctcgaaggactttcaaccattctttctcaatttccttattgagtggcagacctttttctatcctggaattgcaagtgaagatgaagtcttctttctccctgacttccttttggagttcaatggttagggcttgtttcatggacagctcagcaacaagagccatcattttctcagttgcatttttgatccttctttgatagccattcatcttcttggctaagagcagtgtgtcctgcttgcagccctgagttttgctgcagagcctgtctgtgagcctggagacctgctcatagatgaaatccttctccagcagcttctcctccttcttggccagttgtagttccagcttgtctaatttttggatcatttctttttcggtcagatctttccctggaaggaagcgag

SEQ ID NO: 310065 - DNA, 1000 bp, Homo Sapiens
tttttttttttttttggggacaccatgttgcccaggctggccctgaactcctgggcccaagcaatcctcctgcttcagtctggcaaagtgtttggattacaaataacttactacttgccaagttcctttctaagtgtttttgttttgttttgttaatttttaaaaagagacagcgtcttactatgttgcccaggctggtctcaatctcctgggcccaagagatcctcccacctcggcctcccaaagtgctgggggctacaggtgtgagccaccatgcctggcccctttctaagtgttttacacatactgattcatctatagcccttcaacaatccaatgaggaaggtactatttttatctctattttacagacaaggaaatggaggcccaaagaggctaagtgacttgcccaggatcacatagctagtaagtggcaatgccaggctcaaatgcaggcatttgagtccacatggataagcacctactaagatgcccctttgaaaagaacctctatgtgaacttcagcatgagctgccttctctcgggggagagtgtggggtcacagccacatccactacagtggaggttgtcatcctcttactgaggaggaaacaggagctcagaaaggttaagccacttaccccaagccgcacagcaggggagaaacagaccctggacccactgaccccagtccatgctccttccctgaccccacagccgtctgcacccaactgaactggcccagtatgcaggaaagggctgtgagccaggaggcaaggtcacgcctgcctctgttgcccactcatgccatgccctctgagggactcagtttcccctcccgcacaatgcaagacctggatatattgaatgtgaagagcacgttccagtttggtatcctggctcccacaccctcccctcactctggctcagggccctcaatcacgatccttccccagaatccagacctggccatacctgatgaagagggtgcacaggagga

SEQ ID NO: 310066 - DNA, 1000 bp, Homo Sapiens
ttttttttttttttttttgagatggagtcttgctcagtcacccaggctggggtgcagtggcgtgatctcggctcactgcaagctccacctcccgggtttacgccattctcttacttcagcctcccgagtacctgggactgcaggcgcccaccactacgctcggctaattttttgtatttttagtggagatggggtttcactgtgttggccaggatggtctcgctctcttgaccccgtgatccacccacctcagtctcccaaggtgctgggattacaggcgtgagccaccacacccagcctggacttcttaaaggtatatgcagagtttgcctccacttagtttctgggagctttcataaaacctagacaggagcagaggccttctgattccagatattaatacatagttaataccctaattcctgcagagttggggcagggtcctagacccagacccaacctcctaggctaggcttggaagagatttattcttccctcatggatttgcctttctcatcacacatttctcattcagaaaggaagaggtctatattctatgaaggtgcacatctcattggccaagaagatatgaatccaaaagagactgagtagttaggagacatcagcctgggatgtgagctgcttgcacctacctgtcattctgaaagtggtggcccccaaaggcagaccagggccaagaaaggaagaaagattgggaattactattaggatacactttcaattattcagcaataagatgacagtcttgaaaggtagtaggttctttattgtctaaggtatgaagatagaggctgggtcacaatttggtgagaatgatgtagggggacaacagcactcaatgagggattagactgtgacaacaacagatagaatagaccatgggtcagggcatttaaatctaacttccctgcctcaccatctaagtaaacagatgattacaatacagtgctcagtgggggacatccagggtccatgggga

SEQ ID NO: 310067 - DNA, 1000 bp, Homo Sapiens
tttttttttttttttggagttatacctttggttctgtttttaccctttatttggaatacagtgcaacattacagttttggatcattaaatgaatggacttggtgatatagtactaacaagcacgacctgaattctgggagtaagtggttttctagttcatgggggaggaaaacagatacgtgcaagatctccagaggagaacagaaccatggtactcagtgagtcaccaaagggctttggcttcaactcactaatggctggaacaagtgccagtcttggtcagccatccaggattttcatcacagcaaatcaaaatctccaatttttcaaactaattgtaggtagaagagagagaataactccaaactgtcttataaaaggatctagatgactactgaagtgtcctccattcatgagttggcaaaatcttcagagtgactgttggagcaaggagcctttcatgtgctcccagttattatatagtgcatagaggctggtaagtgttagtcctgtcagaccacctcgtgctatccctcgaagaccacctttggactctggatgggtcctccaaatattaaccttgaagattagtgacggccaggcatggtggctcacacatgtaatcccagcactttgggaggctgaggcaggcttgagctcaggagtttgagaacaacctaggcaacacggcaaaaccctgtctctgcaaaaaatagaaaaattagcttagtggggtggcatgcgcctgtggtcccagctatttgggaggctgaggtaggaggatcgcttgagcccaggaggtcgaggctgcagtgagctgagattacaccactgcactccagcctgggtgacagagtgagaaagaaaaaaaaaatgtggtaagatagctataatcacactttgagttagatgctggtgaccaccccccacttcatgcactgacgcatcaatctcccacaattaaaaaacagtgagtgacacctagcatcatgctagttga

SEQ ID NO: 310068 - DNA, 1000 bp, Homo Sapiens
ttttttttttttttttttttcctaaataaatgagggtgatacagtatgtttatgaaaaagaaaattcaacatttttaagaattctacttctaatttctcaaattcaataaaattctaattaaaaccacaagaatacttttccaaggaatttgataagctgattctcattttatatgaatgcgtcaggcagctcctaatgaaaatacagatacttgtcctactagatatcaagactcattagaattatagtaattaaaactatatcatgtactatttgtgcagagatagacaacttgatgaatagaatggaagagcccaacacagaactaggcaaaaaaagaatcatgaaatgacagatggcactctagccactggactattcaataaagttactaaaacaaatagttatccatatggagaaaaatgaaattggactactaccttacccttttcaaagaatcaattccaaataaatttggaacactaagggcaagcctttgaaaaaaaaataaagatatcctcgagaccttgggacagaaagtaatttcttaaccatgacacaaaaagtgctaatcatataagagactgataaatttaactaccatttaaattcagttcttttcactaatataccataaaagaaccaagtcattaacagagagaagatttttgcaacatatatgtacaaaaggcatctgtatccacaatacataagaacccctaataaaacaaaattgggggcagggggacaaataacaaaaaaaaggcatttcacagaaatgagaatggaagataaacataaaaaaattgttcaacctcattattaggaaatgcaaattaaaaccatgatgaaatactatttttatacccatagattaggaaaaatcaagaagtctgaagattgtcagagttgataaacctgcagcgcaaagagaactattgcactttgctggtggaaatgtgtatcagtgtatcaccaatttggcattatcttgcatgg

SEQ ID NO: 310069 - DNA, 1000 bp, Homo Sapiens
gaaaaatggtaagagattggtaaaaaacaaacaacaaaaaaaaaacataaggactctataatggaagtgcttaccaactgtatttaagatattgttacacttaaaaagaaaaaaccaaaagtgtaaattgggaatgttgaattatgtcactacataagaaatatacatggaactcctaggagcagaccagtcctcaaagaccttagtcctacatcctaaaatgggggaataaatttacattatataaatgtataatcaagtgcttaaggttatgtcaaaattttttgtattgtgatttctcactctagtagacttcatcaaataactgatactagagggtggtttctagtgtgattcctacttaatgaattgccatcttctaaaaaaagtcaataaatagtacaatgaagcctcagtaatctatcatagtcagaagtgtaaaatttaggtttaacaatgatggaatacttacagtgtcttctgataatgaacggcggcaaagatctacaggagaaaaattgttttaaaagtagtattgctgggtaaatcccatttctttcactattccaaagagcaagatctaaattcctaagcagaagattccaagataatcgtagtaacaagcagttgtgaaatttacattagcatcaaatatactacatatatattatcagtctcttgactttcccagctctttggcactttgctttcatttgttgtgtctgtgctaaaaatatttgtaaagtgcattaaaaaatacaaatgtagtaaatattaattgcgaaaaatcaattatagaaaagtataaaaataaacaatcctaccacccagagataaacactactagcatttcagttatttagttttttaatattttttttgtttgtttttaaagttggaggtctcactctgttgcccaggctggagtgcagtggcttaatcatagctcactgcagccttgaaattctgggcccaagtgaccctcccacctccgcctccc

SEQ ID NO: 310070 - DNA, 1000 bp, Homo Sapiens
gaatcccacttctcaggccccttccactaggacacactatgagcttaacactgctaagaactcactgaggaatggtgacatttgggggcggctccttcagtgctttgtttggcttcttttttaaattataaatggtggtttgaaagttgttggaggggaaaatcagatgaaatcagggatgtggctgaagcagtcagtgtagcagcgtagcagagaagcagagaagctgtcagcagcctacccaggccccgaaatgggcacagccctgcatttctggcctgaggcttgccgaggtcttaggtgaacttcagctctttctacagcaccccagtctcagcactctttggtggatgtcctgattggctgggagattgttgcttcctgatacagtggtgattacttctgaaagatggggtaataccaacagctatcgtttctgaccatttactgtgcagcatcactgtgcaaagtatttttatacatatcctattgactcctctcaaaactcctgtgaggcaagcaggcaccccagtggcctcatcctagttctggccctggtgacattatgattgcctccattctccatttgataggtacagaaactgaggttcagagaagtgaagtaaattcccccagatcacgcagctagcaaacagctgagcttctatgctcatcctaaggctcggttgaaatggattttttaaaagatgtattttgggctctttactatatagaaaaccgaatctgtttatcactaaggttactaataggccttacatctgtgaaaacttatctgtcagctggccctgaaatgttctgaaatgagtctgagcacaggatgcctgtgacaaccgaatagtttaaaaaaattctccatgggagccgaaaccctattaagacaggtctttatttttgttcctgaatgccacatttagaaacaaaatgtcatatttttgtatatgaatgtcacaagtgacaaagcatatgttgcaacttggct

SEQ ID NO: 310071 - DNA, 1000 bp, Homo Sapiens
ggcgagggccccggccagcccgcctgagatgatgtgggactgcgggttgtaggtccggtgggggttgacctgctcctgcaggaactcatacgtgatgaagtggatggactggaaggggatgttcatggtcagctgcgtggtgtagctccggtagaaggcccccaacccctcggtcctccacaccgtccggatgcagctgattgctgaccggtgctgcgagttgtacatctgcaagcgctgcttcaccactgtggttggaaccgcggggcaggccagacggacagccagtgggcagtgggttggatgtggccccaccccaggtcggaatgaagccaagccataaagagaaacaagccagttagacaccggaaacaggcgagagccagcacacacagccctagtctgagcagccgcggagggccagctcccggcagtcctaggttaaaatccatttttatctccaggactcacgcctggaaggtggctatttccgtctctcctgcctgaatcttgctgaaggcagcccccgaaccaggcagccacttcagactagagtcgctgatctgtttcccagatcctggctacccctggtaggaaccctcaggacccaccacaaagctgaatcctgtcccctgtcccctctgccctcctccttccccaacacatctactggaagcgtgcccccttgtgtattctcaggggtttgtgcctctaatggtaattctagcttctgtgacacagtgcgtttggaacagacactagaattatgtctgcccaagttcaatgacattctaagtggagttcacaggacaagaggcaaatgagactaactgtggtaccttaggctcagggttttaatggcctcatgtattgccaaataaatacatacaatgtgctttacttttaaacaaataaagactgtaaaccaatagttatgacaaggagaaagagagagtttgagcctcacttttttctactttaaaaaagataaacaaaaccc

SEQ ID NO: 310072 - DNA, 1000 bp, Homo Sapiens
ttttttttttttttttcttaattgattgagtttattatagtggtaacttgctgcacatatttttccatacagatttcccttttaattttagttacttttgctgagagtttttgaataggcacagaaaggcatgtcataaacaaaatacagtgttggaaaattatttagaaacaatgcccattgtaactgaagaaatgacacaggaattggaagtagggagacaagatactgttgaagtggtatcagcatgagatgaaactagagtaggaactggagagagaaaggaataggtgagcaaggaattgttttggtggggggaggaaaacttgacagcatttgatctctgattatagaggtgaagaagaaagaaaatgaaacatactcaagatttaagaaagagggaacgagcagtaccattcactgatttggcaagtcaagaaaagccactggttggtaaagatgatgaaatctgttttaaacatgctagttagagcttgaaatgtccagtaagcatttattcttcattttgtcaaaatctttgcgggttccctaattgggacaaggcattgtcccaaaccctacattgtttctacattgtgacttttaattccattctattagacttaagtgtaactgatactttagttcaacttgaattaagaaaaaataagttcaggaaaaccagatgcttctcaaattaaggagagatttgtttttcattattgaaaaaaatatagttttgtgagaacataaattttcttgcaccaaaataaactcatactaacttgttataacatgtctgaacaggatctagtttgaggcactaagaaggataggacatcagtttgcaaagagtccctatcaaggcaaaatcaattctgctaaaattgtagcaaggacaaacatcaaattgatggtgaaagttgtgatgtggaagaatggtgaaatcattgatactttacaaatagtttatggggacaatgccccaaagaaatcagta

SEQ ID NO: 310073 - DNA, 1000 bp, Homo Sapiens
ctttttttttttttttaattttatgtttagttaaatttcaaaacactcaatgaaagcaagtatgctaattagaaatgtgaaattggcttagtcatgagattctctttttgggagttcagaatatccatgtaatcctttgttttcaagcatatgtttatcatatacgtttccagaaagaaaaaagtgtggaactaaggtacaaatacaaacaaaatttaaccttcaacaatgaaatataggtaattcctgtctctttgttttttaattaaaaataaatgaaataaaggagataaggaagcatgaagagaaaagacaaccaactatccaaaaccagacaaaagccaaagcaatgtttgtctctgggaaactataaatttgataatagagctagaatggccaagtgatttacatttacacagaagttgtgtgtctgtaagaaatttaacttccatatgctgacaaattagccaacactgcttttttgttgttgttgttatttttgtaatctcactcctagatgctttgagtttgcaggaaacaaaataataaatggtatacctaagagttgaatggtatacacccttttaaaaggtgactgtcaacagtctatttctttcagtgattacaaaagactcatataaatggtttatgtaggagttttctgaattaatttctatgcagaatgcaatatttaataaaaggtaaaacaaatgtgctattagaagttttcctcttgccttctcaaagtatattctttagtattcttaaatatattctttaacattcatattcttaaactccaatattaatgataaacattactgaataactaaagtgtgagtcttggaagggatgcaccttcctgcatcaagcacctcaccatcactcgagtgtcctctattgatgaagcttaactttcaactagctggcaaaggaggaatgcttacaggatcctgattcagtatcataaagctgtattaggatatgagggacgataaat

SEQ ID NO: 310074 - DNA, 1000 bp, Homo Sapiens
catctgttttcaagactagcccaggcaacataatgagaccttgtctctacaaaaaatgaaaaattagctgggtatggtgatgtatgcccgtggtcccagctactgaggagactgaggtgagaggatcgcttgagcagaggggttgaggctgtagtgagccctgattgcagctgctgcactccagcctgggcaacagcaggagaccttgtctctaaataaataaataaataagtgaataaattccttgccatttttgtttgtgcattaccaatttagaaagtgatggaagtctgtagagccagttatgaaaactgagatatttcttttagcagcacaaaacaaggtacattttttcttccaactcttaatattgcaacattttgattaaaagtgtaagatttctgtcttaaatcatgtactgaagtctcacctagacttctgttcttgtattccttgttacttttcattttgctactctgagtctatcttattcacattgattgcttgatatcttcatataatgctttttctcattttcaactcccccggcccatgcccgcccccatattagtattattgcatgagttcacccatcagacacacaaaccttcttctttttcaatagcagtctcagtcatgaagccctgtcatttaactgcctggtagttgccttcagttactaggccagaacagctctttccaccaactcactgttactggaaatatattgagactagtggcatcctttagacagtgctgtagctcacatgcctgtggctgctccagttggcatctgacatgccatttgagccagattccacatggaaaattatattccaagacatttcaggtttacaaaatgtttcttcttttccacttttactatgaggttttgtgtatcattcttacacgtctgttcagtcactattctttttttctcctaatctcctagtggtgattgaggaagataatacccctctatgatgcatacattgattag

SEQ ID NO: 310075 - DNA, 1000 bp, Homo Sapiens
tttttttttttttttttttttttttttttttttttcaaagtttacaataatttattattgttgcatgacatttgccagtaaaataaattataggaactatagagtctttataaactattttgtatatcatattcacttcctaatgcttactgcagtaactgtatgaaatttaattagattacgttttagcattagtcagaagatttaaaaaatatgtaaaatgttttcacagtactttggatttataaaagaccccattattttaacttttgtgcaacctgtttgaaatgtataaaaaaccttttacaaaccaaaaggtggcgtaaggttttactgagttgctgaagacatcttactttcttgaatttctacttaacatccatgtggtgcactttttcaggcattgtaataagtgcaaataaataatcaattattgatttctaaaaatctataccaatagacaatactcaggcttggaaatattttgaacactcagatataaaaattcagtaaacaatttatgcatggtattttctctccctgtcctccctctccctcctcccttcccctatctatttggttaaaaaaaaaaagttcaacttcgatttaagtcctagggcctgacaaagtgaccctggataaatgtcatctccagccatctgttttctttagttctcattacatctgtccaggctcttctatcagcatcaatcctttcctgcagggacggaagagttttcaaatccttgctgaaagcattttgttctcctctgtaacagcacagggcatgaaattgtttggagtctttttatcaaattctctatagactacatgatccgtgccaataccacagcagtcagcagctgttgtctgtgctaggagaccacagtagtaattacacacaggttaagtggcttaaaaaaattgatcggttttgaaaattaggtgtggaagatagaaaggaacctgaggatttttataatatttttgtgatataata

SEQ ID NO: 310076 - DNA, 1000 bp, Homo Sapiens
ttttgaagaaggaacagagtccttcagggattctttattcatcaagtctcccaacctcatgcaggcacaaggcagggaggggtggctaggatggccaatgacaaaagaggtcccgcttcccttggcataatgtggggccaagcccagcatgcacagggagtgggggaatgcggctctacatcccaggtttacacagcactccctgccccgggcctgtgatgccacaccaccagcatagggtcaccgcccacttcccggggcacagggtgcatgacttgggactgatagggacaggtcagccagccctgtccttttctaataagtcagcttgcacactcaaggcacagggtttaggcatgtttaaacagtaagtcctttaataacacctgtgtcggtttggctgttgattcttttacttttggtctcatctctgatctaggatatatttactggattggaaagccacagaatcatcggaatacttggaggacagctaaaatggaaaaaggccttaaaatgatggcatcaggcaaaatgaatagcaggagaaggtgctgtatttgggggaatctgatgcagcacatggggaaatgtggagaaagggaacatgcagccacaaacacttacacaagcccttatggccaatgagcatcagaagcgaccaggaagacactccgaaagattctagaggaatggcttgagaatgtcaggagatggcaactaacccaaaccaaggccaggtaagactttcagagcgttagaaaacctcataaagaggctgtctgtgatctcaaggaagtaaacctcagcaagaacactttggcaggtgacatggaatggaaataaggccaggaagggtgaagagaagactgggaaacaagaggaattcatggcacacccaatacatgttgtgatacagctcacttccctgacatctagtctgtgtatctcacgattagcacccagacagcatttccagcccgtgtggagcaccagctct

SEQ ID NO: 310077 - DNA, 1000 bp, Homo Sapiens
ttttttttttttttttctccctctctctctcttttttttgtttttttgagacagggtctcggtctgtcacccaggttggagagtagtggtgtgattgcagctcactgcagccttgacctcccagggcttgagtgatcctcccagctcagactcctgagtagctgggactacaggcacatgccaccatgcctggctaatttttttgtatttttttgtagagatgggggcctcaatttgttgcccagactggtcttgaactcctgggctcaagcgatcctcccaccttggccttccaaagtgctgggattacaggcatgaaccaccatgcccagccgcttttttttttgttgaactggaaaccttccctaaagttccctcaaccttccctcaagttcctactgagatggatttcccacccttagagaactatcttggggttcaaattccagtctttgacttactggttgggcaggacacttagcttcttcatgtccttacttgtcaaatggggatcctgattttcttcctgctttctctttcctgacccagctttccattgcttctttcccacttctctcatttttccagtgggccttgtggaagttccttgttaacaagctcccttacatcttcccctctttaccgaatgtttctttcacttccccctcctgatggaaatccagctcctcttgctaagggttgggagcatggacccttgagtccaaatccctggaccgggtcccatttcccagttaggtgtgaccttgggcaagtttcttaacctttctgtgctatttccctatctgtaaaaagaagaagagatggtaccgatctcccagggtggttgtgaggagggttaagccctcgctgcacttcacatgcctggtacacgcacagaacagttgatactctctgatgtctgctctcatctttatcttcatcatcatcagcatgattgccatcactttctctcattccctgaggactctggcatctgatg

SEQ ID NO: 310078 - DNA, 1000 bp, Homo Sapiens
gacctgggcgggcggaggagtgtgacgggccttagggccgctgtggatggtttctaaaatgatcattgaaaacttcgaggcactcaagtcctggctcagcaagactctcgagcccatctgtgatgcagatccatccgccctagcaaaatatgttctggctttggtaaagaaagacaaaagtgaaaaagagttaaaggcattatgtattgatcagctggatgtatttcttcagaaagagacacagatatttgtggaaaaactttttgatgctgtgaatacaaagagttacctacctcctccagagcagccatcatcaggaagcctgaaggtagaattttttccacaccaagaaaaagatataaagaaggaagaggtaacgatttgtgttaataccttacaggttatttaaacacataagaggaataaccaaactgagtttttatcttctatatctttgtgttggagtcctcaggaccactcccagtttaaatgatttttctaggaggactcataggactctgcatataattatgcttatggccctggcttatttcagcaaaaggatataaagcaaagtcagcaaatggaaaaggtgtatgaggccaagtccagtggaaaacaagcacaagcttacaaagtcctcagagttgcacaggatgtgcttaattcccctagcagtgaactgtaacaacacatgggaattaggcaagctccttagaaactctgccctgcgttcttatttggaactggtcacataggcaccgcctacctagtatgtaccaaaattccagactcctgggaggaaggcagatgttcagtgtagaccatattgtttcataactaattcaggcatagtgaaccattccttatcagggggtaatgggaaccctcgagaaatcaaagtgcccaggagccagccttacaagcatgctggctttctaaggttagtattgtcaggcctgcttttactctgcacaatatcttacagatatagagtctt

SEQ ID NO: 310079 - DNA, 1000 bp, Homo Sapiens
tttttttttttttttgtcttctttctttcccttccattattgtatgcttcctgcatgccagaaactgggctaagaaggctcttggatttaatcctgggcagaatgagcttgaggtctttggggaagccagactgcacttaacaattacaaaatgcggaattgtaaattgtgatctgaacttggagtgagagcatacatatttgagctgagagacagtgtgtataataattttttagatttggctcttgccctccaagtggacgttttcagggttaaaaagatgcctcagagcctagatgacttgctaccattccgtgccagccccgtctcccaacccaagtcacaattgcttgacccttgtgaaggcgaggatggaaatgacttgttggagtgatagagaggctagcataaacctgccaagacctccttcaagatttggttcattttgcaaaagttgccagataaaagatatttccaggtggagggccacgcaggaaatacaaatggaatatttgttaatagctcttcctttgcgagatatgacccaaggcggccttctgcaatgtgatgggaagcactgtagcttgaaagcgtgagaggagtcagcaggcccacggcagtctcgaagtctttggaaaggggctctggcctgagcaggcattaaagatgctctgctcatcagagacgcccccttttccaccaccaccatcccaaatggagatgggacctgctatactctaagtatgggattctcagacaggagggcagatatctagaagaatattgagctccttaatgctgtggctttgcataataacaacctgcactctttttttctgtccttggagtcaaatgggcttctgcaaagaagtttatccagaagtcagggatgagcactattcgaaaagtcctaagtgggcagggattgccactgattgcactgaagaatgtgttggagctcatgagactggcttccccataacatttggttgtcgaatgg

SEQ ID NO: 310080 - DNA, 1000 bp, Homo Sapiens
tttttttttttttttttaagtaagacccaactacatacttataataagaaaatcactttaaacataaagactaataggttaaaagtaaaataatgaaaaaagatacattgcatcaacactaaaacctagtgtaaatgcttcacttaagcatatatcttgtaccttttcatctgatatcatcatacctaaaaccttggcaatgagttcatgtgataatggttaagaagagtaagaaaaatgctcatttgaagtttacttttatatcttttacaaaattagcagtgaaggtataattcattgttacagatatcccctagtaagatcatataatatattcttcacagaattcaatgccaaaaaaagtctgtactccatgcaaattcatgtgctttctttaatcagataagtattctatgagccaaagttttccctttatgtcttggctaacaaacagaaagctcaaagccagactaaattaacagaattctcacttccttcttctaatcatttttgacctttcctaaaattatttttcttatattgtacttttggaagcaactttgaattctttctttttaagagtgtgctttataacagaaaaaaataccaggaatcagactgagcagttgctcccccacttataagatgtgtgatctaaatcacagaggtcaaataattgacctgaagttccattttgcatcataaattgagaatttctttgcctccctctcaagaacattgataaaaatgtgaaagtttgcaaatttaacataaaacaaagctaatattaaatgaatgtaaaagattatcaaaattaatgtggttaaatttttaaccaaagtctgatcttatggtgtagtcatttccaggctaattaacttctttttcacctattatcaatacaaatcaattagaagctaaatgttcagatatagatctatagtctactctaagagagagaagtgataaaatgaccagccagagtcaaattttagaactc

SEQ ID NO: 310081 - DNA, 975 bp, Homo Sapiens
tttttttttttttttttttttttttttttcctgttaacgcttttgacgttttcattttaatatgtgaaacctggctacttgtctcagggagagtttatggaaaaaaagcttccagctggctttgggcagcccataaaaatgtactgaaatgtctaactttgaccagttagaaattaggagctgttgggggatgcaggccggtgacgccactcgccctggtgaggccactgaatttcagtaattagctctctgggcaggaggactcgctcctaattccttcctggttccgagtcaaaggatgaggccctgaatctgttaaagagaaaccacagctttcagataacagacaaacacgtctttaacacacgcaatctttgattcaaatgatttcaaagggcatgggggagggaagggtttttgtgagctttaaccgaagccgctcatcagaatgtcagctctccaaatcctatccttccctcagctcaagtctgacctcctccaggaagccctccttggtaaccccagcccatcacaggtttgttcatccacacgactccttgctttaaaactctccagagggtctgcctaacttcatggtcaagttcagtcttcttagtttggcatacaaggccctttgtgatctgacaccttctcacctgtgtagcctcttctcctactctccacccccaccctttaacccaggtgcgacaaacaaccttcacccctctccccggaatttgggcctcagagccttggactgtgtttttgccttgatggggattttccttccccttcgtcatgtggctggatggtccttattcccaaaactcaccccaagcctctcctgcaggggtggggagagattgagcccccagggctgggttaggtatccctgctcatgccccagagcgcctgggtttctgctcatcacacttagtgtaaggatccatttactcatctgcctctcccgccctc

SEQ ID NO: 310082 - DNA, 1000 bp, Homo Sapiens
gaatgagaccctcttgtgtttttagttataattgttttaatattttgagattatacatttttgttttaatgataaaatatttcaagcattcagagaatataaacacccatgtaaatatcacccacagattaaacagatacgaaaattttgcttgtttttcaggtttttattcaaaaatatttcagaaacagttgaaacatcctcgtgtataccgttccccactcttctttcccagacatatctaaatatcctgaagctgatgtgcatcttccctttcttggttttagatgttcatttcatttgtatccataaatgatacatagtagtgcttattatgtgtttataatttacataaatattacctgtatccttctgtaatttttttcattcagaagtctgcttttcaggtttattcctacagatatgtgttcatttagttcattcattataactgtggcatataccacaactacttatccattctcctgcagttggatatttaggttgtttccaatttttcattattatcagtgctgaaattaatatcctaatatctatttttgcaaatgtacagagtttgtttggcatgtatacttagtggaattactgagttgtatgttatatgcattttcaagtttaactggatcttgccaaattgttttccacagtggttggaccaattttcactcccccagcagtgtgtgtgagttccccatttccccacatcctcacctcacagtcacacattaacttttgccagcttgatgggtattaagtgtcatttttgtattacatctgttttctagtgttattcagcatctttttgtatgtttattgaccattgatgatttgcctgtttgtgtcctttgttgttctattgaatcatttttcttatagctttttgtgttcattatatactctagatactaattctttgctagctatatgcattgcaaatattttctcccagtctgtggcttattttaaaattttatttgtg

SEQ ID NO: 310083 - DNA, 1000 bp, Homo Sapiens
ttttttttttcctgtgtcagcaagatcagtcttcatgaaatcctgctaaattccctgtgaaatataataagcttaagacattttagagaaccaaatgctgtttatgatacagtttagtagagttgtaatatatttcagcacagaattttagaatactatgggggctgattttcaattttgtaagagaaattatgagcatagtttatatagtcttttatttgtaattgtttacgtgatttcagaagtaatatgcttaagttattctaatgtttttaaagctagagagtctgaaaagagggaagaagaaagaaaagtgtttaaattgatctcttttgaatttaaaatgcatattaagtataactagaacataaaatgaagaatttaaattctcatcttattcctagaattatacctataatatgtatcattacttataacaattcatattttaattttgcatggcacataatctcttctgtgagttggatttttaggtggtgggaatttaagcataaattctcataactttcttggggtcaatttaatattaataagtgtagtaagtaataatacccagcttgagacctcatgtacttgttgcatttggatttaaagctcatttcctatagaagagctgtagaaatcagtcatgtagtttcataaactccttcatgcttgttaataattttcaagaatcttaaaataaattacaggaatattgttatgaagtagtagaagcagtatggtataggggagaaagtgattgtagttgggatctgaggatagtctttactttgctattaactagctgtgtgaccttgggcaagttgcttatctctgcttcagttccataaactaagaattacagagctgaaccggatcttggaagcaatctagtacaaacctctcattttacagatgaggaagcagataatttgcacaggctttcactgtaagacagttgggcccaaaattcagttttctgactctcaggttggtt

SEQ ID NO: 310084 - DNA, 1000 bp, Homo Sapiens
ttttttttttttttttttctagtgtttcattggcaagccacaattatgggacctgtaagtattaagaatttttaaatttagttttaagtgaaaatccagcattgatttggttgtaatttttaacttggtctgtaggtttattttatcatatagttaattctattttggatattccatagttgtactgcatttgaaagaaaaaacataatgagttagtcatttgttacgtgtactttgtgtctatccctgtgttcacgttctagagtatagccatctctatgacctaccaaacatctctgtatctcagttcagtttttctacatagcactgtgtaaagcattgtcatggaacttcctgttatttatagagacaaagttactggctctgatatgccatgcgttgtgttactcagagatcttattctgttactgcagctgccaataatctagcttaattgtattttgatatttgattctttatagaacttcagtttatgcaaaatttgaatatatttaggcagaaagtgatattttgaatatagcaaaattcctttctatcctgggtagataagcaactatatgctggataattgaatattcagaattatggataccatctaagaatttcagagaattagagcgcactaaaacatcctggggtaagactgtatcttacacaaatatttaacttttttttttttttaacttgctaaggcgcttaaggatttgttttctaagttacatgtgtatcttcctgaaaactgtcttccctttttggtggttttataagcaacataaagagcaataatgtactaggtgagataatggtcagtaagtaatatttagaattctaaaggaaaaaatgctcttagagttagtagatgagtcgaatcaacaagtatttatttagtaattctgattctaactttagtcatttttctgtctcaaatgtgagtacatactgtgtgccaggtaataaggatacaaattgaacataataa

SEQ ID NO: 310085 - DNA, 1000 bp, Homo Sapiens
tttttttttttttttttttttttttttttttttttttttttttttttttttttttttttttttttttttttttttttttttttttttttttttttttttttttttttttttttttttttttttttagaagagtattaatgatttatttaattagcccacaagaaactagaaatcctctaccgaagtggaataagagagaacactggaacttccacagaagtttcgctttatcatctttatatatttttcagccgtgtacagcttttatatcacattttgaactaacttggaaggatttaactacccttgatctgtgcatttgttttagtctttaaacatactaatttttttactaatgcttttagagtttgtaaacgctaatattacaagtcagttaatggtttttactgaggagtgcaacggtggtgtcgtattttaggagcatcacgtagttcaaatccctaattttatagaagagaaggttaaagcccagataggtcgtgaccagttgcaaatagtagcagtgctgtcagtgtggtctacagaggtcttggatcttttttttctctgaaacaggatcgctctgttgcccagactggagtgcagtggtatgatcagtggctcacggctcacagcagcctcgacctcccgggcttaagtgatcctcccacctcagcctcctgggtagctgagatcacaggcgcgcgccaccacaccaagctaattttttgatcgtctgtagagacgtgttctcacaatatggcccaggctggtgttgaactctcggagctcttagatgttgattcagactccttcatagtataataggcttaaaatggaaagactgtgcgtacaggaatttatcctaaggaagtaatgtgtcagatttgcgtatataaatttaatatcagttattaagaattttttttaaaattaaatattcaagttttgggaatctgctaattctgttgtgaaagtggaaatctatacagccacttaa

SEQ ID NO: 310086 - DNA, 1000 bp, Homo Sapiens
tttttttgttttattcttaatatattaaaatagatcaggaaacattcatttggaaaagtggtttcattcctgacagatattattgaagtggtggtaatgtttgtttatttaataattcaagagacgatgagtttagcatgctagtctatcttcactgaaatttggttgactcaaaatctgaatactctcttttgaaaattagaagtttctgcctgtttaacaatacaaaacacaaataatcaactgaaagaattattttagaagatataatggatgatcctctagtcaatattggataacaaaataaggatgtaatgtaaccattacattttgtaatggttaatgaattattctgtgattaattacaaaataattttgaaagacattttaacactggtttaaagtcactaaatctgggatcgtgatgtgaaatgacagaataattctgcatctactgaagacaatttatatatgataaagctcaataactgctaagtgagaactggacaaattaaatgatagttttcttctgataattaatgtttggagaattgattaattttaaatagtgcatatttgcaagatgagattatcctattttattaaattattttcgtctgtatttacatagtttttgtatcttacaaatcttgccaaattgtgacatcacagctccaccttgtggtcaaaatagttagctaaatttaaagcaaatgcaagagctttataaaatcatgctatcaaattttttcccaaaggctaatactaataaaatgataaatattggatgcttttattcaggaattatttatatatttttaagtatgatacaatacaacattttaaaaggaagaattgtgacaccttattctgaaataaggagtagctagcatatttctagttaatactgttgaagtgatttgttttctgtttttatctaatttgtaaactgctaatctatgttcaatagagaatatttacttggattaataataaaata

SEQ ID NO: 310087 - DNA, 1000 bp, Homo Sapiens
ttttttttttttttttttcatgttaaaatgtgaactttaattgtaaaaatcattttctgtaaatatagttatatcaacctctctgcacacaacttggttcagatatatacagatatgatattcatagatgttatttgtaccacagaacaaaatcaattcaagaaacatttacttttagcttcaggattaaccccagctttctttaggccttaaaattaccaccactggaaacagagagagagcacggcatacctgggcacaccagtattcagggcaaaatctatgcagtgtcttactaatttcatactatgaggtaaagacccgaaacaaaaatagattcagtctctcgtattgctataactcttaggctggggtattaatcaaaataggatttttacatttaaggcgacagggaggctatgctgattctaactcagaaagaaatgggaaaacagtttttctaaggctacaactatttgtttaggcttattttcccggacctatacaaaaattcagtcaacaagttttgggtaaataaaggaaattcattttgctttcctctgctctgtccctgaagtcactcatccaggttggctgctcaaacaccaagaatctccaccattcttcacttgacagtctttgtggacacgttagacccaaacttttttttgtataacaccatcttaaaattttttagtatactttatctttctttagtttacccaaaggaaggagttttcactctaatgtcaatatatttgcaaccatccaactcaaagacctctgtgtcgactgttcactttgtggatcatctctggctcatttaaaacatcctgcctcatccccacattcgctgactggccttagaaagcaaagtaaatttattgttagtctaaataagcattctatagcaaacataagtaattcacacctggcctactatgaaaattaaattttctgaatttagatcatattagctctaaaagccccacagtatgct

SEQ ID NO: 310088 - DNA, 1000 bp, Homo Sapiens
ttttttttttttttaatgacaatgacattttttaataggatggaacatttattttgtagaatttctcttaatttaggtttttctgatgtttctttatgattaagttcataatattaaataagtgataaattattaaataagtgatatatcctcctttatgcatcatatcatgaagcatacaatgccagtttaatcaggtgatgttaactttgtttttacttattttattttattttatttttgtgtgtgtatgtgtgatgttaactttgatcacttggtgagttgatgtctgccaggtttctccactgaaatattactattttcccctttataataaataagttatttgtggggagatactttgaggctgtataaacatcttatcaaactttgatccattttagttttagtatcagtgatagtttcttgcctaaatcagttgctctgatagatggaaaatggtaatttcttaacccctttttttcttctgtattttttagttagctttatactttgaggaagacctgtccctttcctgtatcagtttgaagtcaggattcttattctatgcaataagttttctgttaatgtttcatatttggtcagtggaagcccctttcaggccacctcctgtgtccttttgacatgtcccaggctttttatgagcacctcttaaattctgttacaagatgttctaaattcatcttgtccttttcctgctctaacaatggaatccatttttctaaagagatctggttcctttggtgaggaattgttgatacacatacccccttttttgcccatctgcatacagcttcattcacaaacatcagccattgggcagtagcctccttatcttggtttgcattttttggtggtagcaaaaatactgaaatgtcgttaactcatagccactaacagtatatcctttcagaatattgtgcaaagaaatttatggaaagtaaaatacataggttttcaacttaaatgtatgcttgct

SEQ ID NO: 310089 - DNA, 1000 bp, Homo Sapiens
gaattttctttattaatgaccccaaccgtatttctttagatacaggagttttgaactcaaatacttaggagaaaacaagttatgactgcattatcctgcaactcattaccagtaatatattgcaaagcgaaacagcttggaaaagagggtgggagaaaagggaagtgagggagggaagataaagaaaaggaattaagttgatcaagtggaattctttttttttttttttttaattcttgggaactatattgtctgaaaaattgtctcaatttttcaagccttttgttagcattaatgcttggttttccatagtaatgatgggttcgttcctctgcatatcttctcttttatagacagatgcattccagaagcccgttccattggaacagcaccctgactatgcggaatacatcttccatccaatggacctttgtacattggaaaaggttggcctccgtcaaagaacctcaccattctagcccacagttgagatgcctaaggctcttccctcactgcctatgctctatcacaagttggacataacaatcttaaattgtttctctatattttcattgctcctttatttggatagaagaactcttgattctctaacgtctttcctttgtaacattcttccaagattgcagtggaatgttgaaattctttggtaatacttttgcgatgattctagctttttacctgcaaaagccatagcttctaagagttagtgatttgattgacttgagcgttacctcctctttctttcggaggtgctaatgagagcagcaggaaggaagaagagaaaattaagtgtctgggaagcctccagattagcaataaagatgtggcttcttagaatttgacttactctactgattaggttttttcttgaatgcctgaaggttttaaaagttcatgctaaaattccacgctgaaaattacacttggaacactgtagattgtgcacattattctgatgctgattttccaactatttgca

SEQ ID NO: 310090 - DNA, 1000 bp, Homo Sapiens
tcctccaggcctggccgtgcccgctcaggacctgctccactgtttaacactaaaccaaggtcatgagcattcgtgctaagataacagactccagctcctggtccacccggcatgtcagtcagcactctggccttcatcacgagagctccgcagccgtggctaggattccacttcctgtgtcatgacctcaggaaataaacgtccttgactttataaaagccaaacgtttgccctcttcctttcccacctccctcctgccagtttcccttggtccagacagtcctgtttgtggagtgcaatcagcctcctccagctgccagagcgcctcagcacaggtgtcagggtgcaaggaagacctggcaatggacagcaggaggcaggttcctggagctggggggtgacctgagaggcagagggtgacgggttctcaggcagtcctgattttacctgccgtggggtctgaaagcaccaagggtccctgcccctacctccactgccagaccctcagcctgaggtctggtgagtggagcctggaggcaaggtggtaggcaccatctgggtcccctgtggccgtcacagtgtctgctgtgattgagatgcgcacaggttgggggaggtagggccttacgcttgtcctcagtgggggcagtttgccttagatgacagctgggctcttcttcacaccacctgcagcccctccctgcccctgccctagctgctgtgtgttcagttgccttctttctacctcagccggcgtggagtggtctctgtgcagttagtgccaccccacacacccgtctcttgattgagatgtttctggtggttatgggtttcccgtggagctgggggtgggcgccgtgtacctaagctggaggctggcgctctccctcagcacaggtgggtcagtggccagcaggcccatctggagtgggagtgggcacttccaccccgcccacaggccatccggctgtgcaggccagcccctaggagcaggtcccgg

SEQ ID NO: 310091 - DNA, 1000 bp, Homo Sapiens
gagctccttgatgtcaaggcagtatcttactctgtctccctcagggcacacagctaaagactgagtacacagcagactgttaaatatttgtgacacggtaacaatgtatacagtgacagagtgaggtgatgtgagcacttgagtctgtcacatctggatgtgaggctcgtgatgataaaaggcaatgatatgttcaagcatgtgcactatgataggtgcccactgttacagacactgatataggttactttagccagtcgttcctgggacagagagcaggtgacttttgataagaaaaagctggaaagataggggaagtcagtatctatgtgacttaccacatatgaatgataattagctagtcgtcttacgtatcatgaagacaggaaatcaacatatgccaaatgactggtaggaagttgttcaacacatcctccatacctagaggctgtatttcaacaaggcacaatgtttacgcttcttagaccctgtgacatacagaaccaaactgaatctgacggccttgggcacactttctcaagactccttgagactgtgaatactggtgatatggacaggagacagggaaacactgggtagaagagggtagttcctgggcaaaggccccaccctcaagcctgaagacctgcagccctaaatgggaacaggcatttccgttttcatgtccaaaaagctaccttttggcccaaaacaccccctatcctgcactcatataagtaaagaaaattacttagagaaatcctactgccactttgggggacagtgaagggcaaagtattatgtttgtgtcaggaggatggtttcaatgtgaagcatgtaccattagtaacacattttcaactgattacttctcatttccttacagaatataaagcacataactcatctgttgagtgaaaaaaggctttggaatatactggctgggaaacccaaacagaaccaaacagccacttcttttacaacctctgtgttaattagg

SEQ ID NO: 310092 - DNA, 1000 bp, Homo Sapiens; identical to SEQ ID NO: 120184

SEQ ID NO: 310093 - DNA, 1000 bp, Homo Sapiens
gtcaccccaggcctttgctcagtcgggtgctgaaatgaaaacacgggaaatcaagctgagtatctctgagcatagagaaacatgtgaagccatttgtgacacaaccagaaaggagtctatgagaattacgaccgttctcttttccttatccataggcagatggatgtgagaaaaccgaccaacaaacaaacaccaaagcaacagattcctcccattctagaactgtagattgaacaaggaaatatttcacctgacaccttagagaaacacaacagatcagattcctcattggaaagtgagctcacgaggtagcacctttctaggaactctactgaatcttcatgcaaacggcaccgcatttggcaatgcgggctgcaggtggtccttggctgtcgggggcagagtttgggacgagacatggaaattttgcatgtttcccagaccgttgatcatgaaagccaagcctttgcttccggcatgggcagaaacggcctatgtatctgctgagacaagcacttcctcgtcagggatgtgtgcacgccaaaagcttcttccttggacggagagagggaatcctctcatgcccctgcatctgaattgtagtaaaagtaggagtctactactctttctctctagacccctcacaggtacaagtgtcatcagaagagttaagatactgagaaatcactcccttcaaagcctagggctgaagagccttgagcactgggagctcatgtactgctccatagacccagggccacatggaatcaatgcagccctgttaggtttctcgagggtgacaggctcagagccaattctcagaatctgcaatgctgaagactgctctgaatgctggctacttgaagaaatccccggaaaagcttactggcttggaaagagtgacacacctgacagcatgttacaataaaaattttggctgggacactgaggtagcccgttttacaacaaggtgaattttgaagtcgatcccctggagggt

SEQ ID NO: 310094 - DNA, 1000 bp, Homo Sapiens
gatgaggaagctgaggcttagaggttagtaatttgcccaaggttatattgtttgttagtggtagagctccagttcgaacccaatggtttagaaaccatgatttaatatatatgctgcaatctactacttttgtggaatgattcacagttgactgcatagggtaattgttgagagggagactgattagaggagtgagtgggcagcaagccttgatatcgtcacccctccttaagtcatagaactattaggaagtctgactagggaaactctagaattaagatcaagaacctccagtcttcaaaaccattctataccttatccatcacctcctttaagtcatttaaagaaagcaaattgattccttacctgagtctccaaggcctcaaatctcaagggctgatttggatgctagctgcggagttcagtgggtgcagtttgtttctcaagcacactgggagggtgagtggtgtagtccaggcctgaagatgaaatcgctgatagacatcaggtgacaggaaatcagtagcttctgctaccctgggcttcgctccaattactttggtttaacacttaccatagctgaaggaggtgcaaaaaaagtttctgccttaccaggtttcacttcttgaaaaagaccccaggggactgcctggcatgctcatgctaccttaattagaagaacttctgcagcccccaccctataagcaggtgtggatggtaggtccctgaggacaagaaagattctagaagttggtcaaagatgggctgttagcactgacttttgccttctggcttcacttttagggctgagtaggtgggcaggaggcatccatgcagagattcaagaatcactgaggctgtacacttggcagcactatacttaggggtccccaaatattgtcctcattggttcacacttaagtttcttatgaaccatgtatatatcttgtgtcagatttagcagaaatggcctaaaattatactttagtgccatagtaca

SEQ ID NO: 310095 - DNA, 1000 bp, Homo Sapiens
aagcttttaagaatgtttcagacttttcagctagattttgcttgaatgatttgcttgacatggctgagtagtttataaacaagaatgttcaaaaagattttattgcttaaaagcgtcagagaagaagcaaaatctaattataaatacttgctttgtcttgactatacttttcaaatttaattgtatgttagtttgtatcttcacagttacttaatctgggcttttgcctttttccacccatcatgtgggaggctggaagagttgataagagttggatttatcttaaaatctacatttctccttaattaataatttcagatattttgaggtttattttacattaaagttgagtgatgattatctaccttctaagatataaaaatcatctcagaattttataaacattatggcaacttttaaaatacagttaacatgtatgtctaaaatcttatttttactcaataaataaaatgtttctgtaatatttttccctttaatttcagatattcatgaactagccctgtactatgttaaaatgaatactaaatgcaaacatttaaaaatctgcatgttgtcaaattatcgaatgtataaataaattagggaagttgaaaagtgacatttgataaggttactatgaataatgtaaattgatgtctagattttattgaaactctataagtccagaaaatatagtgaatttcttaagttaaatgaaaagggctaaactttaagtttccatcatttagctatttcacagatctgctccatttttagtgatattagtttgtaagaaggaaagtctgaatcatcctcatgggttaaagtatctagggccagaatttgttagagcattgacaaagactgatctgctctgtcttcacatatgactattggccatgttctcccttttgttgatgactgcacagattctcattttctttgtcatccattttcttctaattcatgaatcaactttggctaaaggatacctcagaag

SEQ ID NO: 310096 - DNA, 1000 bp, Homo Sapiens
caagcttaggatctcgctcctctccccaatgttgtagcccaggggtgcaccctgggaatcacccccacctgaggggcaagttggtgaaggggaaggggacctcccttgcttcctagttcgctcccactgtgggaattctgaggagggtctcggaaggggcgcgatttctttccccatcgacttctccatctcgtactccgctcaattttgggggtcgaggaggaccctcaagttaagcaagtggtctcagattttctccctgaaatcccatcttcggaacaccgcccctccccagcgtttctcttctgtcaatttcggagaggttactaagggggcgagacccccacccgcacgggagtggaagtcgggggagtagggcccaacccctctcaccccaccccgcccgccccgggaaggtgaggaggaagtgggccaagggggcgcggtcggtcgctgactcacagccgcagggtcgggggtggggtggggtggaggtggggactggcgaggagtgcgggagtggggggcccgcattcgcccggggtgggcaggaggcgccggcttctttggtgtgtaaagcctccggcccacgcacgccccgctctgactcagtttcgcctgcggaggacagcaggatcatcccagccctcaggagggcccggaggtgaggagaccctcccgggagcccccgcccccacacgccggctccgggctgagcccagacaccctctgaggcttccgcagcgtgtcttgccggccccgccccgagtgacgtcactgatttggtcgcgccccttgggtagagcgccacctggcccgggtgaggcgcccgagccctgggaaatcagttagttccacatttacacacgggtaaactgaggcctggagacagggaatgaatctggcctatggccctcttgcctgagcccccagaacccggaaagccaccaaggtctgagtgtaaaaccaacaattctcagggccagctgactatgtgaga

SEQ ID NO: 310097 - DNA, 1000 bp, Homo Sapiens
  misc_feature (14)..(14): n is a, c, g, or t
aaaaaagccaacancaaaggacccagtggtccaaaaagggatcattagccaatacaggttattacaattttcttatccacaccaaaatagatacttagaaaaataacacaatattgcattttctatgctttaagcaaaccattaaaatatggaaccgtggctgggcgcagtggctcacacctgtaatcccagcactttggaaggctgaggcgagcggatcacttgaggtcaggagttcgagaccatcctggttaacatggtgaaaccccttctctactaaaaatacaaaattagcctggcgtggtggcatgcacctgtaatcctagctgctcaggagctgagtcaggagaatcgcttgaacctgggaggcggaggttgcagtgagcggagatcacgccactgcactccagcctgggtgacaagagcaaaactctgtcccataaaaataaataaatatatatgtgtgtgtgtgtgtgtgtgtgtgtgtgtgtgtgtgtgtaaccgtttctgaactattacagttggaaatacacaaatttgtggtgtgtacaattcatttgcagcattaaatcaacatgaaacttttaaattaatgaaggctaagataaaattcacttgtcaaatgaaaggttatcaagtaatgttttaagaactttatgctacagattgttaattttacttgtgggaaaactaatgtcacactgacttctatgctaaaaaaacaaaaattaagtcagccatttctacttactgtccttcaatgagccacgtgcacttcgttttgtatttataatttccaggtccatctgtcacaaacccagaagatccagttagtctgtaatttaaatcaagaaagaaaacttaagtctgctatattaatttcatatatttttatatattttatatattttcatatattaatatttcttaattcttaatataatacaaattaaacataatgggtacattaacaaacactataaccagtagaaaatgacta

SEQ ID NO: 310098 - DNA, 1000 bp, Homo Sapiens
tttttttttgaaccgagataaacctttttatttatttatgcttctccattttgtttaaaacaacaacaacaaccaccttaatgtaactgacagcccttccccctcaccctgcctcgggctgggggtagttaatggggaaatggcccccagggtggggctgaccagaagagcccctcaaggagctcatggagcccaaatcccctgccctggggaggggacctgtagtgtgtgacgggagcctctcccgagcctctgcttgtaccatcaaagatgcccttggccaacaagggtcaggaagcatgggggagggatttcggcctcctctgtccctacccagcccaatctcacgagcagggctggggggtttaaaaagggtggagcgggtggggttggctcacacgaaggagtactggttgttaatggccctggggtggcccccttcctctccatcaccccctagtggtgactgctgcagctgcaccattgggggcacccccgcgtccccaccagacccagcgccctgggcctctgagcctggggctatggcctcttccaattcaaccacggggaccagctcaaccacggggaccagctcttccgggacccctccaccgcccgctttctctttctcttgcctctctttggctgctgcggctgctgctgccgccacttctggcgccctcgacgcctcttctgccccaggctgtgggggatctgtccatgaagggggttcagggggctggggtgggtcatgggaggtggtcggttacacagtcactcgctccgaagggcatgagggtgcaggaggcatcggggtggcatccatctccctcgcacacccccgcatggctcccagcctgctcccggcctcacttcttgggtgcacgggcacctcctcccctgcagacctgctctgctcaccctgctgtcgctgggaggatgggacatagctgacaaggacaacatcactggagcctcccgactccaaagggatggggtg

SEQ ID NO: 310099 - DNA, 1000 bp, Homo Sapiens
  misc_feature (657)..(657): n is a, c, g, or t
  misc_feature (670)..(671): n is a, c, g, or t
  misc_feature (740)..(741): n is a, c, g, or t
  misc_feature (853)..(853): n is a, c, g, or t
gctatgaccattcaggagtgagccactgcgcccggccaaatcagcgggttttacaggcagacatacacactggcaattaagccgacgcaaagcaagggtggtctctgacctcggggagagtgcagtatctgaagagctccttatcttcctggaaatcctggaccttcgtgatcatcttctcacttggagcatattcggatttcgaaatggtcacatctctcattactgttaatcctaatggtttcacctcctttctgcagattttttcaaactcattcctagaaaatttaatttgcaaatgatgtcgttaccgctggctccaagcacctgccctgccctcctctgtggaaagggttgcagacttgaggggtggtttctctgcactaagttggcctccagcttgaggtagaataattccaatgaaagggaggagaaactgtctggctagaatccattcccagaattaaattattccctagtttagcataccagtagggaagtctttttataatttggttacattgtaataataataacagcaaacatttctgtaacacttaccatgtgcccagctctcttcaaagtggtttccatatatttcaccgtatttagtcctaataacaacactaggacataagtgctattattatccccatnttacagatgaggnnacagaggcatgggatgtgaagtaaattgccccaggacacatgatattaagtggtggagctgagactganncccaggcatggtggctcccgactgtaatcccagcaactcaggagggtgaggccaggagttcaagaccagcctggcaacatagtgagactccctgtctctaaaaacaaagaantaaaaaattagctgggtatccggtggtgcacaactgtggtcccagctactcaggaggctgaggcaagaggattgcttgagcccaggaacttgaggccgcagtaagctatgatcgcaccactgcactcagcctacacaacagagtgag

SEQ ID NO: 310100 - DNA, 1000 bp, Homo Sapiens
ctttcaggaattatccataaagtactttattttacaacctgctttacttgtaaaactaaaggtgcacttttttacataaaagttttatacagtgttaaaaccagaactgtgtgtaaaatactgcatgtaaatgtttctaaatagtcttgttccagtggttcatcggtgacttctgtggcttcgtcatcattatccatgggatgattctggaaagattctttccagttttactgggaattggttcctactaatttttctgtttcacggcagtcagaagaaccacttactttcagggccttcgttttcactaccttcagaatgtagcaaatctttctcagcttgagacacatcagattcctccatttgattattttcttcagaagtctcttcattcacagttaaggcatcatcagattctttttcttgattttttctttctgggatcatttctcttgatgtcataaaagactcttcttcttcctcttcatcctcttcttcatcctcttctgtacagtgctgccgggtacaacggctatctttgtctttatcctgagatgaagatgatgcttctgtttctcctaccataactgaagaaatttcgctggaagtcgtttgactggctgtttctctgacttcaccttctttgtcaaacctgagtctttttacctcatgcccctcagcttccacagcatcttcatctggatgtttatttctcaaagggctcactgaggaaacttctgattcagatgtcgaagagtcactgtgagttttctcctcattttgctgcaaatttgcctctttgctgtctgtgctctcaggccacccatttgttgtcatgggggctgacagagaaacctttggtcgattacgtggcctgggtgtcccaggcccatttatattagacctctcagtatagcttggtgcatttccaggaaacatcacaccattcattcgatttaaactattggaattgtttctctctgaagaaggataaacacag

SEQ ID NO: 310101 - DNA, 1000 bp, Homo Sapiens
tttcataataaactttattgtgacaggcggggctgatccctcccatgttggaagacaccatgtggcaagtgacaaagctctgagcccgcccctcttgcgcacagtggtagggatgggggaaggggatggaccccaggctggggtagtaccatgactggaggcgggggaggcaaccagaggcctgctgctttggggaggtgcattcccccaaccatgtcccgacacctctggagttcaggcaaggaccttccagtcctacttgtcctgcatcttctcaaggataggcacaatcatgtcaaatttgggtcgctttgcagggtcttcattcatgcagatcttcatgagcttacacacatgaggggaaatacctggtgggatggtaggccgaaggccttccaatgccacctgcgaatacaagaaaaaaagcagcctcacaatttgagtctgtcatgtagagagaagccactggcccttgggacaggattactgtatatccgaacaaatatgtgaggagccaaggcccactacagttattttcaccatcaccaaccactcccgcaacacaaatgtatgctgttgtgctctcaccttcattccaatctccatattggagaggtcagcaaagggtacctcccgtgtcaccagttcccacagaagcactgcaaaactccacatgtctgctgagcgtctgtttgtgtcttcaggcttcttctgcagagctggagagatagggcttgtctgttctggcccccttgcctgtcctgtctctgcccccttccactacttctgaggtggtccttttttacctcccgacatgatgacttcactcaccttcgggggctacccaggcaggtgcatacatgcgaccaggacattggaaagagaacttgacatcagccatgctaattcgggcagtcatgtcctcatcaatctgaggaagagaaaacagatagaaggaggtaagtcatagataggcaaagggcttttggggcctgggcca

SEQ ID NO: 310102 - DNA, 1000 bp, Homo Sapiens
gaattcggcgggtaatcaattctatgacttgcctggctactggccactttcctgttctcaacaaggaaattaagtctttccaccctaccatcttcactaaatctaaaagtcctcctccatagcttcccaaacaaagtttgtttgttgctgaaactgaactttgcttctttcagacagtgactcttcaatcaatggggagcactcttcccatgtatttattcttgttagccataatcctcttgccacttgcttttctggctaggttgctagggtgcaactctaggaagttacagcttggagtccaactgcataaactggttttggtggtggtggtggttggttaaaagtcaactattgcacttacagtaaggctatcttattagatatgccaaaccagctcctactccagcaacacctgcaaaagccagcagcacattcctgatgccaccttctaggtcctctacatggaagaactccacaaacccatcctagaaaacaaaaaagaaaagcacattttcaagtatgggtttctgctctcttaacaacactactatccagagagaaggtaaattaaaatatctaaggtttccccctaaagcaatagtaaaccaattattattcaccccgggggcaaaaaaagaaaataagttcttcagtttcttaagcggggacccatgataattaaacttcattttacagtactatcttggtcttattaggatttatcctaacaaaaggacttccagagttcccatgaggtaaaagacgaaaacccttattctcaaatctccaccacctaatatttcagtaacgcctcaattgcgcagatcagtttttctcaacgtagttaagtacatcctgcatcagatctgggtttgtttaaaacgcaggctccaccccatatcttctccattaaaacaggcaccgccttaggaattatttcagctatcctcccctggtgacttattttttcatggtttgaatccactgaagagtattc

SEQ ID NO: 310103 - DNA, 1000 bp, Homo Sapiens
tttttgtttttttgttccttataaaatttattttattgttttacactcaatcaaattattattagttctttgaaaatattatttgcacacaaaagcatatgactacgttctaaccagtctgtctttggctcagttgtttgaggcaagtcttcctggaagctccctgggtccagtgggaatcggagcatggtcgccattagcctgagttctttcttatttcacccaagaagtcaaaggtctgctccgaaaggtcaaatggtttgtgaactccatctggtgacagcagagccttcagggaaccctcgttctcccggctctgcttgaggaagtcagcaatggctttccatcttgcagcctctgtctcttcctcggcccacctaaaggggggcagcagtgtcgagtgcagaagagggagcacgcagtcatggtagaccaggaggaactcagcctttaggagctctttgtctctcttctctgctcgctttagtgtactttctttctcagaccaggaactcctgagagcatccatcacgtcgggctgctccaggagcagagggaaggtggccagcacgggatgactgattaaatcggcactttgcaggtttgtcctgtctctcaggagcacatctccaagaatttgtcggtaaaatatcagtaagtgagcagagcacatactccccaccagggtttctggcagcagactgagcatggccctggacctcctgttcagagaccgaagtttcaccagaagttgaggctgcctgcgcacgcttatcatctgacggaaaacactgccctgtgctcttctggacactgaagggtccacttcaacacctttttcgtaaggagtgccgccattcaagaagagttcgtatgtttttgctggaataggaactccactggcatcgaaaagcttaagaaacacccagccacagcttaactctcctctctcaccagttgaattgcgaatgtaagaaattccaagttcaaataatatccc

SEQ ID NO: 310104 - DNA, 1000 bp, Homo Sapiens
ttaatgaagataatccagaaaatttagatatgttgtcctccttccttatcatcatgccaactgcttacaagcacacttgtgaattatagattttgatgtccacgattctgtcattatgtacaatctagtatctaaactatttattttggaaagataaataaaaacaaagacaaatttgtggaattggtgacagttatctctttcattgaacataaattaggctgtatatggagcaagatgagacatgtgtccaatccacttcaggagtggaaaccaaatgctatttttgacaaacattcccagaagactataactatagttaagccattttcgccccatgaattaataactaaagcatttacttttgccccctagaacttgctgcaagtactttatgaccttgagttgtttatgtaacaaatccatatatatgaaaattttccttggtctatggaagtttctaattcttgcttttcaaaatgtactttcacagtactttgactttaatttgaggaaacatttgcattcagaggttttaaaagtagaatttaaaacattgatctttacctgattctcccgttctttctgagacccaggcagaagacacacttccagccatattcacagctaagactctgaactcatacttggtgtatggctccaagccagtgatggttgtcattgtttgaggaggttttaatgcattttcattggccgattctacaaatgaatgaggactgagccaaccactgctctgaaaaactcgactttcctcagatgtggtttctttagtagatctcagtcttctcatgtatagttcatatcttataattattcctagagacattaaatagtgaacctacgtaactcatcagacaaaggggttactttaggggtagggtagggacaggtcagttaaagagtgctggatattcattgtctttctaattagattactgtcaatttctttagcattcaaaatgtagtgatttagtagttt

SEQ ID NO: 310105 - DNA, 1000 bp, Homo Sapiens; identical to SEQ ID NO: 120186

SEQ ID NO: 310106 - DNA, 1000 bp, Homo Sapiens
cattccaggaataaagcctacttgatcatgttgaactaatgttttcatgtgctgctggattttgtttggttacattttgttgagaatttttgtgtctatgttcatcaagaatattggcctatagttttcttctttgttgtatctttgccagattttggtatcaggattatgctgctttatagaatgagttagggaagagtccttccacctcaaatttttggaataatctcagtaggatctgcaccagctcttctttgtgcatataatagaattcagttgtgagtccatctggtccacagctttttgggttgatcagcaataatgattcaattcctttgctcattattagtctgttcaggatttctgttttgtcctggttcaatcttggaaggttgtgtgtttctagatatttattcagtttctctggattttctagtttgtgtccatagtgatgttcatagtagtctcaggatcttttgtatttctgtggaatcagttgtaatatcacatatgttgtgttcagttgtgcttagttggatcttctctcttttcattctttgttaatctagctagcagtatatcaatgttgttatcctttcgaagacccatcttttcatttcatcgatcctttatatgttttctgggtctccatttagttttgctctgattatagttatttcttttttacgctagctctggatttagtttgttcttgtttttctagttcctttaggttgagattaggttgttaatttgagatctttctatcttcttgatgtaggcatttagcaccataaactttcttcttatcactgcttttcacacattccagaggttttggtatactgtgtgtctattttccgatttcaaagatttctttaaatttctcccttaatttcattgtttgcacaaaaatcattcaagagcaggttgtttagtttctatgtatttgtgtggttttgagagttcctcttggtgttgctttctatttttattctac

SEQ ID NO: 310107 - DNA, 1000 bp, Homo Sapiens; identical to SEQ ID NO: 120187

SEQ ID NO: 310108 - DNA, 1000 bp, Homo Sapiens
atttttatctctgaagtatgttttgcttctcttcaaaatatgtatggcaatttatgtgtttgtggacatttatgtatatatacatagatatagtttgtcattctttcctacaagtatctataaactagatttggtctcaaattatttcagattttttatttgttgtgtgtccagaaactaacacagcacctaaataggatgagtattcaatgcaattgtaatgaatgaaacatgtgatgaattttacccacacctggtcaataatatatttggcctttaacaatgacataatgattctaatcattactgaaacccactgttctatagaatgcatcggtcttccctatttgtactcaccagttttctgcacatcccacctcaacttgtctcacatctgccttttgaatttccttggataatactggtaactagtccttgcttagctactgtgcatcatactaggttaattttctggatctgtattttttttttcactcacaaactttggtgggcatgtaagctatccctagataatattcatttttaacatgatatggttatgcgtaaacataaattttcatgtcatttgggaaaatgcataagtataggattgctaggtcacacgataaatgtatgtttataattagctgtctaactgttttccaaagactagtgctttttgggtccctccgctgtggtacaatgtggggcatgtgtagtgagagttcattcagcctgggcagctttcctgagctgtgggaatgggcttgtgatgaaccccaggcttctgtttctcattgctgcatgtctatgagtaacaaatctgcttttcttgatttgttgtgtgttttatctcagcaggttcatgaactaggtagagaacctttgcatatatatgtatgtccttttctccaaatcctccctgctgtcatccgcactattttatcatatatttttgtaaaataaacacacagtacattgctactatttttgctatata

SEQ ID NO: 310109 - DNA, 1000 bp, Homo Sapiens
tcaagtaaattgctgactagaatcaagccctcaagctctgaatttagggttaggagcctgggttaggaagaaagactgtatatatgcttttgaggcaagcagtcagtgagggaatgaggcatgattacttgcaggtggctacaagcaataaaaatgcggtcaaaaaggttagcagagggattgccccactagtagataggaactgttacaacagcctgtgacaatgaagacagattgcaaacttcctacttaggcacagatgagaatgtaacacagaagaaactggccgcaactggttaaagccaagatggtcgaaaacttggctgactgctgacccttagcttcattatgcccttaatatcataaaacttccatggggaaattcccactcccatcatgcacctgacgccatgacagttccggattaaccatctttagtcaagaaaagggtggcaccccgattccgggaattgcccgcccatttcccagaaaacccctccccttgattacagagtactccataccttcattgtgcttattcatatagtacgtgaaccacattgcctgtgactcaaatctttgagtgcctgcactcctcccttgagggtgtcgttggttttgctccacaataaaatgtctatactttcgcttgggtctcattttcagattctcttatgctttgaagacaagaacctgcactgccctactggcaacacttttagataccctctgagatcagtgtgcttgtttataccagaaaaatgtcatcaccaggccccttagtcacaaagtgtatcaagaagtcatctgcggtcattttttacagtttctaggccactttctgtttccaatcagtgtagttcctatgtggcatgactcagatacaagtttctatagacattttcttctgtggctgctagtgagaacccaaaccagctcagccaattagagctccagttgtcactcctacccacactgggcctgggggtgaagggaagtg

SEQ ID NO: 310110 - DNA, 1000 bp, Homo Sapiens
gatctagatgtcactgcagattgtttctagatatattagttggatgagctactatgaccggagggagaagtaaaatattgagcatcttcaggaaagggattagaggattagaggcagaactgaaaattatattcaacttaatccacacctgtgttagtataatacatgcagcagtgcatggatttggtcaatgcacttcaagaaagattttgaaagagcataaaaaattccgtttgagcaactggaagggaaattataatacttacaaagttaaggttaagataatcacatacttgtttacaaatccagaaatattagattgaagcccctccacccctgcccctgatcttcttagaaatttaaacttgctaatttggggaaaatgaaaaagaaataactgtaacttctaataacactagtatctactgagggtttcctatttgtcaaatgctacttcaaactcttcaaacaagtaagccatttaattttcatggcaactctatgaaatactaacatattcaacttacaaatgagttaaatattatggttaagattccgaggagctattgaggaatttacgcaggacagctccatgaacaggtttttgaaaaaagtgtaatggcaacatccaggaggaagacttagactaagatcaaccaaaaggagacagattagttaggaggccttgtggtgatcacagaggatggtaatggcagtcagtagttgggcgttggtagaaagcatgaagtggaggggacaggaagagagaatttcaggaggcactgtctttgtgtggaaaagggaagggtggtgattaggacagtcctcagctttctgaatggagatgatggttaaacatggtgagtattatcaggagtagatgtgggtataaggagcgaggttaatctgcgcaagtacaacctctcatgctgggtctacttgaggtaagataaaaggaaggtggatcagcttatttgtatccccaacataacttggaata

SEQ ID NO: 310111 - DNA, 1000 bp, Homo Sapiens
tgtgcgaatgtaatcccagctactcgggaggctgagacaggagaattgcttgaacccaggatgtggaggttgcagtgagccgagatcacacgcacttcagcctggacgacagagtgagaatctgtctcaaaaagaataataaagttaattaattaattaaaataaataaatcacattgggcatagagggagtgcatggtgtgtgtgcaattcactaggactctggtcccaaaaagcagacagaattcatgctagcatgagaggccatttattgttcaggggctgagcccccctgttttgggggggttcctgcactgctgcctccccccattgttcccgtggacccctcaagtggcaggttgctgagatgatcgtggagggagcacatcttcaagtgtagatggtccagagtggccatcttctccctgtcatgaggcagcggggagttgatggcggcatggctaggtgctggggtgttggagtggaaggggagatcaggccctttccccaagatctcaccctcctcccatgccctcagcctccttcctcactctggcttcatcttgtctgtcagcagtaggttcttggcccgcagggcctcgtcttgggccagccgaagggtggagctcagggcctctgccctgacgtgtttggctaaggcctggcgctccagctcctggggagaggagcgtaggcgtagctgggcttgctggactgggctgggggtggagggggaactggattgcggagggcaaagggtagggtcccatggggcccacatttctccctcagagtttcccatcatgccttgagcttgagactgaccccagcatcccacaatgcactggtctccagattccgctgtggactaaatctgtgtctgtcctattgtctgtcccatgatgcactgacctatgtcccagcaagcactaaatcagtgcctatcgtctgtctcctaagctcatgaactatcctacatttgatatgtgtgtgcaccccag

SEQ ID NO: 310112 - DNA, 1000 bp, Homo Sapiens
ggtcattactaaatagttactgttttttcacactggaattacaatgactccttataagtttttatacttttttagaatatttttattttttaaattaaattaatttaacttttatttttaacgtttattttaagttcaggagtacacgtgcaggtttcttacatacgtaaacttgtgtcatgggggtttgctgtactgattgtttcattacccaggtattaaaactaatatttgtttattagttttcctgatcctctctttcctcccaccctccaccctccaatacatctcagtgtatgttgttgccatgtatgtgtccacatgttctcatcttttagtttccactcataagtgaggacatgtcacatttggatttcaattcctatgttagcttgctaaggctaatggcctcctgctccatccttatccctgcaaaaatacatatttttgcttttttatggctgcataatattctgtagtgtatatatgccatattttctttattcattccataattgatggtcatttaggtttattgcatgtccttgctattgtgaatagtactgcaactaacatatatgttcatggatctttataaaagaacaagttatagtccttaggttatatacccagtaatgggattgctgggtttcatggtatttttgcctctgggtttttgaggaatcaccacactgtcttccacaatggttgaactaacttacattccaaccaaaagagtataagcattcctttcctatataacctcaccaacatcatgatattttttgaatttttaataatggccattctgactggtgtgagatgctatctcattatggttttgatttgaatttctctaatgatctgtgatgttaattttttttcttcatgtgatggttggccgcaggtaggtctttttttaaaaagtgtaacaattttttaaatacttgaacttttcattgataatcttatttttctaaggtactattttggaaaatca

SEQ ID NO: 310113 - DNA, 1000 bp, Homo Sapiens; identical to SEQ ID NO: 120189
  misc_feature (352)..(352): n is a, c, g, or t

SEQ ID NO: 310114 - DNA, 1000 bp, Homo Sapiens
acatgcaaaaggaattaagaataatattcatgcaaggatacaacattactaactagactatttttaaaataaaaagcactacctaaaatcatcatattactactttacacacatgcatttctttaattatttttttacatagatttctcacatctattcttgcttcatgggtttcagttttataatttttgggattgaagacatagtgtctacattaagaaactgacatgtttactctgtatttactcatcactgccaaaagctttttgggaatcctggagaagatctatttgattatctgttttatgagtaacatcccctcaattaatcattgaagagcaagagacagcatcagacataaggacatttttacactggccatttgggacttaggatctattcactctggtccatactctctttggttactccctttttgtttatttggacttgattctggataatgggaaaggaagctggagagcaggaatggtgtttagacttcaggttccagctggctgtggtcaccatgtccatggaactgattgtcaagttatctcgtcttagggacctttaaaaaaacaagtttgagggcacttaatagtttattctcactgttcttgtcagaaattagtattgaaacaaaaatatttttggtaattattattcaagcttggaaagaactgggaataaaaattgtttgagttgaagaaaaataaaagaataaaacatttatctcacccaccctgactacattcccgcttttccaaactcattctctctgaaattttgctgaaaacacccaaacatctatccctctcaagctttgcgggaaataatttgggaaaaagtatcaatagagtaaagagaaactggaggatagaaagaggctgatgtttcgttattcataggacctcttgatgtgtactcactcaaattcttcaaccttatatatttcacttgcttttgactacttttatgtatagcatagtttaaaatt

SEQ ID NO: 310115 - DNA, 1000 bp, Homo Sapiens
ctcgtgccgaattcggcacgagctgtacaatatatatgtgtatttaaatatatatacatatatatatatatatatgcacagagaaaccttagccaacaaatccctgagtccatgggaacccaggacactaacaaagggaaaggagagtccatgcctaaagagtaggaaatatggcaacatctttccctttcctcctggttccctgcaacagagggaagggaacagtcactacaaattactaaaacgagggtttaggtggggcaggaaagtggggtgagagtggtaggatggggaactcagatgccaccagtctgggaaagtaaaacatttgatccagcatgaaagccaacatgaccgcagaggaaaaagaccagactgatgggcatgcagctggcctttggtatatgccaagcctttgcttggtagccccacgcctgggccagcacaacaaatagcacctgtggggcctataagccgggaggggatgggggagatagggactggggaaatggcccttgagtgaaggaaagggagataaagctgaggaagaggcctcaggcctcagcacagggtggcaacactaccattcactgtccctgtgccatttcttcagactctgggccgccaccaccaccagatggccaagagcagataaccttttgtccacagccaggtagagatgggcaacttacatggccttgagaagaggtatagaaaaaggagtgcttttgagggctaccccctgttgtgaccattcctgaagtgcagagaccacaccagcaaaacatgcccagtcttagtagtggggacgaagaattgatgagtggatccagtcagctccggcagacaggccacagggttgccaggtttgatgagccaaccaggtgagcacacagcttcggagcactgccctgaatcctgtcttctccctcaggactgccctttcctggccacaccaagtttggcacctctccagaaagttggcagggagcaagtggca

SEQ ID NO: 310116 - DNA, 1000 bp, Homo Sapiens
ggtcctgctccttatggtcaggttgaaatcagagatgctctagtctagcagcctgagtgaaagcgtgggatttaggtcagactgggctccagattctgagtttaccgcttagaggtcgtttgatttgggcaaggggttaaaggcctcaaaggtttaagccttagtttcctcatatttaagatgaggataataataatatataccttatatgattttgaccattaaatgagatcatttacaagtgcttggcacactaagaattgctcaataattagtagctgtatatgttcatatctttttcttggatttgcttggtgctttagttttagccaagtgttttcacatatataatttcacctgaagtaaagcaggttttgctatctctgtatttcacataagaaaacttaggtcctgagatattaacagacaagcgggggtttagagaagttatagacaaagccaggatcagaaccagatgttgtgattttcagtctgtgttccttccagctcattgtgccctctctcagtattgctgaccttcccagattctctagtccccctttccctcacaggtggggaactcagtgtgtggtaaaaatgttcctgcacccaaggaaacagggctctggggaagtcctggatggtgggtgatttatttcgggtggccatcattcgctttctctaccccaccccttgcctgccttttcagataggcgtgtttgaccaggtcccccttctcttctcaatatcccccatcaatctcacttctcccagttttcattgaaatgtcaatggtgtccccctagtctcttaaatcattcaatttctacttcctctgtccttttctccttttgatacaccgtttagtacaccatctccactcacctccatgggcataccttcaattttattcaaatcaggaaccacttctgttcagtttctctaaagctgagctttcaaactctcctgccagctatttctgggtcatgttaatctttat

SEQ ID NO: 310117 - DNA, 1000 bp, Homo Sapiens
gcctttgtagccccggccccgcgtccttaccctgccgacggctgctcggctccggcccgcggcggcggccccagagccgaggaccggggtgggctcgcgctcttcgtcactggagaagtccgggggccccttgctgttggtgccggcggggagcggcggccggttgcgagccgtgaggtgctgcaggtagagctggacgtacacgtctttgcgctgctccccggccggcagcgtcacattgttggcgaccaactcactcttcaacttgtcttttgtcaggaccgaggggtcttccaggaactccggcatctcggggatctgcgaagccccctccccacagcctttgccgccgccgctcacgccggcgcgcttgctcctggccggggaccgcgctgccgcctccgagcctcacggctcctgcccgggaagagcgctgcggagcggaacaaaaactcgcggacacaaagccaagccagacccggacacaaaagaccccagagccgaactacgaaccaactgcggccaagctggaagctcgcaccaaccccagcccacacactacaggcaggaggcgagcagcctgcttcgcccacgccccaagaacgcgcgccgccattggcgggcgacgggaggaagcgcggcggtgattggcgagacggctcgcgcgggttccattagccgccgcgctgagcgagaggaggtagaaacgcagtttaaaaggcgctggggcgggagccgaggctcccggcccgcttctgttttcgttttctccacccttccccttagacgccgataagggacaggtcgtactgcttttgtgcgccgtttcctctccctcccccagcttgagaagcagctttcgtctctggggtcgatcgcctacgaacgcgccgaattccacgccagtgtgaggacccttggctgggcctttcttcctcccgggacactgaagctccaagagtagccgcagccttgccttccccaaacgctagccctgaag

SEQ ID NO: 310118 - DNA, 1000 bp, Homo Sapiens
agattttaataagattttaataatattggtaaggagccaaattacagaataccctagaatgtggaatacaaaatctcagagacaaaataaaaactcatgaaaatataagagcactttaaaaaggtaataatctttaggataaagaaagccttttctcaacacaggtactgagcatgtttaataaaaattaaatgagattaaagagaaggggcagagccacacgctccccgccccgcggtgattaggaaggtgatgcttgtgtaggtgaaagcatggagccagggcacagaagagctccgaacaccaacagtgctgcagtaagctgtctccacgtgggtggaatttctcacaatccactcacgggataggaattaattttctctccagttgcagaggggccttgtacatgaactgcgttggcatgcggaggaggggcaacacatccatgttggggacccctcccatccacagccccagctgccaccacggcagggcatgggctttgggggcaacaaggagagacaggctgtctcctctaggaacaactcattattcagctaaacgaaatggaagagctccatgtgaccaacaaacccaaattgagccaaaacaacaggcgtccccaccccccagagggataatgtgccaccaccctgtgtgcagtgggagagcaggaatggaggaaatattcctggttcagttacactcctcgtctgtcaggacagatgtgccaccctatctcggattccgggagggtggctgggggtttccctcaactctgcagcaaacacttcaatgctactgtcatttgaggcctaattttcttccaagggcactatatgccatgcttcacttgggccagatgttcagatcagtgtgtctgctcgtccccattaagaacacaaccacaattatttatttgtccttccagcacatgtagcagtgaagagaggctgccggatcgcagcagatgacagacagctgatgctcctctgaagag

SEQ ID NO: 310119 - DNA, 1000 bp, Homo Sapiens
ctcatttacctaaagattctgggtgggaaatccaatagctgtggctgatggaggggaggcagcaggctgcaatctcaccagctcctatagggatggggcaccacgggcgttatcaagtctgagccctcatcagagtgaagataaatgcatataacaataattttaaatcattttgtaggatgttaagcaataagccaccaaccgggaattccctaagtcacttccccctcttctgattggctacccagccctttaaaaaaataaaataaaggattacaaacattggctcatttgcatttggccaactcacacgttagtgttcaaacaaaacaggtctaaccaggtaatgcctgtgtctcaagaacagagagacaacctgttaatggatgaggaattgatttggtggtgactgttcttttcagctcagaggctgtttcaggtgaaaagcaccctgctcaccaaagacaccatcgggaagagggaatgtaaaagcaaagtgagtagaagtccaaatccggaggagatgatggtatggaggggccctcttgagcacctgtctcatttattagtctgtatttagtccaccctgctttggcatcaagatcttttccctagctctataagtaccaggctctgaaggggctcccagcaagttcccttctccaggcaccatgactgccttcttgacagagactcttggcaattcaatggactttgaaaagcctatctcccctggccccaggtaagagccttgagaggtttgaaaagggaaggtcctgggagggagggtaccttattgaggagatgcttaggtcaagcagtcaactctcaaatatgcaagagctgattatccggttggtggattatctaggttcttcacttcctcttgacacttacatgatcttttttaaaaggtttattgacactccctataagagttagagatgagaagaccaaaatgctgaaactggaaataaaaaagcacagtttggacaagaag

SEQ ID NO: 310120 - DNA, 1000 bp, Homo Sapiens
acaaaaaaatcaagtttttatttcaaatatttgaatctaatagatcattatttaggtttatactctgtgaatatatatatgatattgtatttaattaatatctgagtaatctcaattaccattttctaggaaggatagagtgtaagagctaaacatttcatgtagaaatattaactttcaaaagttataataccagagttttagagtgaaggagtatttaaaatgtgtctttctttgggagagaatcattttgttctttactaacaataatttgaaaattggtaatttaatatcttgtgaatatgaaaatattatggtatagattagcttctaggagaagttaagtgtagcatgatttcttgaagattaaaaaaacatttaactttttaaagataatatgcatattgaatattatttgaacataatagtaaagaaaattatctttgagcttttttgaatatatggcatttgcaaaataacattagctcttatgcatgaaataaattgtaactagatttaataggacaagatataatttatataaaaattaataaggccttagttaatatttggtagtaaaatggacaatgaatcagagatcataattcaaagcagtttttcaaaggaagtttcattaataaatgcaaaaactcatatgtcctttttctcaaattgacaatgagtattaaaaaatgtacaaaaacctttataaatcagttatacagaagataaactataatttgaaaagcaaaagtatacaaccagagctacaggccttacagcttaattcatacaggtatgagtttagatagtctcaatcaatatacagacttcagatttcctgaggagactttcactaatccactaccacactcctgatttttgttcctggctgccagtgctttcaaaaaacatgaagtcctagataaaaacaaaagtatacaaatgaattttcaacaacaaaacagagatcaattatcagatgcagaaatactaaggg

SEQ ID NO: 310121 - DNA, 1000 bp, Homo Sapiens
gatcacttttagtatattttaataatacaaataactattaagtttaattcatagttctataacagatatgagctattgtcaaaatacctgcacaaaaaatttaatagaatattcataaataccaaacataagttatacataacttttctgaagttatgtatattttgtagagtattttttgcatatacacaaatatataaaacaaaagtcaataacattttctttagagatggggtcttgctgtgttgcccaggctagagtgcagtggctattcacaagcaccattccactactgatcagcatgaaagttttgtcctgctgtttccaacctgtactagttcaccattccttaggcaacctggtgatctcctgctcaaagaggtcaccatattgatgctgaacttagtgcggacatccgatcagcataacacactacagaccagaactcctgggctcaagtgatcctcccacttcagcctcctgagtagctgggactataggcacacaccacagcacccagccaataacctattttaatgacatatttaacccaactctgctgatatgcattttccaaagtccgaagttcataaaggttagcagcaggccggtgggcaaagatctactttgttttactccttcaatagctgaacctagagaatagcttctctctctgcaacactactggcctcatttgcagaaggagaaatacatacagggaatgacagccagtgagcacaccacggaagaaactagcatccagactccttcctaacaagccctcagagatcatgctacatttgttttctattctctttgaaaaccacagcaggagctagaaatcagatattaccataaccaaacatcacaaagtttatcataagaataaactgacatgagaagttaccatccacagcatccaatctctttttactcaaaatatactcgaatttgcataattgctcattttcatggctctgaagtttaaaattcttcttgg

SEQ ID NO: 310122 - DNA, 1000 bp, Homo Sapiens
agaaagttctattttattcattaaatttttttttttttttttttttttttggctggcacagtgactcacgcctgtaatcccagcactttggaaggcaaaggtaggtggatcacctgaggtcaggagttcgagaccaacctggtcaacatggtgaaaccctgtctctactaaaagtacaaaaattagctggatgtggtggcgcctgtctgtagtcccagctactctggagattgaggcatgagaatcacttgaaactggtagacagaggttgcagtgagccaatatcacgccactgcactccagcctgggctacagagtgagactcagtctcaaaaataaatgaataaataataaaattaattcttattttattcaaattttattttttcttttttatttttaattagttaatattttggtaagaatattcaaggtgaaatatgtctttcatcaaattgttgaatgcacaatgcagtatttggtaactataggcacgacgttgcacagaagatgtctacaagatgttcatcttgcataactaaatacttatgtccattaaacagctactccccattttctctcccttctagccacgggaaaccaccgctttactctgtttctgtgagttttactgctataaattccacttataagtaaaattatgtagtacttgtccatctgtgactggcttatttcacttaacataatgtcttccagattcatctatgttgttgtatatgccaggatttccttttcttagctgactaaataatattatatattatatataatattacttatatatataatataaatacattgatattacataaacatatgtattaataaacatatttatattatatgaatataaatatataaatgtataatataatatataatatgtattttatatctcacctattctttattatatatatatctcacatattctttatttattattctgtcaatagatatttaggtgtttccatatctt

SEQ ID NO: 310123 - DNA, 844 bp, Homo Sapiens
tttttttttttggtgtgctgtgctttatttagacagcagccatgttgagagtgatgttgagtctgcttagcatgtgttcctttctacagtctactctagacaaaaatgaagctacttcttcttcttcagattcccgggccctaagactggctcacgcttggatcatatacacagcaggagtaatgagtgggctgaggttctgagtagttagtcatataagttgacttcgctgtgcatttgtagtgaggaggatccagctcaggctgatgtccaggaaaccagtgaggctctcgtttaaatctatgtgttgattgtggcttcttcctgctgtagtttgcatcatatgttgtttcgaaggcatgtccaaactgggaaggcaagggtttaggctttacaatattttttaggtcgtatctttcctggttccagtttcctaccagggtacggttcgaataggagttctcattagtggtgcatctccatccgtactgtaaaaacttggacatgtcattccagtctgtccacacttctccatgaccatcagcataaataaggctgccatagtgtgggtttctaagataacagacaaggttttgtctcttgagatatgttgagtggctgagagaacaggagacagccatgtcaggagatggtgcagttacagcgtcctgagcctctggaatacgcaggactcgtctcacccctcagttagtgacagttatgcttcaagcaagaatgggaagacgctcagggccgtccgtgttgggccgtccgagtactgaaaagaaaacgagcctttggaggcgcacaaaggtgaagggcaaggccaagagctccattttac

SEQ ID NO: 310124 - DNA, 1000 bp, Homo Sapiens
cctcccaagtttttttaaagcagggcatactatatttcccaggcttgacttcctgggcctaagtgatattcccacctcagcctcccgagtagtagctgggactacaggcatgagcagccaccacacttggctcctcatagattctgacataacagcctctaacccctcataagaagcactgccacttcaaatacaaatatcctggtgtgctaggtaggagaaaagttccaagaaccaacttactattttgagcatcaaaatgctcaaaatagtaagttttgcaaaatgctttgttacaaaataatttaatcccattgatcaaagactatctgaaaacccttaggggatgaatcagtatttaaaaaggtgggacaagggtgctcttaatatccatattgactagaaggcacaggaatactctcttcctacaatccacagtcaaatgcaggaagctgatatttgcatggaatacaagggctacctgccaaatgctagcttccgttgtgccgccctctttaaactatcatctatcatgccctctttaaactaccatgctcgctatactagttgtaaaaacagactggtaaagtcagttcactctgaagttgccagtgtccttccagggtcttttttttttttcctttttttaaatttcagagacacagtctcactctgtctcccaggctggaatgcagtggcataattatagctcactgcaacctgaaactcctgagctcaagtgatcctcttacctcagcctcctgagtagctgggactacagaggcacaccgccaccatgcccggcattttaagtgaaatactttaagacacgtttgaccctaaagtatcacactcacagcattgatcccagagagctgctgagagagctggagcacaatggaaatgatgatgggctgtcggtagctggacactctaaagagctctagcacggtgacttgcttttcttgtgacatccttgcactctcatctttcatctcct

SEQ ID NO: 310125 - DNA, 1000 bp, Homo Sapiens
cagaatattctttagtaaatataaccttaatctctcatattgtagtttcaagtctgttatttgtccctagcaactggtaccctgtaattttgggcttaatgactctagaattacatgactaccaaggtctaatttcagttgacagtttgtgatacaaatgcaaatgaaagctgtcaccagacagggactataaacctcattgttttcaaacactattcaaagcctactttcatttaataagtcatgatagtttatttatacaagtcatgcatgaccagtaatagaaaaatcaaaaaatgttcacaggaaataagaaaaaaatcagaaaatgtcacaggaaataagaaaaatataaaaatcaactttcatcctgcaatttggggcctctatctcacaagactttatatatacatgtgtagacatgtgcatgtgtgtatgtgtatatacaattatttttaatttttttctgagtgcttataagttatgatgtatagtaaagaaaagtcccttataccatagaaattttcaccagtaaattaaccacttataaaattagtcctcctcaaaaacccctttctgctaaacaatagcacgtattattgtccatcatatcactggtcctctgttgactattgaatgttaacaataaaaaaaagaaattaattgcaatgtagaattataaatcttggaaaatacacaggatttcataaagttgaaagtggtattggataactatttcaatatgtcaaagccaatgaaaaacgatttaaatcagttaagttgaagtgaaaaaaatccacttggatgatgagtgatgggtattttgaatatccaattaatgagagacctttggaggaaacagtgaattgttcaaacgttttggtaaaaataaccctatttatgaggtaaaggatactgtatcattcaacacttttatcagagaactaccccaaatccctcaaatagttcttatttcattctttgtccattctaaaaatta

SEQ ID NO: 310126 - DNA, 1000 bp, Homo Sapiens
accacacccacacaccacacccacacacccacacccacacccacacccacacaccacacccacacacaccacacccacacacacccacacaccacaccctaaccctaaccctaaccctaacccctaacccctaacccctaacccctaacccctaacccctaaccctaaccctaaccctaaccctaaccctaaccctaaccctaaccctaaccctaaccctaaccctaaccctaaccctaaccctaaccctaaccctaaccctaaccctaaccctaaccctcaccctaaccctaaccctaaccctaaccctaaccctaaccctaaccctaaccctaaccctaaccctaaccctaaccctaaccctaaccctaaccctaaccctaaccctaaccctaaccctaaccctaaccctaaccctaaccctaaccctaaccctaaccctaaccctaaccctaaccctaaccctaaccctaaccctaaccctaaccctaaccctaaccctaaccctaaccctaaccctaaccctaaccctaaccctaaccctccctaccctaccctaccctaccctaacccctaacccctaacccctaacccctaaccctaaccctaacccctaaccctaaccctaacccctaacccctaaccctaaccctaacccctaacccctaaccctaaccctaaccctaaccctaaccctcaccctcaccctcaccctcaccctcaccctcaccctaaccctaccctaacccctaacccctaaccctaaccctaaccctaccctaaccctaaccccaaccccaaccctaacccctaacccctaaccctaacccttaaccctaaccccaaccccaaccccaaccccaaccccaacccctaaccccaaccccaaccccaaccccaaccccacccctacccctaccccaaccctaaacccaaaccctaaccccaaccccaaccccaaccccaaccccaaccgcaaccccaaccccaaccctcaccc

SEQ ID NO: 310127 - DNA, 1000 bp, Homo Sapiens; identical to SEQ ID NO: 120190

SEQ ID NO: 310128 - DNA, 633 bp, Homo Sapiens
ggctcctgggtattggctaggagagctccaaaaggaggggccgggaaccccaaaagtcctttttgcactggcccctttgagctgggacaggctggaactgggtggggatgcacggaccttaccttctgtctgtgtttgctcacaggcagcacccaagctacccaggcggcactggcacctgcagctggtgccctcgaggatgggcaccccattgttgaagcaaggcccacatcggcaggcattgaattccatcagatactggtccaaggcgcggcgcaggttctggcgcttggcctccagaggccccaggcttgtgtgccgcagcacctcgtggataggctgcatctgtgggcacagaaagaacacagggccctccctgggctctatctaccttcccagagcccaagaaccggccaccaagcttctggaaggcctgatacatgccaggcacagacacagacacccaatttatcccaccaccttggatcctcacagccattctgtgacataggtattaaactcctcagctcctagcagaagaaagggaggctcagtgtttaagtgactggctcagaagcacacaattattaagaaataataatgaagatcaggtttagagaggggcagttaaaa

SEQ ID NO: 310129 - DNA, 1000 bp, Homo Sapiens
aaattcagcatccgggctgcacagctccgtatgggggtgtggttacaggtgaactgcaaaagtggaggggtatatcagggtaaccaaggagggaaagggttgcaaggtacctggtgaagccatgtaccctaacctgggctatgcccaggtaccttataccccatgggccttagtactcactcagggatgacaagaggttgggagaacaaggaaggagaaccggagttaaccttcccctattctgggagggggctccctgagggcagaaaatatgtccttttctccgctgtactcccagtgtccaggacagtgcttggcacagagcagaggtgggagaattcccactggacccttaccatgttggcaatggcagaagtaaacacaagcaggacggaaaagatgccaactgcggtgctatgtgcccgtgagcggacaatgctgcgggacagacgttgcagggccttagggaacagctagaggcatcaagagaccaagagttgaaggttgtatcagccaaggaggaatggcaaccagggatggggcccagtggaagaggcatggccttctccctctccccatgtgacctcctccctgtctggagtccagcctgccctccccaacagcctcagaaatccccttacgtacagaaccacaggagtacacagcacagatcagcacggtgattagcagcagcaggaagatgctggcatagatcccaagcatcagggtggagctccccagaacagggccagaaaaatcatttaattctggaagatctgggcattcttgtcccaccctctggaacaagcagggatgcaggctccagggattgtgggcttgtgtgggtatttaggaagcttctgggaagtggtgaagagagaagctaagagagtaaaggcagggctctcactgtgggaagatgagaagctggatgaagcagatgaagcagaagaccaacagggcacaggcaacgtaggctccgaagcggggatccaccttc

SEQ ID NO: 310130 - DNA, 1000 bp, Homo Sapiens; identical to SEQ ID NO: 120191

SEQ ID NO: 310131 - DNA, 1000 bp, Homo Sapiens
aagctttttgatgtgctgctggattaggcctaacagtattttcttgagaatttttgcatttgtgttcatcaaggatatttgcctaaagttttcattttgttgtatctctgcctggtttttgtatctggatgatgctgacctcatagaatgagttagggaggagtacctccttttcaattttttggaatagtttcagtagaaatggtactagcccttctttgtacctctggtagaattcagctgtgaatctgtgtggtactgggctttttttttttttttcggtttgtaggctatatattactgcctcaatttcagaactcattattgatttattcagggattcagttttttcttctttcagtcttggaagggtgaatatgtccagaaacttaccaattttattttgtttttcaagttatgtgcatagtggtgtttatagcattctctggtgcttgtttgtatttctgtggggtcagtggtgatattcccttatcatttctgattgcatttatttgatttgtttttcttttttattagtctatctggtgttctatctaatttattaatgtttttcaaaaaaacagctcctgctttcattgatttttgaagtttctcatgtctctatctcctctgatcttgattatttattgtcttcagctagctttggggttcgtttgcttttggttctctagttcttttagttgtgatgttaggttgctaatttgagatctttctagctttttgatgtgggcatttagggctataaatttccctcttaacactgctctagctgcatccttgagatactggtgtgctgtctctttgttcttattagtttcagaaaatgtcttcatttctaccttaattttattatttacccaagagttattcaggatcaggttgttcaatttccatgtagttgtgtagttttgaataaatttcttaatattgagttctaagtttattgtgctgttgtctgagagactgtttatatgatttt

SEQ ID NO: 310132 - DNA, 1000 bp, Homo Sapiens
ctggctattaatgccggtttcctcaggccttgctgaaagcaggctgagattgtactaggatgaaggggatgtaccagaatccttcaagactaacattatcttatgtgaaatttggcaaagggcttttagacaggaatgagatctctgatgtgtggaagatgtaatgacacaaatgtatcatgaaatgtgaaggcatctaaaggtacagcatggtgggacatagggtgggactgaaccaatgagcaacggtcatcacctgaagaatcattcttctctacttctttcatcccaattgtcccagcaacatgagacaaatttcattcttaagctattctttcttaatccctcagctttttgctttggaatcaccgaaccactaatatcaagttcagtttatttaccttttagaaagttcagttgccttttagaaagaaagctattaagtgccgttttataaaagcaatgacacatgctctatacatatacttggaaaggagtaattaatactttgattttttgaggtttgttatcctcagctactatcatgttaaacaacactcacttcaactgtattgttttcattaatattcatagattatttaatatgtcatctaaaataattaatgtattgatattctgagaagagttacataaaacattgtgggggattactaagatatctagcaaaatctgcctcaaaatccttgtacttgattgaaatgacacagttatcaacttaaagcccagcattcctagattcaatgaggaaaaaacacacttactgagaaattgttaatataatattaatagtccatcaacaataattttctaaaacaaagctatagattttcatcacagttcagtatacatagagactaatccagctaacagatgcaagcatttaatagttggcctgggttggagcatgaccttgaggaaggcacctgatttctctggttttgaaagtctgtctcctaaaaataaagtatggagatgtcat

SEQ ID NO: 310133 - DNA, 1000 bp, Homo Sapiens
aaattcactacacaaactctgtgattaggtaagaaaagcgatactggcttgcagggaccttctgattcaagtacaccaagaaataagctcctcctcccccaactagatggtattgatcactctgcccacaaatggtacccccttcagcaagaactgcaagcccttcttggatttgccttcatgagaaaatggtggcttgggatggaggtgacattccttgctgtggtgaactgcaaagaaggaaaccaggcaatgtattccatagaggcctttaaagagacccgttggaaatgggccatggtctaatttggtgttgaaataaactaacctctttggctgtttctcccaaactgccaccagccaggcaaggccaatccaatactgactgctggctgggggagctcgtaatgggtgatgccgccctgctttttgcatatgtcaggctaacaggtgctttatttccagagaattgttaatgcccttttttgaaaagagccagcagaaattccggacaagaatctgaaaaataggtgtcaaaaactatttcccagaaggtagctgtacaggagtttgagtctccagctgccagggcattaggtgtctagtcactccactcttccccaaagccgctctgctccccacagctcccaggtgtcagttctcattctacccaccctcacactaagagaggttctgggggtcacttttttgttccactcagtcctctctcttggggtggtttggggcaaatcctgatcatcgtctgtgttaaatgtttccctgtcccccttccccagggtggtttggtgttggtccttctcaacacacactggttacaaacacagcaaactttaaataaaggagaaacaaaaacaaaaacaaaaaaaacctcaggatatggcacctaaactccaaagtaaaacactggaaaccaaagcacaaacttgtcctctgtacgaagcgaaactcccacagaaggcagtagccgagtcttcagggc

SEQ ID NO: 310134 - DNA, 1000 bp, Homo Sapiens
aagctttctctctctccaagcgcgacaggggcgaggggctggagcagctccttgctcttttgctactctgggctctggagagtgcacctgggggctcccacttggaagaccgcgctccagtcccgccagtcccctggggccccagaaagtttcttgaaagtggaaactcttacctgacccaaaaggtcatagcccagctcctcggcgatggccgaggctgcttccgggcccccggggatctccgctgcccattcattgacaaattgccttttcgcttttgcactgttcagtgcacaccaagcgcaaaagaggacgaaagcagtgcactgcagactccaggctcttcgctccatagctcacacactcgcttgaacaagagtgggaagggaagaggaaaaagaagcaagataggagaaaagccagacagactcccccttcccaccctcgggctctggaccactcctggctcctggttgctctgcgaagagctaggaggcgcgagaggagaggctgggcggcggcgagcgctcagtgaagcgcttcggtctccaggctgagtggagccccagcccttcccagccagaatggaaatgagtgtttacacgtcaaatcgacgaaagccatctcttgacgtcagatctacctggactaagatccgaatggtattcccggcggggcggagaagcggctaaaataagcagccagggattaggaaaaggaaggaactgtttgctgggatcagttaagtcttgctccttgtctgcccataaattctgtaccgtgagaaacattttcacttttcaaagagaagtgccccacttgaacataactaccaagaatcaaaggctgggagtgctttccctcccttccatccattttctctgtatttactttattatctcatgtgtgtgccgggagggggggagctatagattcttataatgccctttgggcatcagcacctgctatgaagaacaaggctcttaggtctttcaaagag

SEQ ID NO: 310135 - DNA, 1000 bp, Homo Sapiens
tttttttttttaattggaaaagtttctgttctttaaaaaaactttcgtgaaataaaatttgatactaaacaagcatttatttttcagtgaatacggaagatcacaaacagttttcatttccctttgttactcagggaatcatcatgactttgtaccatttcgtattggaatttcttctgtgaagcaaaaacagtcccaaaatgaaggatcttcaggtgtcatgggaacggcagatgacattaaatcattaaagttgagaatagtaaattgcctctgggttggtttggaatcatcctgagatggaacatcctgatgtctagatccatcgggtttcctaagagcaactgcaacaaaatggtgctcatctattttgctttcctcaaatgcccattctttttcttcctctccatccaggaataaacgtgtttctttataaacttggcctatatccaagtttaatggagatagatcaaattcaagccgctgcaattcaaatcctagtccaacaccaatggcttttatgaagctttccttaagtgcccaattcctataaaacatatccagctgagtccactcatccttaaagcttctgattgtttcccattctttgttggtaaactttcttttcataatatgaaagaattctggaattgaaccacgacctggaaaactagtcttcattatatcaattccaacttgcagctcaggttcagcagcaagcactgcatagtctccttgatgagagatgttaaagttgaaattcgggtaaggattcgatgagtcctttgcaagaactggttttccttttgcagttctttgcaaacgaatatgattccaagggatattcaatttctctgcaactaatttccttatcatcagacgaccagccatggctgccttagcgtcccgggcaaagacgaactggccaatgcgctccttctcctcgggctgaatcgatcgcactgccagcagccattcggctcggctcggcagccaagtg

SEQ ID NO: 310136 - DNA, 978 bp, Homo Sapiens
ggtgctgccgtcccctcctctgagacactgaaggggaaagagcctggtgcctggagcagggcagagaaggggaagttgctggctgccctcctcacttccttcctgccccttagacagggagggacaaggtcgtcacagctggggcggggcagctggggagggggagtggggacagggcagcagtctgtctcagagcaccccactgccctctgccattcccaggagggggttccagagaggacagaccctaacacggtcatcatgcctttctctgcaccaggggcagggttccaccgtttcacacaggttgcttactagaagaacactaccaactttggaagccaggactgttaccaagcccatttccagatgaggaaacagctgtccagagaggtcaaggcacttgccccaaatcacacagtagttagcactggtggcagaattcaaacccagatctgtctggctgcaaaaatagctattgtctaggagggatttcctgcctcttccagggatgccctggaattcactcctttcatcctcacctcaatcctttgagagaggtactattatgatccccattttacagatgaagaaactgaggcacagagaggggggattattcgtgcaaggtcacacagctagtcaatgaaggtgcaaggatgttaactgaggctgactggtgctagaagcctccctggagctggtgttctctcccacttcctcaccctgagccgcagggaaaagcttgttcttcctaagctacgaagaggcgtgcagggctccagacaaggacagaagaataaccaggaagcaaacccatcaactgtgcgccaggccctgggctaggcttctcttctaggtgggtcaataactcttcacagcaatcttgtgagacccgaacctcactttcaggggctcaagaccaatccccatactcacacaaaatcagggttggttttccccctggatcttgaaaaa

SEQ ID NO: 310137 - DNA, 1000 bp, Homo Sapiens
aagcttcaggagccaattagatcaactggaagaaagggtatcagggatggaagatcacatgaatgaaattaagtgagaacagaagttcagagaaaaagaataaaaagaaatgaacaaagcctccaagaaatatggggctaggtgaaaaaaaccaaatctacgtatgactggtgtacctgaaagtgacggggagaatggaaccaagttggaaaaaactctgcaggatattatccaggagaacttccccaatccagaaaggcaggccaacattcaaattaaggaaatacagagaatgccacaaagatactcctcgagaagagcaactccaagaaacataattgtcagatgcaccaaagttgaaatgaaggaaaaaatgttaagggcagccagacagaaaggtcgggttaccgacaaagggaacccctagaagactaacaactgatctctccgcagaaactctaccagccagaagagagtgggggccaatattcaacattcttaaaggaaagaattttcaacccagaatttcatatccagccaaactaagcttcataagtgaaggagaaataaaatactttacagacaagcaaatgctgagagattttgtcaccaccaggcctgccctacaagagctcctgaaggaagcactaaacatggaaaggaacaactggtaccagccgctgcaaaaacatgccaaactgtaaagaccatcaaggctaaaaagaaactgcatcaactaacgagcaaaataaccagctaacatcataatgacaggatcaaattcacacataacaatattaaccttaaatgtaaatgggctaaatgctccaagtaaaagacacagactggccaattggataaagagttaagacccatcagtgtgctgtattcaggaaacccatctcacatgcagagacacgcacaggctcaaaataaagggatggaggaaaatctataaagcaaatcaacaaataaaacaaataaataaagcaaataaata

SEQ ID NO: 310138 - DNA, 1000 bp, Homo Sapiens
gagctacacacatgaacagcatttatttttcatgcactcaacacatgttcaagcctacggactctctgctgggccctgagcggggccctgggaacagaggtgtgagaaacctctaagctggtcgaggccagggccagtatcgtcccccagcacagagcctggtggccgctgtcacctagtgagtgtttgctgaatacacagaaggtcatgtggggtgagcaggttgggcagggcagctggaataaggggtgctgtggctgagaccaagaggggcttgtccccacctggaagcacctcagtcgccgggttcctggtcctccttgctgatggctgcagactctgggaacagggaacccccttctgcctcagagaacttgcctagggagtggagacggccaccagccccctgaacagtggcctcaactcctccctgtcctgagcccctgggcttctggcagcttggtgcctgctgcctgaggtcaggctgaacggcctgggaccacgtgtctatgtccaagcgcccagagggcccagccctgccccgtgatcaggttaaggcctggcagggctggggaagggaagggacatgcagcaggaggtcatggggcccaggagtctaggagggactcccagaccagcatactggccccacaggccccgagctgggagccctgaggtcagagccccacagaggagcccgaagcacagtccagctcagcagggccgcttgctgtccagaatggccttccagtcgtccgcccacgagtgcagcctgcggcgggggggctgcagctgcaggtgctggttgtggcaggcggtgaagaggacatgctcccagctgggggttggctcggcccctgtgggtgggaaagcggcattcagctcagcagtggagacctggagcgcagccgcctagggtggaaacctgggtatccaggcaggcatctggccttgccaaaacttgtttcctctgtaaaggggtgactgcacgcacacccgc

SEQ ID NO: 310139 - DNA, 302 bp, Homo Sapiens
  misc_feature (14)..(14): n is a, c, g, or t
  misc_feature (61)..(65): n is a, c, g, or t
  misc_feature (73)..(73): n is a, c, g, or t
  misc_feature (139)..(139): n is a, c, g, or t
  misc_feature (151)..(151): n is a, c, g, or t
aacatggaatattnttcagccttaaaaaggaaggaaattctgacacatgctacaacatggnnnnnatgaagcntgaggacattatgctaagtgaaataagccagtcacaaaaggacaaatactgtatgattccacttanatgaggtacctngagtagtcaaattcatagagacagaaagtagaatggtggttgccaggggctggggagaggggggagtggggagttagtgtttaatgggtacagagtttcagtttgggaagatgaaaaagttctggagatggatggtggtgatggctgcaca

SEQ ID NO: 310140 - DNA, 1000 bp, Homo Sapiens
cttagctttcttcttggcttgggcatgcactggctgcctgatggggcaggtttttaatctcctctgaacaactctgcaatccttgttcatagtgacccccactgtaatcaaaggcatcccatatggcaaagtcccaagccttggtctgagaggttggcagttgacatcaaggattgagagacaacctgagggtggaagggttggagacagggccattatgggggtgtgggattttccatcacaccaaaaaaattgagtggcatgtcatgttcaaagggtctgcagttgattcccatggctgctggaagacatggatccaaacatgctcaagccatctcttgttcccaggactgacccacgtcccaaattcaagaggaggaatgatattgtcaagggggtgggtataggtatcctgcagcccacgattgcatttgctccatattttctcaactatcatgtgttttttgagcacctactgcatacctgatttgaagatgagccagttctatgtggatgagaacagctggggaatattgcatggccaagggagattgttgctggcctctgagcattgctgtgcctccagagcattgctggacatcctttggaaataaatgatgtgcaagatgtaatttctaccgtccagggatgccagccatgttggagactcaaggcaaggtggcagtccccggggagtctaaataacagcacaaagaagctagtagttaagttttgaccttcacaaggtaattaataaggagataagagcagatctcatctattgtctgagtgtattacttatgtgagcatcaggatggaaccttccagtgtgtattggtgccaacagcattggacttggagtctgaaaactgggtttgaaccctgaatcatctacgtacttagtctatgaacttgttcaaagctcttcattagtacagtgcccataaaatgtatgagaacatgccttacaaactagaagcacagtgcatgaatatagtca

SEQ ID NO: 310141 - DNA, 312 bp, Homo Sapiens
tttgccaatcttaaaatgtggaactgaactcctgttgcaaaataaatcacagaaagagtttagattaaaataataatccataggacttacttttgggaaagggctgacagaagattacacaccctctcctcacatagcaaatgtagtatttataatccctcttacctgatgtacaaatacatcttctttggtgtcatttctgttgaaagacaaaaagctcacaattaaaggtagtacgtatgtggaaaaacttaaaagaacctatgtgttatgaatttaactcccaagtcctcaaaacacaacatatatttt

SEQ ID NO: 310142 - DNA, 1000 bp, Homo Sapiens
gagctcccacttccaaaaattaagtatcaggattatttgttcaatctctgcagatttattgttgagtaaacttatctttaaataatacagaacaattaaagctaaccaagtgcaacagataaataagcctgccagttatacacataactttataccaaccataattcagccagtcaaaattccaaaaacaatccaaataacttccaacatactagcggtcaaactaccgaattaaacttgatgcagaccagtattcccaagttgcaatagtctccaatgactttgctgaaatgcataaaatggacaagcctaggtatctgcgcaaccagcaggttttttttttttttgtaccaaggctagagaatgcctggtaaaagcttgaccagaaaactctcaaaagtaactgttactgccctactattcttaagatacttaaaatttgaataaagaacctactggctatgtaacattctaaggtctaccagatgctaccaaaaaatattagctacatggagtgttgctaaatatagctgagatttacaaaaccactttagtctcattgacatttctgattgacatctttaattactttgcaccagcctggcaaaatagaagaatgttgtggttgggaactgcaaaacctagcttgaagattaacaacaggtctttgctcagaataagacaatccatttgaatagatgaagagtatctgggctggaaaattttgcaaagctggtttacatgaaggtgttttgtcccaatttcagacaattcctcaaacatgcattttttggtataaaactggttaactaatgtagaaagcaaagaaacaagaccattgagagtagaactccccatatcttggggagtcctaattaacactatgccacctagtagcctgaaagctgcaattagtataaagatcatccagaaatcagtttctatttctcatacatttaatcagtttcgtttagttcctgtcatgctcatttagacacat

SEQ ID NO: 310143 - DNA, 1000 bp, Homo Sapiens
tttttttgcttgctcaagttacacagttaagtgagggcccagtttatataacttcagagtactaacgtacagctctgaagttgactgtaaactgaattcagccatgcaatagggctgccttaaatgcaaatgggattttaggctcaattaatagaagcatgatatctctaatgaaggaggtgagagtcctgcttgccctgtcctggatagagcttgactgattgtctaattctgggtcttgtgctgtcagtagggacaggtttcatctggagcagatcagggaacagggtgagcgaaccggaaaccctggtctcaggaagagctggaggaaagggggtgcacaatttgtagaagacttgaggggcccaggatcactgtcttcaaatctctaaagagccatcaggaaagagggggacagacctgttctggctgacccaaaaggaggcagagctaataccagcaggtacaaggcataagaagagagagattttagtgcatccttaggacaattcttttacgcagccaaaccctccagcagcaggtcttgcagccttggcaggtagtgagtgcggtgttgctggatgtgtgcaagtactgattgtgtgacccctggtggaggggaggaaaggggttgaaacatcaaatggggatttgaccagatgaccttgaactccccctgaggctgacattctgtgccctttgtttacaggtagtgctcatagctctctttgtccagtgcttcggccttggtcccagcgccttcccacggagcagcactcttcaccctgcacagccttgttaggtaggtagagcaatacagacacctgtcgtcctcttaaaccccgccctggctgcccagggaagcctggaggggacttcagtggtggaagcagccgctgtagccacagtggattcagtgggagtccctgaggtcttcctaataaggctcagagtgcgtctctgctcctttcctgtccttgagagggaggtcaggcgagag

SEQ ID NO: 310144 - DNA, 1000 bp, Homo Sapiens
aagcttcccagacttccgcttcaattcctgtccgccccccacgcccacctcaacgtggagcgcagtggtctccgaggagcgccggagctgccccgcctgcccagcggggtcagcacttcgcatcaaggcccaagaaaagcaagtcctccagcgttctgagcacccgggcctgagggaaggtcctaacagcccccgggagccagtctccaacgcctcccgcagcagcccgccgctcccaggtgcccgcgtgcgccgctgccgccgcaatcccgcacgcgtcccgcgcccgccccactttgcctatccccgggactaagacggggtaagcctccacccgggcaggagagggctcaccagaggtaggagggtccagatgcccagcatggttgttgagcaatcctccgaagtgaaagagcttccccaactccgtactgagcgggtccaccaacccgcgggagaagaggcagctccgcctgggcagccagggctggcctcagggtgtgttccgtgccagtgcccgcccctgaggctccagccaagtcactcgtaaaccgcttccctcactccccagaagcgtctttgaacacctgtgtgtcactcttgcgcgagatcagagacgagctcacgaaaagccccggtggtcaggaggatgggaaggaagcctcgctggggaacgcccgggttggggagggctccattgattcagcaacttggcctgcgcgcgggtagggagggggagaagtcagggtgaggaaggagtcagggttcgttgcacaaatgggcattcctgtcccggggcgttcctgcagtggctggcatgctcacttcaggtgaggacctcgagagccggcctcctgccctttctaaaggcttctgctgtagttcaacctgggaagttggggaggtcttgaaggagaatggagctcagagcgcagaggtcctgcctgggtacaggagccttggctaattgctggagtcactcagagaaagacttgcgggg

SEQ ID NO: 310145 - DNA, 285 bp, Homo Sapiens
aaaggcccaggtctgccttccttcccctcagccaccgggaaccacaacttacaggacccaccttccacgcaggagcagaccccacggagggccccagagctgctgcggccgttcttcctgtcatggtgggtataccgcagcttcctggccatggtgccgtctgagagccgcacctcgatgttgggcagatcgcgccagtctgaccctggggccaaggggatgtgccgcatgcgggcagccaccaatgcactcatgtcctgaaagagtgtggggggacgtgtccat

SEQ ID NO: 310146 - DNA, 1000 bp, Homo Sapiens
gaattcaccctctagccactggcatataccgttcttaccatttccttcccacactcacagagataaacctgcactattctatccatagccctgtgtcatggttaatggctgatcttcagctaagatgaagtaactgcattcttttagcgaaccagagacattgagcaaattcagtggtggacatcatatatttattctcaatggcaactactaacatccagatcacaacttaagttcacggccttttgctgagataatctgcttaaaattcacgaatctcacttttttaaccaacttggtaattacatgtaatgtcacctaaacatattttttttttccctaggaactcaaagcattccccaagtggaatgttccagccatttaacaaacaaatgtgacgtaatgggtatttattaaacacttattacatccaagcactatgctttatacacagtatgtcatttaacccttacaaccaccatatgaaatatatattagtaattattattctccctgatgagaaaactgaggtttcataggttaagaaactttccctaggacacaaggctagtatgtgactgatccagccttaaaacccagtattgtccgattccaaggcgtggcacaaaaactctctgcaatgttgccctccctgataacattcagagtagaggggagattaaggcatacggggaacgtgggggcctcatcctcttttgctcctgccagcatttttttgttttgaggaagtccggtaagtatgaacataaaggatagcctgaaacaaaagctccgagagcatgaacgtgagggataatgggtttggtgcttggcaggtacaagtgtcatagggaggatgtggccacagcactcagccgctagggcaatgattctcgaccacgggagatttggtaacatctaaggacatttttggttgtcacaactgagggggtgttaccagcatccagtgggtaaggaccagggacactgctaaacatcc

SEQ ID NO: 310147 - DNA, 1000 bp, Homo Sapiens
ggatccaacctggactttatttttttatagtatttctaaaaatagagtctcattaatgtccaatggctactaagttttgtcctctcaaaattaaaatagcacttgccattatccagtaggaactacagtcagcattttggttaatatcctcccagtcatcttttgatattctagatgtgtatctagttatgcataagtacatatataaagtgttatataaacaggctcatcctgtatatcctattttaaaactgctttaccactaaacaattacttcctaaaatcttaatacctgttatttcttgtaaactttgatttactccggagaaatcggtctgaaacaattagcatctcacctctttactatcaggcatatcaaaggttattacattaacaaaaaaatacatcaagttgacctgacttcatttatgtaagaggtagaaaatctgagtaaagtttttttttcattaattaaatcctattttaatgtaaatcctcttataattcctcgtttcactaaagtaatcttggaatcactaaagttttgtggaagcaccacctatctgggggaaaaactgcctttaaacacctgcaaattgggttgatagtatctggttaagaggtggtatcagtcatgtaagagtaagattgtgaccgtttagtcatatttaataacccacttacataacccttgttatttaattcagatacgatgttcagcttgtatttcttgataataacccccctcctccaaaccaacacagatgtacacacccaatcagcgtgcatgactgctgactggcactctttccaatgactgtttattgagtgtcaggaacacaactgtgattatacaaaatgaagtggacaaacggtcttgcacaaatgacgtacatttcacagttaatcgtgaaggttagaaaggttaacaagttctattagtacttttcataagcagtttgatttctgaaaaatacagtaacataattttagtaactac

SEQ ID NO: 310148 - DNA, 1000 bp, Homo Sapiens
ctgagaatgtggcagtggcctttacatgtatttattttaaataattagcttaggtctgagctataatgactaatctccacgagtctatgcctgacggtgataaaaagttgacatacatggaaggtgttagaggaaagaaccagaaacaattacagtaagtggaaccgtgcacaaaagctgctctgcatcccgggttcatgcttttaagcagcctttttgctgaaagcctcacgaagtagttttgtttgggttgagtgttatgtttaaaatttcccttctaccagttattgagaaaataataatgccgagctcatctaataaacaaatgtctagttcgataagctttaatcaggccctcacaccctgggatggtcgttaatgacatggatcagaatccctgaggtggctggaatctaaccagtgggtagcacagaaagctcaccttgcctatggaggctgtgggtatttttaggaaggtcatgcattatgggatgggaatttttataaacaaattgctacataaaaactaatgcactgttgcagcacttgtggaggtttcctttgctttgagacaccactgtttataggctgcagactgtaaagggaagtactgggaaatggcaaaggtcacatgggccagtgccatgttttaaggtcaaaggcactgttattttaagtgacctatctcattattaaaatcagtcactttcaccatcttcaaaatattttgtttttttaaaaagacaagggccttgtggctccaactattttgttggatgtaccaacataaataaatcagttttaattgatgcttctgcatgatttcttttgtaaaatgaaaggagaaaatgagctgggccagttaaaatggtatctgggctttttgcccccttagcaaaatccttctatacaaagtcagcgtcatttatagagtgccagtcctaaaaccaggtggcagagaaataagtgatgattcaagttaccttgcaagaagtgcaga

SEQ ID NO: 310149 - DNA, 256 bp, Homo Sapiens
tcgatgcaaatgatcatgatacagttgttggagctattttctctcaaaccagatatacaacaggaatgcttctcaccataaatgccaatgattttctggggagatctcacctttttcctgttcctgcagctccctcaagactggacagcctatagctatgacagtgggaatttttgctccaagttcttctgtgaaatccttgcctcatacttgccagaagctacatacaaaaaagaataaagtttaaagggagttm

SEQ ID NO: 310150 - DNA, 812 bp, Homo Sapiens
tgaagcatcagtcctatgcgggcgggcatggaggcggggagaaagaggaaaatgataatctaaaactgttctaaattcctattctttttctttctctctttttgttaaatgacattctgttcatcatcatggcaagatactttgagagtttcctgagcttccctgttggaagtttttactgtttgaacttgaggtcttttctactggtggaaaaatacttttcagaaaacagaagtcttgctggacagaaagcccacctaccttctgttcacacttaccagaatggtagtcactactatggtccgattctctgaggatgcactgtcattgctgatttgctgatctgagaaaggcacaaacctttcatactcgttccagtagccagcctagaaagagaagacatttgacctggatgcctatttttccctcagaaaagtactgcatgaaattgaagtgctgttgtggaacaaaactttcttgagctctataaggattgacatcctgtctccccgggtcttgtaattcccaccaggacccccaacactgacacataggtgtgctattccttcatcctggaggttcccatctcccactcatccttactgatattttgtaaaataataatacttattttctaacatccaaatgctgtcctctttcaagagtccttttctttaaatgtctgttttggttacttacttttcgagagccactgactttcatttcatacacatcgatggtataatttgtcctacgtccataagtgtcaaattgaatatttccagtcattccttgtacttgcacctggtaga

SEQ ID NO: 310151 - DNA, 1000 bp, Homo Sapiens
tcattcatttttaatattcttgtttaattgacaacattgaaatggtattttgatatcttggcctcagtgaaatgagtcattgggattaacttcacttattttacttttaaaactttaactaccagaacagttaaatgttattcatgtggctcacaatgctactcacatacatttgtattggacagtactgctctaagaatttttgtttttttctccttttgtgtcacagaccataacttaattctaattctgcctttagaagagcactgctcactgacaagagcacacaatcattgtttacagataattaaatagtagcaaagagacaatgctaaaatcaaaccaaaggaaaaaaaaaacacacgaaggaacaacaacaaaaggttaacacacagaaacgtaaggctgattagtttactagaccttaaccgtacccctagatcttaacactttctgttccatacacgttgtagccttctctgtatgtagcgtaattctgagtgttggtggcaggagcaggcttaaagttttgggtgttctttgtgagtttcatgcgtttggactctgcccgagatttgtaacagaattctatcaaagccaccatcatggccagacccagacctccgacaagtatatagaacacgcctgccacattgctcaggcttagagcactggtcttgtcctaagaaaaatgaacaaggcgattagttcttgaggaaaacaaaggcagtagggcatcataacacatcacaacagtataggacagttctaagttgtaaaataactaaacattgtgtaagtgttagcactcagctctggcaactggctgatgtttcacaatgaccagcaagatgatagattatgtttctgttgacagttttgcttctcattccttatgcctcttagtatccccaaatgtttaacacagtgttcaaccactaaataagacatcatgtgttcaggggaacaaaagagcaaacacaagcataatgtatctctc

SEQ ID NO: 310152 - DNA, 1000 bp, Homo Sapiens
ggatcatgagcagaaatctgaggcttgaataaagggctgagagggcaggagctctttggggtgtccagagcagacgcccatcccaaggacttccatggagtggggggaaggctgggtaggtttgagttttatcgtcaatataataaattaatcagaagctttcacaaaacaaacaccgcggctccgctgaagataaaatggggctgggaaaaaccaaacaccaagtagaaaccagctgaccagtgtgaggtgttgtagtccagtctcccgggcccagcagttcagtggccacgtagagattcaagggcctcttgttggctgttctccaggtttccaagaaccggtcagtaaagctggtttttcaattggtgcaggacgccaatcacaatctcccgcagggtctggcgagggcagcagaggaagaaatagacaatgcccaagtcaacgcagagtagtttccaagatgcctgcctagatcagccatgtactttagaaaagtgctttaaaaatagccccccgggggccaggtgtggtggctcacgcctataatcccagcacttcgggaggccaaggcgggtggatcacctgaatttcaagaccagcctggccaacatagtgaaaccccgtctctactaaaaatacaaaaattaggtgtggtggcacatgcctgtaatcccagctacacaggaggctgaggtatgagaatcgcctgaacccaggaggtggaagttgcagtgagctgacatcacaccactgcactccagccttggtgacagagtgagactccgtctcaaaaaaaaaaaaaaaaagcccccaggaagtactgatgtctgcagtttaatttgaggtgctcctgaagcaagatggagagatggaaatatagtaaaatgtttcggtaaaatttagggagcgggtatacgagtgttcactgtgaactcctctcaacatcgcaatatgtttaatgtgtttcacaataaaaatgttgggaaacgaggccagg

SEQ ID NO: 310153 - DNA, 162 bp, Homo Sapiens
ccgccatcgctcaagcaccaagtttagatattctcctgcactgactcttgagtccagcctctccatccctccctgtggcactgcctcaggaattgtgcatccacttgcatatgaatggtgcacagtctcctaaatcatactcttgaccctaatctttccctt

SEQ ID NO: 310154 - DNA, 1000 bp, Homo Sapiens
gatcaggtagcgcttggagttgagctgggccgacctgggggccaaggagcctgggcggccccccatcttgcggttccgcagggactccaggtctgtgtaggtcagcaggtccagggtgactgactcactactctgtcaggagaggagaggaggagctgccacagcacccgccactgccacacggagggcacctagcacacacctgggccacagcccttcccgttctctaggcgggctaggctttcctacgcgaaggctggcaatcaacatggccctgtcctagggcagacacaaggacttcatcgaaggaagaaaccagaaagaacctaaatgctcaaccagagagaacagcttagacctgtgactctctgagtgctgtctccagatccctggggggtccacgagaccctttcagggatctccactgaggtcaaagctactttcataataatacaaagacgtcatttgtctttttcactgtgttgacatgtgcgcgaatggtacaaaagcaatggtgggaaaaactgctggtgccttaggagaaatcaagcccctggcaccgaatggtactggaggttattgtatctccccagtctcagtggggggctggggaagagaaataaacaaacaagtaaataagcaaatcaaccataaaacacaggaaatgaaacatcggaatgttcttgatgaagcagtaaaaattattaattttattgaattcagcccctagagcacacatctctttattatgttgagcaagaaaatgggaagtacacatcaagtacttctgtgcacgccaaagtatgacgatggtctcgggaaaaagcacttctgtatctgagttttgagctaaattagccacttttcatagaacactatttttacttgaaaaaaaaaaacgactgacagacaaaactatggttatttagactcgggctatctggcagaaattttctcaaaaacgaacaaagtgagcctgtcacttcaagaaaaacagcta

SEQ ID NO: 310155 - DNA, 1000 bp, Homo Sapiens
  misc_feature (152)..(152): n is a, c, g, or t
  misc_feature (154)..(154): n is a, c, g, or t
  misc_feature (369)..(369): n is a, c, g, or t
caaattgaatgtaacttaaaattgttaggcaaagtgaaagaatcatgtttcaaaaggccacatgttatatgatgccatttatatgaaatgtccagaatgcgcaagttcacagagacagacaacagaatatttatttctatgagttggggaananaggcatggggagtgattgttaatgagtatagaatttcttttggggtgttataaatgttctaaaattagacagtggaggtgtctacacaactctgtgaatacactaaaaccaatgaattgtactttaaatatgcagattttatggtattaaattatatcttttaaaaattattatatatgttctaaaaagactaataacaaaattaaaagaaaccncagactatgaggaaatgtccacgtatcatatatttgataaattaaggacttgtaagccagagattattaagaactcatttaactcaataaaatgagaagacaagacagacaacccaaattaaaaatgagcaaatgatttgtatacatttcaccaaacaaagtcaaacaaatggccaataagcacataaaaaaagctcaacctaattagatattatggaaatgcaaattaaaaccaccatgagatgccactttgtacctacaaaaatggctataatcataaagacacaatcctggatgttggtgaggatttgaagacactagttttaaacattcctggtgggaatataaaatgtcacgttgggaaaacagtttgactgtttcttacaaagctaactattgatttttcatatggcccagcaatttctagcctagggaatctccccaacagaaaatgaaaaacatatgtgaacacaaagatctttatttacatgttcagagcaacattattcctaacagcccaagaagtgggaacaatccaaatgtccctcaactggtgaacctagaaataaaataggtcttttccatgcaatggaatagtattcggcaataaaaaaatcctaagtatcaatac

SEQ ID NO: 310156 - DNA, 1000 bp, Homo Sapiens
cttatctgggcatggtggtgggtgcctgtaatcccagctacttgggaggctgaggtagaagtatcacttgaacctgggagacagaggctgcagtaagccgagattgcatcactgcactccaacctgggcaacagagcaagactccgtctcaaaaacaaaacaaaacaaaaaaaaaaaacacccagcacccagcacccagcacctagaaagtccaggagcacatgggatgcctgcagggtctgtaattgaagatcggcacataatacaagaaagtatcctaagcaaagtcccaggcccttcataactgctcttagaatatgcggagtgttagcgtgttctgattaacaaaagtctaacatctattcttactggaataaaagagtgatcataacagcaattctgacccctcccctaaggttaaggaacaatgttgactgcttctgacataacatggtgtatttatcctgggtaggataatttgatgcttgccttcccacagaaaaagaaacgcttaaagtttttgggtttttttaagaaaaaagcagcaagtaggccaggcacggtggctcacgcctgtaatcccagcactttgggaggctgaggcaggtggatcatctgaggtcaggagttcaagaccagccaggccaacatggtgaaaccccctctctactaaaaatacaaaaattagccaggtgtgatggcacatacctgtaatcccaactacttgggaagctgaggcaggagaatcacttgaaccctcggaagtggggattgcagtgagccgagatcatgccattgcactctagcctggtctacagagtgagactccatctcaaaagaaatgccaggcaaacccagcctatttttaaaatgtatttgataaaaaaaaaaaggcaggcttgataaggcacttcacaaaagaggatacctcaaaggccaaaaacacttgaaaaagtactctttcccattagtgatcagggaaatgcaaattaaatgagat

SEQ ID NO: 310157 - DNA, 1000 bp, Homo Sapiens
gtcttaccaaagtcccctgaccctggtataatcaaacatacctttgaggaaaaagcaaatggaaacaacaggggatattcagatacatttattcaacaataaggccagtcaggcctcgcggtgacctgatgggatttcaaaaccttggttctcagcaaggcccagatttttgaatgaggatagaagtctggcgtttcctgcagtagagattaaaaaaaatatatcagcttaaacttcactgatgaaaagtgactatgggagaaaaacagggggaaaaataacagcttcatttaaagttggagaggtttgagatttataatcttttctctgtctttcattcatttatacattcacttagtcattaattcatcaaatatttattgattactgttgaatcactaaggatacaacagaaaggaaaaatatctgtccttacagtttttacagatctcgtggggtgttacagtgaacccctgaaattaaactcaaaactattgttgcatcttttgctcctgatgcctctgccttcgccaccaggtttccatctcagctgatgcctgagctattgttggaccttctaattgattgacctttcatcttagagctctggggattcgtatctgtgaggtctcacaaaagtaaatcacatatttattccacatgattcctgccagttctaaacatcctcccctccagataaaacctctctgttcgccccacactaccattaccaaactagttttctcttccctaaactaaatatctctaaattttataattgttccctagaagactgtttccaggtctttaatttttctaaccattttttctttgaatgtacgggcttacaaaaattcttctacttctctattactgaaggacatctgacttccatatacttttttttcttttttttttcttttctttttttcttttttttctttttttaagacagagtctcactctgttgcccaggctggagtgcagtggtgtgaccttg

SEQ ID NO: 310158 - DNA, 1000 bp, Homo Sapiens
gggggaaaaagtggattttcaagtttttgaatttagtacgtctaagatctggcctggttttcccaaactctcatgaactgaattaaagttaatgataattgataataacaattcttgtaaacaggtccaaatcagcacaatacctaatacataagaaagtaacatgcaaactgtttctgttaaattttgaaatgtgtcaaactttttctgaaactgttcatcatagaattacaaatttggcattaaacagaaatagttcatttcatgagatattatgaaatattttttttccaagaaatattaaaagataaagtaatttactggagatcttgaagttgacactacctcctttggaatcaactatttattgtattagaaaataagaccaatatattctgcagagagctacttataactctctccagatctcaaacacaaatgcatccagtagccactcaggtaattaacgggagaaacaaggaacatgatactccaattacagacattcaaaatgtaaaagccccatgtagagcaaacaagaacacttctgtgggcagcgttcagtcccgtgacttgccattttccagtatgcgtgctagcatggtttttctaattaactctcccgtgacgtgccaaagtgcatatttttatttttagtttgctcgtgtggtttattttggggcttttgggaaattgtagcttggattttacttacagcaacaaaacacagtgatacaccagacttgtaaactcctttaggcatatgaagccaaatgaattttcaatgatttggaaaaatgagctataggtatctgagatttgcatagctctgttgtttttttctaacaggtcttgtcatgaagcaatacgaaagatgtccagtttgtattcttttgcctacgctatacacttatttccaagaaattacagtgagaatttttgtggagtacctgtcttcacctcacttgttattgcttgttatgcataagtttataatgct

SEQ ID NO: 310159 - DNA, 1000 bp, Homo Sapiens
gatctgcccacctcagcctcccaaagtgctgggattacaggctcgagccaccatacctggcctgttttctcttaaacacttattaatcgtttgctgtgtgccgggaactgttctgtgtgctttacaaatggcaattcattgaacctcccaacaaccctgtgaggcaggggttagagctacccattttgcagatgaggagactgaggccttgagagtttaaatggcttgttgaagttcacacagtgcaaattgcagagccaaatctgaatccatggcatcggcgactatacggtgctgcctctgggcctccatcctcatctggaaaatggggcccatagtaacagtgtcatatcgtttggatgtttgtcccctccaaatctcatgttgaaatgtgatccccaatgatggatgtgggcctagtgggaggtttttgggtcatggggcaatccctcatgaggctttggcgccatctttgcggtaatgaaggcattcacgctctgttcattcatgcaaaagctggttgtttaaaagaacctggcaggccgggtgcagtgacttatgcctgtaatcccagcactttgggaggctggagcaggagaatcacttgagcccaggagttcgagaccagcctgagcaacatggtgaaaccctgtctctacaaaaattaggcaggcatggtggcatacacatgtagtcccagctacttgggaggctgaggcaggaggatcacctgagcctgggaggcagaggttgcagtgagccaagcctgcaccactgcactccagcctgggtgacagagtgagaccctatctcaaaaaaataataataaataataaaaaaataaaggctgggcacagtggctcatgcctataatcccagcactttgggaggccaaggtgggcagatcacctgaggtgatcaagaccagcctggccaacatggtgaaaccccatctctactaaaaatacaaaaaagtagtttggcctggtggtgggcacct

SEQ ID NO: 310160 - DNA, 1000 bp, Homo Sapiens
ccaggacttccccaaagacctagctctgaagcccagaccctcatggctccctctagaaggggttgccttcttcagcctgcatgaagtggtaaatgaagaagaggacgatcacaaagaccaggaaaagcagcagctggccccagagcgggacctggcgatcctggcccagcccagccccaggagcacggttttcaggccggatggcacggcgggtgagccatgaagaggaagatgatgaggaggacataaaagaggtggaggaggaagtaggataataggacaggtccagggagctcctggaggctgaaacagggcggtagtgcgtgatgctctggtaggcactgtcccggccgtacatggggcgttccctgaggcaaaagaggggagcaagtgggccaggagcctggacccagaaccagcccgtccctgggctcccccactacgcacctatccttgcactcctcttcagaagaagacaaaagatcgtcatcatgcacctgcagaagagagtcagggcgaggggactggctggcagggccaccatggcctgtcatgtccctcagtccaaacttccccagccagtcccctctgacctttggttagaggccaggaacccacaccctcctgaatggctctggtgttcagccctttatccatgggccttgccacttgtgctcatgccccagcatccccttttgcccccaggactctcaggaagagtctgagcctagatcccagaccaggtgctctagtcacacagagtctccccggaggcccaagagccaccatttgtacccagtgcccccctggatttatccaaacacagccgcgatcccctaggttgtacccaagtacaggacgcctgccagccagctcacctggtgatggaaagcgtcagcatctgggaatgaagtcactgactggcggacagccctggacgggccggcagactcgggctccccataagtcctggtggtgaagtagctctcttcatagtagt

SEQ ID NO: 310161 - DNA, 1000 bp, Homo Sapiens
gggccccctcgaggcaagaattcggcacgagaaaaagacaaaagcaagtatttatgaaagtccatcagattcctcagtaaagctgaagtcacacactagagacaggtggtctgaaggataattgaaggaaggtaacctgttgggtccaatctgttcttcagtgagcagatcgagagctgaccttacatttagagcatgtttagaataccagatgtaatccagggtgtgcctgcactcccctgaggtccggatcttccaggtagtgtatgggggttctgactgcccatcagcactcagcagcttgtaggcgctgttcaggttgaggctggaggaagcaaagtgtttgtagacctcttctgttggctctgcattgaagtccccacacacaataaggggaatcttggctccttgggtgatgttttgcaggttctgaaggaggtcacagccttgagctgatcgaaaccgctcccagccagtgcgtgcttttagatgggtaacagcgatgcagaactgtcggcctgactccttgcactccagggtctgtgcaatggtcacctggttggttttcaatgtcatggctgtcagcctaatattggcactgttgactagcttgaatcggttttgaagaaaaaataaggcacaaccatctggtccattgttgtgttctacatctagacaaggtgaccagggtttggggaaaaacgtgccttgatagcctagtctactgaggagtggctggaaggtgtcaaaatagtggtccacctcttggaggcacaatatatcaggctggtaggccaggatttcttccaggatgagacatttcctttcttcccatttgagtgcttcaacagggcactgtacaaagttgtctttgccttctccaagagctgaaaagaaaaagctagtcagttgtcagctcttacaaaaccgtgacttcaaagtacccaggaggtttagcatcactcaagaccctcagaatgcttcctctgctttaaatgct

SEQ ID NO: 310162 - DNA, 1000 bp, Homo Sapiens
ttttttttttttttttatttatttatttttttttattgatcattcttgggtgtttctcgcagagggggatttggcagggtcacaggacaatagtggagggaaggtcagcagataaacacgtgaacaaaggtctctggttttcctaggcagaggaccctgcggccttccgcagtgtttgtgtccctgggtacttgcgattagggagtggtgatgactcttaaggagcatgctgccttcaagcatctgtttaacaaagcacaacttgcaccgcccttaatccattcaaccctgagtggatacagcacatgtttcagagagcacagggttgggggtaaggtcacagatcaacaggatcccaaggcagaagaatttttcttagtacagaacaaaatgaaaagtctcccatgtctacctctttctacacagacacggcaaccatccgatttctcaatcttttccccacctttccccgctttctattccacaaaaccgccattgtcatcatggcccgttctcaatgagctgttggttacacctcccagacagggtggtggccgggcagaggggctcctcacttcccagtaggggcggccgggcagaggcgcccctcacctcccggacggggcggctggccaggcggggggctgaccccataagcgctaacttaagggttgaaccatctgaagaatgcgacgcctcggtgcctcgttaagacgatgcctcgcgttcttcaattgcgttttgtaggctgtcagggatactgtcccacgaatggccacctgtaagctccagatgaccatttttgttattctccacaacgagttagttcttcttttcggatccggcacttctgggggggaaatccagcgatggctggattatgtcgtcaattaaaaatgcggcgagtagattagcaaatatccacgctttcgcgagttcaggttcctttgcacgcaaagcatccaggtgcagcaaacttttgagccgcttaaaagccagt

SEQ ID NO: 310163 - DNA, 1000 bp, Homo Sapiens
gggagatttgtagaaagctcatagatgctaaaaacatgggtctttaggaaaattagaattcagctgagcctcctttcatttggacaatgttcagaagctcttacagggggctatggcaatcttttgatgcttcttatagctttctgaggttaacgcttttgtggtgggcatcggtagcaataaaatgcaaactttattgcatttccagtaaaatctctcccactttgagcaggaagcactcacaaaaaacgcatatacatgtcaacgttgtgagctcatcagagttttagaaatcaacttccacagtgaaagccaatgtaggcagaaggtttataacagaatccccaggcagagaagtgaatttcagagcatttcagggaggaaactcctctgcacatgtcagcatgtttaacatcgatgatggcaggttgtgtgctggcagccagagtctgaggccactgtccaaagttcagcgtcagtggttcctgttgctggtcatggagagagacaactggaaagtcaggtgtcttcacgctctaactagagcacagggatggaccatagccatgctaacctttgttaacccctaggacttgtcaaggtgtttaagcagtaggaatgaggaaacaacgttctgattcaagtaaatgtaactagaagtaaaaatttaaaaacttgtaagctcactaaagtgaagctctgcagacacggttcatatcctggtggctgagggcacataaccaagaacttacacaagcacccccaagccacaaagatcccagctgctatggttgaggggtaacctgccagcactggagccaagtgttggagctactgatccaaagttagctcacttctgcagaggctctgaaccagagcaaagaaatggcccagtgcaagcccagtgtgagccaagagttggccatgtaatcagttctggcccaaccaggtttgaaaggtagaggagcagtactgggttttggagagggaaggttggaac

SEQ ID NO: 310164 - DNA, 1000 bp, Homo Sapiens
ctgtatgccaacgatttttgtttgttttgtttcagagaaggagttatgctctgttgccaaggctggagtgcagtcattattcacaggtgcagtcatggctcactgcagcctgaactctgggctcaagcagtcctctcgcttaagcctcccaggtagcaggtgcacaccacatgtctgctttccaaggagttttaggtcaaccctcacaacaagcctgtgaagcagcgattgttattcccacttctctggtagcacaccaaggtgcaaggattccctgtggctaggtggttagtaaggtagaatggggtgaggtttgaacccagtcctgacaatcatcagagctacgcaaggctgccaagaagtagaaaaagatagtggcattttgggtccccattatcaattcgaaaaatgtacagtcttaagcttggaagtcggtcgtctggttcaaccctgccttttgcagaagcaggagctggaaccctaaaaaaataaagctacttgcctgcaattaaacagggtgagagggggcagatgaagtgtaggcatgtggggctggatctggccctgccctgacacatagaaagcctgaaatagaagtgagaaaggaaaattccaagaaagaaaaggcagagaagtggctgttcttactcccacacctaaggtgtgaattcttttattgagtcataataatttcccgagaattccgagtcctgctactttaggttcttgcccaggaatccacctcttttcccccaagcccaacaatcctttgaggtactcatgattgagcgcgtggtgggggggggtggggaagaggctgcatgggggtggggctcctgtggcttcacgtcatccactgtcacctctggtccccaagtctctggatcctttggtctcacctctagacaaccgtatctttcaaaccttcttccctggcaactcctctctgtcccgacaaaatctctcccaaggcattgtccttgtagttagatttacacag

SEQ ID NO: 310165 - DNA, 1000 bp, Homo Sapiens
aagcttaaaaagaggccgggcatggtggctcacgcctataatcccagcacttttggaggccgaggcgggcggatcatgaggtcaggagatcaagaccatcctggctaacacggtgaaactccgtctctactaaaaaatacaaaaaactagcagggtatggtgagaggcgcctgtagtcccagctactagggaggctgaggcaggagaatggcgtgaacccaggcggcggagcttgcagtgaggcgagatcgcaccactgcactccagcctgggccacaggcgagactccatctcaaaaaaaaaaaaaaaaaaagcttaaaaagaaataaccattttgattatatatttatcatctgtaagcaatgtgaggatggtaaccatttatgtattgttcaccataaatccaagaaactcactaaaaggagcttttaaaaaaaaaaaagctattgaggccgggcgcggtgtctgacgcctgtaatcccaacactttcagaggccgaggcgggtggatcacctgaggtcaggagtttgagagcagcctgaccaatacggtgaaaccccgtctctactaaaaatacaaaaattagccaagcatggtggcgggtgtctgtagtcccagctactcgggaggccgagacaggagaactgcttgaacccgggaggcggagattgcagtgagccgagatcatgccactgcactccagcctgggcgacagaccaaggctccgtcacacacacacacaaaaaagctattgaataatcatgaaaaagaaaaatatctattcatttctgactcccagcccagcagctgcatttcctcagatagcagcacattcaccaggcttattagtctaagctaataagtttccaaaccccttagaatatagtttccatggcctcagaacacgataaagagtagcacaccttcagacctcagcaccctgatccagagtgataactggggatgtttcctggcctggaaggtgggaagcctatgtct

SEQ ID NO: 310166 - DNA, 1000 bp, Homo Sapiens
ctgtttaaatgcataatttaatgttaaaagatttggagcacaggatttttaatctcaagattaatcgaaatattgtgtgtcaaaacgacagtatctcaacagaaatcctttttctcccacaattgaaagacaaataaatggaagccctgtcattcctggaccagcttaattctgtagcctattttattttattttattttattttattttattttattttattttattttattttattttgagacagagtctcactctatcgcccaggctggagtacaatggcgtgatctcggctcactgcagcctctgcctcccaggttcaagcgattatcctgcctcagcctcccaagtagctgagaatataggcgcctgccaccacatccagctaatttttttttttttttttttttttagtagagatggagtttcaccatgttggccaggctggtctcgaactcccgacctcaggtgatccacccacctcagccttccaaagtgctagtattacaggcatgagccaccgacacctggccgattctgtagacatttttttttttttttttttgaaaaaaagaactgggaatggcagtgtactgagcagtacatgagagccacagatctgacgcccttccccagacggagtaaaagggccccacgaaagctgatccatgtaagacatatgggctactatggagggcgactccaattgggtgctcctataggtctgtcttctctggctccagtcaactcctgggaacctcagcttaagattccacttgtgtagttaggaaagtagcttataacttgcttaagtgcctgtccttccttttccccatctttttaagtgtctttgattttattttttatttggacagagtctcattctgttatccaggctggagtgcagtggcacaatcacagctcattgcagcctcaaactcccggggtcaagcaaccctcccacctcagcctcccaagtagctgggaccacaggtgtgtg

SEQ ID NO: 310167 - DNA, 720 bp, Homo Sapiens
ctcagttttacgttctcagccttttctttccaagatgatgacagtatatgcttgaggatccccaagaacaagttgtggaaagaggcaagcagacagcccctcctcctctccaagatatggcccaggcctggtggttgatagcagctctgccctctcctcctatcctggccctgggctcccctgcctgggccagataagaggtttatcagttgcaggcagcagaggcacagaaggaatgggctctggagacactggacctctgtcctgtgtcctcacagggtcatttgggccataccttaacccatacaatcagaagtctttcctcttctgaggtaatataaccttagtaaagacttagtaagcacttgttaagaactgtgctggtattgcaagcttagtttataagacttggtttcatcgggcgcggtggctcaggcctgtaatcccagcactttgggaggccaaggcaggtggatcacctgaggtcaggagttcgagaccagcctggccaacatggaaaccccgtctctactaaaaatacaaaaattagctgggcgtggtggggtggcacatgtctgtagtcccagctactcgggaagctgaggcaggagaatcacttgaacccaggaggtggaggctgcagagagccgagatcgcgccactgcactccagcctggctacagagttagactatgtctcaaaaaaaaaaaaagctgtttt

SEQ ID NO: 310168 - DNA, 1000 bp, Homo Sapiens
ttttctccattgaatggtccttacacccttgtgagaaattagttgattacagatgtatgggataacttctggactctcaagtttattccatcatactgattttttattttaacttcatataaatcacttttatattattttatttggtattttatcttcacagcttccaaaattatttatcatttatttaactgattgaaagtgagccagaagcaaatttgctgtcataaaagtttactaaaaatcaagagaaatggcttcgtagcaccattactgcaatgttacaattacatacgttgttattagaatcatttctaaagttataaatttatgaagctttgagactccatttcaatatatcagaaaaggaaatcatgttaataaaaaatcattagacgcaaaataatataaaatataaatgaatacatgaagtaacaatttttaactcttttacaaacttatgtacaataagattaaaataagacagttgtgcattcaagttttcctgtggatctgctcatcttcattgcaagggttgctaggtaataacggcacagggatatggttattctgaatatttttctcactgtcaaagacagttgttagggacaaatagacaccaaaagagacaaatagggatcccttattggctccttacattttgttggataaagcacaatttccttgcaatgcttccccatccttctctcccaaatattgttctctttctctctctctctcttttttttttttttttctgagacagagtcttgctcttgtcgcccaggctggagtgcaacggcacgatctcagcttactgcaacctccacctcctgggttcaagcgattctcctgcctcagcctcccaagtagctgggattacaggtgcctgctaccacgcctggctaatttttgcattttgagtacagacggggttttgccatgttggccaggctggtctcaaactcctgaccacaggtgatccgcccggctcggcctc

SEQ ID NO: 310169 - DNA, 1000 bp, Homo Sapiens
  misc_feature (517)..(517): n is a, c, g, or t
  misc_feature (548)..(548): n is a, c, g, or t
  misc_feature (569)..(569): n is a, c, g, or t
  misc_feature (576)..(576): n is a, c, g, or t
atgtggtatgctttgtcaaacttttccaaaaaattttaagccctgctttagagagaaattctcatgttacacatatatatttacatattttttcttcaaagactaatgacaatgtatgatgttaataggcctgtaatggaaccatgatactactaataatatgaaataaaaagccactcatttatataaagtgttcctgaatggtgcaataagaaatgggatcacagatttatgtacatatatgaatcactaagagttcagaaattaagctcactttaagaaaactcagccaggcacagtggctcacgcctgtaatcccagtactttgggaggccaaggcgggtggatcacgacgtcaggagtccaagaccagcttgacatggtgaaaccctgtctctactaaaaatacaaaaattagccgagcgtggtgacacacgcctgtaatcccagctactcaggaggcaaggcaggagaattgcttgaaccagggaggcggaggttgcagtgagcccagatngcgctattgcactccagcctggacaagagancgagactccgactccaaaaanaaaaaanaagaaagaaaactcattctatttttcctcttttggagccggaggtttgcaaaaatgtgattcctaacaaaaacgtttgtgtttaaaagctccaaaaacccaagcattagcctaaattggctataactgcaacttaaatcaaaaactatatccaactagatcttcgttgtggctatgcaactttttgctttgtggcctgaaggtttttactgaggtaacaacctcttatctcttgtccttccctcaaccacaaaagcaaaaataaacaacaacaaaaaacacctctacagcttccttcttcatggctgtctttggcaatgcttccaaatcttgaaagcaaaagaacctgctgaagtatatgaggaggatgaaaacactaaacatgacatatgaaaaccaatctaagcgtatgaattgagaaagaa

SEQ ID NO: 310170 - DNA, 1131 bp, Homo Sapiens
agattctttccattttttattaattgaagcacagagaaaagaggcaaaatgattaaagaaatttatgttttttagacagggtgttggctttacaccaacgaaaaagaaaaacagatgaataagcttttgatcttcattttctttctcttattctcatggtaggctgagatgcttttaaatgtgatgttataagcctaaggcagcttgacttgcagcaacaagttttttaccctcctcggcaaagcaggtctccttatcgtcagccttgcagcacttctctacaaaagctgcgaaatcatccataacagctttcagttgctcttttgttgccttgggcttgtgtttcacaagctcaacaagtgcagtttgtttcttgatttgtctctccttctcagaaagtgtgcatatatctgcatggaaggtgaatgtttcagcattaaactctttgggaacgtatgtttcatcgacttccagagctgaaaagcatggtcgcctgttcaccaaggattctgtgcagcatttggtgactctgtcacttactggcgttttctcatgcaacacacataactggttcaggaccacggatagatagtcttctgcacagggcattctttttgcttcaggatgtttacaacatttgctgcccacttttcctaggtttcttgagacctctacaagagttggagttgacacttggggtactttcttggtgtaacgaactaatagcgcattctggaatttgtactctccaagctgctcaaaaagctcacaattttgtttgattaaattctgaggctcttccacaagaggtttaaattcatcgaacactttggcatagcattcatgaggatctgcagcggcacagcacttctctagagtggtttcatatgtcttggcaagtctcagcagcagcacgacagagtaatcaggatgccttcttgcatattcatacaaaaacatgcccaggaagacatcctttgcctcagcatagtttttgcaaacatccttactttcaacaaaatcagcagctaatgaaggcaagtcagcaggcatctcatcattttccacttcggcaatgcagtgggatttttccaacagaggtttttcacagcattccttcagtttacccaa

SEQ ID NO: 310171 - DNA, 1163 bp, Homo Sapiens
gcggcaataaattcagtagctttatttttaaatttcaattaggttccttggatgaacaagaaacaagtgtgacattttatgtggaatctgaaaaccaccttagcatggctttacatcggatgcatcagttttccaaaaagccagagaactgtgttccttgaagcatttggggacttcgatagtgccatctatacactgagcatcctctgtatagctacacttcttttccttatttttgcagaagaaagaaactttatcaccatgtagcattccattcttaaatttttcctgaatctttactctctctccttggtacaccacagtggcttttttcacaggtactttacaagatgctttacaacttggcatggcagaccagtttcccagtttggtacattctatttcttccgggccatccagagaatatccatcatggcagccaaatgtggctttatccttgtaataaagtgttggttttgcaggatagttcacaaatccattgtctggtcttgatgggaatgggcattttacttccctgcattctggtaatttagtccaatttccatgtgtcgtgcaggtaattgtatcatttccaaacatcgcatgttgtggcaaacattcaaaaactgctgtgtcccgatagagggaattgtttccagctgatggcttataaacacgaagtgttgcaaacgtaggtatggatggtggagggcagatgatgggagcacagacaggaagctccgggctccattttccttcctcagtgcacttggcagaatcagcgccattcagataaaacccagtgttacaagaaaaactgatcgtgttgggatattcaaaagtcgtatagcgtacggctccattttctaagattccagcaaaaggacatactctgggtgtacatttcagagtgttgatgggccacagtcctgtgagagggcagataaactttctcatccctcctcgggacacatagcccggcttgcaggaatacgtaatctcttctcctggctcatagaatgtttttaacgggaccactgtggaaaatggtaaatcatctggcttgggacaggtccgtcctgcaatagcaacatggcagagaaaactcgagaacaagatgagcactggagaaatcattgtggatgagtcacactggcacccaa

SEQ ID NO: 310172 - DNA, 571 bp, Homo Sapiens
aaaatcaataataatttttattttttgttcagcacacatggcaacacagagctgtgaagacagacgtggttagcacaaaccacttgggccagtgaaaccagggcaaactcatggatcatctgcgttcccatcttcaccttggtggcagccctacctctgagattttaaggtctacggaaagtgcaggcttccaggagtgatgaggtggagcattttctcaggttaccaacagccttgacatattcttctcctaagtatttttcatatgtgtttctgtcatgaagtttggccaaacatactgtgtcatctctgaacagaaggtccttggtttccgaccggaacaaacaaaagttgcccgagcagtcagttacgttgcttccaaataggtgctgctgttgacgtaatatcttgtggacgcaagcttccttatctttccgtgtgaccacagcgtgattcggggctctggccaggtggcagttcgcatactcctccacaggtttcctggtaccatcaaggcacagcaactcatagtctttttcattcagattcttagcccatggatcagggccaa

SEQ ID NO: 310173 - DNA, 692 bp, Homo Sapiens
gcatcaaaaagctttatttccatttggtccaaggcttgttaggatagttaagaaagctgcctattggctggagggagaggcttaggcagaagccctattactttgcaaggggcccttcagaagtcgctgggctcagaaggctcttagtcgtgcttgagagtgagcctttcgaagagatactcgcccagcccagcctccgggccacccagcctgtggaggttggtcaggtggtcacccatcttcttgataagcttcacttcctcatctaggaagtgagtctccaggaagtcacagagatgggggtccgtgcgggcagaacccagggcatgaagatccaaaagggcctggttcagctttttctccagggccatggcagctttcatggcgtctggggttttaccccactcatcttcagctggcttcttgatgtcctggaagagagcgcggccgccacgctggttttgcatcttcaggagacgctcgtagccctcgcgcttctcctcggccaattcgcggaagaagtggctcacgccttccagagccacatcatcgcggtcgaaatagaagcccagagagaggtaggtgtaggaggcctgcaggtacaaattgaccaggctgttgacggctgcctccacgtcggtggaataattctgacgaatctgggagctcatggttggttggcaagaagccaa

SEQ ID NO: 310174 - DNA, 539 bp, Homo Sapiens
  misc_feature (395)..(415): n is a, c, g, or t
  misc_feature (469)..(494): n is a, c, g, or t
cttcattcaggtttctatttttattcaactacaagcaaacagcacaattaatgcaacattcagcaactccagaccagcttttcttacccccatgaagaacgatcaatttaaaaaacacagatctcaggtttccccaagctgtcagcgagcgctgctaccggtctagattgccatgtcccaacaacagcaaagccaccctccctcctgcttcttccaggattgctctttaaagggaccagagtgacatactgatgcctactgaggcatctgagatgcactgtgttggaggttagcctcaatgccagcctctggttgtctaggtgagtgacatcaccataaaatcacattgtgtaccattctggactcaggatcacaaaggcagaggcaaccaatcnnnnnnnnnnnnnnnnnnnnnaaacctcccttaaagattctttgatgctttgctctatcactgtagacctggtcnnnnnnnnnnnnnnnnnnnnnnnnnnacattctgggttgctattttcagattaataatttgatgaccccaa

SEQ ID NO: 310175 - DNA, 520 bp, Homo Sapiens
gcagcttcttgtccagctttattgggaggccagcatgcctggaggggggccaggcatgaggtggggtaggagagcactgagaatactgtcccttttaagcaacctacaggggaagccctggagattgcaggacccaaggagctggcaggatggataggcaggtggacttggggtattgaggtctcaggcagccacggctgaagttggtctgacctcagggtccaaatcccagaactcagagaacttgtccttaacggtgctccagtagtctttcagggaactgaagccatcggtcacccagcccctggcctgctgggccacctgggactcctgcacgctgctcagtgcatccttggcggtcttggtggcgtgcttcatgtagccctgcatgaagctgagaagggaggcatcctcggcctctgaagctcgggcagaggccaggagcgccaggagggcaacaacaaggagtacccggggctgcatggcacctctgttcctggagcagctgcctctaggccaa

SEQ ID NO: 310176 - DNA, 795 bp, Homo Sapiens
gaaggtttatagaatatttatttcttttttggttgcagctatctccttcccaacctaccactgctaagactgtttcataagatgcacttctctacactcagctaatgaggtgtttcaatcagcagttgttctttggatgaggagccgatattgttttaaagcctattattttcttgggtgggtattctggagcatggggagctgaaagtgttgcaaggaaactgctgtgtgaaatttgatcaggtccttggtattcatttttatgtttcaataactgatttattttttcccccttgtacttaagatttaacatgtgttgtatttccagcagttcaaatctaattgtgtcgaatttccaggattggaggaaaagttgctccctttcagccctcctactagaagcactggagctaggctggcgggcattggaccctagtaggtatagcaggctgtgaagagcgactgggtggaagcagccccagaagaacccgtgtgaacatactgtcctttggccgcctggcagttagccatggcccgcttcataaaagcctcctgggttgcctccttgtttgcagccttgccaccccaggcagccagtgcactggcctgcagggcccgtccataagagaaacttagtttccagggctttggtagagggcaaaggttgatagcattgaggttgagagtggcatcctcttcactcatgccaccagacaaaaagcagatgccaggaacagctgcaggaacagtacggtggagagctgttacggtggccccaacttttttgtacaaagt

SEQ ID NO: 310177 - DNA, 2781 bp, Homo Sapiens
  misc_feature (2406)..(2457): n is a, c, g, or t
  misc_feature (2460)..(2580): n is a, c, g, or t
tttgacaaagagacatagactcccgcacaataatagtgagagacattgacaccccattgacagtattagacagatcactgaggcagaaaattaacaaagatatttagtacgtgaactcagcactggatcaaatggagacgatagacctctacagaactctctaccccaaagcaacagaatatacattcttctcatgaccatatggcacatactctaaaatcaatcacataattggacacaaaacactctcagcaaatgcaaaataactgaaattataacaaccactctcttggaccacagcacaatcaaattagaaatcaagactaagaaatttgctaaaaaccatgcaattacatagaaattgaataagctgcttctgaattacttttgggtaaataatgaagtaaaggcagaaatcaagaagttctttgaaactaatgagaacaaagatacaccataccagaatctatgggacacagcaaaggtagtgttaaatgctcacatcgaaaagttaggaagatcacaagttaacaacctaacatcacaactaaaagaattagagaagcaagagcaaacacattcaaaagctagcagaaggcaagaaataactaaagtcagagcagaactcaaggaaatagagacacaaaaaacccttcaaaaaattagtgaatccaggagctggttttttgaaaggatcaacaaaattcatcgaccgctagcaagactaataaagaaaaaaagagagaagaatcaaatagatgcaataaaaaatgataaaggggatatcaccaccaatcccacagaaatacaaactaccatcagagaatactacaaacacctctacacaaataaactagaaaatctagaagaaatggataaattcctcgacacagactaaaccaggaagaagttgaatctctgaatagaccaataacaggagctgaaattgtggcaataatcaatagcttaccaaccaaaaagagtccaggaccagatggattcacagccaaattctaccagaggtacaaggaggaactggtaccattccttctgaaactattccaatcaatagaaaaagagagaatcctccctaactcattttatgaggccagcatcatcctgttaccaaagccgggcagagacataacaaaaaaagagaattttagaccaatatccttgatgaacattgatgcaaaaatcctcaataaaatactggcaaaccgagtccagcagcacatcaaaaagcttatccaccatgatcaagtgggcttcatccctgggatgcagggctggttcaatatacgcaaatcaataaatgtaatccagcatataaacagaactaaagacaaaaaccacatgattatctcagtagatgcagaaaaggcctttgacaaaattcaacaacccttcatgctaaaaactctcaataaattaggtattgatgggacgtatctcaaaataataagagctatctatgacaaacccacagccaatatcatactgaatgggcaaaaactggaagcattccctttgaaaactggcacaagacagggatgccctctctcaccactcctattcaacatagtgttggaagttctggcaaggacatcaggcaggagaaggaaataaagggtatttaattaggaaaagaggaagtcaaactatccctgtttgcagacgacatgattgtatatctagaaaaccccatcatctcagcccaaaatctcttaagctgataagcaacttcagcaaagtctcaggatacaaaatcaatgtgcaaaaatcacaagcattcttatacaccaataacagacaaacagagagccaaatcatgagtgaaatcccattctcaattgcttcaaagagaataaaatacctaggaatccaacttacaagggatgtgagggacctcttcaaggagaactacaaaccactgctcaatgaaataaaagaggatacaaacaaatggaagaaccttccatgatcatggataggatgaatcaatatcatgaaaatggtcatactgcccaaggtaatttataaattcaatgccatccccatcaagctaccaattactttcttcacagaattggaaaaaactactttaaagttcatatggaaacaaaaagagcccacattgccaagacaatcctaagccaaaagaacaaagctggaggcatcatgctacctgactccaaactatactacaaggctacagtaaccaaaacatcatggtactggtaccaaatcagagatatagaccaatggaacagaacagagccctcagaaataacgccacatatctacaactatctgatctttgacaaacctgagaaaaaccagcaatggggaaaggattccctatttaataaatggtgctgggaaaactggctagaaagctgaaannnnnnnnnnnnnnnnnnnnnnnnnnnnnnnnnnnnnnnnnnnnnnnnnnnntcnnnnnnnnnnnnnnnnnnnnnnnnnnnnnnnnnnnnnnnnnnnnnnnnnnnnnnnnnnnnnnnnnnnnnnnnnnnnnnnnnnnnnnnnnnnnnnnnnnnnnnnnnnnnnnnnnnnnnnnnnagaataatattctataggccctattatttcatggccccattattctcagcatcctctgccttacaagtgagggttaggtgtaaggagagctcttgccctctcgactgcactccctgaaatttaataactatgacatatagctgtgggtgacggatgggatgagaaatgctgatatccagctcttccagggaattaacaatg

SEQ ID NO: 310178 - DNA, 519 bp, Homo Sapiens
caagcaatagtatgtagtcaaagtatgttcaaaagtcaatttgaaataagagaacagtcaaaaattaatcagattaattattattttccccttaagtttgattatgtcattcattcatttgaaatatatttggattcacttgtttctcattgcattcggttttagagtcttgtaataacttatctttgcttgcttaatatcacactttgagagtgtaaaagattaacttaattaaaaatgtacaattatgcacaaaagcattcacagagcaatatcccattctcccatatttctttcaccaaattcccctctaattctttatagataatacatgttttcagattctggtacattttggctacatttgtttgtttcatgcttgtatttttggtgtattatctaagaatgcattgccaatccacagcaatgttttatttccatgttttcttctaagcatgtatggttttcactcgtatatttacattattgatccaatctagccaacttttttgtacaaag

SEQ ID NO: 310179 - DNA, 409 bp, Homo Sapiens
tagattctttccattttttattaattgaagcacagagaaaagaggcaaaatgattaaagaaatttatgttttttagacagggtgttggctttacaccaacgaaaaagaaaaacagatgaataagcttttgatcttcattttctttctcttattctcatggtaggctgagatgcttttaaatgtgatgttataagcctaaggcagcttgacttgcagcaacaagttttttaccctcctcggcaaagcaggtctccttatcgtcagccttgcagcacttctctacaaaagctgcgaaatcatccataacagctttcagttgctcttttgttgccttgggcttgtgtttcacgagctcaacaagtgcagtttgtttcttgtcttgatttgtcccaacttttttgtacaaagt

SEQ ID NO: 310180 - DNA, 168 bp, Homo Sapiens
tcaggcagccacggctgaagttggtctgacctcagggtccaaatcccagaactcagagaacttgtccttaacggtgctccagtagtctttcagggaactgaagccatcggtcacccagcccctggcctgctgggccacctgggactccccaacttttttgtacaaagt

SEQ ID NO: 310181 - DNA, 1229 bp, Homo Sapiens
gggtcaaaagaaagctctttattgattgactcagcaatgcagggctggcacccatcagcttcaaaccacatcttatcgcatccactcctgtccactcccgtccactttgccctcttccaggctgaaatcttgctttcaggcaagggcttccggccagccttgcattagttctcagctatggtcttctgaacccagtcctggatggaagtcaccttcacatacacaccatactcagccacagcacagctcttatcaaagcttaagatcccagtcgcataccaggtgtcctcctccaggtcgtgaacggcaaaggcactgcccgcatcgccatagcaggtgtcttcttggtacttagacatgccagcacagaaggtgtgttcattcagtatgggctgcacccctacagggctcttcggtgtcttcttttcggggactgtgctgccttcataatgccttatgcattggtcttggtcagccacaggcagcatgacatacttcagatggtcagtaaatttaaaattggcatttcgcccccagccagaaacataacccacacgccctacttctgcataatcctttgaaggtaggcagatgggcatcactctctcattaacagacaccttctgtttgagtttgatgagccccaatatctacctgggagtagttagggtgtagaacaaccttctcaatctctacaagctgctttttccccacatagagtgttaaagtaggggcaatgtctttcgctgttgcattttctgaatggttcaggaagagatttttagccgtggtcagcagccattgttcattgatcagcgtggcacctgtggtgagattatggtgggaaaccatcttagcctgccagggaaagctgcctttggcatccaggtgtccacccaggatccgctgcactgggtttgccggattcttgggcttcccacatactgcttcacattcaggaagtttatctccaacagccttatttatccactgcttctcattgtttaaggtgtacactccatctccttctgtgcgcagtttgtagtagttcttacactggtagcgaaccgagtgctccacatagccatgtgcaatctcggggggcttcgggcagccgtcatctgcgatatccgtgacatcattgcctgagtccactgcaaaaagctgtccccagagcaggagggcaatgacagctcccagggcactcatcttggttggtcttgccccaa

SEQ ID NO: 310182 - DNA, 1710 bp, Homo Sapiens
  misc_feature (134)..(156): n is a, c, g, or t
attattattatactttaagttttagggtacatgtgcacaatgtgcaggttagttacatatgtatacatgtgccatgttggtgtgctgcacccactaactcgtcatttagcattaggtatatctcctaaagctannnnnnnnnnnnnnnnnnnnnnnacaacagtccccagagtgtgatgtttcccttcctgtgtccatgtgttctcattgttcaattcccacctatgagtgagaatatgcggtgtttgggtttttgttcttgcgatagtttactgagaatgatgatttccaatttcatccatgtccctacaaaggacatgaactcatcattttttaggactgcatagtattccatggtgtatatgtgccacattttcttaatccagtctatcattgttggacgtttgggttgtttccaagtctttgctattgtgaatagtgccgcaataaacatacgtgtgcatgtgtctttatagcagcatgatttatagtcctttgggtatatactcagtaatgggatggctgagtcaaatgatatttctagttctggatccctgaggaatcgccacactgacttccacaatggttgaactagtttatagtcccaccaacagtgtaaaagtgttcctatttctccacatcctctccagcacctgtggtttcctgactttttaatgatcgccattctaattggcatgagatggtatctcattttggttttgatttgcatttctctgatgaccaatgatgatgagcattttttcatgtgtctgttggttgcataaatgtcttcttttgagaagtgtctgttcatatcctttgcccacttattgatggggttgtttgtttttttcttgtaaatttgtttgagttcattgtagattctggatattagccctttgtcagatgagtaggttgcaaaaattttctcccattttgtaggttgcctgttcactctgatggtagtttcttttgctgtgcagaagctctttagtttaattagatcccatttgtcaattttggcttttgttgccattgcttttggtgttttagacatgaagtccttgcccatgcctatgtcctgaatggtaatgcctaggttttcttctagggtttttatggttttaggtctaacgtttaagtcttcaatctatcttgaattgatttttgtgtaaggtgtaaggaaggtatccagtttcagctttctacatatggctagccagttttcccagcaccatttattaaacagggagccctttccccattgcttgtttttgtcaggtttgttaaatatcagatggttgtatatgtgcatcttatttctgaaatctcttttctgttccactggtctatgtgtctgttcttgtaccagtaccatgctgttttggttactgtagccttgtagtatagtttgaagtcaggtagtgtgatgccttcagccttatagaacttatattcttaaatactacttttaatattttgagaaattaatattttgagaaatactttgagataatattttgagaaattatcatcatggtactgaataaaatggtatatatgagcatgcactacaggctgcttggagtcaccagtatccagtgtctctgattatactttctcacccacaggcaggaatgtgtaaccagttcaaccaagaagttgtgagtggcagtgacgtgtgcattgaattctagcatgaaactttcc

SEQ ID NO: 310183 - DNA, 900 bp, Homo Sapiens
ggggcagccagaacgcaccacttctcttgggaagtgccctggctgagactctgcagcttgcagcaacccaaggagatcaatacacatccgatgacccaagcaaacagtgcctatgagtgggtgccatggagtcagtccttgccctggaatctccaggctcgggcgtgccccatggtggcctggacacaggtgcttcagccgcttgtcggttctccaaggggaactctgttgagtcacactagtcacgcaacagcgggaagccagcagcagggggaagtgagagggccacgctccagggtcagattaggacagcagggccagactcctataagcaggcaaaggacacgctggagccagcacagcagaggcccaacaaaaataatttcatttttcttaaaataatttgatcaacatttgtttgtcattgaaataatctttaacagaaaaaggaacaagtcatcagacttccttatattcattctgtggcttacagctgttgttgtttttaatggggacaaaaagggaggggggtgagtagaaggcaccgtaatctttttagtgcttagagtctttaaatgtcttaatccagacccgaacagggacacataatctgtgctcggtccctcaacattctcaagccactgattcaagataaagtcatactctggcggtggagctgatactgacaaggataatgaacgtggagaaggagcacatcgcagggcaaagaccactgacctgaccagacggtggggaatccagtctgcagaccggacctagctcaaacttctgtatcaggttacagacgatggcagagcctccttcactcattcattcgcacattcaatagtgaacttccacaacgtctgcagcccagcaaccactggcactcctggccaa

SEQ ID NO: 310184 - DNA, 533 bp, Homo Sapiens
ttcccaaagtcaacaccatctttctttaatgagcagagcgcttcggggaggccttcaatccctggaagggtggtttcttggtttgttccagcaagaggagcacctctttggtctaacttgattgccaccacgatccccttttcttaggggagggttatgaacagctttccctggttgtccttatggtagagggtctgggcgaaaaggatcacacccccgatgttcaggctgatggaactctccacagcgaagaggatttgtgagaaccgcgggcggttctgctcaatattttccacctttagcctaggcaggcggttccccatggtacctacagattcatctgcagccaggatcccctatgctttcatttaagggggaaggcgctttgtgaagtaggccttatttctcttgtcctttcgtacagggaggaatttgaagtagatagaaaccgacctggattactccggtctgaactcagatcacgtaggactttaatcgttgaacaaacgaacctttaagagcggctgcaccaa

SEQ ID NO: 310185 - DNA, 827 bp, Homo Sapiens
  misc_feature (171)..(369): n is a, c, g, or t
attgtatgtatatactacatttatccatcaatgaacccttcagttgcttctatctcttggctatgaacatgggtgtgcagatatctctctgagatcttactcctttccatttttttggatatacagtcatccctcagtatatgcagggattggccaggttccccatcctgnnnnnnnnnnnnnnnnnnnnnnnnnnnnnnnnnnnnnnnnnnnnnnnnnnnnnnnnnnnnnnnnnnnnnnnnnnnnnnnnnnnnnnnnnnnnnnnnnnnnnnnnnnnnnnnnnnnnnnnnnnnnnnnnnnnnnnnnnnnnnnnnnnnnnnnnnnnnnnnnnnnnnnnnnnnnnnnnnnnnnnnnnnnnnnnnnnnnnnntatacctagaagtggaattgctgaatcaatggtagttctatttctaattttttgaagaaccaccatactgttttctatttaaaaggtcgcaccatttaaaaatcccaccaacaaagtttccagtttccccacatccttgccaacacttatcatcttttttatagtagtcatcctaatgggtgtgaggtaatatttgattataattttgatttgcatttctctaatgatgttgaacatcttttcatatgcttcttgaccatttgtacatgctctttggagaaatgttcattgagatccgttgcctatttttaaattggattatttgggggttttctgagtgttgagtgttaggagttccttctatatttctagatagtaacccctcctcagatatatgacttgcaaatattttatcccattctacagttgccttttcaccctattaatgtgtcactttt

SEQ ID NO: 310186 - DNA, 901 bp, Homo Sapiens
taaatattgctggatgggatgaataataaattattacataaaaggtagcagatgatgtcactatcctaggccaatgattatttttctggtatcagtgatatttgcaaacatactctactcattacttcacatacattcacctccccaaaaagtatctaggaagtacttaataacaacattttgtaaaactacagtcagaattgggggaagattccttttaagatgtaaaaagccatagtcttaatggattattaacattagatttaattaatatatgtaaccacagtcataatattgtagtgttatgttatatactatgttattaatatataaaacaaagtatcacactatgacaatttttattttgtcatgttattagaaattatacattattatatacactcagtttttagttaaatcaaagtatttaaatgtttatcatttttaaatatatatataatggcatattgacaatgaataattctttgctttccattatttataattggatggtatttagtgaatatgttaaatgatgctcagtgcaattaaaaaggactttacaagtcagcatgcattgtcagggcatgtcttttgcctcatctactaggatagatacttccagcacaatttcattttttataacttgggatttacagttcattactgtggcccagcatagtgagaagggctccacattaaggaatgtgtcagcattttaaccaaaaaaagttcagaatatttcaaaatattttatattttaactttggaggaaatatacacttgatctttgagatatcttttaaattaaaaacaaattatctgtgaacgggccgcatgctccacagttgtcagcttccattgctagtgctgtgggggcctgccctccccattgacccaa

SEQ ID NO: 310187 - DNA, 874 bp, Homo Sapiens
ttttcaaatcactttaaacaaagctgaatgcagaaacgaaagcccaacagcagcaattaaattacatttggaataaaatcatttggctaattttcataaccacagatttcagagaataccaccacccatgccaggtgtaccagacaatcccattgtctgttttagccgtgtaggggccgctgtagtatacaccattcaggtttgcagagtgacacctgttaaaccaccagccagactgatcttcttctgcgcagttcccttcatagttgtcatgatctctgtcccacgtgctgaatttcattctttggtgactagcccaccactgcacctcaggatgaaaattccccgcaagggaatctccagctgttccagaatattccccaatattcaactcgtagaaattcttttcatctccaactttgaaattcttatattgtgcataacggctatttttttcaaaatctgcaaggtcgatttttaaagtgtagtcttcttgagtggtcaagaagtgaagatttttattgcccagccaatattcaccatgtttttggacaaaatttccaaagccattttcatagtctttccatcctctgttaaagttttcactgccatcagatcgtctctgaattacagtccatcctcctccatcggacatgtcacaataaacagaaaattctgctgggctctggagaggtttgattttgtaaaatccactgagcttatacccatcattgaaaatctctgaacaatctgcatactgcctcttgcttccaagatcaacgacagtattctcatctcctttatcaaggaactggacttcattctcctgcaaaagctgcttgatcttgacctgttgctgtttgacccgggccaa

SEQ ID NO: 310188 - DNA, 774 bp, Homo Sapiens
  misc_feature (217)..(297): n is a, c, g, or t
tacacatgaacgtagagagtggagtgatagacagtggagagttggaaggatgagctggttggagggaagtggacgatgggaaattagttaatggatacaatgtacattaattgggtgatggatactctaaaagccctgacttgaccactctgcattctatgcatgtaacaaaattgcacatatactgcacaaatttgtacaaataaaaaagtgtatnnnnnnnnnnnnnnnnnnnnnnnnnnnnnnnnnnnnnnnnnnnnnnnnnnnnnnnnnnnnnnnnnnnnnnnnnnnnnnnnnttcgaagaagtgttttataaatggcaattggatccagttaatttatgctgctgttcagttcaattatggccttactggttttctgacttgctgaatctgtcaattactgatagaggggtattgaaatctccaattatgttagtaaattactatattttttcttgcagttttatcagtttttgcttcacatattttgctgctttgttgttaagtacatacattatcatcatgtaatgctccatttagtcctgacagttttccttgatcttaatttggccttgtctgaaattaatatagcagctcagctttcgttctattagtgttagtatcatatatcggtaataataatcttgtcggtttcttccttaaaggataaagccgcactctgttgtccagattaaagtgctttggtgtaattttgaatcttttcttagaaaaaaaatcccccccgccccgaacgcctattttttaattatt

SEQ ID NO: 310189 - DNA, 1044 bp, Homo Sapiens
  misc_feature (347)..(656): n is a, c, g, or t
acgccgcgtggatccggcttactaaaagccagataacagtatgcgtatttgcgcgctgatttttgcggtataagaatatatactgatatgtatacccgaagtatgtcaaaaagaggtatgctatgaagcagcgtattacagtgacagttgacagcgacagctatcagttgctcaaggcatatatgatgtcaatatctccggtctggtaagcacaaccatgcagaatgaagcccgtcgtctgcgtgccgaacgctggaaagcggaaaatcaggaagggatggctgaggtcgcccggtttattgaaatgaacggctcttttgctgacgagaacaggggctggtgaaatnnnnnnnnnnnnnnnnnnnnnnnnnnnnnnnnnnnnnnnnnnnnnnnnnnnnnnnnnnnnnnnnnnnnnnnnnnnnnnnnnnnnnnnnnnnnnnnnnnnnnnnnnnnnnnnnnnnnnnnnnnnnnnnnnnnnnnnnnnnnnnnnnnnnnnnnnnnnnnnnnnnnnnnnnnnnnnnnnnnnnnnnnnnnnnnnnnnnnnnnnnnnnnnnnnnnnnnnnnnnnnnnnnnnnnnnnnnnnnnnnnnnnnnnnnnnnnnnnnnnnnnnnnnnnnnnnnnnnnnnnnnnnnnnnnnnnnnnnnnnnnnnnnnnnngctcccttatacacagccagtctgcaggtcgatacagtagaaattacagaaactttatcacgtttagtaagtatagaggctgaaaatccagatgaagccgaacgacttgtaagagaaaagtataagagttgtgaaattgttcttgatgcagatgattttcaggactatgacactagcgtatatgaataggtagatgtttttattttgtcacacaaaaaagaggctcgcacctcttttccttatttctttttatgatttaatacggcattgaggacaatagcgagtaggctggatacgacgattccgtttgagaagaacatttggaaggctgtcggtcgactaagttggcagcatcacccgaagaacatttggaaggctgtcggtcgac

SEQ ID NO: 310190 - DNA, 589 bp, Homo Sapiens
cacaggacacgggtgactatagtttaatgaatcagagtctggaatcttaagccccagaaactttcaggaaaggcaagcagattcactgacccccacgtgtatctttatgtgtaatgaaggttttatgggaactgagggaagatggggagagaagggcaaattaaactcctaagataaatagagctgaagactgagagctaatcagaagttctcagatgaaactagattcttgatattgctacaaaaggtttctttctgatctgccatcgcagtaaccgttgtggacgatcagcctgtactgcctggccaggcacagctcctcctgccgctgccttacaatcttctgcgcttctgggggcaggccgttggggtcccgggaaaacacgaaggagtagctgtcagcacaggtgccatcgaggttcaggaggcggcaggagtactgcacggcatacgtgtcgtagtctgtgtcgacgatccagtggtcatcatttcctttctggagaaaggaggctacgccccagtacttcatcttgaacttggcagggtcctcggtgtctgtgaaggtgcccaccatgtctgcgcacaccaa

SEQ ID NO: 310191 - DNA, 884 bp, Homo Sapiens
gtcgagtccattttaagtaaataaatttgtcactcaaattggaaacaacctgtaaacactttatactgtaaatctttaatgctataaacacttttgcagtgtcaaaggaaactggctaacccatgttctgctatttgcaggtccactccagccaaaggccattgctcttgaaatttcacctatcgcctcagacaagcaagcaaggaatgaatagctaggactgtgttgtgtgtttcctgtgaggccacatctcagtttaggttcttgagattaggatctagatgcaggtaatttatttgggagatgatcccaggaaacagggttgaggcaggggtacaatgagaggtgaggaggataagccaacaacagcaacaacaataaataaaggatgtgttactgacatggctaccactgtgggaactgggtttaattccacagtagaccctctaagaaaccctgctttcaaaagacaagatgctgggtcaagtatctactgtaacctctcccccattgtttaatggctgccccccagagtataaagtgccctacccttctggctgcttccgcatatgggctaacacagtttttgagctatggaggaagccctgagacaaaaaagcagaaagaagctgtgcaacatagttgatgtggctctcaatcatgtgcatagaatcctctgttacagctgcttagaaataagaggtgggttgaatggatatgatagtggccccaaaagcatctgccacagttagttccaaaggttcttcagataagggatgttaaggttgctcaaagaggaaagtacacggtggtaggagagaaaataagtagtaaaagaagaagcagatgctttccaagaaggtagaaaaaggaggaccagccaa

SEQ ID NO: 310192 - DNA, 219 bp, Homo Sapiens
aaataactgagagttaatgaggaggaaaatgaggatgtgaagcagagattttattcccctgtactcactctgctggatctcaggtggctgtagtgtgtatctacaaagcacagtctatcagactctggagtccagaaagctgctctctccaacttttgtacaaagtggcatatagaagcatgctcatcaattgtgcaacgaacagtcactatcagtcaa

SEQ ID NO: 310193 - DNA, 169 bp, Homo Sapiens
tagcaattagtaacagatctaagcaaaagcaaaaaatatgtctggatgacttaaaacacactgatacgctgactgctcagcatgaacacagaaccaaatgagggacatgaggtccaacttttgtacaaagtggcatatagaagcatgctcatcaattgtgcaacgaaca

SEQ ID NO: 310194 - DNA, 833 bp, Homo Sapiens
tttatcatcttatgttgatgacccaggttttcatacttagaaaacatcagcatgtaaatgacatttaaacaatgaaagggatgagattgcttcagagacatagtaaatacatcagagaatatggcccaggaaagattctggagacattccacaacgtaaagcatcttaaacatgctttagctataggtgaatggctctgaaacaacaatagcaataacaaaaactgtttttttgtgccttctctttactcttctcatttttccctcctagttccttctctaaatctataaaaataccttgtacttacgaccatattaggatacatatatagtctaaatacatgggaaataggtctattgaaactttctctgtatatagagctagccagagtgaatagaaacagcaaaaaatttgaaatgcttgggaaaatagtctttgtatgttgcatgaatcagaacaattctcctttctacttgcttcattaacttgaattaatgaggaagataagttaactgcatatttcatagttttaactcattagttagataaagtgtgtcactttttctatccctgtttgctagagttacatggcaacccaggagtagtatgaggatgattttggaactgcaggcactggtctagtcataggcgataatgtttcttatgcatattgcagcacgtgttcaattagtcagtttcacagccaaaaaagaaagtatagaatgggaaaagagaaagttgtgctctcctaggacccagagtgaagtggccaagagtaaaaacagtctagggaaactttgcaatttcccataagaaggatcaaatccacccaa

SEQ ID NO: 310195 - DNA, 394 bp, Homo Sapiens
gagtatcagagaatagagatgactgtactgcagactatagtatctattggtgtgaaatggtatttgtttgttagtcttttcaggaaaactttttatagagataaatgtggtggtaccaatatcgtatataggcttgctttaccaacaagtatgagtaaggaaatagatgaaacaaagtagacaaattcttaaaaattatcaaagccgggcaagagttgcatggggtgaaaagttcatgaattaattataatattctctctattttgtatattttttgaagattttcattgtaaaaaataaaacaaagcaacaattagaaaacactacagttaacatagcagtctcaattatgtttggtagtcaaccacaatgacgagaaaataatgatttccaa

SEQ ID NO: 310196 - DNA, 688 bp, Homo Sapiens
tacacactcaggtgctcacaatcatttttaaaagacagatttgtgtgtagttggtcttattttcccaggatatggcacatatgttggtgggctttggatcaagcctaacatctgagaagatggtaagatgaatttgatttacatttctagaaactgatttttttcccctcaactgataagttagctgacaaaggggaaggaaacaggtcaagtatagtttgataccaaattaccctcattatattaaaagaataaagtgatgacttgagctcatgtagatcaaagagagaatgtattgtgactgtattcttgttgtggacattgtttgaccacagcgtcgtgaggaaactggagctgacgtagctgattgacccacatgaatgtggaagtcgggttctccccaaaacatgctcagtcaggaccaggccacagaagtgaggctaacctgggcttctcacctgagaatagtaacatcgtagtaatgaaggctgatgaagcaatagaaacaggtgttcatcagatattttcctagagatctccggatctcagcccaccaaggcaatatgatcatgtcaaagtgattctgcctccccttcccacgatcatgatgcaacttttgtttgtttgcttcttatttactgaagtagttaaattttcaatttcctcaggaaattatgcaaaaccccaa

SEQ ID NO: 310197 - DNA, 394 bp, Homo Sapiens
ttggggagaaaagggctgaaaatgaaattctcagtcatgttcacagttgcagagttgatggaggaggaaatctagagatagaatctgagtaagcaagtcctagcaaatagattaggaatcatgacagtaaaattggacattaaaattattgtcccagttggataaagaaaatatcccagttggataaagaaaagaaatctgagggtggaaggatgaaggcttagggacataaagaacaatgccctccctccctggctttttacaaatacaacttgattgctctcttgtgggaacatacactggcattcaggtagactgtgagaaaattaaggagttgggatgctgtgacaacagcagcacccaggaagctggcattgagaaggaagacactgtg

SEQ ID NO: 310198 - DNA, 303 bp, Homo Sapiens
ttgggttcaatctcttctgacctttgaaagacacagcacagacagtggtccttaggacgaagagcaggagacccctaattccgtcaccatggcgatagggcataaacattgctgggtgagggcacaatccacattgtgaggtccaactgctgccaggaagacaggagtgcttttacatagaccgaaaggtcattgaaggctcagagttttgtttcaagaactgaatcccaagcccacacgttattaggctgcgcttcttaaaacgagttatgagatgggaaaaagggcacccacaaacatacg

SEQ ID NO: 310199 - DNA, 84 bp, Homo Sapiens
ttttggtacattggctgtatatatagatgtaaagggctgcataggctgtacactgcactactctgggggtgccatttacattgc

SEQ ID NO: 310200 - DNA, 990 bp, Homo Sapiens
gaaaattttcaacatagacaaaagtggagagaaaagtataatgaaactccatgtattcattacccaatctaaaaaaattataaacatatggccaatctagttttatttattatctcttcattccccactttcaacttcccagaactaattttaaacaatttctaaagatgatatgattctattcataaacactagttattattattatttaacatagggaatattcatatatataacaggtacaaagtctataatatttaagctcttttatgttcccatattaaatgtaaatatttgtttaaactcatggctttccttggttcatcaaatcaggtaataaattaaccaggcaggttcacattcaatcagatagtattctgaattgctcctggcatcttcaaaagatgaggattgttcggacgctgttaataacaataaaacattaataagtataattttcatgataaatttaaccaaagctcacaaataagttttgccttttcatttcaggatctggtcttcctttatagacattcactttattaagcctaatttcttttatcccgtcatcctcttccattcatggtgttaataatattttatgcatgtgctagtaaacttggggggaattgaggacccttactcaccttaggcagcgtccttgttactcagtggtgctgttgaggagaattagaatgtaccaaggagggagtcaggttttagtcttggaatagtcactgttctcggatctcctatagctgagggcaaagttgagcattgaaggagggagtgggcatcaaagttggtgtgttgggatgctactttttaagaacccagatgttcttatttctgggtaactccaacatgtagacacaaagagggggataagcctcaaggacagagcagtctttatctcaaacattactgctggaactgtggaacccctgctatgagcagggtgctatgcataaatgttttcttcacccccaa

SEQ ID NO: 310201 - DNA, 1020 bp, Homo Sapiens
  misc_feature (111)..(255): n is a, c, g, or t
  misc_feature (316)..(384): n is a, c, g, or t
  misc_feature (395)..(689): n is a, c, g, or t
  misc_feature (838)..(897): n is a, c, g, or t
ttggagcctgctgtgcccacacacacccactaaggagaaagaagttgattccttcattcacttcgccattcattcatacttccgtccatccattcagaaagcatttattannnnnnnnnnnnnnnnnnnnnnnnnnnnnnnnnnnnnnnnnnnnnnnnnnnnnnnnnnnnnnnnnnnnnnnnnnnnnnnnnnnnnnnnnnnnnnnnnnnnnnnnnnnnnnnnnnnnnnnnnnnnnnnnnnnnnnnnnnnnnnnnngagagagtgtgtgattagaagctaaataggaaagttttgagcttcaagtcagtgaggagtnnnnnnnnnnnnnnnnnnnnnnnnnnnnnnnnnnnnnnnnnnnnnnnnnnnnnnnnnnnnnnnnnnnnngagaataatannnnnnnnnnnnnnnnnnnnnnnnnnnnnnnnnnnnnnnnnnnnnnnnnnnnnnnnnnnnnnnnnnnnnnnnnnnnnnnnnnnnnnnnnnnnnnnnnnnnnnnnnnnnnnnnnnnnnnnnnnnnnnnnnnnnnnnnnnnnnnnnnnnnnnnnnnnnnnnnnnnnnnnnnnnnnnnnnnnnnnnnnnnnnnnnnnnnnnnnnnnnnnnnnnnnnnnnnnnnnnnnnnnnnnnnnnnnnnnnnnnnnnnnnnnnnnnnnnnnnnnnnnnnnnnnnnnnnnnnnnnnnnnnnnnnnnntaagagagaatagaagaagctactgcatgatgttagttaccaagcctgccatgggtcctctcttgctagacacactccatagatccccccactgagctgtggatgggcaaaccccggtggaatcccaccctccccaacaccccactgannnnnnnnnnnnnnnnnnnnnnnnnnnnnnnnnnnnnnnnnnnnnnnnnnnnnnnnnnnngtctgagcccccaggccttttccactttgagggaggtgcttcgaagaatgttgcccacacctaagtgttagaagcctatgtccgttcatccctgagaggtctgaaagaataaaaataaattct

SEQ ID NO: 310202 - DNA, 588 bp, Homo Sapiens
gtctcaggaagaaagaaatcttgcatcacaatctttcttgctggaataaactgaagtagtctcacctatcaggttttccagcttcaaatctcagatataactaatcattttttcccttctttgcttttctagcaaacttccagaaacaaaacagacaacattttgtgacgataaatatcacagttgccacacagaccagcaggaacccaatcacatccaaagagtggtactggaaccaggtgaggtcgtgggctgcaacccgaaggtgtttagctcctttgtggcgcatgacaaattcaatccagaagactgctcgatccaggggcttcactggttgatcatgttgaattcttgataatttcataacattctctttatatgaaggatcattaattactctcttcaatgcattcagcaagtctgtactcgacattgtgttgaagtccactctaacagctgctcccctggccttcatgtgagcaatgttatcaggttgatcggcaaacaatggaatccccaccatagggatcccatggtagattgcctcgtagatgccattggctccaccatgagttataaaagctccaa

SEQ ID NO: 310203 - DNA, 937 bp, Homo Sapiens
aataaggagcaatgaaaagaaactaagcaaaaggccagagaggttgtaaaatgctgactaattgttcttagaggaattatctgaagctcaacacgttcaacgaacatgtacaccagaacttaaagtatgtaaaaaaagtaaagtttaaacacatcaatcaggcattatagtatttccactagataatcaaaacctaaatttaaaaaatacacccatttctgtggcagattgtgcttccaggagaaatttataaataaatccatgggggtaggaacatgctggacctatttctaggttagtaaaatttgcattgtcttttccctctccctccatcatcaaattctactcattattccctacatctacacgccacctggaagaaacctccaattatttcagatgatttgccttccccattcttgcacctactgcagtagtttttgtctatcagtgttacaaggcttggcctatatttcttccaagacacaatcctggagaattgttattaaaataaaattataatatactgatatgctattcagcatattctagagagttatgttcttagcagatgttcagtaaatatctgttgtataaaggaaaaaattatctcagcctaggcatcaatgaatgacacttctatgtaacataaagagaaaatacccagtgttgctctaagtaatctcgagctaattttaagatttgtccagttgaaaaagttttataccatcaccttattcttccaggtacaagctacttaccttgtaagtgcatgagatttctcaaatttaagatctaatttagttgaaaatttttataaaaatagactttgtaaatcacttcctagcagatcttagcggtagtgggttatttcatatattatctatattcattagacaaccaagtaatacaatcatgatttctcagttttatccaa

SEQ ID NO: 310204 - DNA, 224 bp, Homo Sapiens
  misc_feature (115)..(130): n is a, c, g, or t
ttgggtggtgatggatcttctcccatccaatccaccgtaaatcaatatttctgtagaataaaaacaaactaggaaagtaaaatgccacctggatgtcacaacatcaaattgcctnnnnnnnnnnnnnnnntctaaagtcttactctcaatttctgtatttacttcaccataactggtaacaagcagttcacattctttggcccacacaagaataactatgttag

SEQ ID NO: 310205 - DNA, 987 bp, Homo Sapiens
  misc_feature (918)..(937): n is a, c, g, or t
ttttgatttacacaatttgttacataaaaatactaagacgatgacagataatacacagactttaattaaaattgtactaaaatcaaaagtctaaataaattacaagggtacgtggtacatctacatgtatgtttatatattttatttgtgcattttattcctagggttgctttttgctttagtttgtaaaacgttcttatttttataataatgtagtatatactaaataaagaaaaatcaggaaatagaaaatgaagaagaaaacattagctattgtcaaccaaataaaaattgtgcagtctctaagtacatgaacgatgtattatttgtacagcatgtacaatgtttatgcttcacagggtgaggtagagactgcaaaacattgaacctgggacaaagaagaaagtaaggaaattttcagaatatattaatattacagaaaatgttgaacttaacagttaagatacaagtagtgaaaaatgatagtatttaaggagatctagaaaggttaatctatatcagtaatgtgtgaaaagtattagaataatgcgtgtatttctggattggcatcgatttctattgagactggaaacataatggaagtgagcaaaaaagaatttaaatcgtggatacttgagttttatacctaggagttcgagaagtacattttgttactatcaaagcagttggcacaagagtgtacaaaattccctaattgtgtctatgacataggtgaagacatagacagagaatagcaaaacagaaatagcaaaaaagcacaaataaattttacctgtatttttacgtaaaagccaattagagtaggaaaacacgaaatttgtgttttatcaaaatttttctcttatagtatagttgattatattactggaaaaaaattgaagcattggtatgttcacnnnnnnnnnnnnnnnnnnnncccaactttcttgtacaaagttgtgcggccccaacttttttgtacaaagt

SEQ ID NO: 310206 - DNA, 811 bp, Homo Sapiens
  misc_feature (753)..(763): n is a, c, g, or t
tgtgtctggccaatcaacttagcccacaggcaaacaataaatatccatcccccaaggatgactgctatctggtggtctcagtccttccagaagcttctctgcaaactgtgctggaccaagagaagaaaacagccacaagctgccttcctcggggacttgataccagtgagcaggcaggcccttttcagttacagccttgtcctaagttgctgaaaatagcttttcttctagcgatcatatgacccaaaatgattccctatgaatatctacctcaagcaaactgactaaaaacaacaacactttttaacgtttacaggaaggtcacaagaaatgcctgctcagtactaagtaaatcctgttgtgtacgataaattgcttatgctttgctttcaagagtactttgtgaaatccctgtgtaaatatgtgatagaataaaaccactgtggagttaagagtgaactgaaaagcttttgacctgtgcaatctcaagtcagaagctgaatgtcttttggaagagatgagggcacggttagcaccaaaaccagggcagggaaggaggctacatgactcacgaagtcaagccatcagcagatttgctaccttttgctttgttacaggagagagcagtggaagacaacgttcccacagggatttctattcatttcagcaatttaatattcctcatgtttatccgttggtgcattctctagtttgcaagtttatgcttgagaatgtcttttaatatttttcctnnnnnnnnnnntcctactttattaaactcaaaaagaccaacttttttgtacaaagttgg

SEQ ID NO: 310207 - DNA, 659 bp, Homo Sapiens
cccaggctcacaccacctttctttatttgtaatgagtgggactcttcctccccatggtggtccaggccccagaagcggccctgcagttgcagggggaagccaagtgtacagggtgggcacagctccttccatcagaactacagctccacagaccagcaggaaatctccactcccgggggcccctcctggtaatccagcctgcgctctctggtggcagagtggtcattgccctgaaccctcagcgtgcgtctgccgtcatctgatgctgctggagatccccagagcacctcctggtaaaactggccaagggtccctccaacgtggctggagaagcggtcagtgtcacgcagaaggagccggagcccctccccacggccatcccagaacaacaggccgatggtcactttgtctgggtcactgagcagcaggagacccgtcttgtccatggtcatcttcaggccgggcatcactgagaatagcgtctccttccacttgtacgcagagcttcttcggttccgagtcaccaccacgtgttcaggggatgcgtgaacccataccagggggttcttgaaggtcacttcgatccatgagaacccagccttctccctctcatactggccagtcacccaaccccttgctcagggtctgagagcagccaa

SEQ ID NO: 310208 - DNA, 379 bp, Homo Sapiens
gtacaaaaaagttggaaccacagtcatcgtatacccctacatgaagcttgctccaggagaacttactatcatcctctaattttttaaaagaaatcttcatttattcttcttttccaattgaactttcacatagcacagaaaaaattcaaactgcctatattgataaaaccatacagtgagccagccttgcagtaggcagtagactataagcagaagcacatatgaactggacctgcaccaaagctggcaccagggctcggaaggtctctgaactcagaaggatggcattttttgcaagttaaagaaaatcaggatctgagttattttgctaaacttgggggaggaggaacaaataaatggagtctttattgtgtatcat

SEQ ID NO: 310209 - DNA, 665 bp, Homo Sapiens
ttctgttcctaacacaaatgtgaatttattggttgatttgatatttaaaatagtacttttacaaaatcatctcagaaaatatactacatttattaaaattcctacaaaccattgcagaaaatattaaaccctctaaccaacctaacactcgctttcagaggcacttgtgatgattttcacagcttccatagttgcaaagaacaaagaaatcatcttccaacaggggtggaattagataagaataatccaaaaaatatttatttctttacagactcacagattgcttgatgtttaggggctcttacctaggatacctaattattcaaggttttcctaatttagtagactttttcattgcctacaatctacaatattcagcaaagtattaaggaaaatgaacccaagaaccttaaccacctcaaatagttttatggatatactaaactgtcaagtacaatctttatcttaagacttgagaactggaatgcaggaaaacaaactttggtggaatactggaataaaagacataaagctgggcagaactaggtgtggcaaccttgtatgttaattctgaaagccagaccagtgacgctaagaataacaaatagattcagatttgtttttcagaaacttgagctatttcggccaggtgcactgtctcacac

SEQ ID NO: 310210 - DNA, 576 bp, Homo Sapiens
tttttctcatttaacttttttaatgggtctcaaaattctgtgacaaatttttggtcaagttgtttccattaaaaagtactgattttaaaaactaataacttaaaactgccacacgcaaaaaagaaaaccaaagtggtccacaaaacattctcctttccttctgaaggttttacgatgcattgttatcattaaccagtcttttactactaaacttaaatggccaattgaaacaaacagttctgagaccgttcttccaccactgattaagagtggggtggcaggtattagggataatattcatttagccttctgagctttctgggcagacttggtgaccttgccagctccagcagccttcttgtccactgctttgatgacacccaccgcaactgtctgtctcatatcacgaacagcaaagcgacccaaaggtggatagtctgagaagctctcaacacacatgggcttgccaggaaccatatcaacaatggcagcatcaccagacttcaagaatttagggccatcttccagctttttaccagaacggcgatcaatcccaacttttttgtacaaagttgg

SEQ ID NO: 310211 - DNA, 331 bp, Homo Sapiens
gggacaggagctctaggactggccagtgggtgttctagaggccagctggggttggaagacaatggtctggacacttcactgggtggcaggctgtgttccaagttccacgaaatagctcaagaagttaaccagttccgttccagccttcttgatcaggggtgtcagctgctcctttgacttttcaaagtaagacttggcctcggcctgaagctctgggctcttgaccttctccatcaggtccttgccatagtcagtcacggtctggaagtactgagaaaccaggctctccacacatggctcctttgcctgtctccgaaccaaagctcctgcc

SEQ ID NO: 310212 - DNA, 1142 bp, Homo Sapiens
  misc_feature (251)..(268): n is a, c, g, or t
tttctcataaaactttatttggaaaaagttatattcaatgacccaatggtatcaaagtggaagaggaaagtgacaactagagattgataactatatcctctgcaatcctcagaagaaagaaaggggccctttgggttgtttcaggtaaagtacatcaatgggactacaggaaagagaatttcacacacggtctttctgcatcagtaattttaatagagactcttagtggttatcaacaactggtcagttgnnnnnnnnnnnnnnnnnnccacactgctctctggattcgaacctagtgaattctgggctcagtcctcctcctccatctctttcttgatccagtccacgtagttgagcactttggtgtagaagccatagcccctgctgcacccgatgccccaggacacgatgcccgtggccacccagcgatcagtgttcgggtcccttactgcaaaaacgcccccactatccccctggcaggcgtcctgctttagagatgggtgtccagcacagaacatgttttgagagaacacatccatcctattctttccccggagccagttctcacaggcctgtggattagctacgggcagacggacaaacctgaggtcatgagcaatcttctcctccatgaccccgaagccactgacatagcccatcaagcccaggtcgtagaaggtatcgttgtcagggaggcagatggggaggaggttgggacccagggtgacactattttccagctccagcagggcgatgtccccctcaaaattgtaggactcatcctgacggtagtccgggtggacgctgaccctgcggatggggtgatttcctagcttcatgagctcttccacatttgtgtggcccaggaacacatccaaagaggcgttgctttgcgcttcgtgttccttgggatacagggtgtgggcagctgtgaggatccagcggtcgcccagcagggccccgcccccgcgcccgtggatgttggtgaacacctgccaggggaagttgcccatcttggctttttgccctccgatgatgcgctgcctctgttccacggggttcacgggcttcccacacactggcaagcaccgaggaatcttctctcccttctgttcattcttccaaatgccctgtgctgccaa

SEQ ID NO: 310213 - DNA, 992 bp, Homo Sapiens
attgcaacagagtctggtttaattaataaatctttttggaagttttctttgacagatcctacataaataaatatagttttaaaagtggacttttaaacatcagtttttcctttccgtcatggttttcctacgacaaggataaaagacccctcttccttatttgaaaattctcgcaatcaactagaactgaaattatgaacaccaactctgtcaaaactatacttttgttacttcttggtgagcaagagaaatgaagaaaacaaaagaaaatcatgtgctattttaatgtaatttatcctatacttttttcaaaaagtcacactcacgtctgcttgagagttttagaggaatataatgtatgaaagaaaattccaataacataatgtacaaaaatgttgtcacatacagaagagcaaaaatctacgtattggggactattgctgtgggaagaagggcctgatcttcatactcatcttcctcattgagtaccatgaccccttccaattcatccatactacaccatcatctgtgccatgctttgccatgtcccaggtgtactgtccaccccagtagtatctgccgtttggattggctgcatgacatctattataccaccatccaccaccgtcttctttagaacactgttttctgggatctgatgttaaccagccgtcattgtctctgtcatacgtgctgaagaacatgccgttgtgaatggtcatggtcctgttttctcccatcagctgagatgctccatccatgagggcattaccggctgttcctctgtatttgttcactgagatctggtatttgttggcttcattctgtacagtgaatcctccatagtgagcctttactttgtctcctttccagtcctccatttctatcaaaagttctgtgggtcccatcctggtaagctggctaattttatcatttccaagccaatattcaccttgtgtaaggccacagtaattccaacttttttgtacaaa

SEQ ID NO: 310214 - DNA, 863 bp, Homo Sapiens
ttgggcagagtttctggattaaactgaacatcagcctactccttcgcttttcaagtttaagatgagtcaggcactgtactaagttccttgaagatatcatctcatttagctaacatggtaaccccatgaggttggtactgtcactggctttactttgttcatataatgtaaacttaagaggtgaaatggctcattcaaggtcacatagcttgtaaataggtgaatgggaattagaacccagttcttcctgactccaaggtccatactatgttatgatggaaatagcaatgtggtaaatgtaatctttccacatgcaattacggtcttacagtttttcattttctgaaaattcaatatgagaaaacagcactaggtggcagctacaaaagcaaatgtgggctatacagtgaaattaggatcgaagatagaaaagaaaagtccaaggtactcagcaatggctggttcttagctgggaactatacttcagctttgagcctacactttagaggaatggtgtattagttttctactgctgttataacaaattattgcaagttttgtgccttaaaacaacacaaattttatatctcacagttctatggttcagaagtctgacacaggtctcactgggctaaaatcaagatgtcaggagaggtgcattcctttctgaagactccaggagagaatgtttccttccttttccattgtttgtaggccgcccagatttctaggcttgtgttctccttcccttatcttcaaagctagtgatgatgagtgaggcttctcatatcacatcacttcatcactccaatgatttgttttcaacagtatctctctttctctgacccatattatgctcccct

SEQ ID NO: 310215 - DNA, 1805 bp, Homo Sapiens
aacaaatccaaagtttaattattaaggattacaaatatttttagcagtgtagttaggcaatccaagcctggacttccacttcattcctactaaactacttgcagagctgaggaggcaggagactagagtacagagagcattttagttctatcacaaaggtctagaactgtctctacagtcacaggaagaaacaggtatggcaccgtggccagaagggggtaggtattcacagagagtgggtatcaaggtgtcaaactttgtcttctgatagttttccagagattcctgtagagaagggagcagggacttcctcatcagagtctaaaaccaagtcccctatggtaatgacggatctgcacagagacggaggacacactggcttcctggccctaggaggtaataatgaatagtctcagggggtccatgtagcaatccaagcaattctccttttgctctgtggcaggcaagtcaactgggttctccttcagagcccttccccccagggtctggcatggactcttagacttcccagtggaggctgctcttgtgcccatggctaggtctgctgtgtatatcgcatgttcttccttgctctcaggcttagatatgacctgggttggtgagccgagattcctaaagggaaacagcatgactgtggggcgctccttatggcctcccctagtggaggcccattgggactgaactcttcgtcggcctagaggggccagattgaagtgtcggccagctagaggttctgggtgcgtccttgaagatggtccctgaggaagatgtgtgccaggcttggcttttggcaggggattgtggagtgctagtctttgttgctgaggaggattctgttccatgggctcagccaggttcactgagtcagtaacagagcactctggaagcagccaccccatgtccacaccatattgtctccaggcaagagaagaggtgatagagactccaggctgcatccaactcagcacatcctgaagctgctgtgcctgcggtgtaggcagtgctttctccagctgacacaagtactcaaaaagcagcttttccatggcagccagaaagggttccccatactcttgttcaagttcctgcagcttcgaggccaaatccacaggagcctctgacagctgcttcacctgctggtaaaaagtttcctgtgcctccaaaatcttcctcagatcctgctttgtagccttgggatcccgcactataggtccagattctggaaaatggtgattcagggctttcaggacttgggcccaaggccggccctgcaggatcagctccaccaccaccttggcctttaggcccatacaaaggcgttcgtggtgccggtagcgaaccaagccaggggcaacagcgcgcagagatcgcagaaactccagtactcgcggaaaatgttccacgcagcgtccgcgcacaacctgccagctagccgcggcggcgaagcgtagagctgcgggacccgccaccaggggcgtagccatggtcggggctcgcccggaggcggtcctccgggttcctcacccggatgggtgaggctttccgatcactcctaggggcggggcttctggcaactccctgtcgctccggtctgtcggctctgggtacctcgcgatctgactcggctcccttccatcggcccccagaattctgggggagggggtcttctggctcgggctggaggagcctgagtggagaagctgaccgtctccagtggcactgggtcgctcagctttaaacgtcgccgctgtctcgagcccgagggtgcctcacttccggctccg

SEQ ID NO: 310216 - DNA, 1695 bp, Homo Sapiens
  misc_feature (62)..(62): n is a, c, g, or t
  misc_feature (71)..(71): n is a, c, g, or t
  misc_feature (1643)..(1643): n is a, c, g, or t
ggaaaacagggtatggccacccgtggcccagaagggggggtagggtattcaccagagagtgnggtatcaanggtgtcaaactttgtcttctgatagttttccagagattcctgtagagaagggagcagggagagcctactatccgaaaccattccctgaaccctctgaattctgaagcatgtggatttctcagtcttgttctacccatcccctttcccagctttctgctccttcccactcacctttccttccccctggccattttcttcctcatcagagtctaaaaccaagtcccctatggtaatgacggagctgcacagagacggaggacacactgtaggagggaaaccagaatcaaactactacttctagatgaacacaggctcttgagagtccccaagagaggaggctgttgatccaatcctgactcagactacctacctggcttcctggccctaggaggtaataatgatagtctcagggggtccatgtagcaatccaagcaattcctgaggtgagagcaagcaaagaggataggatgaagggaaggcaggcaaagaatgtgctcctagtaagaagcaactctgttccactcactccttttgctctgtggcaggcaagtcaactgggttctccttcagagcccttccccccagggtctggcatggactcttagacttcccagtggaggctgctcttgtgcccatggctaggtctgctgtgtatatcgcatgttcttccttgctctcaggcttagatatgacctgggttggtgagccgagattcctaaagggaaacagcatgactgtggggcgctccttatggcctcccctagtggaggcccattgggcctgagctcttcgtcggcctagtggggccagattgaagtgtcggccagctagaggttctgggtgcgtccttactgttggtcggcctagaggggccagattgatgtgtcgggaagctatgggttttggcaggggtttgtggagtgctagtctttgttgctgagggggtttctgttccatgggctcaagccaggttctctgagtcagttacatttctctctggaagcatccaccccatgtccacctcatattgtctccaggcaagagaagaggtgatagagactccagtttgcttccatctcagcacatcgtgtagctgctgtgcttgcggtgtaggcagtgctttctccatctgactcaagtactcaaatagccgcttttccatggcagccagaaagggttctccatcctcttgttcaagttcctgcagcttctaggcctaatccgcaggagcctctggcagctgcttcacctgctggtaaaaagtttcctgtgcctgcaaaatcttcctcagctcctgctttgtagccttgggatcccgctctataggtccagattctggacagtggtgattcagggctttcagtacttgggctcaaggtcggccctgcaggttctgctcctccacctccgtggcctttaggcccatgcacggcgttcctccgcgccggtagcgaaacaatccaggggccccagcgcgcagagatcgcacaatctccctcgtgccgattcctgcagctcgggggatccactagttctagggcgccctagagtcgactacagcggctcacaaantacggcctgggagagagcggggggagacgtccggagggcgggggggttgagt

SEQ ID NO: 310217 - DNA, 1183 bp, Homo Sapiens
  misc_feature (186)..(213): n is a, c, g, or t
attgggggaggagatttcccaaaccccctttgttttcttgggcccccgggatttttccttaggggaaaacaaggtaatacgccccagtttcccacctttacctttgcggggggcccggcgcggcccaaaacgaaatggtttttagaaaacttttttgaagggccgaggggcgccccgccaaggaannnnnnnnnnnnnnnnnnnnnnnnnnnnaggtaataagacaaaaatttaatgaaaattggacagtatgtataatccagggctaaatagttacattggactggagtagaaatttaaaatacaatagatgctggagtaaatgttacatattatcatcatctgattcatcttcttccttcagagattccttagcatatttctctgcttcttctcttatatcttttggaacaatttcatgtcttccattagttaattcaccaacccagctgagttctagttcaaaagctttatccttaacttcgtcatgtactatgtaaattatttttgcaacttctttaacgatatcacggcaggtcatttctttcatctgaagcttctctatttccgtctttgcagcttgcctggctttgccgatggcacagccccaataaccgtatgaaacacctgatgggtcaatcatgtagagttgcgcaccgtcattcacactgtaagaccctaacatgaaactgcagccaaaaggtctaacagcactgtagagtgtatatgcatgcacatacatggccactctgtctgcaagatgttttagtggaatgttgtagccaaagttagatctgaagttggaagcttcttctcttgctatgtctgctaaagaacgagcatctgccaacaaacctgctactgccattccaacatgccgatcaacattaaaaagtcttttgttggaaccttcttcataaagtttagaaaggactaatttttctaccccaaagacaacaccatctttgcatctgattccaatagctgtactactattttccacagccttcatagcatattcaacttgaaaaactcttccgtcaggagagaatgtagaggctgacaggtcatacccagtgccgattgagctcatcgtgctaaacccaaagggacgcgtagggattccaggcccggagcgcttcccctataccacaggatgccgcaaactagtaacaggcccccc

SEQ ID NO: 310218 - DNA, 403 bp, Homo Sapiens
  misc_feature (332)..(332): n is a, c, g, or t
gcagcattttaaccagggaatttttcagtagtcataaatctatattttaatactgagtaaatgtcctcatttacccccaccaattttgtaaagcagatattaaccaaacttcaatagttataagacaaaaatttaatgaaaattggacagtatgtataatccagggctaaatagttacattggactggagtagaaatttaaaatacaatagatgctggagtaaatgttacatattatcatcatctgattcatcttcttccttcagagattcctgttaagagaatacaggtgtttaaaattgatttttaaaattgttatatgccacacctgtngggcaagttaagctacaacaacctgaattaagtggttaaattcctctacttgtaactgaatgaacagtttc

SEQ ID NO: 310219 - DNA, 550 bp, Homo Sapiens
  misc_feature (116)..(116): n is a, c, g, or t
  misc_feature (171)..(171): n is a, c, g, or t
aagcccagggccagggcactatctccgctgtgactccactcagcccctcttggcgggcctcacccccagccccaagtcctatgagaacctctggttccaggccagccccttggganccctggtaaccccagccccaagccaggaggacgactttttctttgggccactgcntcaactttcccccctcctgcaggggatccgggtccatgggatggaggcgctggggagcttctagggcttcctggggttcccttcttgggcctgcctcttaaaggcctgagctagctggagaagaggggagggtccataagcccatgactaaaaactaccccagcccaggctctcaccatctccagtcaccagcatctccctctccttccaatctccataggctgggcctcctaggcgatctgcatactttaaggaccagatcgatgctccatccagccccgacccaatggccttttgtgcttgtttcctataacttcagtattgtaaactagtttttggtttgcagtttttgttgttgtttatagacactcttgggtgt

SEQ ID NO: 310220 - DNA, 411 bp, Homo Sapiens
tatagaaaaaattggcccagccccagggaataaattgtgactggtctaaacagggttggcaaactatagaccaagggccaaatctggcctctgactgtttgtataaattaagttttactggaataaaaccaggtccattcatttatgcattgtctacatatgcttttaggctatgatggcaccactgcgtcactgcaacagaggttatctagaccaaaagcctaagatattaccgtttgcttctttatggaaaaagttagccattccccagtctaaggtttagattctgagcttaacattttaggcctacccccactttacccgtgactgggctcaaaacaaggtctgtggattcccttctggactatttctactgaggggggaatcccccttctttctcatggcagggct

SEQ ID NO: 310221 - DNA, 1233 bp, Homo Sapiens
  misc_feature (1144)..(1153): n is a, c, g, or t
tttttaaaaaatcacatagaactttattaaataaaccagtagaaaggctcctatttacatccaggttgtcagtttaagctcaagtaatatgcaaggcacaattcttcctttctccagctttagaaaaatcaaccacatggcccagccctgaaggactgaagggagcttgtgcgggatcccgtcatcctggactctccacacagcgtccacgcatggatggccatgggcatgagtctctggatctccctgagggtagcccagcctcggcctggagcacaggggcctgtgatctgagaatctcagatccagaatcaggagctgggaagagaggacttttccaagggtctcctcccccaggccctggggagtcccttctggatgggcaggccctgggctggcggccgccctccatcattggcccaggccgggctctagggcctgctgggaagctgtctggggccctgcgcctgataagctgccatgaaagtggccgcctctcacactggcaggcggtggctcagatctgctgaggttctggagtggcacaggaacaggaggagcaaatgacactgggtctttgtgctgaggcaggacacagcggctttccgaaacacacacacagaaaatatgactcctgctgccatctcaaggacattttcctaaggacagtcctggtgtcctgatggagtgaaagggatcacacgtgggatgtcccagcagggcctaagccaagtccatcagatgtctcaacggcttatgaaacaaaaacagaggactgaagtctgttcacagtggcccatggttgggcagcagccctgggtgagctcctgtgttctccagcctctcgctcacccagggcttggctatcctggcctccaggtgctggttcctgaggcttcccttgcggcagtggcgcagatacagggacactcatgtcccattgctcctcagaagtcctagcagcagccagactaggggcaaagtaagttttcacagggggaaaaaccccaccaaaaaccccctaaagtaactggacaatcctttccctgagaccactacagtaacatcacccacagacaacttcaaaagagcacttttaactgctcaaagttttgagaagggaaagattttagcaaggctaggnnnnnnnnnntgcaacagcacattgtccagaaaccctagacaaccatgcaaaaaggaatgagccaaaaagttttagctttgtaagacttg

SEQ ID NO: 310222 - DNA, 1548 bp, Homo Sapiens
  misc_feature (27)..(27): n is a, c, g, or t
  misc_feature (66)..(119): n is a, c, g, or t
tgtaacttgcccaagttcacatctttnatttctttttaaggcaaagcacccgcaggtcaagccccnnnnnnnnnnnnnnnnnnnnnnnnnnnnnnnnnnnnnnnnnnnnnnnnnnnnnngtcagctgttccccttggcctcgggttccctggcgtcctcggcagccgggctgggagtcttcatagcatcttctccaacaggtgcgagggtctgggggctccgctcctccttcaaggtcagcccgcccgctgccgtctccttgggtagggggccctcgagactagagtccaacagcgcggcctcggtcagccccgagtcgtcatccatgctgatgaagatgcccggggtctcgcactcaggcccctcctcccggaaatccatggcttcctcagacgggggcgggcctggccgggccgacggagagggagagggggaggaagaggagggggctcccactcctcccggcttcagcttctgttcctcctccagctgccgctttaaggccttctcctgggccagtcgcaggccgatgaggtcctgagggggccggggtgctggggccggcgccaaggtcaggggctccagatcatcctcctccaagggccccgcaggcgcctccttggcctctggctcctgcttgccgctggcctccaagatggtcatgatggagttagggatgtgagcttgctggtggggggtgaaggagcggacatgggccagcaggggctcccggagctctgggcacttgtcaaagacggctcccagctgctggggcggcagctgcaggatgacctggaagctctggggctttgtgcgctggcagcacttgatgaagccctcccacaccttggggtacttccacacctgcttcatgatgaggcgggacaggatgttcatgacgaagccccccaggcgggggtacatggtcagggactggatgacggtcctcatgagcagcatgggcagggggctctgctccatcagctgctgcatcaccacggccagcacctctgacgtgtacacgttccgctccgcaaagcacaggttggtggctttgatgatggatttcatgtcgcacttcacggagtcaatgttgtgtaatgcgatcaggagctctccagggttcagcggggacaaggctgagtttccctcaccatgctgggtgccccagcaggcggttgaagacttccttcaccacgatggggttgagtttgatgagtttaggcagggcctggatcacctctttcttctccagcccattgagcaccgggatgaggaagcggacgtctggcagtcgcttgtggtagagatcccggacccgcttcaccagctctggggagggtgggactttgtctgccaccagcaggagcagctccggggagttcatgcccattcctcggatcggctgctcaatgaccctcagcaccgtccgcttgatgtcggcgatggcttcagtgtacacggccgccagttcgtggatcagcttgtggttctgaggcaggagggccaggtagaggtacagacactgcttcactgtctcctccgtcc

SEQ ID NO: 310223 - DNA, 728 bp, Homo Sapiens
ggggtgcctcgaagcgttttggatctcaggcccaaatgtgggttccacaattgtgaacaatttggctctttgggcttctgtccaatgttccgaaatggcccactcacagggcgcttgccgagggaccctctgcgactgaggcggactggcatggacgacccccggggtcatgccagccccgtcaccaggacccagaagcctcaggcctctagactgctagtcgggctgcgtgcaggggggctgagctgggggcacaagtgggggcgaggtaaacctcccagaggccgagtccctgccgcagccctaggcgccgcggtggtggctgctatggcatcaccagacccgtgggctccggggcccaagcaacctggtcgatgggcagacctggcagctctcctgctctgtgggctcagacccgcctgacctccctactccccggcctcaccccaccttgcccccaagaggtcccacagagcttcggacctcctggagacaaggcagggtgctgaggggcgggcaagatgtcaccgagggagaggggagggttcctcaagtgtgcggaaggcggccaccctgccccagcctgatggaaccctctgtttacacacctgctagccccttcccctccggccagcctcaggccagccaggagccccctcctgtggcctccgagcaccctcctgacacctgagcctcgtgccgaattcgccacccaggcctcgctcctt

SEQ ID NO: 310224 - DNA, 1470 bp, Homo Sapiens
  misc_feature (1424)..(1424): n is a, c, g, or t
ttttcatgacttttaatgctttattgggattgcaagcgttacaaggttaaagacaaaacccaagcatgggattttgccggaaatattagcgttaaaggagctgagttgagtcaaacacgggccgcaaggtggaccgaggcggcaggcacaggtgacattcagtgtttggcgtgggggtcttcaggtgatggcagaggaggggacccaagagggggccccccactgaagacattggggacacggggaggagacaagatggagagccacgactaggcacggaggtcagacaggcagcccgggccaggatggttagtggcccaggggagagctgcaaacctggggacgcaaggggctggtcggcaagtgcccccgggaacacccactccggcgaggcagaatataacactgggtgggtgggtgtcctgacgaatgggcaggtaatttggggtgcctcgaagcgttttggatctcaggccaatgtgggttccacaattgtgacaatttggctctttgggcttctgtccaatgttccgaatggcccactcacagggcgcttgccgagggaccctctgcgactgaggcggactggcatggacgacccccggggtcatgccagccccgtcaccaggacccagaagcctcaggcctctagactgctagtcgggctgcgtgcaggggggctgagctgggggcacaagtgggggcgaggtaaacctcccagaggccgagtccctgccgcagccctaggcgccgcggtggtggctgctatggcatcaccagacccgtgggctccggggcccaagcaacctggtcgatgggcagacctggcagctctcctgctctgtgggctcagacccgcctgacctccctactccccggcctcaccccaccttgcccccaagaggtcccacagagcttcggacctcctggagacaaggcagggtgctgaggggcgggcaagatgtcaccgagggagaggggagggttcctcaagtgtgcggaaggcggccaccctgccccagcctgatggaaccctctgtttacacacctgctagccccttcccctccggccagcctcaggccagccaggagccccctcctgtggcctccgagcaccctcctgacacctgaggagaccctgcccaacccccccctccgccctcaggacttctggggaccagccactgtccccagaagccaggccggacagtggccttctccactcccctctgacttctccaagggggctcagtggccagtgccccccaggaggctccaccctcaactcaacccaagcaacagggacagatgaaaaacaaaatccaatcagggcgataaatggcggggggcaggacgtggtggtctccaggctggcttcgtgcgttcttgcttttgtcactgcccccctgttacatggggggggngtttaatttggtttctgagcgcataaagctaaggaggggtaaaaaa

SEQ ID NO: 310225 - DNA, 1055 bp, Homo Sapiens
  misc_feature (685)..(685): n is a, c, g, or t
  misc_feature (687)..(687): n is a, c, g, or t
  misc_feature (699)..(699): n is a, c, g, or t
ccgactccacctttgagctcatacgtgcgtggcgttggcgcgaatgcgacgatcgtcagagtctccaacagcgagccagaatactgcgcttagcgaaccgcggcggcgacctcttaatgtagtgtagacgcccacgccttctatgcactaattcagcgcccgatcttccagcgtggtactacccacgttgtgccatctctagacgttatccgtcgcgaggacagacgcctcgcgatacgaatacagtggggccgactagcctgccaccctgacatagagctccggcgcgatcccgcgcacaccgcgtgacaacaaagcgccgcccccggcaaaggttatccgtcatcacgcggtgcggggcgtccgctcgccaccagggcgagccttcgcccttaaatcccgaggttgcagggtaacgcgctcgcgcaccactcatctcatgtgatataccggctgtcccgggagccacgggaggtcgccgggcgaatgctttcctctgtccttcggccgcggcgcacctgcgtccttcattacggcccgaaccggcgcggccacgccccgcctggaagcccccagggtccatgccaaccccgtcaccaggacccagaagcctcaggcctctagaccgctagtcgggctgcgtgcaggggggctgagctgggggcacaagtgggggcgaggtaancnctcccagaggcngagtccctgccgcagccctaggccgccgcggtggtggctgctatggcatcaccagacccgtgggctccggggcccaagcaacctggtcgatgggcagacctggcagctctcctgctctgtgggctcagacccgcctgacctccctactccccggcctcaccccaccttgcccccaagaggtcccacagagcttcggacctcctggagacaaggcagggtgctgaggggcgggcaagatgtcaccgagggagaggggagggttcctcaagtgtgcggaaggcggccaccctgccccagcctgatggaaccctctgtttaccctcgtgccgaattcgccacccaggcctcgctacctt

SEQ ID NO: 310226 - DNA, 1355 bp, Homo Sapiens
  misc_feature (581)..(613): n is a, c, g, or t
  misc_feature (668)..(728): n is a, c, g, or t
  misc_feature (841)..(854): n is a, c, g, or t
  misc_feature (911)..(911): n is a, c, g, or t
  misc_feature (977)..(977): n is a, c, g, or t
  misc_feature (1052)..(1109): n is a, c, g, or t
  misc_feature (1191)..(1205): n is a, c, g, or t
tcaccctacccttgcggtggcgaattcggcacgagggtcaggagggtgctcggaggccacaggagggggctcctggctggcctgaggctggccggaggggaaggggctagcaggtgtgtaaacagagggttccatcaggctggggcagggtggccgccttccgcacacttgaggaaccctcccctctccctcggtgacatcttgcccgcccctcagcaccctgccttgtctccaggaggtccgaagctctgtgggacctcttgggggcaaggtggggtgaggccggggagtagggaggtcaggcgggtctgagcccacagagcaggagagctgccaggtctgcccatcgaccaggttgcttgggccccggagcccacgggtctggtgatgccatagcagccaccaccgcggcgcctagggctgcggcagggactccgcctctgggaggtttacctcgcccccacttgtgcccccaggcttaacccccctgccgggagccccgactagccagcctattatgcctcgaggcttcctggggccctggttgacccggggttgggccctgcctccccgcggggtgnnnnnnnnnnnnnnnnnnnnnnnnnnnnnnnnnttatatgaacgccgcctccttcccgccccagattccgccctccccggtagtcgcnnnnnnnnnnnnnnnnnnnnnnnnnnnnnnnnnnnnnnnnnnnnnnnnnnnnnnnnnnnnnaaatttggcgaccccccacctcctgtctgtaccaccgccccccatcttttcggcgcgcccccctttaataagaccccccgacagagactgcgcctctcccaccagagtgtctnnnnnnnnnnnnnngccttgttatagctccccgggccgcccgctgttttgttcgctcgcccccgcggcccntatgactgacctccccccctccaccgcgtgctggtaccttaacgcagcgccccccgcacctatatnttttcccccaccgccaccgcccactgggcgaacggcgcgcgcgaggaagtctggtttccggccacgccgcgcccnnnnnnnnnnnnnnnnnnnnnnnnnnnnnnnnnnnnnnnnnnnnnnnnnnnnnnnnnngcgggtgaataggcacacacacgatttctcacccgccccgcccctacgtcaccgacccgacctcacgcgccccgcagttgtnnnnnnnnnnnnnnngatctgtgtgccgcgcaccccccgttgatttaggcgcagccgcctggtgtcgcgcggcgcgactactgtggcgtgcgcccgtccctgttcacccgcggcacgcgcatttctgttgcccagccgctccacggggcaccgccccctacgcct

SEQ ID NO: 310227 - DNA, 415 bp, Homo Sapiens
  misc_feature (378)..(378): n is a, c, g, or t
  misc_feature (395)..(395): n is a, c, g, or t
aatgctttattgggattgcaagcgttacaaggttaaagacaaaacccaagcatgggattttgccggaaatattagcgttaaaggagctgagttgagtcaaacacgggccgcaagtggaccgaggcggcaggcacaggtgacattcagtgtttggcgtgggggtcttcaggtgatggcagaggaggggacccaagaggggccccccactgaagacattgggggacacggggaggagacaagatgggagagccacgactagggcacggaggttcagacagggcagcccgggccagggatggttagttggcccgggggagagcttcaaacctggggggacgcaaggggcttgtccgcaagttccccccgggaaaaaaccanttcccgccaaggcaganttttaacacttgggttgggt

SEQ ID NO: 310228 - DNA, 817 bp, Homo Sapiens
  misc_feature (752)..(752): n is a, c, g, or t
  misc_feature (760)..(760): n is a, c, g, or t
  misc_feature (776)..(776): n is a, c, g, or t
gggaacctcttggggacaaggttggggtgagccggggcaattaggaagttcaggcgggttctaagcccacagagcagaagagctgccaggtctgcccatcgaccaggttggcttggccccggaagcccacgggtctggtgatgccatagcagccaaccaccgcggcgcctagggctgcggcagggactcggcctctgggaggtttacctcgcccccacttgtgcccccagctcagcccccctgcatgcagcccgactagcagtctagaggcctgaggcttctgggtcctggtgacggggctggcatgacccgggggtcgtccatgccagtccgcctcagtcgcagagggtccctcggcaagcgccctgtgagtgggccattcggaacattggacagaagcccaaagagccaaattgtcacaattgtggaacccacattggcctgagatccaaaacgcttcgaggcaccccaaattacctgcccattcgtcaggacacccacccacccagtgttatattctgcctcgccggagtgggtgttcccgggggcacttgccgaccagccccttgcgtccccaggtttgcagctctcccctgggccactaaccatcctggcccgggctgcctgtctgacctccgtgcctagtcgtggctctccatcttgtctcctccccgtgtccccaatgtcttcagtgggggccccctcttgggtcccctcctctgccatcacctgaagacccccacgccaaacantgaatgtnacctgtgcctggccgncttgggtccaacttgtgggcccgtgtttgaattgaaattga

SEQ ID NO: 310229 - DNA, 439 bp, Homo Sapiens
ttttgacttttaatgctttattgggattgcaagcgttacaaggttaaagacaaaacccaagcatgggattttgccggaaatattagcgttaaaggagctgagttgagtcaaacacgggccgcaagtggaccgaggcggcaggcacaggtgacattcagtgtttggcgtgggggtctttcaggtgatggcagaggaggggagggtggatgtgtgctgaccacaggtaagtgttgctggctgtaggggagccgcaggagcccattcctacctctccccaacgccacatttggatccctgtgactgactgcatcaaggagtcaccaactctgcagagctgtggctgtggggtaaatgctcctcctgggattcatgtgggcaggtgatcaatgggggtcgtggttttatttatttataacgttccaaattcttccagctcgtg

SEQ ID NO: 310230 - DNA, 1065 bp, Homo Sapiens
caacccagccctgggggcccctttattgaaaccaactcacagcacagtatttgagacagacagtgttggccggcggaaccccaggaggctgagaagtcgaggttgcggcatccctcactgccctcctgggggaggcatcctccaagcagacctgagcggccccgggctggggggggcgatccacacacagaggcgataagagcacttggaatcagggcagccatgcagcactgccctaggcggggatcccccaaagtctgacagtttgggcatcagtggggtggcaggtgccccctcagctgcctttatgagcgcgctcttccacgtaaagctgcatctttaaaatgtccgacgtcatggtttttagtggtatcagccgggggtcatgcatgtggacatcctgctcatccgcccaggatccaggggaaaatccttgatggccctggatcttctccatgttgcgagtggcggcttctctcgtgtgcaccaggactgtgaaggtacagcctggggggttgtggtccaggacggcatcgcacacgctgatcttcaggatgaaggcccggagcagctgctccacatgagacaacagcgagtctgagctgatggacagcagtggaggctgggtgatctcaaagacgaatttctccactgggcggtgctctttatccaaaatcaccaccaccactttctccacatcattcttctccaggagtggcttgacgcagtgcagcgtgtcctggatatactgattcagctccgggtggcaggacatctggaccggcacgttgtacttcttgcgtttctggaagatgcccacggggtagacctcgcgcacgtagaggatgagatgcacagccacctccaggaactcgcagagcacatcggccaccacttggccaaagttgaggtcttgtcgtgtgagcgtggtcatccttcccgctaccggctctgcgctcggttcccgcccgagatcgggcccggccccgccgcggggagccaccgaccggaccgatcgcgcctcccgctcaacccggggcctcggcgccgctcggtgacgttccc

SEQ ID NO: 310231 - DNA, 599 bp, Homo Sapiens
  misc_feature (483)..(483): n is a, c, g, or t
  misc_feature (550)..(550): n is a, c, g, or t
  misc_feature (571)..(571): n is a, c, g, or t
tttgctatcagacaatgttgtttattatttcacacaaaagttagaccaaggccacagtgccgttaaacacctccctccccacccacgcatggctcaaaaaccaccccaaccctgctataaaaacaacagaacacaacaaaaatactgcatttgaggctgagccaggaacagagtggctccaacaaaaataagacaaaaacacaagacacaacatcttttcaggtttgtgtaaaaattgccatggcccacggggaaagtggtcatggccgtgtcaacaaggatacttgaaactcagggcttttggaggtttgagacagctgccacattagggtgtcttccaggctctgctgcaggaactgaggatgctgaagggcagggctgatcccttcgccccctctgaagtttaggccattgcctggatgtgcttttcgttggggaagatgccataggctcacttcctcctttccagagagaggacacatnaaaagcctgaagcctgaaaagcttcatgccacggtaagaagccagcaagagattcctttagaagaangcttcacggacaagtctcgtncgattttggctgaggcaatccttgtggg

SEQ ID NO: 310232 - DNA, 342 bp, Homo Sapiens
ttttatcagacaatgttgtttattatttcacacaaaagttagaccaaggccacagtgccgttaaacacctccctccccacccacgcatggctcaaaaaccaccccaaccctgctataaaaacaacagaacacaacaaaaatactgcatttgaggctgagccagggaacagagtgggctccaacaaaaataagacaaaaacacaagacacaacatcttttcaggtttgtgtaaaaattgccatggcccacgggggaaagtgggtcatgggccgtgtcaacaaggggtacttggaaactcaggggctttttggagggtttgaggacagctggccccattagggg

SEQ ID NO: 310233 - DNA, 1149 bp, Homo Sapiens
tttttccaatttgataagtatttattgagcacctgctgtatgccaggcactgtgcttaatcctgagatccaacagcaaggaagaagagacactgtcgctgccccagtaggactccagccgagtaaggggaagggaagggaagggaaagacatgaataatcacacaaatgaatgtcaaatgatgcagcaaagggaaggcacatgatgcccaagtgtaaataaccagggggcctaacctgggggaggaggaccacgaaaggcttccctaaggagcatggataagtctaccaggcagagggaacagcgtgtgcaaaggccctgtggtaagtaggaaaattaggagagagacatacagccagtagagctggagtgcccagctggggttgggggtagggggagatagtacagagtggggttggagggggagcttgtacccagatgatgtagggcttttgagaacctattacatgtatgttgatccttactctgggcaatgtgaagctgttgaggggttttaagctgctgaatgacatggtctttttgtctttggtcttctttcacttggcatagccatttaccctgccttgccactcatggggacgtggccaaagttttcacaaatgtttaacatgtccacagccagggaccaaggggcgagggaagaattaagtgagatgtttttttctcacatgcagttgagagcagggcttttgccgccctcatataagcagtgtcaagatcattcatatcctccttgtcaatggaagagatggaggggtaggctaacagcctcaaagggacttatgcagagacactagggagtaaaagccagagaatacagagaggacgtttttacctttagggcctgcgtctctggctttggccatcagggtcaaagagtaggagtgaggaaggaagggatgggacagcatcccctgggacgttcaagtaccatccctggtctcccttctccagccttagagagtggaccagccagagcacctcgtctggactctcagacctgctgctttgtctctaccaaccttggcagggatctaggatccatttagtgggatcaggtcccagtcaataccattggggctcaaataagttcttagaaccacagagtctagggccagggtcccaactc

SEQ ID NO: 310234 - DNA, 1595 bp, Homo Sapiens
  misc_feature (1071)..(1071): n is a, c, g, or t
  misc_feature (1096)..(1096): n is a, c, g, or t
  misc_feature (1098)..(1098): n is a, c, g, or t
  misc_feature (1110)..(1110): n is a, c, g, or t
  misc_feature (1128)..(1129): n is a, c, g, or t
  misc_feature (1149)..(1149): n is a, c, g, or t
  misc_feature (1168)..(1168): n is a, c, g, or t
  misc_feature (1216)..(1216): n is a, c, g, or t
  misc_feature (1250)..(1250): n is a, c, g, or t
  misc_feature (1253)..(1253): n is a, c, g, or t
  misc_feature (1267)..(1267): n is a, c, g, or t
  misc_feature (1307)..(1307): n is a, c, g, or t
  misc_feature (1319)..(1319): n is a, c, g, or t
  misc_feature (1327)..(1327): n is a, c, g, or t
  misc_feature (1333)..(1333): n is a, c, g, or t
  misc_feature (1335)..(1335): n is a, c, g, or t
  misc_feature (1396)..(1396): n is a, c, g, or t
  misc_feature (1413)..(1413): n is a, c, g, or t
  misc_feature (1492)..(1492): n is a, c, g, or t
  misc_feature (1511)..(1511): n is a, c, g, or t
  misc_feature (1530)..(1530): n is a, c, g, or t
  misc_feature (1538)..(1538): n is a, c, g, or t
  misc_feature (1582)..(1583): n is a, c, g, or t
ttggtcttttttgaaatttcatttgagtttagattttagaataacatacttatttctcttactcatttaaagatgaaattcttattattattctgtatcatgcattaagagagagaaagaggattgtttttgcattgcgtttgtcacacagcagcacaaagacaatatatgtaagcgtaggttcaccagatttgacacaagagatagcgaacaccacaaagattaggacagaccgcgtatagtaagctctgaggaactccaagaatctagagggggctgtgggaacgctgcttagatctcctcgtcgccggcctccttgctgaaggtggtcatgtcgatcttctcggggaagatgatgttgacggccaggtcctccccgctgttgtactgaagcagcaggttcttcttcttccgcagcatgtggttgtagcgcaggttggacacccaggtctcgcacttgttgaggaagacgatacccacagtgcccagcaccaccaggctggtgagcacgcccaggatggtgaagcagatggcctggccctcggtgaggagaggggttttcttgttgagctctttcatggacaccttcaggatgcggtgctccggctgctgcaccggcagctcgtgcaccccaggggtcaggcggtaggccagcccatagccgctgggcagacgggtgacctgctgggggctcagcgcgcgcttcttgacacaggtgagacctgtgaactcgggcttgcacagacactcgtagctcacctgggtgtgctgcaggcaggtgcccccgttctggcacgggctgctggcgcagttggtcaccgggcggctgcaggtcttgtcgatgaagccggctgggcaccggcagcggaagtcgcccccgatgtcagtgcagacgccgtcgttctcgcatgggttgggggtgcagctgttggccacgatctcgcagaaattgcctgagaagccaggggggcacaggcaggaggcatgggaggcccggccctcatcatccacgcaggtgcctccgtgctggcagggggagccgttgatcacacagggcccgtcctttttctngcagtcctttcccgagtacccgggngnacaggagcattnatagaggccatcgtccanntcacgcaggtcccgttgttngcacagggggccgaggagnaggcccgaacatctctatcacagagctccccgtcccagccgtcggtgnaaatgcactgcccgggttctccacagagtccgtnaangcagccgggagagntcacgcactggtcacaaaggggaccctgccagccaggctngcacctgcaaanattgtcancctcgnanaatccattttgggggttgcaggccgggaagcattcagccccataggtgctgtggccgaaanccagcaggagcaagagnacgcgcaggagggcttcggtcgcggtcatctctgggcggccggggtcgcggtcccgggagcggtgcgggcgcgggtccngcacctggcgccgcactgngcttctggttgcggacgcnaaaggggngcgggcgcgcagcgaggggaaagccagggctgcaccgggctgcnngcgctctcatcc

SEQ ID NO: 310235 - DNA, 1028 bp, Homo Sapiens
  misc_feature (1)..(1): n is a, c, g, or t
  misc_feature (22)..(22): n is a, c, g, or t
  misc_feature (26)..(27): n is a, c, g, or t
  misc_feature (35)..(35): n is a, c, g, or t
  misc_feature (45)..(45): n is a, c, g, or t
  misc_feature (48)..(48): n is a, c, g, or t
  misc_feature (50)..(52): n is a, c, g, or t
  misc_feature (77)..(77): n is a, c, g, or t
  misc_feature (81)..(81): n is a, c, g, or t
  misc_feature (83)..(84): n is a, c, g, or t
  misc_feature (89)..(89): n is a, c, g, or t
  misc_feature (91)..(91): n is a, c, g, or t
  misc_feature (110)..(110): n is a, c, g, or t
  misc_feature (114)..(114): n is a, c, g, or t
  misc_feature (117)..(117): n is a, c, g, or t
  misc_feature (132)..(132): n is a, c, g, or t
natttttcatgaaacttcagangcgnntccggctntcaacggcantcntnnncccagggtcaagcgtaagccagccnatancnntgggnanacggtgacctgctggggcntcanccncgcttcttgacacangtgagacctgtgaactcgggcttgcacagacactcgtagctcacctgggtgtgctgcaggcaggtgcccccgttctggcacggggcctggcgcagttggtcaccgggcggctgcaggtcttgtcgatgaagccggctgggcaccggcagcggaagtcgcccccgatgtcagtgcagacgccgtcgttctcgcatgggttgggggtgcagctgttggccacgatctcgcagaaattgcctgagaagccaggggggcacaggcaggaggcatgggaggcccggccctcatcatccacgcaggtgcctccgtgctggcagggggagccgttgatcacacagggcccgtcctttttctggcagtcctttcccgagtacccgggggcacaggagcattcatagaggccatcgtccaggctcacgcaggtcccgttgttggcacagggggccgaggagcaggcccgaacatctctatcacagagctccccgtcccagccgtcggtgcaaatgcactgcccgggttctccacagagtccgtgaaggcagccgggagaggtcacgcactggtcacaaaggggaccctgccagccaggctggcacctgcaaacattgtcatcctcgcagaatccattttgggggttgcaggccgggaagcattcagccccataggtgctgtggccgaaagccagcaggagcaagaggacgcgcaggagggcttcggtcgcggtcatctctgggcggccggggtcgcggtcccgggagcggtgcgggcgcgggtccggctcctggcgccgcactgggcttctggttgcggacgcgaaagggggcgcgggcgcgcagcgaggggaaagccagggctgcaccgggctgcgcggcgctctccaccgccgcatcccggga

SEQ ID NO: 310236 - DNA, 663 bp, Homo Sapiens
tgtatattataaattttttgcctttgtgtgcggtatttatttcaaatgttttttaaaacagcactgttatttctcaggacaagagcaaaaatcaccccctgcagaagcttgggaactatgtacagaactttacagaatagaggcaatactttagcttaagcctgtctgctgaccagagaatggaattctgcgtggactcaaggaacaaaaggaaactaggcagggaaggggaagaaaagtgcccatctgaatcaaacttcagctgccatcagggcacatcttgtggtggtcacagattgtaggctgttttttggaagattcgggttcagcacaggattccatttgtctgcaatcagatgataagacgacaggtggcattagaactacttggctacacccctggctgaggtgccatgaggtcaatgtcactcaagttcctggccagccaaactcccgcagcaaagagtcccaaatttagtatcaagttcctccggaagtcattcctatcagtggcaaagcggtagacgccccgaagccaatctcccacgttgtccggtatttcgggagtttcattagccgagccagcagcgctcaccgggacagtgctggaagccatagtggaaagcttcgcatgggcctcgctggaggaaccgtatcggcgtc

SEQ ID NO: 310237 - DNA, 809 bp, Homo Sapiens
aggggcgcgggggggttttcgtgtctgttcgggagtaccccagccgctcagttcctgggcgccgggatttccctcggagagccgggtatgggccctgtttcccctgccctaatggggcccgcggcgcccaaacgaaagggttctagaaagtttttttgggggccgaaggcggcccgacagagtttttctttattgtcgcttttctcttgttccgcctttgtgtgcggtatttatttcaaatgttttttaaaacagcactgttatttctcaggacaagagcaaaaatcaccccctgcagaagcttgggaactatgtacagaactttacagaatagaggcaatactttagcttaagcctgtctgctgaccagagaatggaattctgcgtggactcaaggaacaaaaggaaactaggcagggaaggggaagaaaagtgcccatctgaatcaaacttcagctgccatcagggcacatcttgtggtggtcacagattgtaggctgttttttggaagattcgggttcagcacaggattccatttgtctacttggctacacccctggctgaggtgccatgaggtcaatgtcactcaagttcctggccagccaaactcccgcagcaaagagtcccaaatttagtatcaagttcctccggaagtcattcctatcagtggcaaagcggtagacgccccgaagccaatctcccacgttgtccggtatttcgggagtttcattagccgagccagcagcgctcaccgggacagtgctggaagccatagtggaaagcttcgcatgggcctcggtggaggaccc

SEQ ID NO: 310238 - DNA, 413 bp, Homo Sapiens
  misc_feature (16)..(16): n is a, c, g, or t
gggaaaactggtaaanaagatacttaaaacccctttccaacatctgaaaaacacattttaactaggaaatagttaagggttttaacatcacattcttttgtacatttcatgaatacttgacagaaaacattgcttcacccagtctctaggtctcctaagacacgcatgggtgtagttcagtgcttacctacttggctacacccctggctgaggtgccatgaggtcaatgtcactcaagttccctggccagccaaactcccgcagcaaagagtcccaaatttagtatcaagttcctggaaaaacaatgtgttttattaaccctgtggtcactgagtcagttgtacagttaacgaaatgtactggggggaaaggcttccatcaccaccttcccgaggcgttgatacgtggttgtg

SEQ ID NO: 310239 - DNA, 150 bp, Homo Sapiens
agctatcttatgtgacccagagtgggtggaggcagagggggaaggaaaggagtggggctgacaaaacctaaggcagtctggtgggggtcgtgggaggggctgccccacgttcaccaggacgcatctctccagcattctgtgctcgtgccg

SEQ ID NO: 310240 - DNA, 744 bp, Homo Sapiens
  misc_feature (123)..(138): n is a, c, g, or t
  misc_feature (150)..(151): n is a, c, g, or t
  misc_feature (225)..(320): n is a, c, g, or t
aaaaaaacccccttgtttgtaagcccgggggttttttcggaagagagacctaaagggcccctgttttttgtcctctcggggggccccgcgcccccacaaaaagggttttaaaaaagttttttnnnnnnnnnnnnnnnncgcgccaaaggnngtcttttttgttcctgcgcgggggtgtgctcgtcggaacttctttgggccttttcgtgttggtggggttctccnnnnnnnnnnnnnnnnnnnnnnnnnnnnnnnnnnnnnnnnnnnnnnnnnnnnnnnnnnnnnnnnnnnnnnnnnnnnnnnnnnnnnnnnnnnnnnnngacattgctttcttttaattggagtgaggacaaaacctgatcccgttcagagatgaacagaatcatctaggtcgttaagaacagtcttatctttctggttaaccaggtcctaaattcaagggatttccacgtgttctttaaaaccacctgaaactgtcctgcgcaggctcacactgcggctctgtaccaagggcttggccccgcctgcagccagagggcatctcactggatgtcatcatcatcaaaaagatcttcaaaatcgttaaaaaagtctgcatgaacggccttttcattggctgccaagtccatcaagagcccggtgctgcctcccgcctcgtccaggtccacgtagggcccggcgccctcggggaacatctcgtccaccgccggcttcatctcggggccgcggcgctctaggctcccc

SEQ ID NO: 310241 - DNA, 1299 bp, Homo Sapiens
tttaggaataacaaatgtttattcagaaatggataagtaatacataatcacccttcatctcttaatgccccttcctctccttctgcacaggagacacagatgggtaacatagaggcatgggaagtggaggaggacacaggactagcccaccaccttctcctcccggtctcccaagatgactgcttatagagtggaggaggcaaacaggtcccctcaatgtaccagatggtcacctatagcaccagctccagatggccacgtggctgcagctggactcaatgaaactctgtgacaaccagaagatacctgctttgggatgagagggaggataaagccatgcagggaggatatttaccatccctaccctaaggcacagtgcaagcagtgagcccccgggctccccagtacctgaaaaaccaggtccttactgcctttctggatgctctcttgggccaggaagggaaaagtgtgggaggaatgtcttccagctgctaacgagaagtctgcacccacttgaaagggttaggagaataaaaagcagcattctttaaagaactgcaagtggagcaccaccaggccccttccttggactttcccgtcctgggcagcctcagagcctgcacactgaagctgggttcaaatcctgggtccttcctgcctgacagactgacccctggaaacatgagtctctggtttttcttcactgggctagcctcaagcaaatcttgggagctcttgagtatcttcggcatgtgccttttccagcacttgctactgattttgcagagctcccagaaccgtgctccccaactggctccagctctgccagcctggattctcttcactcccaaccagcaggggaccactcagtgacaacactggcctggtcattcagggactgcctgggctctgaagtttcgtcccaactgtctgcgcctatgctggggaaacaccttgcctggtagagctgccctgctcccttgactcctcctcctctgccaaggcaggaaaataatcctctggtcatggatggatggggtcactcacataagtgggaacaaacagtgccccttggtggcagctggatatatgcctccaggcatccctgaccactgtcctgtagacaactgaggccagaaatggagagccaggaacaaactgacctcttccattcaaataagctccaaacccaagcactgcacaatgggaggctgagcctttcaaaggcccaaccagaagagagctggcggctaccgccacccaggcctcgctaccttaaaccgttaggagttactgccg

SEQ ID NO: 310242 - DNA, 357 bp, Homo Sapiens
gcgaattggcaccaaagcagcagctgtattgccgcagttctagcttcaccttcacgatgtttcccttggtcggagtgtagtggtgtgatcatagctcactgcatcctctaactcctggactcaagtgatcgtccggccacagcctcctgagtagctgggactacagttcgaagcattcagcaaacaatggcaaggcagagccaccagaaacgtacacctgattttcatgacaaatacggtaatgctgtattagctagtggagccactttctgtattgttacatggacatatgtagcaacacaagtcggaatagaatggaacctgtcccctgttggcagagttaccccggaatggggt

SEQ ID NO: 310243 - DNA, 711 bp, Homo Sapiens
  misc_feature (428)..(477): n is a, c, g, or t
gaaggtttcaaatgtactttatttcttcaataatgccatatcttaatgggtacacagtgctttaatttggcatcaattatgagctgttttttaaacaattcattattacaccagctgggatgattactgattcctccattcctttggggtaactctgccaacaggggacaggttccattctattccgacttgtgttgctacctgtaagaattaaaatgctgtcagttacgtgtttaaaccagagtacactctctcggagactatttcttgaaaatgacagatattctgttctataggttaaaaatacacagaaactcacctgggatctaataccctccatataggccaaacctgattgctgtcctaattttctagagcagtcctgttgttcaatagaacttcttgagctgaaggaaatgttctagatnnnnnnnnnnnnnnnnnnnnnnnnnnnnnnnnnnnnnnnnnnnnnnnnnntggaatatgactagtatcaccaaggaaatgaatttttaaattttatttaattcaaatttatacttcacatttctatactacccactcaatacactgattccctcaaccacaactacctaagtaactgccagagtattttatattctctgtatcactaaggaacatttcacctccaaaagctcctctgatcaaacatttgttcaacatctgtttatccttctaattaagcacact

SEQ ID NO: 310244 - DNA, 654 bp, Homo Sapiens; identical to SEQ ID NO: 133397
  misc_feature (114)..(114): n is a, c, g, or t
  misc_feature (163)..(166): n is a, c, g, or t
  misc_feature (173)..(174): n is a, c, g, or t
  misc_feature (176)..(178): n is a, c, g, or t
  misc_feature (180)..(181): n is a, c, g, or t
  misc_feature (184)..(185): n is a, c, g, or t

SEQ ID NO: 310245 - DNA, 1412 bp, Homo Sapiens
tgtgtcggttcggttcaaccgcctcgccctcgcgcgcctgttgcccgaggtcgtcatggcccctcgcaggtgctggagtgtgggttgatccgcctttccgtctgtgcggtggttagccccgaagctctatcttctgcgctgattctgcgagtcctttctatgcctgccatgcggcttgctcgttccacatcgatgggcattctgcgctggcctgtgtagctgtgccgtccccctttcattgcagaatcacctgcagcccccgcttgtgttccagtgggtttgggatcctcacctcgatcttcgtgagccagcagtgagggtttaaagttggacttgatgaccaccttgacctccagtttggtgcgtcccacttctcgcactagcgggatcacccggaagggaaggatgatgtccttggttgtgcgatacctcataagctcaaactctccatctggcgggataaagctgatgctgcgttcagagtcaaacttgctgagtcgcacacactggtggaaggtgcagtcatcaatggcaattgattgcttcccgctcttgcttgtttcatcagctgtgcctttgccctgcttttcaataacaatcttgtcattcatcccaaacttgcattcaggcatgccactcaggtagctcttcatcaccacccggcccgacacatgggcactcagcacctgcccttgtggggacatgagcaggttcacactctccagcacatccaggaagagctcattccgacgatacttgataccctctcgccgccagccaatctgcccagttacctggctggtgatctgtgactgctcttcttttgtctgatgctgactcttgatgccctgctgcgtgatgaaggttttcagcgcgcctgtctcggaattctgtgggtagccaaagtctagaatctcatccagcagctcatatatgagcacaaaattgttcttgatgttttcctcgctgatcttgccaaagtaggcagccatcacgtcacacatcttatagaggaattcgaagaccatggcagcgttgacattctgcttggtgactgctgccagccaaatgttggaccgcttaacgtggaagaagctggtgcgagcaatgttggtgacggggctgcgcacctgctgccgggcatggataacattgacccgaaaggcatccactgcgttcctcccgatgtcatctcggtagactcgggagatgagcacctcccccttgtgattatagatgaataagcctccaatcatggcggcagatcagtctccgcggcccatcgctctgagaacagacctggtgtcctcggccccctgctctgccggcccggccactctccggatcccaagatgtccgcccgccccctgctcgtctgcccgctgcctcggctttcaccgcagtccccggcc

SEQ ID NO: 310246 - DNA, 2171 bp, Homo Sapiens
  misc_feature (116)..(116): n is a, c, g, or t
  misc_feature (229)..(229): n is a, c, g, or t
  misc_feature (293)..(293): n is a, c, g, or t
  misc_feature (837)..(861): n is a, c, g, or t
cgcagagatgacgctcgatcgccgatcagttcaactatggtgtgtgacataagaatgaggatgtggctagaaaccgtgtgggagcgagatcggagactcattggagcgtgatcaancggggtatgtgcgagtgacacgactcatcgcatcacgcgcgcgctagcaggaggtgctcgtaatgtagatagagaggtgaagtgcagtatacgtgggtcgagcagtgtggtgntgtcgcgcgcgccacgacgtcgagttacgacagtgcgacgccggcgtaggctgagcgcgtcgtngtgcgcatatctttgcgtagtagagaggctaatatcgttcgcagattcatctcatcggcatagtagtgtattctgaaagtattggtgtctgccagcgcgtgtgtctgggcgtacatcaacacaagagagtgggcgccaacaacgcagcattagttgatacgacggtataacgctaggtgtagaatacacaatcaggtgagagatatgcgcgctctgtgggagcgcaccatctatgagttctgggggcgagggaatgacaatgaggttggtgagagcgcctgctgaggggaccatacccaatgggggggtgatattgtgttttccaggaagggcggggtgcgcgggatgacgcgcccggggggcgggggtggtttaagctgggagatggggtgccaaagacacgtaggtccagggaccgggagattgtccctgggaaaacgaggttatggcacatgttccacttagcatacgggggggccgggcggcccaagaggaatgggtccagaaaagctttctcgagagggccgagggcggccgaccaagnnnnnnnnnnnnnnnnnnnnnnnnngggttgcactctacagagtttattgggtttgtaactggacgaagtcacacgtgtacaaaatgaagctcacactatcccaaagcagagtagggactgaggccggggatccattactggcctttgggggagctctgaggtgaggggcaaccaaccctcccactccagagctgtggccacaggggtgggaaggaaagggaacccacctggctttggtcacagaactcagagcctggcattaggccaggacagacaggtggatgggagagcaggagcctcagaactcccctgcccagggagcccaggggctgctccaccggtcccacttgtaatgtgcttggcccagacctagactcgggctggtgcaaagggaaggcagcaaagcaggagggaggagacactgatgtgtggtgggggagggagcggcacctggacctgtggaggagggtggctggggaggtgggctagctgcctagtggcagctagcagcgagtttcataaatgccactgcggccaatgtagcgcacccatttgatgacatcatggtcgctgtagttcagcttcggttcaaacaccttcaagtagcgcaccttgaggccagagggcgcgaatggcacctcaaagttcatggaaatggggggtcgagcccatttcttcttgtcgttggtaggcagaagctcaatctctgcgctgatctgcgattccttcatgcctgccatgcgcttgatcttccacacgatggcattctcgctggccttgtacttggccttccccttcatgcagatcacctgcaccccgcttgtgttcagtggggttgggatcctcacctcgatcttctgagccagcagtgagggtttaaagttggacttgatgaccaccttgacctccagtttggtgcgtcccacttctcgcactagcgggatcacccggaagggaaggatgatgtccttggttgtgcgatacctcataagctcaaactctccatctggcgggataaagctgatgctgcgttcagagtcaaacttgctgagtcgcacacactggtggaaggtgcagtcatcaatggcaattgattgcttcccgctcttgcttgtttcatcagctgtgcctttgccctgcttttcaataacaatcttgtcattcatcccaaacttgcattcaggcatgccactcaggtagctcttcatcaccacccggcccgacacatgggcactcagcacctgcccttgtggggacatgagcaggttcacactctccagcacatccaggaagagctccctcgtgccgaattcgccacccaggcctcgctccct

SEQ ID NO: 310247 - DNA, 613 bp, Homo Sapiens
  misc_feature (565)..(565): n is a, c, g, or t
  misc_feature (574)..(574): n is a, c, g, or t
ttttttaggctcatttgagtattttgttttcaattagggagatagttggtattaggattaggattgttgtgaagtatagtacggatgctacttgtccaatgatggtaaaagggtagcttactggttgtcctccgattcaggttagaatgaggaggtctgcggctaggagtcaataaagtgattggcttagtgggcgaaatattatgctttgttgtttggatatatggaggatggggattattgctaggatgaggatggatagtaatagggcaaggacgcctcctagtttgttagggacggatcggagaattgtgtaggcgaataggaaatatcattcgggcttgatgtggggaggggtgtttaaggggttggctagggtataattgtctgggtcgcctaggaggtctggtgagaatagtgttaatgtcattaaggagagaaggaagagaagtaagccgagggcgtctttgattgtgtagtaagggtggaaggtgattttatcggaatgggaggtgattcctagggggttgtttgatcccgtttcgtgcaagaataagaagtggantgctgctanggctgtaataatgaagggcaagatgaaatgaaaggtaaa

SEQ ID NO: 310248 - DNA, 1500 bp, Homo Sapiens
  misc_feature (1183)..(1244): n is a, c, g, or t
aaagtttgttttgtgggttttttccattttcttttgctacccagtatatgcagcacttgtgaactcccaacaggttcccagctttaaacacattaaacatcttgaaagactattgaattcttcaagaatctaaaaacagaccaaacgtgttttgctgtgaacattctgtagagacgaagtgaggcgggagtttgggttcatattttttaaaaaaagaatcaatatagtgatggaagggtaaagaatgcaagaattcagacattctgtggagggttactctctctccattaaaggtccataaaaaggagcaaactgagatccataaggggagtcagcaggagctgtgtgtgtttccccacccgctgtgaataggtttttgctgaggggccatggccaggtccccacttgctcccctccctttggcctgagatggcagggcagtacaggggcactgaaggagcacgtcacgactcctcattcccagaatcatcatcatcataacagtcggcatcttcctcctcctcatcttcatcatcaatgtcgtcatcatacaagtcgtcgtaaagcaaatctgagctgttgtcattggaaggcactttagttttgatgcagtattccgccagggttgtggggaccttcactccatccttttctgcttcggccttagtggctgaaacttgtttcctaataatttcagcatattctttgtcttttcctttactgtctctccatttcctgaacataactgaagcatcgacattggctggggagaaggtgttgggctcattaagcagtgagattacacttaataggatagtcctcacattctgagtaggattccacctttcagaaggcagttctccactctgtgggtcatctacaggcggatgaagaatcgaaatgcatacatctccattctcataaatgttggggtgccacattttggtcaagaatctgaaggtaggtggtgaataggggtagtcaataggaaatttaatatgcgccttgaagtagccgccttcgtagagggtgttggggggtccgaagatggccacctcccagttgtagaggtcggactcgtccaccagggtgatccggaagccctccaccggttcctcctgcagggatttcagctcgagcatcagggccttctgcgagctggtcatctgctgctgggccatcnnnnnnnnnnnnnnnnnnnnnnnnnnnnnnnnnnnnnnnnnnnnnnnnnnnnnnnnnnnnnnaccaggcccctcccctccgctcgccctccggccgggcagcaccgggccccggtcttcacacacccggcgggccggaccaggccccacacggcccgtgggcccgcccggggtcctcctcacacacgacgcaggccggccgggcccttctcctcacactcggccgggcgagaggagaggtcgagggagttaggagcgacgcgtggtcgacgatatcccgagaattccgaccggaccagccgcttttaagcagttaatc

SEQ ID NO: 310249 - DNA, 505 bp, Homo Sapiens
  misc_feature (15)..(15): n is a, c, g, or t
  misc_feature (29)..(29): n is a, c, g, or t
  misc_feature (38)..(38): n is a, c, g, or t
  misc_feature (69)..(69): n is a, c, g, or t
  misc_feature (76)..(76): n is a, c, g, or t
aaaatggcaagggcnaataacaaggggcnactgaaagnaagcaacgtcaacgaactccctaaatccccnaagaatncaatcaatccatccataaacaagtggggcatcctccctccctccctccatccttccatccatccaatgtccgtcaatccataacaaagtccgtccgtaaaagcaaaatcctgaagctgtttgtcaattggaaaggcactttaagttttgatgcagtattcccgcccagggttgtggggaccttcactcccatccttttctgcttcggccttagtggctgaaacttgtttcctcacattctgagtaggattccacctttcagaaggcagttcctcactctgtgggtcatctacaggcggatgaagaatcgaaatgcatacatctccattctcataaatgttggggtgccacattttggtcaagaatctgaaggtaggtggtgaataggggtagtcaataggaaatttaatatgcgccttgaactcgtgcc

SEQ ID NO: 310250 - DNA, 795 bp, Homo Sapiens
  misc_feature (61)..(61): n is a, c, g, or t
  misc_feature (119)..(144): n is a, c, g, or t
aaccaggctagtgaccccatggtttccccttacccttacctgggccccggcgccgcccaanacgaaattggtctagaaaagccttctcgagggcccgaaggcggcccgaccatgttttnnnnnnnnnnnnnnnnnnnnnnnnnnaggtatgaggctgatgccaggtaagtttttattatatttagaaaaaaaatgtaactggaaataaaggtaagtcatttaaaatgaatgagagtttttaaacccctataattctttaatggcagcatttgggtccactgcccaagccacttttaacccaaccaagatgctggaaagcagagcacacagttgtgcccaccaagcccaggagggcgatggaccccagggctcctcgactacgcttgctgggttctcccgtgtaatagccataagcataaagaactcgtccaacaatccaggccaagcccaggccagaagctatacgcgggtggtaaacacctccaacagctagaaaaaataagaagggaggatacacttccaacgtgttctggtgggctcgctgaatgcagttgaagatgtgcccattttcagggtccgtgctgtacatgataggatactccactttgtacttcttgcgggccttggaaacattgatggctaggtgggccaccattataaagctggcagcaccagttagaagcacaaaaccatattccttagagaggacagccatcttgcgtctggatcaccttcgaacagctggagcagaacaaaactgcgcagcgcggtgtgggtgcggcgccctcgcctccc

SEQ ID NO: 310251 - DNA, 895 bp, Homo Sapiens
  misc_feature (252)..(286): n is a, c, g, or t
  misc_feature (327)..(351): n is a, c, g, or t
  misc_feature (498)..(625): n is a, c, g, or t
cccccccgtttttttccacggggggaaaatatttatttccacaaggggccccaaggggttttaatcccccggggggattcagagttctcccccccgccgtttgggagagggttcccccttggggcgcgaagaatgtttttaaaaaattttccccccaatcttctcccaaaaaaatggccagcggcgcggggggcttaatttttatatttttggggcctcccccccggggacccctcccgtgtgataagagannnnnnnnnnnnnnnnnnnnnnnnnnnnnnnnnnnttgggattttgtttcacaaaacccttccggtgttccccccnnnnnnnnnnnnnnnnnnnnnnnnnaatccaacacctctttttctttgccccgggttttctttggaaaacccgttttggccccctgtttcctttcccttttggggggccccgccgcccaaaaagaaatggttttagaaaaaatttttgggggggcgggggggggccccacannnnnnnnnnnnnnnnnnnnnnnnnnnnnnnnnnnnnnnnnnnnnnnnnnnnnnnnnnnnnnnnnnnnnnnnnnnnnnnnnnnnnnnnnnnnnnnnnnnnnnnnnnnnnnnnnnnnnnnnnnnnnnnntaggtatgaggctgatgccaggtaagtttttattatatttagaaaaaaaatgtaactggaaataaaggtaagtcatttaaaatgaatgagagtttttaaacccctataattctttaatggcagcatttgggtccactgcccaagccacttttaacccaaccaagatgctggaaagcagagcacacagttgtgcccaccaagcccaggagggcgatggaccccagggctcctcgactacgcttgctgggttctcccgtgtaatagccatcc

SEQ ID NO: 310252 - DNA, 497 bp, Homo Sapiens
  misc_feature (433)..(433): n is a, c, g, or t
  misc_feature (484)..(484): n is a, c, g, or t
ggtgatccagacgcaagatggctgtcctctctaaggaatatggttttgtgcttctaactggtgctgccagctttataatggtggcccacctagccatcaatgtttccaaggcccgcaagaagtacaaagtggagtatcctatcatgtacagcacggaccctgaaaatgggcacatcttcaactgcattcagcgagcccaccagaacacgttggaagtgtatcctcccttcttattttttctagctgttggaggtgtttaccacccgcgtatagcttctggcctggggcttggcctgggattgttgggacgagttctttatgctttatgggctatttacacggggaggaacccaggcaaggcgttagttcgagggagccctgggggttcccttcggccctcctgggttttgggtggggcacaactgtgttgctnttgtttttccagcatcttgggttggggtttaaaagtgggctttgggcagtnggacccaaatgct

SEQ ID NO: 310253 - DNA, 729 bp, Homo Sapiens
ttgaaaattacgggcagttctttattacatgagctcaggccgtctgcacaaagccctgggagctaggcagtcagctctcatttcatggatggggaaactgagactcagagaggcactcttatatctggccccagaggctcggtacagagacgtagagagggaggcgggctgagaccccgtcctgccctgatgcaggccaggattggggcagacccctggcgagggctgtgaaggcgggagccctgtcctcatttgaggccacacatccttccacagccagacccctaagtcaggcctctggggcggctgaggcccccagacaaaggtgttcgtggagggcagaacagggcggatcaggagctggagactgtggttgggcctcctcttctccccctagcttgctgggtgcagggctgctggtctcatcctcagaggattcagctttaccccgataccataggccaaagaaactctgtattttggactccgggggtgggggatggtctcccttgtcatcggagagcaggatccatgggccagcctcatcctcactgctctctgcttcctctggtgtccctaacatcttggccttgatcttcttccgctgcttccggacagccaccttcatggcctcgagcagaaggccggggacccggtggtctgtgagcagctcccgctggaagtaggccagttcctccttgagcaggaacactttggctttgagttcat

SEQ ID NO: 310254 - DNA, 977 bp, Homo Sapiens
  misc_feature (674)..(674): n is a, c, g, or t
  misc_feature (732)..(734): n is a, c, g, or t
  misc_feature (741)..(741): n is a, c, g, or t
  misc_feature (763)..(763): n is a, c, g, or t
  misc_feature (771)..(771): n is a, c, g, or t
  misc_feature (783)..(783): n is a, c, g, or t
  misc_feature (794)..(794): n is a, c, g, or t
  misc_feature (804)..(804): n is a, c, g, or t
  misc_feature (881)..(881): n is a, c, g, or t
  misc_feature (898)..(898): n is a, c, g, or t
  misc_feature (903)..(903): n is a, c, g, or t
  misc_feature (909)..(911): n is a, c, g, or t
  misc_feature (917)..(917): n is a, c, g, or t
  misc_feature (920)..(920): n is a, c, g, or t
  misc_feature (927)..(927): n is a, c, g, or t
  misc_feature (935)..(936): n is a, c, g, or t
  misc_feature (938)..(938): n is a, c, g, or t
  misc_feature (971)..(971): n is a, c, g, or t
tccatgcacacaggacgtatgtttctttggttttattattacaaacacaccatggctctgtcacaatagggaaatctaagctctacataccatttcttttctacctggacagggccccataaaagcctccaagccacgtgtagatgtgagacacatttgacagaacatttcaactcatagcttataatgatgccatttctccagctgtgcaagggctttacaaaaactgtgccaggacttcccatgaggctggattgcttgattcatgttttatgagccccacaatactgaagctccttttccagggacttggcataggcagtcaattccacatttgggataggtcctctctggaagtgaatgtcaggcagtgacatccaagtttctgcatgcagtgggttaacagccatgtttagggggaacatgatttaaaaagtacatctctctccctcctcccccacatgcacaaggctcacatctcattatggtgcggcccatgtacattaaagtgtgatacttggttttgaaaacattcaaacagtctctgtggaaatctgagagaaattggcggagagctgccgtggtgcattcctcctgtagtgcttcaagctaatgcttcatcctctctaataacttttgatagacaggggctagtcgcacaggcctctgggttnccctgggaatcgctgatgcttgtttgaagatctcaagcgcagagtctgcaagtacatnnnctctttnctgaggtctgttggctggaggntgcagaanattggtgatganatggaacacgncatttgtggncatgatgtcaggctcggcaacaggctccttgttgacactcaacacattgtttttcaagctgacttacagcttgtcancttggagagactttagncgcancagggnnncgatgnctncgctaancaggattnnanaaaaaatgtggtatttaaggatgttggaaagtnaattgg

SEQ ID NO: 310255 - DNA, 1722 bp, Homo Sapiens
cactttctccttccttgtagccaagacactatttgaattggctgcagagtctgatgtgtccacagccattgaccttttcagacaagccggcctcggcaatcatctctctggaagtgagcggttgaccctcctggctcccctgaattctgtattcaaaggagcacatctctctggacctaaccatcaccctttcttgtagatggaacccctccaattgatgcccatacaaggaatttgcttcggaaccacataattaaagaccagctggcctctaagtatctgtaccatggacagaccctggaaactctgggcggcaaaaaactgagagtttttgtttatcgtaatagcctctgcattgagaacagctgcatcgcggcccacgacaagagggggaggtacgggaccctgttcacgatggaccgggtgctgacccccccaatggggactgtcatggatgtcctgaagggagacaatcgctttagcatgctggtagctgccatccagtctgcaggactgacggagaccctcaaccgggaaggagtctacacagtctttgctcccacaaatgaagccttccgagccctgccaccaagagaacggagcagactcttgggagatgccaaggaacttgccaacatcctgaaataccacattggtgatgaaatcctggttagcggaggcatcggggccctggtgcggctaaagtctctccaaggtgacaagctggaagtcagcttgaaaaacaatgtggtgagtgtcaacaaggagcctgttgccgagcctgacatcatggccacaaatggcgtggtccatgtcatcaccaatgttctgcagcctccagccaacagacctcaggaaagaggggatgaacttgcagactctgcgcttgagatcttcaaacaagcatcagcgttttccagggcttcccagaggtctgtgcgactagcccctgtctatcaaaagttattagagaggatgaagcattagcttgaagcactacaggaggaatgcaccacggcagctctccgccaatttctctcagatttccacagagactgtttgaatgttttcaaaaccaagtatcacactttaatgtacatgggccgcaccataatgagatgtgagccttgtgcatgtgggggaggagggagagagatgtactttttaaatcatgttccccctaaacatggctgttaacccactgcatgcagaaacttgggatgtcactgcctgacattcacttccagagaggacctatcccaaatgtggaattgactgcctatgccaagtccctggaaaaggagcttcagtattgtggggctcataaaacatgaatcaagcaatccagcctcatggggaaatcctggcacagtttttgtaaaagccttgcacagctgggagaaatggcatcattataagctatgagttgaaatggtcctgtcaaatgtgtctccacatcctacacttggccttggaaggccttttatgggggccctgttccaggtaaaaaaagaaatgggtatgtaaaaagcttaacatggtccctcattggggacagcagccaggggggtgctttgcaacataatacaaccccaaccaacaccccttcgtaagtaaaataacgccagtcgccgccattccaactggcgtggcccccctttggcccccttaaaaaacctttttttacaacaatttccattttgggcgccggggggtcttaat

SEQ ID NO: 310256 - DNA, 606 bp, Homo Sapiens
gccgctccaccatttattgttttatttcctggagaaaatacatcattttatcccagccttaataacccatcccagtgtatactccttcatcttcatggataatgaccctgctacatgctctgaacaaatcaggaggcccctcgtgggagtataaccagtcctttctttctctgtccctcttctgtgcagagcctttgcattgagaacagctgcatcgcggcccacgacaagagggggaggtacgggaccctgttcacgatggaccgggtgctgacccccccaatggggactgtcatggatgtcctgaagggagacaatcgctttagcatgctggtagctgccatccagtctgcaggactgacggagaccctcaaccgggaaggagtctacacagtcttcgctcccacaaatgaagccttccgagccctgccaccaagagaacggagcagactcttgggagatgccaaggaacttgccaacatcctgaaataccacattggtgatgaaatcctggttagcggaggcatcggggccctggtgcggctaaagtctctccaaggtgacaagctggaagtcagcttgaaaaacaatgtggtgagtgtcaac

SEQ ID NO: 310257 - DNA, 1574 bp, Homo Sapiens
  misc_feature (31)..(31): n is a, c, g, or t
  misc_feature (37)..(37): n is a, c, g, or t
  misc_feature (44)..(44): n is a, c, g, or t
  misc_feature (53)..(65): n is a, c, g, or t
  misc_feature (73)..(73): n is a, c, g, or t
  misc_feature (102)..(102): n is a, c, g, or t
cccccaatgccaacctgttccctcaaaatgncaagangcctaantaacgaatnnnnnnnnnnnnntcctccanttttttgcccgcccccaaaatttcccccnggtcctgtccccatggtaacaagataacttaagaggcccagctggtccttttaaattatgtggttcccgaaagcaaaattccttgtaatgggccatcaaattgggaggggttcccatctttgaaataacaagaaattccaggggaagcccaggagggtcaaccgctcacttcccagagagatgatttccgaggccggcttgtctgaaaaggtcaatggctgtggacacatcagactctgcagccaattcaaatagtgtcttggctgagtctgggatgagtagctcatcaatgtagtggatcaccccgttggtggctaggatgtctttattggagatgatcgccttcccgttgatagtgagcatgtccccgctgcagcccacctccagtgtcgtgccctccagggtctctacagacagccccgcaacgatggcttcagcacacatagctgacttcaagatgtggttgttcagcaggtctctcagggcttcttggtcgcccaggatacggttcaaagtctcactagggatcttctcgaaggcctcattggtcggggccaaaagcgtgtactggccgttaccttcaagcatcgtgttgagccctgatgcagccacagcagcccgaagggtctcaaaggtgtcctcgatctcaatgatctgctggatgttgttggtgatggtggagatgaccttatcgatgaggtgcaccaccccgttggttgcatggtggtcggctttcagcagccgggcacagttcacagttacaatcccattaggatagtggtggatctggatgttggaattctggtacatagaggtgagggtcatgccgtgtttcagctcatcagtcaggactcgcctgcccaccatatggtagcggagggcattgagcagctcaatgttgacattgctgaccagggagtccagcacttcagctggcaaggaggcccaggcctcgttgctaggggcgaagatggtgaagctgccgggcccctccatctcaggcctcagcttctccgtgcggtccgtgtacagctgagtggtggtggatccaacgactcccagggtctcgtaaaggtttgagagtggtagggctgctggacagcccttctccccagggaccttttcatatccaggacagcactcgtagctgatgactgttgatttgccacagattttcctttggtaccactgcttgcagttggtgaagtacttcctattagtgccaataaccttctgcacagcacacacgttggggccgtgctggcggccccggagcctgctgtgctgcagcaccagctggtagggcgacttggcgggacccgccagggtcgcggcggggcccagggccagagccagggcgagagccagcagccgcacgaagagcgccatggagcgggacgacgcgcaccgagcgagctagcgaccgacgggcaagcgggcctcgtgccgaattcgccacccaggcctcgcta

SEQ ID NO: 310258 - DNA, 969 bp, Homo Sapiens
aagggggtatttcaggatgtgggcaagtttcttgggcatctccccaggagttctgctccggttcttttggtggcagggtctgggaaggctttcatttgtgggagcaaagacctgtgtagattctttccccggttgagggtctcccgtcagtcctgcagactggatggcagctaccagcatgctaaagcgattgtctcccctccaggacatccatgacagtccccattgggggggtcagcacccggtcccatcgtgaacagggtcccgtacctccccctcttgtcgtgggccgcgatgcagctgttctcaatgcagaggctattacgataaacaaaaactctcagttttttgccgcccagagtttccagggtctgtccatggtacagatacttagaggccagctggtctttaattatgtggttccgaagcaaattccttgtatgggcatcaattggaggggttccatctttgaatacagaattcaggggagccaggagggtcaaccgctcacttccagagagatgattgccgaggccggcttgtctgaaaaggtcaatggctgtggacacatcagactctgcagccaattcaaatagtgtcttggctgagtctgggatgagtagctcatcaatgtagtggatcaccccgttggtggctaggatgtctttattggagatgatcgccttcccgttgatagtgagcatgtccccgctgcagcccacctccagtgtcgtgccctccagggtctctacagacagccccgcaacgatggcttcagcacacatagctgacttcaagatgtggttgttcagcaggtctctcagggcttctgggtcgcccaggatacggttcaaagtctcactagggatcttctcgaaggcctcattggtcggggccaaaagcgtgtactggccgttaccttcaagcatcggtcctcgtccgaattcgccacccaggcctcgctaccta

SEQ ID NO: 310259 - DNA, 931 bp, Homo Sapiens
tcccatttcctcccagcctgtgccaaggggctttacaaaaaactgtgcccagggactttcccatgagggtgggattgcttgattcatgttttatgagcccccacaatactgaagctccttttccagggacttggcataggcagtcaattccacatttgggataggtcctctctggaagtgaatgtcaggcagtgacatccaagtttctgcatgcagtgggttaacagccatgtttagggggaacatgatttaaaaagtacatctctctccctcctcctgtagtgcttcaagctaatgcttcatcctctctaataacttttgatagacaggggctagtcgcacagacctctgggaagccctggaaaacgctgatgcttgtttgaagatctcaagcgcagagtctgcaagttcatcccctctttcctgaggtctgttggctggaggctgcagaacattggtgatgacatggaccacgccatttgtggccatgatgtcaggctcggcaacaggctccttgttgacactcaccacattgtttttcaagctgacttccagcttgtcaccttggagagactttagccgcaccagggccccgatgcctccgctaaccaggatttcatcaccaatgtggtatttcaggatgttggcaagttccttggcatctcccaagagtctgctccgttctcttggtggcagggctcggaaggcttcatttgtgggagcaaagactgtgtagactccttcccggttgagggtctccgtcagtcctgcagactggatggcagctaccagcatgctaaagcgattgtctcccttcaggacatccatgacagtccccattgggggggtcagcacccggtccatcgtgaacagggtcccgtacctccccctcttgtcgcctcgtgccgaattcgccacccaggcctcgctc

SEQ ID NO: 310260 - DNA, 1668 bp, Homo Sapiens
  misc_feature (845)..(845): n is a, c, g, or t
aatagattatagaaatattaatttttcaatagttttagaaaaatcacattaaaataagcattttggttttttgaagttacaacacttaacgacaggttaaaatgtttacctgatttattttttgtggctaaagatttcataactatttttttaattagcccttgaatggtttaaggctataagtgttttatgaagcatctcttgaattgaagaccaaattggaaatacacatcatgaatgaaacctctctctagtcactggcattagtttgaaagtataagctacccacatttttcactttcatcagagaggtttcaagctgccttgtacttaaagctgcttgactttgtctgctgaaggacagctccctccttgccatacagatatgaagcccaggaaaacatccagagtggcaggtatgctatgcactgagaccttagggcctcactggcacgtaagaataagctgaatgtgatgaccagtgagcatattagaccagtctgtcttctaagtctcatttttatctggaacgcactttggtaagagatttcagcctatatttgagatctaaactgaactagggtccagtttctccaaagggctttctccttggtccaacttgtgttttgtcacagaggagccattaacagtcatgcttgaagctagcccttgttttaaaataaattgctgggagagaacaagacagaacagttataaggtgatgcaagatggaagtggtgatgaagcaccctagagcaagtcagcttcagaaaatgatttagaaagataaatgtaagagtcaggggcatcacacaggagacatctgttcaacagaaatgggtcgngccgcactgaagggaaggaagcaggtgcagtgcatcaccctagagactatcctaagcattaggcaccttcccaaaaaatatgccccaaatcctccagaggggcagtttacatgaaataaaagtacaatttttttaacaggagaaagtttaaaactagagctcaggggggaaaaaaagccgagagagaaaggcactctggacgctaatgagtggggacggtggtggaaatgcctttctggtgtgcatgtatttgatgtcagtgtcaggacctaaaaacttatttaaaaaaataaggtaggagagaagatgaagtgacttcatcgaagctaacaagttttattttatagggtataaattaatcttcaaaaaaatcttcagaaaatattctttgtttccattcttggtagagtttagtagtgagtaacagtcctgcacttatggagaaaggaaatactcattaatacttttgtctacttttgtgcttgcttctcagtagagatcgcatatacctgagcagggaacaggagtgctgagtttgccaaactggcattttttatcgtggctcatgaccggcccacggctcagtgctggaatctttccaagctactccatctttttcctcccagcttcaaaaacttaaataacctgtgaagagtgacaacaggtatctgaggtaatattcacaagtaggctcacaaaaaagagttgacgaattcagtgcctattttgctcccatcactctgctacttctgctagttctgatttatacatattccagcagcatgcatgttcaaagaaaaaggtcggagtggactccagtgct

SEQ ID NO: 310261 - DNA, 925 bp, Homo Sapiens
taccaggctcaatattctttattgataagccattagtgaaccccttgccctgggagctcagccagtcctgctctcagattcctggccttaggtgggagagcatcttttcctcatggatcaactgtccatgtctgactgtgcctaacttgccagatcatgggtcagggagacaggcagcaggtattggaaggtgatggccaggtccttttccccagtgaccactctccatctagaagcactctgcttcagctgcgcaggctcttccggggactctgggagcctgctggttagatggaggagttgagcctctgacacctccaggttctgcctgccaagggttcctccgcagccgggctgagctgagcaggagcaatgggctctcgcttctgtcctgaggttcttgggtggtgagcaagagagctaagggcaggaggtcttacgtggtgcctcataggggatagagatgccagagactgcactggaagcgggggtctccggggtgggtcttcagcacctgccacacctctgggggaggctccaagcccatctgcttggcccgacaccagcgctgcagccgtgtgatcccggtgcagggcccgtactgccaggccaggtcaaactgcctcagcagctccagctccgcttcctcctcgtcgcggggctggggctcctcccctagctcgggtgccagctcccccttgctgtgcccagcgggcccctccctcctcttcacaaccgggtaggaatcagtgatgagccgcttccggcccatggcggccacccaggcaggcagagaaggaggcaactgcggggaagaggagagaccggccagtgggcgcgagaaagacagctgctgagagagacagacggggccaggccagcggcgggcagacaagatgacccagacaaaccgagagaggaagtc

SEQ ID NO: 310262 - DNA, 1890 bp, Homo Sapiens
  misc_feature (1199)..(1210): n is a, c, g, or t
actcattggattttactctgttctgtttacagtttactatttaaggttttataaatgtaaatatattttgtatatttttctatgagaagcacttcatagggagaagcacttatgacaaggctattttttaaaccgcggtattatcctaatttaaaagaagatcggtttttaataattttttattttcataggatgaagttagagaaaatattcagctgtacacacaaagtctggtttttcctgcccaacttccccctggaaggtgtactttttgttgtttaatgtgtagcttgtttgtgccctgttgacataaatgtttcctgggtttgctctttgacaataaatggagaaggaaggtcacccaactccattgggccactcccctccttcccctattgaagctcctcaaaaggctacagtaatatcttgatacaacagattctcttctttcccgcctctctcctttccggcgcaacttccagagtggtgggagacggcaatctttacatttccctcatctttcttacttcagagttagcaaacaacaagttgaatggcaacttgacatttttgcatcaccatctgcctcataggccactctttcctttccctctgcccaccaagtcctcatatctgcagagaacccattgatcaccttgtgccctcttttggggcagcctgttgaaactgaagcacagtctgaccactcacgataaagcagatttttctctgcctctgccacaaggtttcagagtagtgtagtccaagtagagggtggggcacccttttctcgccgcaagaagcccattcctatggaagtctagcaaagcaatacgactcagcccagcactctctgccccaggactcatggctctgctgtgccttccatcctgggctcccttctctcctgtgaccttaagaactttgtctggtggctttgctggaacattgtcactgttttcactgtcatgcagggagcccagcactgtggccaggatggcagagacttccttgtcatcatggagaagtgccagcaggggactgggaaaagcactctacccagacctcacctcccttcctccttttgcccatgaacaagatgcagtggccctaggggttccactagtgtctgctttcctttattattgcactgtgtgaggtttttttgtaaatccttgtattcctattttttttaaagnnnnnnnnnnnnccttaagctgcatttgttactgaaatgattaatgcactgatgggtcctgaattcaccttgagaaagacccaaaggccagtcagggggtggggggaactcagctaaatagacctagttactgccctgctaggccatgctgtactgtgagcccctcctcactctctaccaaccctaaaccctgaggacaggggaggaacccacagcttccttctcctgccagctgcagatggtttgccttgcttttccaccccctaattgtcaaccacaaaaatgagaaattcctcttttagctcagccttgagtccattgccaaattttcagcacacctgccagcaacttgggggaataagcgaaggtttccctacaagagggaaagaaggcaaaaacggcacagctatctccaaacacatctgagttcatttcgtgaccaagggaatcttcgcaccattccaaatccctgaggagtaacagctgcgaacctgttcagttctcagtgagagccagctcacttatagctttgctgtttgaacctgttgtggctgcattttctgttggccagtgacaactgtgtaaccagaatagctgtatggcgctgaccctttggccggaacttggtctcttggctccctccttgggcacccaccacctgtcgcacaagccctctgtttttacacctatac

SEQ ID NO: 310263 - DNA, 1411 bp, Homo Sapiens
  misc_feature (518)..(527): n is a, c, g, or t
  misc_feature (685)..(719): n is a, c, g, or t
  misc_feature (867)..(867): n is a, c, g, or t
  misc_feature (938)..(938): n is a, c, g, or t
  misc_feature (955)..(955): n is a, c, g, or t
  misc_feature (1022)..(1022): n is a, c, g, or t
  misc_feature (1044)..(1044): n is a, c, g, or t
  misc_feature (1222)..(1222): n is a, c, g, or t
  misc_feature (1251)..(1251): n is a, c, g, or t
  misc_feature (1260)..(1299): n is a, c, g, or t
  misc_feature (1321)..(1321): n is a, c, g, or t
  misc_feature (1332)..(1332): n is a, c, g, or t
  misc_feature (1344)..(1344): n is a, c, g, or t
  misc_feature (1356)..(1356): n is a, c, g, or t
  misc_feature (1365)..(1365): n is a, c, g, or t
gaccacattttgcttaatgtaaaggagccacttgaaaatgtctgctccttcggggtcctgagattgtggctccccctctggaggaggtggctccacgatgccttgattttcactcatcatttggacatgtgactggcttttcctacctctgccatggtgtagaaattgattgcacattgattggatgagccgggggttttctctaaatctgactaaaggcccaaagtgggcccatctgagtcaggtttgttgagaacaagccctctcaagtgggtggtggcttttcagtggccctgatttctgttccacacgtgttcactggagccaggtgacttcctccttgcgtgagtgagggcacaggaatctcaaaattaaacctgacttcattgcacaaaaacccaaaacggacagacgcccaccacccacccccagtcgcacaccaaatcggccccccgccacaagacaacaagggcgcactcccccaaacccacagcgcaaccccaccatctcgccggcgnnnnnnnnnnaccctccaaaaattttatataaccccctcctttggggcgcgcggccggcccagctggcgcaaccccccggcgtccgtacaacactgttttccccagggggaacctccgggtaaacaccgcctcagtggttttggaaatccttgcgctgagctgaaaannnnnnnnnnnnnnnnnnnnnnnnnnnnnnnnnnngtctctcaaaaacaaacactcccgatgggtggggtattttttccacagcgccccctccctcacgcgcggaaatatttaaaacaaaagacgaggaagacgttggtcgcaaggcaggaggagccccctcgcacacctggttaggacaganccaaaaaagggcgcaacccccgcgtagcgcctactctatactatcttcgttttttattactacgagcgcanacaaaaggtgggggggngtgggcgacacacctctctgttgtgtttgtgctcggccccacactctgtcccccgcccaggcgcggntgcaggtgggaccgagaggcgnggagctatggcacgccaaatgggtggtgcgggttcaggtcaactaacataaaccccctcgccccaacaactctgagccccgcgcgcgctcggccgctcaccgagcagccagcactcccccctcctctccttcgtcacctctccctctgtcaccaacacatcctacctgtcctgtgtgngccgcgcgctcgccagggccgtggcggangacaaaacnnnnnnnnnnnnnnnnnnnnnnnnnnnnnnnnnnnnnnnntttagccgatgatacgtaatangaaatacacanacggccgcctcntatgattcgccntgggtatgnggggccggcgggggggcccgacacctctcgccaacgcacgtgcggg

SEQ ID NO: 310264 - DNA, 627 bp, Homo Sapiens
  misc_feature (485)..(485): n is a, c, g, or t
  misc_feature (510)..(511): n is a, c, g, or t
agcagtgggatacttcaaaaggagaacaagtttccccggtttgccagctgaacagggatctccacggatggcagaaacggtggacacaagcgaaatggtcaacggcgctacagaacaaaggacgagctctaaagagtccagccccatcccctccccgacctctgatcgtaaagccaagactgccctcccagcccagagtgccgccaccttaccagccagaacccaggagacaccttcggcccagatggaaggcttcctcaatcggaaacacgagtgggaggcccacaataagaaagcctcaagcaggtcctggcacaatgtttattgtgtcataaataaccaagaaatgggtttctacagagatgcacagactgctgcttctggaatttcctaccacagcgaggtccctgtgaggttgaaagaagctgtctgcgaagtggcctttgattacatccaagccaaagacgatgaggaattgaacacantggatatccggctattcttttttcnngcatctcctttgattaacacgaaggtgtttgccagcaaccgcaccgccaggattcatgccggggcgagaacccttcccaaccaggggtgtgtaaccattccagcgggttccgttcc

SEQ ID NO: 310265 - DNA, 1980 bp, Homo Sapiens
  misc_feature (185)..(198): n is a, c, g, or t
  misc_feature (667)..(667): n is a, c, g, or t
  misc_feature (687)..(700): n is a, c, g, or t
  misc_feature (1655)..(1655): n is a, c, g, or t
  misc_feature (1684)..(1684): n is a, c, g, or t
  misc_feature (1707)..(1707): n is a, c, g, or t
acaatagacagtgacagagaaatgcacactatgtatcaaatagcaaggaaatgaagcaaattataacacagtgtggcaacgcacgagcaagtaaccattagagtaacattacgtccagtaaatgcttcagttattatactttgtactagaattatctcaaacgtacaatataatgtatttcagcnnnnnnnnnnnnnnttgaaattacagattatttaaaacagtatcagctattccttcttgtatactgacattcttaaccgtcatagcagttgatgcagaaaagccgcatgtcgtgtgtatagtaagtgatgccagatacaaatggtttggtctgtagagttaatgtggagctgcactgtgtctacagcaagctcataatatgcgatctgtttaataaagtttagccccatctcgggcacttctaagagtcaagagtcagggcctctggtgagcacaggaaatattgattaagcaccgctgccttgcataccaacagcactagaggcgggttatttccaacacagcctcacaaaattgaggaacagtttaaatactgagatctaatctatataatttcattaataaaattatctggccttccctgtgcacctcaaacttttgtaacttggagataaagtgtttaggtgtgtttcccccacccccnccgaaatgctctataaattnnnnnnnnnnnnnnctcaaccacattgaggaacattaggcacagagagtaatgtgttggttctgagcttgcatgctggaatttcactgaaaaggtaagagaagggcaggaggtgaaggaaaggagttcatttctttttgccaaaaaggctgaaccgcttctctttgtctttctctttgtccttttcccgcttgccgggactggactcgctggtgatggtgacgacgctggtggggagggtctgcgcgcggctggatgctggcgtgctctgggtgctggcagacacctcgtgtttatcagaggagatggcggaagagatagcctggatccatgtgttcatttcctcatcgtctttggcttggaagaggtactcattgccatcatttagtcttagcttgaatacgtgtttcttctttttgtaatcaagggccacttcgcagacagcttctttcaaactcacagggacctcgctgtggtagggaattccagaagcagcagtctttgcatctttgtagaaacccatttcttggttatttatgacacaataaacattgtgccaggacctgcttgaggctttcttattgtgggcctcccactcgtgtttccgattgaggaagccttccatctgggccgaaggtgtctcctgggttctggctggtaaggtggcggcactctgggctgggagggcagtcttggctttacgatcagaggtcggggaggggatggggctggactctttagagctcgtcctttgttctgtagcgccgttgaccatttcgcttgtgtccaccgtttctgccatccgtggagatccctgttcagctggcaaaccgttttgggaaacttgttctccttttgaagtatcccactgctgctgggactcggcttcctctgaaaccttcgtgctcggctcgggagaaggcggccgcctcttcctctcctcttcctcttgctgtctgcgcaacttccnagtaactccaatgtagtcaagcctttccnagggcagagaacctctcatcccnaggttgctgcagacttttcaaatgcctcgtggcgcttgatgagcttctccacctcgtccacgctctggcctatctctcggctggataggtacggctcctgtccaagcagcccggcctcggccacactggcgtctcttgagaactgatggacctccagaatcagtcttaaccattcccatcggtcttcccacttgtcgatcatttctttcctcttttccgtcaactgcagtaatttttccttgatctcctcagatgcatagtgttttctcgccc

SEQ ID NO: 310266 - DNA, 605 bp, Homo Sapiens
  misc_feature (160)..(160): n is a, c, g, or t
  misc_feature (210)..(210): n is a, c, g, or t
ggaacgacctccctgcctggtccgcccctggtggggagggtctcgcccgggttaatcctggcgtcctatgggtgttgcaaaccacttgtgatcacagagattgcgtaaacagataccctgcatccatgtgttcatttcctcatcgtctttggcttgcaanacgtactcattgccatcatttagtcttagctgaaaacgtgttcttctttntgtaacaagggcacttcgcagacagctctttcaaactcacagggacctcgctgtggtagggaattccagaagcagcagtctttgcatctttgtagaaacccatttcttggttatttatgacacaataaacattgtgccaggacctgcttgaggctttcttattgtgggcctcccactcgtgtttccgattgaggaagccttccatctgggccgaaggtgtctcctgggttctggctggtaaggtggcggcactctgggctgggagggcagtcttggctttacgatcagaggtcggggaggggatggggctggactctttagagctcgtcctttgttctgtagcgccgttgaccatttcgcttggggaaacttgttctccgaagtatcccactgct

SEQ ID NO: 310267 - DNA, 619 bp, Homo Sapiens
  misc_feature (513)..(513): n is a, c, g, or t
  misc_feature (566)..(566): n is a, c, g, or t
agcagtgggatacttcaaaaggagaacaagtttccccggtttgccagctgaacagggatctccacggatggcagaaacggtggacacaagcgaaatggtcaacggcgctacagaacaaaggacgagctctaaagagtccagccccatcccctccccgacctctgatcgtaaagccaagactgcccttccagcccagagtgccgccaccttaccagccagaacccaggagacaccttcggcccagatggaaggcttcctcaatcggaaacacgagtgggaggcccacaataagaaagcctcaagcaggtcctggcacaatgtttattgtgtcataaataaccaagaaatgggtttctacaaagatgcaaagactgctgcttctggaattccctaccacagcgaggtccctgtgagtttgaaagaagctgtctgcgaagtggcccttgattacattcaagccaaagacgatgaggaaatgaacacatggattccggctatctctttcggcatctnctctgatcacgaggtgtctgccaggacccagagcacgccagcattcaagctgngcgcagacccttcccaccagcgtcgtcaccatcaccagggagtccagtcccgc

SEQ ID NO: 310268 - DNA, 549 bp, Homo Sapiens
  misc_feature (424)..(436): n is a, c, g, or t
agatttaaaagcatttaatgacatagcatatatttaacagatagggcaaaagttgagaggtacaggtcgtacgactgagcaccaggcctgagcgaccacctccctgttcaggcccagcctctggagttcattcctatcaatgtcattttgattgtgcagtaagatgaaaatttgtcattacaatagttacagtgacagagaaatgcacactatgtatcaaatagcaaggaaatgaagcaaattataacacagtgtggcaacgcacgagcaagtaaccattagagtaacattactttgtccagtaaatgcttcagttccaccacttgtacacttaccaatgatttaaagggtttattatacatctagttttattatactttgtactagaattatctcaaacgtacaatataatgtatttcaacannnnnnnnnnnnnttgaaattacagattatttaaaacagtatcaggtttctattccttcttggatactggcatttttaaccgtcatagcagttgatgcaggctgtaaagttaatgtggagcttgct

SEQ ID NO: 310269 - DNA, 417 bp, Homo Sapiens
ttcgatttaaaagcatttaatgacatagcatatatttaacagatagggcaaaagttgagaggtacaggtcgtacgactgagcaccaggcctgagcgaccacctccctgttcaggcccagcctctggagttcattcctatcaatgtcattttgattgtgcagtaagatgaaaatttgtcattacaatagttacagtgacagagaaatgcacactatgtatcaaatagcaaggaaatgaagcaaattataacacagtgtggcaacgcacgagcaagtaaccattagagtaacattactttgtccagtaaatgcttcagttccaccacttgtacacttaccaatgatttaaagggtttattatacatctagttttattgtacgtttgagataattctagtacaatataatgtatttcagc

SEQ ID NO: 310270 - DNA, 1046 bp, Homo Sapiens
  misc_feature (56)..(70): n is a, c, g, or t
  misc_feature (164)..(173): n is a, c, g, or t
  misc_feature (616)..(630): n is a, c, g, or t
caatctcagaaccaacacattactctctgtgcctaatgttcctcaatgtggttgannnnnnnnnnnnnnnaatttatagagcatttcgtggggggtgggggaaacacacctaaacactttatctccaagttacaaaagtttgaggtgcagagggaaggccagannnnnnnnnnaatgaaattatatagattagatctcagtatttaaactgttcctcaattttgtgaggctgtgttggaaataacccgcctctagtgctgttggtatgcaaggcagcggtgcttaatcaatatttcctgtgctcaccagaggcaaaatgtaccaatatcctgacaccattctctctccatttacttctggtggttaccctgactcttgactcttagaagtgcccgagatggggctaacctttattaaacagatcgcatattatgatcttgctgcagccacagtgcagctccacattaactctacagaccaaaccatttgtatctggcatcacttactaacacacgacatgcggcttttctgcatcaactgctatgacggttaagaatgtcagtatacaagaaggaatagaaaactgatactgttttaaataatctgtaatttcaannnnnnnnnnnnnnngctgaaatacattatattgtacgtttgagataattctagtacaaagtataataaaactagatgtataataaaccctttaaatcattggtaagtgtacaagtggtggaactgaagcatttactggacaaagtaatgttactctaatggttacttgctcgtgcgttgccacactgtgttataatttgcttcatttccttgctatttgatacatagtgtgcatttctctgtcactgtaactattgtaatgacaaattttcatcttactgcacaatcaaaatgacattgataggaatgaactccagaggctgggcctgaacagggaggtggtcgctcaggcctggtgctcagtcgtacgacctgtacctctcaacttttgccctatctgttaaatatatgctatgtcattaaatgctttt

SEQ ID NO: 310271 - DNA, 439 bp, Homo Sapiens
ttagatttaaaagcatttaatgacatagcatatatttaacagatagggcaaaagttgagaggtacaggtcgtacgactgagcaccaggcctgagcgaccacctccctgttcaggcccagcctctggagttcattcctatcaatgtcattttgattgtgcagtaagatgaaaatttgtcattacaatagttacagtgacagagaaatgcacactatgtatcaaatagcaaggaaatgaagcaaattataacacagtgtggtcaacgcacgagcaagtaaccattagagtaacattactttgtccagtaaatgcttcagttccaccacttgtacacttacccaatgatttaaaggggtttatttatacatctaggttttatttatactttgtactaggaatttatcttcaaacggtaccaatataatggtattttccggcc

SEQ ID NO: 310272 - DNA, 2529 bp, Homo Sapiens
  misc_feature (1223)..(1223): n is a, c, g, or t
  misc_feature (1229)..(1229): n is a, c, g, or t
  misc_feature (2311)..(2343): n is a, c, g, or t
agaccgcagggggtaagaagccctcggggcgtgtgctgggcgccaccagcccagcacacgtaccctagatcgtgggcggggggtggggcctcacgcggacccggcagcggagtgcggggggttatagaaaagaggcgatagtgtgcgcgcccccgaaggtatcgtgggcgcccgcgaggcatttctttgtgatttagatcctgccaccccgggcactgtatgtgtctcacaccaccgtcgggggccgcgcacgactgtttgatctcttcgttcgctcccaccaatcatgggactccatcccgcgggcgagggtttgtgtaggtatactgcgcgtcatcgggacgcgatatatcccgcgacacggtttgtcctcgtgaattaacgccacggccgccccagtattcagaggggggagggtgctaccacggctccgtggcgggctgcgtaagccagaaccttcttatgcagaaaagaagaggtgggtcgctcagcagcggcctccgttgtactccatatcatcgattgctccgcggaccgccggcgcggcggttcagactgtatagatgatgggaggagtctcggcggttgaggcagcgcccgcgctgaggtaatgggcgcccgcccataatgacccctcggagagggtgcctgctttgggggttggtttgtggagaaacacccttggtttgcccccccgggggggcgttgtttttgtgggggggaatacccccagcccccttgcgatatcgcccagggtttttcctggggaaaaacaatataccgccaggttccggggcgcctgtggggggcgggcggcgccaaaagagggttttggatggatttttgttggggccagggggccccccccatgtcgtgtggttggggtttatgggcatgcaaggttaggtctttctcgtgggttgtggtagccatgtttttgtgttctatgttgggtgggagggaggtagggtttgtgttgtttgtgtgtgtgggtgataaaagtaaccactgtaaatttattatgcattaggaagcttaacctaaaaaccaatagcatagtaaaaagatatgttatctctgttcatagcagaacaggtttcaaaatatattttcttttaaatgtattcagtcagtacacaatcctttataaaagttgtatatatttttttctgtcaataccttcattacatttataaatacaagatttacacagcaccccatcnaaaaanaaaaattaaaaccctttacaaatatctacatatatttcatacctataaaactttcaaaggggtgctctgttaaaggtgggccctagttaatggtccatttactggtgcagcaaaatacatataaatctgtaaagttttctttgtccataaaacatctcaaaaaatagcaagacacttatcgtgaaactcagcttcataaaaccttattttagaaaggaacttaatgtgcgtattcccatgcgattcaaaagttaaacagattgaaataaagatgaattgaaaacaaatgcatactcagagcagttaaggcaggagtgtgatggatgagaaaaactttgagaagcaggacatggaagacatgggaagaagcaaatcataataatgcctttgagtctgaacttggatataaacttcactcgtatccagttactaactctcatcctacttaggaatttccaaattgttaataactttcttagaagcagcctacaatctctatgttgccaccagaatgcttgagttgtttttttcttctgtaaaatcaccttggacccaaccaggacaccaggtccaggaatctgagttgttgagttttacatgatttaagtttgtaatgaaaatttctttcatctagtaaaggtaattactattcaatattattatgtccagaagtgtatatatgctgagtttcattctagctaagaatagaaagtagaataaaaggagactaggtttttatttgacctttgaacaaagacagtagatccctgatactgagtgactctttaagagtggccactcatcaacacctatgggctgattcagagaaacaggaaggtagaaattaagaagagattctttacctgaaatcttgccagagatggcagtcccgctactgttctgtgccttctgctgaaaagggcatggaaagattgctgccactcttactctatagtcattacaggaaagccatcctttctaccagagagatgactttttctatttgagtttcaccttgggagttgcacattatttgcaaggaagtatttcaaatcttatcttgttctaatgtataaacaggnnnnnnnnnnnnnnnnnnnnnnnnnnnnnnnnncaggaggaggatgagcagaatgatggcggtggtatttatcaaacttggccctgaaggatgccgctagcgtctcccatccagcaccatgaagtcaccaggggtgtggctccctccatggctctcagagatggcgtatgcagaatcccactttctgccgagtttacagctcagtgcactgattccccc

SEQ ID NO: 310273 - DNA, 792 bp, Homo Sapiens
tttcagtgtgttatcctttaatgaaaagctgggtcaatggagtcaccactctccccaagacccccctgcagcagatagccctcaccatggctacctatgaggcagggcagccctgtggcagccagccctgctgaggggtcagtttgtagtggcctaggagaggcgttcaactcttagacctaggatgtggcagcagcaacaaggccagaggcagctcaactgaggtcagggatggtggaggaggcagacaggaagcatggggctctcctccttcctctccgaatcccagtgtggccaaggccagttgttcaggaacagtacagttttccccaggggcctggagtctcttccagccactctctggaagcccttagtccccaactccctgcagaccggtgtcacagggtcgctggactcggggagcaggctgggtactaccccatgagccttgaggccccgggtctaggaggtggatccagcagggccgatgccagagccaccaggagactgggagtcaccttccactaactctgcttgtcagtcactacaggcacctaagaaggtggcctctcctccgagcttccagggctgcccaggccaggctccacagcagctgcaatctgctggagccgatagcccagctgcatcttctgggccgtgccatcctcctccagggcagtgatgatctggtcatagtacttgttgatgtacttgtagagttcatgcagggccactcgcgccccgaggtctccggagtagttccaggacagttcagccaggacagagttcatc

SEQ ID NO: 310274 - DNA, 643 bp, Homo Sapiens
tgatctggaggagggggtaatttatttaatttgttgactctggcttacaattttgtcttctgtttccatatctgggtcattagaagccccttcaatcccatcatcccttttcccttcaaatcagggcaactcagagatagctttcttggctggggggcctgttggcttttccttttctctcgctttttcctcatacatcaggatcatttttaggatggcagatctcttgcccagcatcatcctgagaaagtcagggtagctgaacgtctccccggagccactggacacctctccaattaatttctttagctctaggtgagtcttggggactccaagtttctccagcattcgtttcagggacatgatatcaatatcgccatttccattaaggtcaaactccatgtatttctctttgaagccttccagtttggagggcagatcctcatcactgctatatttgggatcgtctaggaattgcttgttgatctcatccagcctctcttcctgctgggccttcagcagtccgaaagcttttcctccctgtaaatccctggtttggctcatagctcagcagatgctggtagaggtggggagacagaccaagctggaggcctctgtctgcaggctctccttctctcgtgcc

SEQ ID NO: 310275 - DNA, 335 bp, Homo Sapiens
ttggttgacctgaagttgaaaacaaacagatccctcccccagaaggccatgaagccagaagtagggctgttttccaaaacaatgtgcctaaagggcccccaaatggtaagggggccactgaaattgggagcaataggcttatttgctggatgtactgaattctgacaagcactttgtgtacttaaggtcgaaggtagctggacagaagagggaacactgtgaggtcttttaatgtgattgacactgaggactgcaacagatgaattttgcactgaagctgaattcttgtgaggggcagttgtgccatgagggggtggtctaatagcaggggtttc

SEQ ID NO: 310276 - DNA, 718 bp, Homo Sapiens
cttctttcagtgggagggagctattgagaggaacaaagagcttataaatacattaggacctggaattcagttgtcgagccaggacggtgacagcgtttaacaaagcttagagaaacctccaggagactgctatcatggcagagaagcccaagctccactacttcaatgcacggggcagaatggagtccacccggtggctcctggctgcagctggagtagagtttgaagagaaatttataaaatctgcagaagatttggacaagttaagaaatgatggatatttgatgttccagcaagtgccaatggttgagattgatgggatgaagctggtgcagaccagagccattctcaactacattgccagcaaatacaacctctatgggaaagacataaaggagagagccctgattgatatgtatatagaaggtatagcagatttgggtgaaatgatcctccttctgcccgtatgtccacctgaggaaaaagatgccaagcttgccttgatcaaagagaaaataaaaaatcgctacttccctgcctttgaggctgacattcatctggtggaacttctctactacgtcgaggagcttgactccagtcttatctccagcttccctctgctgaaggcccttgaaaaccagatcagcaacctgcccacagtgaagaagtttctacagcctggcagcccaaggaagcctcccatggatgagaaatcttt

SEQ ID NO: 310277 - DNA, 1098 bp, Homo Sapiens
taatttatagtttccatttttactgaatttttaattccaggaaaatggttggctaggagaagattggaaatctgaattcacatcagatcctaatgaaaacaaatcaattttaactaagtcagcgaataggagttgtattatttaattagcatataatttgaaagagttcattagcttcacaacaggcacaatcaacacttaggtaaagtactttattgttgcaaaactttagaacattggtattgcaagttcttggcctccatgactgcgttattaaaacctgaaaatcttccttgcttcttctaaagatttctcatccatgggaggcttccttgggctgccaggctgtagaaacttcttcactgtgggcaggttgctgattctggttttcagggccttcagcagagggaagctggagataagactggagtcaagctcctcgacgtagtagagaagttccaccagatgaatgtcagcccggctcagcttgttgccaacaaggtagtcttgtccatggctctttaagactttttcaaaggcagggaagtagcgattttttattttctctttgatcaaggcaagcttggcatctttttcctcaggtggacatacgggcagaaggaggatcatttcacccaaatctgctataccttctatatacatatcaatcagggctctctcctttatgtctttcccatagaggttgtatttgctggcaatgtagttgagaatggctctggtctgcaccagcttcatcccatcaatctcaaccattggcacttgctggaacatcaaatatccatcatttcttaacttgtccaaatcttctgcagattttataaatttctcttcaaactctactccagctgcagccaggagccaccgggtggactccattctgccccgtgcattgaagtagtggagcttgggcttctctgccatgatagcagtctcctggaggtttctctaagctttgttaaacgctgtcaccgtcctggctcgacaaccgaattccaggtcctaatgtatttataagctctttgttcctctcaatagttccctcccactgaaagaagggtcaagttagggaaaaagcac

SEQ ID NO: 310278 - DNA, 745 bp, Homo Sapiens
cacacaggcacaacactcaggtgagtcattgtgcaaaactttagaacattggtatgcaagttcttggcctccatgactgcgttattacaacctgaaaatcttccgtgcttcttctaaagatttctcatccatggaaggcttccttggcagggccttcagcagaggaaagctggagataagactggagtcaagctcctcgacgtagtagagaagttccaccagatgaatgtcagcccggctcagcttgttgccaacaaggtagtcttgtccatggctctttaagactcaaaggcagggaagtagcgattttttattttctctttgatcaaggcaagcttggcatctttttcctcaggtggacatacgggcagaaggaggatcatttcacccaaatctgctataccttctatatacatatcaatcagggctctctcctttatgtctttcccatagaggttgtatttgctggcaatgtagttgagaatggctctggtctgcaccagcttcatcccatcaatctcaaccattggcacttgctggaacatcaaatatccatcatttcttaacttgtccaaatcttctgcagattttataaatttctcttcaaactctactccagctgcagccaggagccaccgggtggactccattctgccccgtgcattgaagtagtggagcttgggcttctctgccatgatagcagtctcctggaggtttctctaagctttgttaaacgctgtcagcg

SEQ ID NO: 310279 - DNA, 337 bp, Homo Sapiens
  misc_feature (86)..(86): n is a, c, g, or t
ctggttctagagctctcagtaagtctgatatgctgatagtatacgtgcatcgtgtgagtgtactgtatatactgatcgatagagtntgacggtacaggagcaggaagaatttctcttctcctttctctagactggatctagtctatgaccttcttcttcaacaaaaggatttcccggatggaaagaaacacgaggttgagagggtccaggaaaactagatgaaggtgggttatcatctcctaaactccaaggaatatttcccggagtagaagttgcccttggaggtgaaggtgccctgggatgaatcccaggtatagagggcaaacttggtaacatc

SEQ ID NO: 310280 - DNA, 1313 bp, Homo Sapiens
ttgttaagacaggaaacacatttattgagagcacagtggggtgcgccaagccctgtgctttggaaccgcatcacagcgcccctcacaacagccctgtgaggtaggtgaaggagcccacttcccacatgcagacactgaaggctcaacagctcccctaggcctcagggttcctgcggggtgggcaggggtccagcccacgggtctgaccccaggtcagcggcgtccatcagtcagagggcgggtctctactcaaggggaggccccgggtccagagtctctgggtccagcctgtcccgtgggaataggtgcagggtgtccccgtggctgtggagggatttcgagctggagaggggctggggtcccacattcgaggtcccttcccacgtaggcatccaggttgatggcttccgcccaaaccaggaaggagacgagaggcccgccaggaagaagacttgggtccgggatggtgggccccatcagggcctcttccgcagcttccatccgcagttcttcagccgacccagccgggccacggcccacgtgccagggcacgatcacgaggggtctctgggatgggacaggagtctgtccatagccctgaggccaggcccacaggaggaggcactggaggatgcttggcaggagatggagacaccagcaggggcttgtcgggggcactgggaacctgctggaaacaggcagctggagtgggagtggctcctggggcaggggagtggtactcagaccacaggagggccaggtgaccacaggtatgggcttggcagggagaaccagcctgctaggcagagggctgtggagctgagccctggagcccagggactgaggcagagaaggggaggttggtcaggcccacctcaggagacagagcaaagcggagtgccgggtgggtgaggaagctggccgctggagagccaccagggagagcaagccagcagccgggcagaagcagagcctgcagatgctccctggaggtttcccctgctggtcctcggcatgggaggtgggccccagcagctgctagagagtgaaggagctggaccaagccccgggggaggaaggcatcacggcaagggaagggtcgcagtcacaaccacacctcgagagggagacctgtggccaaagccgggggggcacacactacagctgttcccgtgcccactttggtcctgagagactcagggccaggggtccagaacagttcagcatcaggaatggggcggggaaggcagagagggagaaggggctggctccgaccagagcagagccctggggatagcttgaatctgccctca

SEQ ID NO: 310281 - DNA, 1006 bp, Homo Sapiens
  misc_feature (6)..(6): n is a, c, g, or t
  misc_feature (15)..(15): n is a, c, g, or t
  misc_feature (18)..(19): n is a, c, g, or t
  misc_feature (28)..(28): n is a, c, g, or t
  misc_feature (36)..(36): n is a, c, g, or t
  misc_feature (45)..(46): n is a, c, g, or t
  misc_feature (59)..(59): n is a, c, g, or t
  misc_feature (65)..(65): n is a, c, g, or t
  misc_feature (76)..(76): n is a, c, g, or t
  misc_feature (209)..(259): n is a, c, g, or t
  misc_feature (261)..(316): n is a, c, g, or t
tttttncttccaganaannaggaccttntcgacganactgaatcnncagctacctcatnacgtcncagcctcttcntcgacaagcccgagattagccctgatgcaaggggagcccgtggacaagggctgccttggagtgctgttggagaataaataagacaagtaagacaagcaagaggggtgggaagggactgacctgtcaaaccttnnnnnnnnnnnnnnnnnnnnnnnnnnnnnnnnnnnnnnnnnnnnnnnnnnncnnnnnnnnnnnnnnnnnnnnnnnnnnnnnnnnnnnnnnnnnnnnnnnnnnnnnnnnattcccccagaaaaggataggaagatcttcagagaggtggggcgtgcctttggtgattcagtagcatgctcattccagaagcccacccagggccttggagttgccagcaggatgctggccaagcccttggcccaggtccccctcctgagaatttcccaaagggatccttccattcaggacatcataagggtgatgacagagtcagtcgacaaagactgacacccccttggggagggaaacactccagtttgctagcaggtgaacacaagcaaagacttataggaaagtactcatagagtcaaagtatgagcatagcaaaggtcagggcttaatgcccaatgccccctcactagggcattggtttaagtctttaggtaagagggacagctggctggtcagttccggtcctcttcatcctttgccatcctggtcctgggggtcagtgagtggctgctttgtatgttggtgggatccaggaaaccgtgctcctagtgccctcgtgaggtgtagatgggcagcaggccccttggcagcagctcagcatggagaggaggtggtccttgaagacaaggaggtggacggatgatgtcatccctgaggagagacccgggtgagggatcctctcgtgggcgccccagctctcctgaggagccgccgccaaggccagcgagccaaggcgcgctccctatc

SEQ ID NO: 310282 - DNA, 1138 bp, Homo Sapiens
gagcttttaccagtggtttttacatccttaatgttcaggacgaataatttatggtcagtgaaaatccaggccccagtgagattcgagtgggctgtaaaatcgagagtcctgctcccagtgagtaatggtagtgaatgtttctgtcactttttgcaaccgtccattcatttgatcctcacaactccctgtcctgagccaggaccggccactgccactcccagggaaacagaggctgtcaagaggctccacagattgggccccactggatcattgaacccctgttccctgagttctagaggaagaattgtacctgtctcagtcccggccacctccagaaggcctccctctgcatttctgactttgctgtgccggcagcctggagcctcccaggtccctgctgtcatcttttctagccactacagtctctgtctttcctttcacagccaagcttcttgaaaggcctgtctacacttgctgtcttccttcctcacctccaatttcctcttcaacccactgcttcctgactcgctctactccgtggaagcacgctcacaaaggtaaagacttttctgtggcttaatccttgtcatgttttcggctcatggacacaaggacacattttcatgccttctctcacagggctctgcgtctccggttcacttctgtgtctttacactcccttcacagagacacttgctcccccttctctcgttcttagcatcccctaggaacttgcacacccaggtctctcgacttctggacctgcttcttaccatgccgtcttaagcagtcaggagtcgctgcctcgggttcgagtcctagttaaattacttagtgctgagaccttggggtaggtaaacttttccaagccaggtttatctcagtttcaaaatagggttaatcgtctttatctggcaggtcaggtgggatgtctcacaggtaagcaccagatgccatttgaaaggcttgaagcaaagtcaataaagcattcatgggaaaatacaactggaggcaccactagattttcgtatacattaggttccacggggaggaccgaagagagaagaaagaagtggaaagggaggagcgtgcaggagagacaggagaagagaataactaaacaaagacattaaagaca

SEQ ID NO: 310283 - DNA, 423 bp, Homo Sapiens
tgtctttaatgtctttgtttagttattctcttctcctgtctctcctgcacgctcctccctttccacttctttcttctctcttcggtcctccccgtggaacctaatgtatacgaaaatctagtggtgcctccagttgtattttcccatgaatgctttattgactttgcttcaagcctttcaaatggcatctgggtgcttacctgtgagacatcccacctgacctgccagataaagacgattaaccctattttgaaactgaggataaaccggggcttgggaaaagtttacctaccccaaggtctcaggcactaaggtaatttaactagggactcggaacccagggcaggcgactcctgaactgcttaaggacgggcatgggtaaggaaggcagggtccaggaaggtcgaggagacctgggggtgt

SEQ ID NO: 310284 - DNA, 654 bp, Homo Sapiens
cccgctgaatggacttcgcactggacagaggcaagacttaaatgagaagccaaagaaatgtcggctccatcaccaaaattagaagtgtgcttaagaacccacattcgccccggcccggcggtggccaattcacctcattatgataatcagtgtgtttttccctcgcagacaaagaaggatccttatgcgacgaatactggaatccagcagctaacctcattaacgtctgcagcctcttcccttcgaacaaggccccgagattaaccctgtgttcattaagggaaaagggcggaaagtggaataaaactgaaaaacaccgccagggtaagggggaggggaggcccttttctgttagccattcattcactgaaatacttcgtgtaccttcaggatttaatcaccagcaaagggggcggtagggagggggcagggtttaccaggatgtgggaggtaaagaggttaaactcgatggaaggagttaaaaacccagaatagggtgatttgatgtgaaagcttcctgggatttgtcactgggataatcaatttaaaaccttcttcccatttgctttcttttagcccaactaacgtaaggggaaaccgtctttggatgtgtttttggtggcttttaatattttctaagtctccctttcctac

SEQ ID NO: 310285 - DNA, 1128 bp, Homo Sapiens
  misc_feature (18)..(18): n is a, c, g, or t
  misc_feature (43)..(43): n is a, c, g, or t
  misc_feature (61)..(61): n is a, c, g, or t
  misc_feature (93)..(93): n is a, c, g, or t
  misc_feature (98)..(98): n is a, c, g, or t
  misc_feature (102)..(103): n is a, c, g, or t
  misc_feature (124)..(124): n is a, c, g, or t
  misc_feature (127)..(127): n is a, c, g, or t
  misc_feature (325)..(375): n is a, c, g, or t
  misc_feature (377)..(432): n is a, c, g, or t
aagactgggccggatggngccccacgaggcctctccgcagctnccaccgcagtcttcaccnacccagccggccacgccccacgccctcattangatanccanntgtttttcctcgcagacaaangangatccttatgcgaccgaatactgaatccagcagctaacctcattaacgtctgcagcctcttccttcgacaaggcccgagattagccctgatgcaaggagagccccgtggacaagggctgcctggagtgctgttggagaataaataagacaagtaagacaagcaagaggggtgggaagggactgacctgtcaaaccttnnnnnnnnnnnnnnnnnnnnnnnnnnnnnnnnnnnnnnnnnnnnnnnnnnncnnnnnnnnnnnnnnnnnnnnnnnnnnnnnnnnnnnnnnnnnnnnnnnnnnnnnnnnattcccccagaaaaggataggaagatcttcagagaggtggggcgtgcctttggtgattcagtagcatgctcattccagaagcccacccagggccttggagttgccagcaggatgctggccaagcccttggcccaggtccccctcctgagaatttcccaaagggatccttccattcaggacatcataagggtgatgacagagtcagtcgacaaagactgacacccccttggggagggaaacactccagtttgctagcaggtgaacacaagcaaagacttataggaaagtactcatagagtcaaagtatgagcatagcaaaggtcagggcttaatgcccaatgccccctcactagggcattggaagtctttaggtaagagggacagctggctggtcagttccggtcctcttcatcctttgccatcctggtcctgggggtcagtgagtggctgctttgtatgttggtgggatccaggaaaccgtgctcctagtgccctcgtgaggtgtagatgggcagcaggccccttggcagcagctcagcatggagaggaggtggtccttgaagacaaggaggtggacggatgatgtcatccctgaggagagacccgggtgagggatcctctcgtgggcgccccagctctcctgaggagccgccgccaaggccagcgagccaaggcgcgctccctctctgctctccg

SEQ ID NO: 310286 - DNA, 1561 bp, Homo Sapiens
  misc_feature (14)..(14): n is a, c, g, or t
  misc_feature (98)..(98): n is a, c, g, or t
  misc_feature (100)..(100): n is a, c, g, or t
  misc_feature (173)..(173): n is a, c, g, or t
  misc_feature (208)..(208): n is a, c, g, or t
  misc_feature (217)..(217): n is a, c, g, or t
  misc_feature (219)..(219): n is a, c, g, or t
  misc_feature (226)..(226): n is a, c, g, or t
  misc_feature (252)..(252): n is a, c, g, or t
  misc_feature (261)..(261): n is a, c, g, or t
  misc_feature (265)..(265): n is a, c, g, or t
  misc_feature (276)..(277): n is a, c, g, or t
  misc_feature (280)..(281): n is a, c, g, or t
  misc_feature (286)..(286): n is a, c, g, or t
  misc_feature (299)..(299): n is a, c, g, or t
  misc_feature (306)..(306): n is a, c, g, or t
  misc_feature (309)..(309): n is a, c, g, or t
  misc_feature (315)..(315): n is a, c, g, or t
  misc_feature (317)..(317): n is a, c, g, or t
  misc_feature (326)..(326): n is a, c, g, or t
  misc_feature (333)..(333): n is a, c, g, or t
  misc_feature (348)..(348): n is a, c, g, or t
  misc_feature (371)..(371): n is a, c, g, or t
  misc_feature (376)..(376): n is a, c, g, or t
  misc_feature (389)..(389): n is a, c, g, or t
  misc_feature (402)..(402): n is a, c, g, or t
  misc_feature (428)..(428): n is a, c, g, or t
  misc_feature (438)..(438): n is a, c, g, or t
  misc_feature (501)..(501): n is a, c, g, or t
  misc_feature (540)..(540): n is a, c, g, or t
  misc_feature (550)..(550): n is a, c, g, or t
  misc_feature (553)..(553): n is a, c, g, or t
  misc_feature (556)..(556): n is a, c, g, or t
  misc_feature (565)..(565): n is a, c, g, or t
  misc_feature (575)..(576): n is a, c, g, or t
  misc_feature (1506)..(1506): n is a, c, g, or t
  misc_feature (1537)..(1537): n is a, c, g, or t
cggagagcagaganggagcgcgccttggctcgctggccttggcggcggctcctcaggagaactggggcgcccacgagaggatccctcacccgggtctntnctcaagaggatgacatcatccgtccacctccttgtcttcaaggaccacctcctctccatgctgagctgctgcnaaggggcctgctgcccatctacacctcacgagggnactaggagnanggtttcntggatcccaccaacatacaaagcagncactaactnaccnaaaagaacagnnttnnaaagnatgaagaggaccngaactgnccngctcgntnttcattttnttttccnatttaaaccaatgcnctagtaagggggcattgggcatnaaacnctgacctttgctntactcatactttnactctattatttctttcctataagtntttgcttgtnttcacctgctagcaaactggagtgtttccctccccaagggggtgttagtttttgttgactgantatgttatcacccttatgatgttctgaatggaaggatcnctttgggacnttntcnggagggggncctgggccannggcttggccagcatcctgctggcaactccaaggccctgggtgggcttctggaatgagcatgctactgaatcaccaaaggcacgccccacctctctgaagatcttcctatccttttctgggggaatggggtcgatgagagccacctcctagggttgttgtgagaattaaatgagataaaagaggcctcaggcaggatctggcatagaggaggtgatcagcaaatgtttgttgaaaaggtttgacaggtcagtcccttcccacccctcttgcttgtcttacttgtcttatttattctccaacagcactccaggcagcccttgtccacgggctctccttgcatccaggtaggggctttgcagagaccatcgacgggctgacttgagtaagaacacgaattatgcatgtggccatttcccagagcactttcctatgtgatatgaacatgtgatttttatgtaatatgtgtatgtaaacgagggcagcctcatttccagggtgagggatgcatttggtagtgttgatttttgtaatttaaagaagctgaaagggagagaggacccgtgaggactgaactctctgtcccatggggtagggcttacatttacattaaagaaacagaaacttgctgggaggtgtaagtatttggtcacattgctggcaacagaaggggttggagttggacccagggtgccacgctagctgccctcaccccttcttcccctctggcccagagttatactaagagtccttttatttcaaaccaaatgtttgacaatgggacagtctgtttgaaatcccagggaaacagaggctgtcaagaggctccacagattgggccccactggatcattgaacccctgtttccctgagttctagaggaagtattgttacctgtcttcagttcccggccacctccagaaggcctccctntggcatttctgaatttgctgtgccggcagcngggagccttccaggtcctgctgtt

SEQ ID NO: 310287 - DNA, 814 bp, Homo Sapiens
  misc_feature (109)..(109): n is a, c, g, or t
  misc_feature (208)..(208): n is a, c, g, or t
  misc_feature (213)..(213): n is a, c, g, or t
  misc_feature (250)..(250): n is a, c, g, or t
  misc_feature (554)..(604): n is a, c, g, or t
  misc_feature (606)..(661): n is a, c, g, or t
aggggttggggtcccaccttcggggggcccttcccccgtaggcatccaggtgatggcttccgcccaaaccagaaagagccgaaagggcccccagaaagagacttgggtncgggatgttgggccccatcagggccttcttccgcagctcccatccgcagttcttcagcgaccccagccggggcacgggcccacgtgcctcattatgaantatcnagtgtgtttttccttcgcagacaaagaaggatccttnatgcgacgaatactggaatccagcagctaacctcattaacgtctgcagcctcttccttcgacaaggcccgagattagccctttgtgagcgtgcttccacggagtagagcgagtcaggaagcagtgggttgaagaggaaattggaggtgaggaaggaagacagcaagtgtagacaggcctttcaagaagcttggctgatgcaaggagagcccgtggacaagggctgcctggagtgctgttggagaataaataagacaagtaagacaagcaagaggggtgggaagggactgacctgtcaaaccttnnnnnnnnnnnnnnnnnnnnnnnnnnnnnnnnnnnnnnnnnnnnnnnnnnncnnnnnnnnnnnnnnnnnnnnnnnnnnnnnnnnnnnnnnnnnnnnnnnnnnnnnnnnattcccccagaaaaggataggaagatcttcagagaggtggggcgtgcctttggtgattcagtagcatgctcattccagaagcccacccagggccttggagttgccagcaggatgctggccaagccctggcccaggtccccctcctgagaattt

SEQ ID NO: 310288 - DNA, 1266 bp, Homo Sapiens
tttttgttaaaacaggatacacatttattgagagcacagtggggtgcgccaagccctgtgctttggaaccgcatcacagcgcccctcacaacagccctgtgaggtaggtgaaggagcccacttcccacatgcagacactgaaggctcaacagctcccctaggcctcagggttcctgcggggtgggcaggggtccagcccacgggtctgaccccaggtcagcggcgtccatcagtcagagggcgggtctctactcaaggggaggccccgggtccagagtctctgggtccagcctgtcccgtgggaataggtgcagggtgtccccgtggctgtggagggatttcgagctggagaggggctggggtcccacattcgaggtcccttcccacgtaggcatccaggtgatggcttccgcccaaaccaggaaggagacgagaggcccgccaggaagaagacttgggtccgggatggtgggccccatcagggcctcttccgcagcttccatccgcagttcttcagccgacccagccgggccacggcccacgtgcctcattatgataatcagtgtgtttttccttcgcagacaaagaaggatccttatgcgacgaatactggaatccagcagctaacctcattaacgtctgcagcctcttccttcgacaaggcccgagattagccctgatgcaaggagagcccgtggacaagggctgcctggagtgctgttggagaataaataagacaagtaagacaagcaagaggggtgggaagggactgacctgtcaaaccttttcaacaaacatttgctgatcacctcctctatgccagatcctgcctgaggcctcttttatctcatttaattctcacaacaaccctaggaggttgctctcatcgaccccattcccccagaaaaggataggaagatcttcagagaggtggggcgtgcctttggtgattcagtagcatgctcattccagaagcccacccagggccttggagttgccagcaggatgctggccaagcccttggcccaggtccccctcctgagaatttccaaagggatccttccattcaggacatcataagggtgatgacagagtcagtcgacaaagactgacgaccccttggggagggaaacactccagtttgctagcaggtgaacacaagcaaagacttataggaaagtactcatagagtcaaagtatgagcatagtataggttaggccttaatgcccaacgcctcctcactaggtcatcgtttccaagtcctt

SEQ ID NO: 310289 - DNA, 1012 bp, Homo Sapiens
  misc_feature (60)..(60): n is a, c, g, or t
  misc_feature (586)..(636): n is a, c, g, or t
  misc_feature (638)..(693): n is a, c, g, or t
ttttaacccccagtcaacggcgtcccatcaatcaaaaggcgggtctctactcaaagggangccccgggtcccagagtctctgggtccagcctgtcccgtgggaataggtgcagggtgtccccgtggctgtggagggatttcgagctggagaggggctggggtcccacattcgaggtcccttcccacgtaggcatccaggtgaattgttccgcccaaaccaggaaggagacgagaggcccgccaggaagaagacttgggtccgggatggttgggcccatcagggcctcttccgcagcttccatccgcagttcttcagccgacccaagccggccacggcccacgtgcctcattatgataatcagtgtgtttttccttcgcagacaaagaaggatccttatgcgacgaatactggaatccagcagctaacctcattaacgtctgcagcctcttccttcgacaaggcccgagattagccctgatgcaaggagagcccgtggacaagggctgcctggagtgctgttggagaataaataagacaagtaagacaagcaagaggggtgggaagggactgacctgtcaaaccttnnnnnnnnnnnnnnnnnnnnnnnnnnnnnnnnnnnnnnnnnnnnnnnnnnncnnnnnnnnnnnnnnnnnnnnnnnnnnnnnnnnnnnnnnnnnnnnnnnnnnnnnnnnattcccccagaaaaggataggaagatcttcagagaggtggggcgtgcctttggtgattcagtagcatgctcattccagaagcccacccagggccttggagttgccagcaggatgctggccaagcccttggcccaggtccccctcctgagaatttcccaaagggatccttccattcaggacatcataagggtgatgacagagtcagtcgacaaagactgacacccccttggggagggaaacactccagtttgctagcaggtgaacacaagcaaagacttataggaaagtactcatagagtcaaagtatgagcatagcaaa

SEQ ID NO: 310290 - DNA, 1073 bp, Homo Sapiens
  misc_feature (13)..(13): n is a, c, g, or t
  misc_feature (35)..(36): n is a, c, g, or t
  misc_feature (217)..(217): n is a, c, g, or t
  misc_feature (1048)..(1048): n is a, c, g, or t
caaggccctgggnggcttctgaatgagcatgctanntaatcacaaaaagcacgccccacctctctgaagatcttcctatccttttctgggggaatgggtcgatgagagcaccctcctagggttgttgtgagaattaaatgagataacagaggcttcaggcaggatctggcatagaggaggtgatcagcaaatgtttgttgaaaaggtttgacaggtnagtcccttcccaccccctcttgcttgtcttacttgtcttatttattctccaacagcactccaggcagcccttgtccacgggctctccttgcatcagccaagcttcttgaaaggcctgtctacacttgctgtcttccttcctcacctccaatttcctcttcaacccactgcttcctgactcgctctactccggtggaagcacgctcacaaagggctaatctcgggccttgtcgaaggaagaggctgcagacgttaatgaggttagctgctggattccagtattcgtcgcataaggatccttctttgtctgcgaaggaaaaacacactgattatcataatgaggcacgtgggccgtggcccggctgggtcggctgaagaactgcggatggaagctgcggaagaggccctgatggggcccaccatcccggacccaagtcttcttcctggcgggcctctcgtctccttcctggtttgggcggaagccatcacctggatgcctacgtgggaagggacctcgaatgtgggaccccagcccctctccagctcgaaatccctccacagccacggggacaccctgcacctattcccacgggacaggctggacccagagactctggacccggggcctccccttgagtagagacccgccctctgactgatggacgccgctgacctggggtcagacccgtgggctggacccctgcccaccccgcaggaaccctgaggcctaggggagctgttgagccttcagtgtctgcatgtgggaagtgggctccttcacctacctcacagggctgttgtgaggggcgctgtgatgcggttccaaagcacnagggcttggcgcaccccactgtgct

SEQ ID NO: 310291 - DNA, 1265 bp, Homo Sapiens
  misc_feature (47)..(47): n is a, c, g, or t
  misc_feature (73)..(73): n is a, c, g, or t
  misc_feature (122)..(122): n is a, c, g, or t
  misc_feature (460)..(510): n is a, c, g, or t
  misc_feature (512)..(567): n is a, c, g, or t
  misc_feature (630)..(630): n is a, c, g, or t
  misc_feature (807)..(807): n is a, c, g, or t
  misc_feature (831)..(831): n is a, c, g, or t
aaagacttgggtccgggaatggttgggcccatcagggcctccttccngcaccttcccatccgccagttccttnacccgaacccaagacggccaggccccacgtgcctcattatgataatcantgtgtttttcctccgcagacaaagaaggatccttatgcgacgaatactggaatccagcagctaacctcattaacgtctgcagcctcttccttcgacaaggcccgagattagccctttgtgagcgtgcttccacggagtagagcgagtcaggaagcagtgggttgaagaggaaattggaggtgaggaaggaagacagcaagtgtagacaggcctttcaagaagcttggctgatgcaaggagagcccgtggacaagggctgcctggagtgctgttggagaataaataagacaagtaagacaagcaagaggggtgggaagggactgacctgtcaaaccttnnnnnnnnnnnnnnnnnnnnnnnnnnnnnnnnnnnnnnnnnnnnnnnnnnncnnnnnnnnnnnnnnnnnnnnnnnnnnnnnnnnnnnnnnnnnnnnnnnnnnnnnnnnattcccccagaaaaggataggaagatcttcagagaggtggggcgtgcctttggtgattcagtngcatgctcattccagaagcccacccagggccttggagttgccagcaggatgctggccaagcccttggcccaggtccccctcctgagaatttcccaaagggatccttccattcaggacatcataagggtgatgacagagtcagtcgacaaagactgacacccccttggggagggaaanactccagtttgctagcaggtgaanacaagcaaagacttataggaaagtactcatagagtcaaagtatgagcatagcaaaggtcagggcttaatgcccaatgccccctcactagggcattggtttaagtctttaggtaagagggacagctggctggtcagttccggtcctcttcatcctttgccatcctggtcctgggggtcagtgagtggctgctttgtatgttggtgggatccaggaaaccgtgctcctagtgccctcgtgaggtgtagatgggcagcaggccccttggcagcagctcagcatggagaggaggtggtccttgaagacaaggaggtggacggatgatgtcatccctgaggagagacccgggtgagggatcctctcgtgggcgccccagctctcctgaggagccgccgccaaggccagcgagccaaggcgcgctccctctctgctctcc

SEQ ID NO: 310292 - DNA, 781 bp, Homo Sapiens
  misc_feature (136)..(191): n is a, c, g, or t
  misc_feature (193)..(243): n is a, c, g, or t
  misc_feature (674)..(674): n is a, c, g, or t
  misc_feature (684)..(684): n is a, c, g, or t
  misc_feature (704)..(704): n is a, c, g, or t
  misc_feature (722)..(722): n is a, c, g, or t
  misc_feature (751)..(751): n is a, c, g, or t
  misc_feature (767)..(767): n is a, c, g, or t
ctgggccaagggcttggccagcatcctgctggcaactccaaggccctgggtgggcttctggaatgagcatgctactgaatcaccaaaggcacgcccgacctctctgaagatcttcctatccttttctgggggaatnnnnnnnnnnnnnnnnnnnnnnnnnnnnnnnnnnnnnnnnnnnnnnnnnnnnnnnngnnnnnnnnnnnnnnnnnnnnnnnnnnnnnnnnnnnnnnnnnnnnnnnnnnnaaggtttgacaggtcagtcccttcccacccctcttgcttgtcttacttgtcttatttattctccaacagcactccaggcagcccttgtccacgggctctccttgcatcagccaagcttcttgaaaggcctgtctacacttgctgtcttccttcctcacctccaatttcctcttcaacccactgcttcctgactcgctctactccgtggaagcacgctcacaaaggcacgtgggccgtggcggtctgggtcggctgaagaactgcggatggaagctgcggaagaggccctgatggggcccaaccatcccgggacccaagtcttcttcctgggcgggcctctcgtctccttcctggtttggggcggaacatttcaacctgggatgcctacgtgggaagggacctcgaatgtgggacccagcccttttcagttngaaaatcctncacagccagggggaaaactngaactatttccaaggganaggtggaaccagagatttggaacccgggnttccctttgagtaganaacccgccttttaa

SEQ ID NO: 310293 - DNA, 523 bp, Homo Sapiens
  misc_feature (145)..(159): n is a, c, g, or t
aaccatcatagttacaaagatcagtagtaaaaccttttcatcattgcccagaaatgattaggctttcatagacatacatacgcacccccccaccctcaatctcattcattcttacagctgttatctttataaacacatgtgcgtnnnnnnnnnnnnnnntacttcaggcctgcggcaccaccccatagagctggtgaggaagtaacttctgcttctcattgcaactgtagatccatcggggacgaacgaatgccagggaggggttgtccatcagggcctcctcaaagctgggatcccattcctgtgctgtgatcacaaactgaacccggtcactcatatagtcctcgagctccccattgaaggctgtgacgtatcggatgagtttctgccgctcgtccccagggaactccccgtaaagaaagaagtgcttgccctggaagaaatctgggagctcagggactggcagatcaggaggctcctggtgttcctcactgtccgtgttctcatccgtggagcctgcata

SEQ ID NO: 310294 - DNA, 468 bp, Homo Sapiens
  misc_feature (65)..(65): n is a, c, g, or t
  misc_feature (356)..(356): n is a, c, g, or t
  misc_feature (380)..(380): n is a, c, g, or t
  misc_feature (402)..(402): n is a, c, g, or t
  misc_feature (436)..(436): n is a, c, g, or t
agcagactcctgtcccatcccagagacccctcgtgatcgttccctggcacgtgggccgtggcggnctgggtcggctgaagaactgcggatggaagctgcggaagaggccctgatggggccaccatcccggacccaagtcttcttcctggcgggcctctcgtctccttcctggtttgggcggaacattcacctggatgcctacgtgggaagggacctcgaatgtgggaccccagcccctttccagcttcgaaatccctccacagccacggggacaacctggcacctattcccacgggacaggctggacccagagattttggaacccggggccttcctttgagtagagacccgccctnttgattgatggacgccgttgactnggggttaaaacccgtggggttngaaccttgcccaaacccggaagaaaccttgaggnttagggggagtttttgaagctttgaatttttt

SEQ ID NO: 310295 - DNA, 847 bp, Homo Sapiens
  misc_feature (809)..(809): n is a, c, g, or t
  misc_feature (816)..(816): n is a, c, g, or t
tgtttgtgttcaattaagaaattccagaataaataaaaatgaattaattcaacaaacattttctggggcaccgacaatctgcccagtgcaccaggctaggtatctgatacaaagataatgaaaacagtctcttggaacctaattggggtcctcatttgaccaggaatttctttcgtcccgttttaagccaaccagttttgtccggacaagacaaaaacaacttgggctgctttagagaagcccagctcagtgtagacaatagctgcccagcctctgaaaggggctgattggattatgtggcaaatggaggtgcaaggatgacttggacggtgacaaatgaagtggggcggagactggctttgagttaatccagggctattagggaggggaccttttgtcttccagagactggcagggagctttttaccagtggttttttacatccttaatgttcaggacgaataatttatggtcagtgaaaatccaggccccagtgagattcgagtgggctgtaaaatcgagagtcctgctcccagtgagtaatggtagtgaatgtttctgtcactttttgcaaccgtccattcatttgatcctcacaactccctgtcctgagccaggaccggccactgccactcccagggaaacagaggctgtcaagaggctccacagattggggccccactggatcattgaacccctgttccctggagttcttaggagggaaggaattgttacctgttcttcagttcccgggccaccttccaggaagggcctcccttttgcattttcttgaattttggctgttgccnggcagcngggggagcctcccagggtccctgttgttcat

SEQ ID NO: 310296 - DNA, 405 bp, Homo Sapiens
  misc_feature (14)..(14): n is a, c, g, or t
  misc_feature (59)..(59): n is a, c, g, or t
  misc_feature (85)..(85): n is a, c, g, or t
acctgcccaagatnaaagacgatttaaaccctattttgaaactgagaataaaccctggncttggaaaaagtttacctaaccccanaggtctcagcacctaagtaatttaactaggactcgaaccccaggcagcgactcctgactgcttaagacggcatggtaagaagcaggtccagaagtcgagagacctgggtgtgcaagttcctaggggatgctaagaacgagagaagggggagcaagtgtctctgtgaagggagtgtaaagacacagaagtgaaccggagacgcagagccctgtgagagaaggcatgaaaatgtgtccttgtgtccatgagccgaaaacatgacaaggattaagccacagaaaagtctttacctttgtgagcgtgcttccacggagtagagc

SEQ ID NO: 310297 - DNA, 1060 bp, Homo Sapiens
  misc_feature (719)..(719): n is a, c, g, or t
  misc_feature (1042)..(1042): n is a, c, g, or t
tttcattcattcatggttcattcattcatgtaaccaacatttctgagcatggcacttctggtgtgccaggtgctgggacacagagttgaattagaccactgtcccttggccttgaagagtttatttactcattcactcagcagcattcaccaagccctactgtgtgcattggctgggcaaggggtggtgttgggggtagagtgagcgttgctggcagggggagccggggtggatgtgaagcagcccacaggtcaggcctccatatctggaaagagcaggaacccggaaaagatgctgttggcaccctccatgcccagtagtgagttcttgtcggtggcctgcaggaagacgttctccccctgctccagcttgaggaccatgccaccggtggtgacctggaaggtgttgtaggcatagtcacagaaggtgaccaccttctgtgcacgctcccggccacgcatgaggttcacgcacaggttccctcgagagctggcgtggtaggtgaagtagtagagaccggggaccttgcaggtgaacttgccactgcggggctcataattgttgttcatgttggtgatcacgtggtcgaagcggatggtctggtcccggcgcagggggacgttgatggttcttgtggcagagaaggcgattttctgggtggccttgtagtctcccgattcacctttggggcctgggctccaggggcccctgggccaccntttatggcccatggggcccttggggccgacttttcctggattcccaggaatccctgggtctcccttctctccgaactcaccatggtctccagccagccctggaagccctttctctccttttatccctggggtcccaggttggccatcggggccaggtgtcccagggatacccgggatgccagggatggctgggggcccggtgcagctgagctgggcctgggagatatcgattaggcccaggagcaggagcaacatcagtactgggatgctgccccatgggatcttcatcatcatactgtgtcagactgcctcctgggaaagcntgtgtcctgtgaggccac

SEQ ID NO: 310298 - DNA, 512 bp, Homo Sapiens
tttttcccaacaaaaccagcactggtctttattgaggtgtcagggtagagtggcaggagcacagcctaaggacatgaaggtcagagtttctcagagaggaggggctgggtccctgagctaggaggagggcggtgggtgactcgggagctcatgagacttcaggaagtccctgtacttggccaggaaagggttggcaagagtgttcagctcttgccgaagctcctgcagagccttgtctcgctcttggggctcccctgtcacctgctgcctgtaatagttgatgtagaagttcatccagtcctccaccacagtcaccatgtcttcttcagagacgagaggatcattgaagacctgctgattcagcagaacgctgaactccttcaaatctgcggaaatgagatccttattggccttaagaagagccatctgccttcaggtctaacaggctgtatatgtctcacccacactcttgagggtgcgtgaatctctctgtgccaagctatagatgtagg

SEQ ID NO: 310299 - DNA, 2829 bp, Homo Sapiens
caagataaagaatgtatatattctctgggtaacagggatcaaacagatttttgagcaagaggacactgatgagaggtacgtgtaagggactggatcctgagtcgaagtctaagccgttgcagtggttgcaaccccacttacttctgtctcactcccatccaaacctcctaccctcaatccacaagcatttcaaaaccatgtttctaaaaaccagccatttatatctgtttaggtaagtaacaggagtgaggtggtgtatttacaagttggcttgtccagatatactataacttagtgtctgtatttaatattgacaaccaaaaatatatataaatatcttgcatctatacacaacagggcaggagtctccatgtcttcttgagcagtgagtttgcaggctcccacaggccctcttctcatggtaatagtgtggccctcagtgcaaaggagactagaacccggcagcccagactggcccttcccctctcctccctgcactccagtgctcccaactggtctcaggtaaagaaagattaatttgagtggttgggtaggaagagatgggaaggggcaaatcctaatggagcctgacccctagagtggggagatccaggccagcagaacgggtggccatagccacctcctgggatagaagctttgtagttcatagttcgattagtgtgtccttaggacataggtccagccctacagattagctgggtgaagaaggcaagtgtctcgacagggcttagtctccaccctcaggcatggaaccattcagggtgaagcctgggatgtgggcacaggagactcaggctgatataaaaataacaaaatcagtaataaaaaaattataaaacctgttgcttgtctgaatagatttgagcaacagtcttgcttttgttaaaatcctggagccgttaagtcctgaatattcttctggacatcattgctggctggagaaaggagccccaggcccggctcggctgacatctgtcaggtttggaagtctcatccagctgcctgtgctcctgagagatccttagggctgctgggagcaggccgggctggtgatctggggcgactcacacttgggaatcagcccccaggggatggaacagctcctcgggtgtcttgtcactttggctggctcccccctgccggaagccggaagcgatctcatcgaaggtccggcctttagtctcaggaactttgaagtaggtgaagatgaagaacagaaccaggagcacagtgaagatgatgaagacgtagggaccacacagttgctccacatactggaagcacatgcccacaatgaaatttgaggtccagttggagaagcctgcaacggcaatggcagctggacgtggaccctggctgaagagttcagccacgatgaaccatgggatggggccaggacccacttcaaagaaggccacaaagccaaagatggccacgatgctcagataggacatccagggtagctgctccagcagtgctagcgcgatggtcatgagtatggcacaacccgccatgccagcgaggcctatgaggtgcagggtccgccggcctgctcgctccaccacaaacagcgacacgacagtgaaggccgtgttgacgataccggagccaatggtggcatacacaggctgctgcacccccgccttctcgaagatgctcgtggagtaatagaagacagcgttgatgccagacagctgctgggacagctgcagcaccacagcgatgaggatgggctggcggtaggcgggggagcggaacagctccaggatggtgaccttcttctcccgcatcatctgccgactctcttccttcatctcctgcaggtcatgggtcacgtcagctgtcccgcgcagcttctttagcacactcttggccccggttctcctcgttgcggttgatgagcaggaagcggggactctcggggcagaagggcagcacgatgcactgcagcagggccgggatgaagatgatgctcagcagcaggggccacaggtccttgttgcccatgatggagtccaggccgaacacctgggcgatgaggatgccgacgacgatgcccagctggtgcagggtgcccagggccccacgaagggctgtgggtgacacttcacccaccatacatgggcacgaagcctgtggtcaggccgcagtacacaccgatgatgaagcggcccaggatcagcatctcaaaggacttgcccagtttcgagaagcccatgagcacggcggacacgaaggccagcaggttcatcatcagcattgaattccgccggccaaagcggttaacgaaaaggcccacagagaaggagccaatcatgcccccaacagaaaagatggccactgagagggaccagagcgtggtgagcgtggtgggcaggatgctctccccatagcggtggacccatgtctggttgtagaactcctcgatcaccttctggggggcattgatgactccagtgttgtagccaaactgcagggagccaagcactgctcctcccacggccagcatgaggcgacccgtcagcttcttgctgctgggctccatggcagcgctgcgctggtggctctggctgcgccgggtacgcgggtggcgacgggcgtgcgagcggcgctctcccgctcaggctcgtgctccggtccggggactcccactgcgactctgactccgacccccgtcgtttggtctcctgctccctggcgtgctcactcggggacccgcgactagcgaccggcacgctcgctgttgctaccctcgtgccgaattcgccacccaggcctcgctaccttaaaccctagggttactgccgt

SEQ ID NO: 310300 - DNA, 1047 bp, Homo Sapiens
agcccatacccaaatgtggtggcccatcagtcattctcgcaagggctcttgcataccgaggtcccccctgagaggatctgaattttccgccaatatactcgttgtgttccctcaccaagtttttctaccatagccgtaggccctgcttggctccagtgcaacgcccctgtgacgagacttcctgattccaaggtaggcagcaattgtgccaaaacgtgtggtaacaggagaatacgttgcccaacaggccccttgttagcaccgaatggtatttgcccgaagcctggttcttgggggcgctcacgatttacttgccaggtcccaggccagtgaatgtttccaatgcagaggaacttagatacatggggagcttggaccgtgattccccagggtatgtgcgtaaaaccatggccgcccatacgtatcttgctggccgtcaaaacttctagaggttcacgatcataggccaaacatgggctgtgtcactaaatgtaggactggggattcacgtgattttggtgtaatcttggatatcaagccatgagtttccctgtgcgccacatccccatggcgttcagccctgaatggttcctatgcctcgaggtctggagacctcaagcccttattcgacgacacttggccttcttcacccagcataatctgtagggctggacctatgtcctgaggacacagtgaatgtgaagctatgtaactagcaaagcttctatcccaggaggtggctgatggccaccgcgttctgctggcatggatctccgccactctaggggtcaggctccattaggatttgccccttcccatctcttccgtacccaaccactcaaattaatctttcgttacctgagaccagttgggagcatctcgagtgcagggagggagaggggaagggccagtctgggctgccgggttctagtctcctttgctactgagggccatcactattaccatgtgaagagggcctgtgggagccttgcaaactcactgctcaagaagacatggagactcctgccataactcccaggtgcaatt

SEQ ID NO: 310301 - DNA, 1006 bp, Homo Sapiens
aaggcccacctcttttgtggccccccggggttttccctccccttggccgggtttgaagagcccagggaaaagccgggggaccttcttcgggggcccagaaaggggccacccacggaatgccactttgccagccaggggccccgggatgaaaagatgatggttcaagccaggcagggggccccccaggttccctttggttgcccccatgattgaagtcccaaggcccgaaacccccttggggcgaatgaggatgcccgacgacgaatggccccagctggtgcaggggtgccccaggggcccccacgaaagggctgtgggttgaccctttccccccccaaaatatcatggccgaagcctgtggtcaggccgcagtacacaccgatgatgaagcggcccaggatcagcatctcaaaggacttgcccagtttcgagaagcccatgagcacggcggacacgaaggccagcaggttcatcatcagcattgaattccgccggccaaagcggttaacgaaaaggcccacagagaaggagccaatcatgcccccaacagaaaagatggccactgagagggaccagagcgtggtgagcgtggtgggcaggatgctctccccatagcggtggacccatgtctggttgtagaactcctcgatcaccttctggggggcattgatgactccagtgttgtagccaaactgcagggagccaagcactgctcctcccacggccagcatgaggcgacccgtcagcttcttgctgctgggctccatggcagcgctgcgctggtggctctggctgcgccgggtacgcgggtggcgacgggcgtgcgagcggcgctctcccgctcaggctcgtgctccggtccggggactcccactgcgactctgactccgacccccgtcgtttggtctcctgctccctggcgtgctcactcggggacccgcgactagcgaccggcacgctcgctgttgctaccctcgtgccgaattcgccacccaggcctcgcccc

SEQ ID NO: 310302 - DNA, 1049 bp, Homo Sapiens
ggtctcttcaatatacgtcctcaggaggtaccaggggtcacggcgtcaagtttgttccccgccgcgaagtgtttttataggcgccctctctttggggccgggtgttttcctccgttgcggggtttgatgcgagcagggaaggcggggggacttcttgggggcccgaaaggggcaagcccggaatgcccttgcaagccagggcccggggaggaaagatgaatctccagcagcacgggggccccaggtttccttgttggcccatgaatgggagtcccagggccgaaacaccctggggcgatgggggatgccggacgccggatgccccagctggtgcaggggtgccccagggcccccacgaagggggtgtgggtgacactttcacccccccataccatgggcacgaagcctgtggtcaggccgcagtacacaccgatgatgaagcggcccaggatcagcatctcaaaggacttgcccagtttcgagaagcccatgagcacggcggacacgaaggccagcaggttcatcatcagcattgaattccgccggccaaagcggttaacgaaaaggcccacagagaaggagccaatcatgcccccaacagaaaagatggccactgagagggaccagagcgtggtgagcgtggtgggcaggatgctctccccatagcggtggacccatgtctggttgtagaactcctcgatcaccttctggggggcattgatgactccagtgttgtagccaaactgcagggagccaagcactgctcctcccacggccagcatgaggcgacccgtcagcttcttgctgctgggctccatggcagcgctgcgctggtggctctggctgcgccgggtacgcgggtggcgacgggcgtgcgagcggcgctctcccgctcaggctcgtgctccggtccggggactcccactgcgactctgactccgacccccgtcgtttggtctcctgctccctggcgtgctcactcggggacccgcgactagcgaccggcacgctcgctgttgctaccctcgtgccgaattcgccacccagcc

SEQ ID NO: 310303 - DNA, 515 bp, Homo Sapiens
  misc_feature (461)..(461): n is a, c, g, or t
aaaaaccagccatttatatctgtttaggtaagtaacaggagtgaggtggtgtatttacaagttggcttgtccagatatactataacttagtgtctgtatttaatattgacaaccaaaaatatatataaatatcttgcatctatacacaacagggcaggagtctccatgtcttcttgagcagtgagtttgcaggctcccacaggccctcttctcatggtaatagtgtggccctcagtgcaaaggagactagaacccggcagcccagactggcccttcccctctcctccctgcactccagtgcttcccaactgggtctcagggtaaaggaaaggattaatttgagtgggttggggtagggaaggagatggggaaggggggcaaatcctaatggggggcctggacccctaggagttgggggagatcccgggggccagcagaacgggttgggccattaggccctncctgggggttaggaagcttttgtaagtttcataagtttcgattaggtgttgtcc

SEQ ID NO: 310304 - DNA, 538 bp, Homo Sapiens
  misc_feature (34)..(34): n is a, c, g, or t
  misc_feature (232)..(232): n is a, c, g, or t
  misc_feature (235)..(235): n is a, c, g, or t
  misc_feature (435)..(472): n is a, c, g, or t
cccttcttcctcatggtaaatattgtggcccctnagtgcaaaggagacctagaaccccggcaagccccagactggccccttcccccctctccctcccctgcactcccagtgctccccaactggtcctcgggttaaagaaagattaatttgagtggttgggtaggaagagatgggaaggggcaaatcctaatggagcctgacccctagagtggggagatcccaggccagcagnaancgggggccatagccacctccctgggatagaagctttgtagttcatagttcgattagtgtgtccttaggacataggtccagccctacagattagctgggtgaagaaggcaagtgtctcgacagggcttagtctccaccctcaggcatggaaccattcagggtgaagcctgggatgtgggcacaggagactcaggctgatannnnnnnnnnnnnnnnnnnnnnnnnnnnnnnnnnnnnnctgttgcttgtctgaatagatttgagcaacagtcttgcttttgttaaaatcctggagccgttaagt

SEQ ID NO: 310305 - DNA, 753 bp, Homo Sapiens
taatcctttattcaatttagctcaacacacattaagtacttaatttgtgcaagagactgggctatgtgctgggggtgaggtggaaatacaaaaacaccaagatgcaatccctctcaagaactgtataatctagtaagagcacaatacagagatggtgcttgcaggtaaaaactgctctgaaaccatggggagagaagagtttacttccttccagagggtgaagtcgggacccatttaaatttggtagtatgggtgaggaaggtcataacacgctaagtaaactggtgtttaagcatgtgacggcaacagctaatggtctagttcctccatggctttaaatgcatgaaagggaaaagagtattcaaaggtatttttattttatctcattgttagcccagtataaggcaggatgacaaaaaataaataaaagtatgaagaggcaagaacatagattgaaaactccatttcctagttttagtgtaaactcaatcccttgtgcatatacatctagttcctgaagtccacactgccaaaagggaaaaacaagaaaaaccagccctagcagtgccctgtcatcatggcagagcactgtctcttctgtgggactgaaacagctagctttggctactgccggtagtggacaatatggcacatggaaattaaaaagtccataaacgtgccctcctaacacgagaataagaaaggtggctgaagtagataatttcagtgacggaggggatgaaatattttttg

SEQ ID NO: 310306 - DNA, 579 bp, Homo Sapiens
ggctgcaggatttttcacgagaaaaaacaaagcacttcaggtcagggagaatgttttaatgtgcattgccatcgaggttctgctatttttgagaagctgaagcaactccaaggacacagttcacagaaatttggttctcagccccatactgattgaattggagacaattacaaggactctctggccacccttgaagaggccccgtgaaggaggcagtgaggagcttttgattgctgacctgtgtcgtaccaccccagaatgtgcactgggggctgtgccagatgcctgggggggaccctcattccccttgctttttttggcttcctggctaacatcctgttattttttcctggaggaatattaggaagcggtgtcttgatgatcttccctgcgctggtgttcttgggcctgaagaacaatgactgctgtgggtgctgcggcaacgagggctgtgggaagcgatttgcgatgttcaccttcacgaaatttgctgtggttggattcttgggagctggatactcgtttatcatctcagccatttaatcaacaagggtcctaaatgcctcatggccaatagac

SEQ ID NO: 310307 - DNA, 705 bp, Homo Sapiens
ttaaaaacttttttttgtttgatcaaaggaagcatttgtagaaaagatgagttgttattcattcaacgttttgtcccccctcctaaaacacacacaatctttgttacgttacctctgaattcaggttttaatttaacatacataaaagaaccctagccatgatgacagcctcaaaagatcagtcacaagcaactcaagcaaggcagcaaaaaaagacaacaaataacaatacttaggatacatcaatcattctttttcctcttaaaaacagaaattggtcttagtttctcattttaaatgtgctttcttcctttgatttatgtaaaacttccaaagatataaacatctttatatacaaagaagtagtatggcagtacatgtgactttatacattttacatttgtaataaaaaaatcatgaaaagtatgctttgaacctgttggtaaattctaaaaaggaactaatttgaaagatttataaatcaaatttgttaagtggccaaactattttttatttgaaaataacaaaattctaactcgggcaaagctggttgggaaagaaggaataactgccttttctaaggcttatcagcttgggagcagatgggaattaataatttccaagaagaggagaagttttatgtaaaccgggtccattttcccccacagaagccacaacactggcagtccccacaaaggggcccca

SEQ ID NO: 310308 - DNA, 1348 bp, Homo Sapiens
  misc_feature (29)..(30): n is a, c, g, or t
  misc_feature (32)..(33): n is a, c, g, or t
  misc_feature (45)..(45): n is a, c, g, or t
  misc_feature (51)..(51): n is a, c, g, or t
  misc_feature (53)..(53): n is a, c, g, or t
  misc_feature (55)..(55): n is a, c, g, or t
  misc_feature (84)..(85): n is a, c, g, or t
tataaaaaagaatctagttatgatgaaanntnnaaagattagtcnggaggnantnaagggagggagcgaaaaaagagaagaggnnggagagtgagtgaggatacatcaatcattctttttcctcttaaaaacagaaattggtcttagtttctcattttaaatgtgctttcttcctttgatttatgtaaaacttccaaagatataaacatctttatatacaaagaagtagtatggcagtacatgtgactttatacattttacatttgtaataaaaaaatcatgaaaagtatgctttgaacctgttggtaaattctaaaaaggaactaatttgaaagatttataaatcaaatttgttaagtggccaaactattttttatttgaaaataacaaaattctaactcgagcaaagctggttggaaagaaggaataactgccttttctaagctttatcagctaggaagcagataggaattaataattccaagaagagaagaagttttatgaaaagaaattgtagtcgtcatgctgtagagtctgagcagctcatctcggaggtttaaacgggtccatctcccccacagcagccacaacactggcagtccccacagagggtccccaggaggccattgaccacctggatggcgcagagaaccatctggattcctcctacgaccagcaggatggagaagagggtcagattccagggaaccacattgagaggctctcggcacttgttccataaggcctcatcattgagataatccccgtcgtggaaggggtagccccatgtactattggccatgaggcatttaggacccttgttgattgaaatggctgagatgataaacgagtatccagctcccaagaatccaaccacagcaaatatcgtggaggtgaacatcgcaaatcgcttcccacagccctcgttgccgcagcacccacagcagtcattgttcttcaggcccaagaacaccagcgcagggaagatcatcaagacaccgcttcctaatattcctccgaaaaaccagatctcttgggaaaggtggtcgttgtcatctatcacttttcctccaggaaaaaataacaggatgttagccaggaagccaaaaaaagcaaggggaatgagggtcccccccaggcatctggcacagcccccagtgcacattctggggtggtacgacacaggtcagcaatcaaaagctcctcactgcctccttcacggggcctcttcaagggtttttggccagagagtccttgtaattgtctccaattcaatcagtattttggggctgagaaccaaatttctgtgaactgtgtccttggagttgcttcagcttctcaaaaatag

SEQ ID NO: 310309 - DNA, 1808 bp, Homo Sapiens
  misc_feature (985)..(1054): n is a, c, g, or t
  misc_feature (1056)..(1056): n is a, c, g, or t
  misc_feature (1059)..(1059): n is a, c, g, or t
aattccacgttcttaactgttccattttccgtatctgcttcgggcttccacctcatttttttcgctttgcccattctgtttcagccagtcgccaagaatcatgaaagtcgccagtggcagcaccgccaccgccgccgcgggccccagctgcgcgctgaaggccggcaagacagcgagcggtgcgggcgaggtggtgcgctgtctgtctgagcagagcgtggccatctcgcgctgcgccgggggcgccggggcgcgcctgcctgccctgctggacgagcagcaggtaaacgtgctgctctacgacatgaacggctgttactcacgcctcaaggagctggtgcccaccctgccccagaaccgcaaggtgagcaaggtggagattctccagcacgtcatcgactacatcagggaccttcagttggagctgaactcggaatccgaagttggaacccccgggggccgagggctgccggtccgggctccgctcagcaccctcaacggcgagatcagcgccctgacggccgaggcggcatgcgttcctgcggacgatcgcatcttgtgtcgctgaagcgcctcccccagggaccggcggaccccagccatccagggggcaagaggaattacgtgctctgtgggtctcccccaacgcgcctcgccggatctgagggagaacaagaccgatcggcggccactgcgcccttaactgcatccagcctggggctgaggctgaggcactggcgaggagagggcgctcctctctgcacacctactagtcaccagagactttagggggtgggattccactcgtgtgtttctattttttgaaaagcagacattttaaaaaatggtcacgtttggtgcttctcagatttctgaggaaattgctttgtattgtatattacaatgatcaccgactgaaaatattgttttacaatagttctgtggggctgtttttttgttattaaacaaataatttagatggtgnnnnnnnnnnnnnnnnnnnnnnnnnnnnnnnnnnnnnnnnnnnnnnnnnnnnnnnnnnnnnnnnnnnnnntnttnaaaaaattctttccttcggaaacctttccccacaataaattttgccaaaccaattctctttgaggccccgcggatcccgggagcgatacgcgataattggccaaaatcccggttcctataaaaaaacccctggaaattcaacacaggggttaaaaatcccccccgcatgaaaaacaacgcccgggggggaaaaacctcccggggtggcaaaccccaaaggccgctcatagaaggttcctacagggccaattaagcgggggccctcctccccaccggggaatttctcaaaatagagacccccgcattctaagatctttccttccccccgccctcttgggcgctctcttagctccataaaaagtgtgttgtcaatgtctaaatatttgggaaattctctcttccccaaaatagggggtagtccccttaacaccttgggggtgcccttgatggggacccctgaaatttccccctcgcgcgcggcatcttacaccaacaaatgtttactccccccaccgcctggtgtaacaaaatttctggcgcccctgagaaaaaaatactcgcgcgcgctggtaggaatgaaacacacggtgggcacaaaatagagagaggcgcgcggggtgtgttaaaaacctcaccccccacacgggtgataataataacactcctcaccgccccacgcgagagatatatcgcccctccttccgccacacaaacactatatcactctctctcttcttgtgcaggacaaa

SEQ ID NO: 310310 - DNA, 1028 bp, Homo Sapiens
tttttttacaggaaaaataaggcatttattacagattgaaactgatcagaagaaaaatcacagaattcacaaaatcattctttgttggaacttttcttccttccattgcattttgctgttaagagaaaaggagtgtgagggtcagaccaccgtggcatgcgttcacattccagctttggaggccagggacccaggactcctgggaattattcaaaaccagatccgatgataccagacactagagcagctatgcaaagcagcagctccttgaacaaaccaaaagggcgagggacacctcaaggccgttactcaaagtcagtatttattcttgctctgtgccggtggtttgggtaccttctgtttccaggaggcaatacccttctcatgatcccaagtgaccgatcataaaattgttcacttatggactcgtctgaaatgagaccaaatagataattgtttctccatttatgagatcccaacatgtccccaaaaatcatctcttcgctgctgtaagactcagacgtggaggaggaccagctgcagcgagcatgcacgccctgcacctgctgggcagataccttcacggtgcttctgcaaacagctgtggacacatagtagtccctctggaaggcacatgtagcgggatcttctccagaatccttcctgcatgtagtctcccggatgctgaactctaaattcatgaccaagttgttctcatctaggacctcaactctttttaatgagcttctgaatgcccgaaacagatacggactcagtgactgggaattcacttttaccacagaggcactgagggcatcccttaaggaggatggatcgtagtcgtacactgggaaacctgagcaagaccagtagttcattccaagagcaaacataatcaatatcttcatcatcatcgtcatcttctccattctggaaatcatgattgtaatcgagagacagagagtgtctctctatgtgtttggggatgacagttcttcctaagaggagctgtctttatcaaacacggc

SEQ ID NO: 310311 - DNA, 893 bp, Homo Sapiens
atgggagaacctcacacagctgactgttctcccggggtcccagtctgggtctcacctccactctcaggccccctctgctgggatacagtatccccgccccatcttatcctccgagttcagcttacatgccctcttcaggaacccttttcctcgggtttcctgcacataggcgtctctggaattggcatttatcaagctgtactctaactacttccacccccttcactaggttgtgggaggtttttgaggtcaaaactatgcctcattgatctttgtaacccccaagcaaatgctcaagtgcatacatgtttattgaacagatgaactgataaatggatgaatggctggatggcgtatcctgatctccagccccacacccgcacacggtggcagctgtggccaacctactcttttgcttttgcttggttccttccttccttacctcacaccacaaacaccttcatagacctgcctggggcccaacacctggctgcagcctctgcttggggtctctttgattcttccctttatgagagatttgagcttcctttctggggttgtgtatctgctccccagacccagttacctgttcttcctcctgcaggtgtccctcgcccttttggtttgttcaaggagctgctgctttgcatagctgctctagtgtctggtatcatcggatctggttttgaataattcccaggagtcctgggtccctggcctccaaagctggaatgtgaacgcatgccacggtggtctgaccctcacactccttttctcttaacagcaaaatgcaatggaaggaagaaaagttccaacaaagaatgattttgtgaattctgtgatttttcttctgatcgagtttcaatctgtaataaatgccttatttttcctgt

SEQ ID NO: 310312 - DNA, 2153 bp, Homo Sapiens
  misc_feature (141)..(157): n is a, c, g, or t
  misc_feature (166)..(171): n is a, c, g, or t
  misc_feature (173)..(175): n is a, c, g, or t
  misc_feature (178)..(178): n is a, c, g, or t
  misc_feature (181)..(339): n is a, c, g, or t
  misc_feature (1403)..(1422): n is a, c, g, or t
aaaaaacccaccccttttggttttgtttcccccggggttttttcttggaagaaaaaactttttgtgcccccgtttttctttttccctcttggggggccgcgcggccccccaaaaagaagggttttaaaaaaaatttttttnnnnnnnnnnnnnnnnncccccaaannnnnntnnnttnttnnnnnnnnnnnnnnnnnnnnnnnnnnnnnnnnnnnnnnnnnnnnnnnnnnnnnnnnnnnnnnnnnnnnnnnnnnnnnnnnnnnnnnnnnnnnnnnnnnnnnnnnnnnnnnnnnnnnnnnnnnnnnnnnnnnnnnnnnnnnnnnnnnnnnnnnnnnnnnntaactaaaatggtcacttttaatgggaaccagaggtatagttacaattacatagtccgacacaaaaaaacccttgggtgatcaggaattggaaggttacaaaataacgagggtaacactgggtacaggacaaaaagctgttccagaacctggggagccaggctaattaatacggcctctccctgcgatcctgtctgtgctcacccctggaatccatcttgccagggccaaagccacctctgtccccaccaccccggccccctcggaagcctccacggtccccgccgcggccccggtagccgcctcgatcatagcctcctctgccaccacgacgatcatccccgtagttaccccccatgtgagagccacctggtccccctcctgggccatctggtttaggggccttacactggttgcattcattcctccaagagaagttcatattctcacaggtgggattaggacacttccagtcaccagctcgctgctgtcctccaccgccaccacctccactgggaaatcctcctcggccaccaccaccactgccaccacctccatagcctccacggcccatgggtcctcctcgccctcggcctccacgaccattgccaccaccccgattaaagtctgcccggcgagtagcaaatgagaccttgataggatttccggagaattctttaccatcaaaccagtcaatagctgctttagctgaaggtgggtcatcaaaagagaccgttgcctctcccttcagcttgccagtttccctgtctgtgtacaaattaatcatgggctgtcccgttttcttgtttgtcttaataataccaatctgcttgaagtaatcagccacagactcaattgtaacattctcacccaggccttgcacaaagatggtgttgttgtctgaattatcctgttctgcggagtcatgacgtgatccttggtcccgagggccaccaaatttattgaagccaccacggtcacttccgcccatgccacctctgcctccacggccacctccacgacctctgggttcatagccaccactgctgcggttgtaaccaccannnnnnnnnnnnnnnnnnnnaccactgccacccctgccgcggcctccacggtcctgctgtccatagccaccgctgccacctccaccactctggtcttgattgccataaccgccaccactgccaccaccactactcatggaggattgatcttggccatagttacctccacctccacctccacctccaccaccactgctgctgttgtactggttctgctgtccatagccctgagggggattatagctttgctgctgtccatagctttgctgctgtccaccatagctaggctgctggctgtagctcccactctggggctgcccatagctgctgctctgagaactgctaccgtaacttcccgaggtgctgctgggagctggctgctggccatagccaggataggaggactgctgcccgtaagacgattgggagctctggctactgccatagccgccagtcgagccatatccctggggagttgactgagttccatagcctgttctggctctggccataagaagaatagctgctctggccatagcctgaagtgtccgtggactggctataaccactgtaactctgctgtccgtagggctgactgctctgctgggaatagccctgcccgggctgggtggggtaggccccatagctttgggttgcttgttgggtataatcgtttgaggccatgttccggcacgcgcgcacaggcaagcaagcaacgaagttccaacaccgctgagcaccgatcccggga

SEQ ID NO: 310313 - DNA, 462 bp, Homo Sapiens
  misc_feature (26)..(26): n is a, c, g, or t
  misc_feature (314)..(314): n is a, c, g, or t
actcaggaggctgaggccgggaaaantcgtttgaaacccggttaggcctgaatgtttgcaagtgaagctgaaaacagcacccactgcaactcccagcctgggcaaacaggacccaaatccgtctcccaaaaaacaagaaaaagaaaagcaatattcagaaagagtaggaagaggtgacccgctgagaaagactcactgtttctggctctggccataagaagaatagctgctcctggccatagcctgaagtgtccgtggactggctataaccactgtaactctgctgtccgtagggctgactgctctgctggganattacctgcccgggctgggtggggtaggccccatagctttgggttgcttgttgggtataatcgtttgaggctcatgtgctccacgcgcgcacaggcaagcaagcaacgaagttccaacaccgctgagtaccgaggctggaggactagc

SEQ ID NO: 310314 - DNA, 498 bp, Homo Sapiens
  misc_feature (78)..(78): n is a, c, g, or t
  misc_feature (419)..(419): n is a, c, g, or t
  misc_feature (457)..(457): n is a, c, g, or t
  misc_feature (467)..(467): n is a, c, g, or t
  misc_feature (469)..(469): n is a, c, g, or t
  misc_feature (488)..(488): n is a, c, g, or t
ttggtactgaggtatgtgcgtgttttccaaagaagtaaatgtcaaggccacactgttggggtcagatttagccaaaancttacctaggtaaggttgatgtaatgggaaaggtaatggattgggttcagtaatactgatttttgttcctgactctgagaagcaagccgttttgtctttctgaagcttcagtttcctcactgtatctctaaagtcaccgtagtttcttcctagttctaggtcttgcctattccccatcgctccagactgattgtcttcctttctccttaagcacctgtgagaatatgaacttctcttggaggaatgaatgcaaccagttgtaaggcccctaaaccagatggcccaggagggggaccaggtggctctcacatggggggtaactacggggatgatcgtctgtnggtggcagaggaggctatgatcgaggcggctaccggtnccccggtcgngnaccgtggaaggcttccgangggggtccgg

SEQ ID NO: 310315 - DNA, 1497 bp, Homo Sapiens
atttggggaagggattcccaggcccttgatcaggggcccagggtgttcctaggaaggcggattatggcccaaggccgcgtagcctacggggcccgggcggccaaagggaatggtgttggaagactttcggaggccggagggcggccgacaagtatagcgacgggggaaaaggacacgtgcgcaagaaagcattttattatcagaacagtatggttttcctatgtttaagatctatttattatgttatttttacaagtagcaaagtccctccgtttttttccccaggtgaatgtacatgaatataaaaagcggctgatgtccacactgctcggcccacccgcatcagggtcggcaggaagttgcggctgatgagcagctcccggagcggtggggcggggcctcctcttctccagttccagcacgctcatcagtcgtcctcctgctgatttctcttcagcttaaggaagtctattagcttgtgagcgtcctccccagtagagaggtctacaaagtccttgggtagccggtaactcaaataggggctgggctggactgtcacttcactgtttgtgcaacggaaagctggggaatcctgctcttgagcgtcaacttcactaaaatcgccgtttaagttgttctcagatatcagttcttcccaggtgaacagcagtgaatctgtgacttcaccaaatggattaaagtcaatgagccacaccttcccccctactgtctctgtatatatcgaacacaaagtcttcatctaagaatttgtactgtatgtgtttcttgaaaaagtcttgtatgcatctgcgaatttcttccttttgtttagaaatatgatcatagtattgtgtgtagtctctttgagaaataccaataagcttgttttccttgacaaaacatcgaaactcagccccaggaatcaattcacaccattttcggagaacgagctcatattctatacatggatctggagaatcatcagtacaatgaataaacggctgagtgaagtcacgagtgatgaaatcggaactcttgaaaagcagaaagatgtcgctgagggttttacatttcagagaactattcattgctatccaatacgcatcccttggggcactccaattaagcttaggaaagacactgcccccgagggaattgatagcttcctggactttagtggcaaactcaggaaattctggtgccgtaagcgtggctgtgttctcatcatcagaccactgtatttcttctgcttcatcatcactgtctggctgagaatgtgttggtggatcatcccttcctgaaaccaccagagttccatcatcgagtaaataatccttcacattctgaggaagtggaagaatgacactcttgatggtaacgcctcggaagaacgggtaccacgcggagaactggcagtgaagcacatgctccttcttcatcctccagctgccgccgctgctgcctttccctctcctgcctgcaccctcccggaacccc

SEQ ID NO: 310316 - DNA, 1178 bp, Homo Sapiens
gtcggttcgatcctttattagacccattttacagattaggaaactgagatgagcagaggtgaagtcagccctgacaggtcacaggagcagcaggtggcagagccagatgttgggctcaagctagtgccaaatgtgccccattggccactgaccctaaagatgtgtgacccagagggtcctgaggagccacgttaacccatggccggtgtcatcctcttccggtttaggactagtggattttgggcactggagccacctctttggcaaacagcttgagggagaaatcaagggctggggccgcctgggtcagcatccccatggagatgacgtctatgtgcggcccgcagaactgggggaggttgtccagggtgatgcccccactggcttccacagccacactcgggaactgggccttcagcacggtggccgtggggtgcagctcctctggcttgaagttgtccagcaggacaaggtcggcaccagcctcagctgcctgcacggcctcctgcaggctgctgcattccacttccaccttcagagcgaagtcagccgcctgtctggccgcccgcaccgccttctccacgccaccggcggccaccacatggttatccttcaccatcaccagccctcccaggtcgtagcggtgcgaggcggccccgcccaccaggagcccatacttctccaccagccggaagcctggcgtggtcttcctcgtgcctgccacgtgcccagtccagccggcccccctggcggcctccactgcagcggcggcagcactggcaatgccactgcagcgggccagcgtgttgagggccacccgttcccccagcagcaggcagtgggcagggccccggacctcggccactctggccaccggcaccagcttcgatccctcggggaggaaccaggagacttggcagttgagttgggtaaatatggcatcgaagaaaggctgccctgccagtaccccaggggatttggcccacagcgccgcctgcgaggggcctgccccgctgaccaaggctgcgtagttgagccctgggcagtcctctcggagccagctgtccaccagggctgccagggtgacgggcggcagcagcagcgccaggccttcagcgtccatggtgacttgcagctgtctgggctggtgtgttggctgctcaggaccaaggctccca

SEQ ID NO: 310317 - DNA, 984 bp, Homo Sapiens
agattttgggtccctcggagagcgccccttcttttgcccaaagcaggttggagggggagaaattcaaagggggtgggggcccccgctggggtcagccattccccaagggagaatgacgtcttatgttggggcccgcagaacttgggggaggttttcccagggtgatgccccccacgggcttccacagcccccactcgggaactgggccttcagcacggtggccgtggggtgcagctcctctggcttgaagttgtccagcaggacaaggtcggcaccagccgtcagctgcctgcacggcctcctgcaggctgctgcattccacttccaccttcagagcgaagtcagcccgcctgtctggccgcccgcaccgccttctccacgccaccggcggccaccacatggttatccttcaccatcaccagccctcccaggtcgtagcggtgcgaggcggccccgcccacccaggagcccatacttctccaccagccggaagcctggcgtggtcttcctcgtgcctgccacgtgcccagtccagccggcccccctggcggcctccactgcagcggcggcagcactggcaatgccactgcagcgggccagcgtgttgagggccacccgttcccccagcagcaggcagtgggcagggccccggacctcggccactctggccaccggcaccagcttcgatccctcggggaggaaccaggagacttggcagttgagttgggtaaatatggcatcgaagaaaggctgccctgccagtaccccaggggatttggcccacagcgccgcctgcgaggggcctgccccgctgaccaaggctgcgtagttgagccctgggcagtcctctcggagccagctgtccaccagggctgccagggtgacgggcggcagcagcagcgccaggccttcagcgtccatggtgacctcgtgccgaattcgccacccaggcctcgctacctttaaccgtgaggagtactgccg

SEQ ID NO: 310318 - DNA, 1057 bp, Homo Sapiens
  misc_feature (37)..(37): n is a, c, g, or t
  misc_feature (43)..(43): n is a, c, g, or t
  misc_feature (46)..(46): n is a, c, g, or t
  misc_feature (56)..(56): n is a, c, g, or t
  misc_feature (66)..(66): n is a, c, g, or t
  misc_feature (99)..(99): n is a, c, g, or t
  misc_feature (176)..(176): n is a, c, g, or t
  misc_feature (194)..(530): n is a, c, g, or t
  misc_feature (537)..(537): n is a, c, g, or t
  misc_feature (541)..(545): n is a, c, g, or t
  misc_feature (547)..(552): n is a, c, g, or t
  misc_feature (556)..(556): n is a, c, g, or t
  misc_feature (558)..(558): n is a, c, g, or t
  misc_feature (561)..(563): n is a, c, g, or t
  misc_feature (566)..(590): n is a, c, g, or t
aaggagcagcagcggcgcccaagccgggcgcagccgnagaggnagncgcgcagccncaccggaganaacaccgacagaggcggcccgaaagcagcgcanagacagagagcagacacagaggaaggggggggaggaccaagggcgaaacgcgagcgcagcacgcacgcgcgccgcanacggaagaacacgccggnnnnnnnnnnnnnnnnnnnnnnnnnnnnnnnnnnnnnnnnnnnnnnnnnnnnnnnnnnnnnnnnnnnnnnnnnnnnnnnnnnnnnnnnnnnnnnnnnnnnnnnnnnnnnnnnnnnnnnnnnnnnnnnnnnnnnnnnnnnnnnnnnnnnnnnnnnnnnnnnnnnnnnnnnnnnnnnnnnnnnnnnnnnnnnnnnnnnnnnnnnnnnnnnnnnnnnnnnnnnnnnnnnnnnnnnnnnnnnnnnnnnnnnnnnnnnnnnnnnnnnnnnnnnnnnnnnnnnnnnnnnnnnnnnnnnnnnnnnnnnnnnnnnnnnnnnnnnnnnnnnnnnnnnnnnnnnnnnaaaaccncccnnnnncnnnnnncccncnacnnnccnnnnnnnnnnnnnnnnnnnnnnnnnccccgcccacccaggagcccatacttctccaccagccggaagcctggcgtggtcttcctcgtgcctgccacgtgcccagtccagccggcccccctggcggcctccactgcagcggcggcagcactggcaatgccactgcagcgggccagcgtgttgagggccacccgttcccccagcagcaggcagtgggcagggccccggacctcggccactctggccaccggcaccagcttcgatccctcggggaggaaccaggagacttggcagttgagttgggtaaatatggcatcgaagaaaggctgccctgccagtaccccaggggatttggcccacagcgccgcctgcgaggggcctgccccgctgaccaaggctgcgtagttgagccctgggcagtcctctcggagccagctgtccaccagggctgccagggcctcgtgccgaattcgccacccaggcctcgcttcctt

SEQ ID NO: 310319 - DNA, 359 bp, Homo Sapiens
aaaaaagccctaccaagtatggcaccttagaaaacaactctaagatcatcttctggcaagcctcataggggtcatccggcaacagcttcttccctgggtatgcttcatccagaactggcaccagaccaaagggatcttaaagaaccactcaggcttatttttcaggttgatattgatgacttcatgcctgattcccttggccttcaggactagacgcgtcctctcagcaaacgggcagaacctcatgctgtagatgcggatcgagccctccgggaccggccccgggggcgcgcttcccttccccaagctcctggctgactccccggacatcgtggcgcagcgcaggccgagctccctcg

SEQ ID NO: 310320 - DNA, 533 bp, Homo Sapiens
tcagaaaaaaacccaacttcggatacatcggagtaaaaactgcttctctcacctgctctacttatttcccttcagcatttctagtgagtcttactacatgcacaagtaagaaatacttttatgctgtttaatgttcaggttctgactaataagaagacgaccttctttggtggcaattctatctctatgattgattacctcatctggccctggtttgaacggctggaagcaatgaagttaaatgagtaagattatttgaatattttgtgcataatttaggatgacagttggaatagtatatattgacctttctttttaacagaagttgaaatatttaatacaactggtctgaatgagaacaagcagacaggggaatcttggactatcccaggcatgtcatatacctacactaactactctccatcactgcaatggggcaggggatttctgagacatgtagtaaagtgctttaaaatttattccttccttcctgattaaaaatccataaggggaaggatatggtagcttacgcc

SEQ ID NO: 310321 - DNA, 1014 bp, Homo Sapiens
  misc_feature (126)..(126): n is a, c, g, or t
taccgcggcagaattttcccctcttgttccaggaaagcggggtccaggaaaccaggtaaggcccaagtccccatttccattacctttttgttccgcaccccggacatagatgccttgaagttatancccaattgccttcggcgaaagggagggaaaatatcagacatagctttattgctgactcctgcccccttcagagcccatagtcacaggcctcagggctgttctgtaagtagagctctaggaaaccttgccagtctttctcactagtaagcagggctgagactgtgggatcttccttcatggctgccatccacagtttcagttttggagtgtggtctacacactcatttaacttcattgcttccagccgttcaaaccagggccagatgaggtaatcaatcatagagatagaattgccaccaaagaaggtcgtcttcttattagtcagaacctcctctagcttggtaaattctttacgaaattcttcttttaggccagcatagtcttctttattttggcttctaataaagcttcctaccaaggatggcaccttagaaaacaactctaagatcatcttctggcaagctttctcataggggtcatccggcaacagcttcttccctgggtatgcttcatccaggtactcacaggtgatggcagactcgtagatcagctgaccctgactgttttccagaactggcaccagaccaaagggatttttcttaaagaaccactcaggcttatttttcaggttgatattgatgacttcatgcctgattcccttggccttcaggactagacgcgtcctctcagcaaacgggcagaacctcatgctgtagatgcggatcgagccctccgggaccggccccgggggcgcgcttcccttccccaagctcctggctgactccccggacatcgtggcgcagcgcaggccgagctcctctggggtttgcaggggattcaggaagtaggtggcgcgtccttcccgccctccttccctcccccgcttcc

SEQ ID NO: 310322 - DNA, 456 bp, Homo Sapiens
  misc_feature (18)..(18): n is a, c, g, or t
  misc_feature (25)..(25): n is a, c, g, or t
aaaaatgaacccttaaanttgtttncctagggtccccacccttggtgggaacctttattagaagcccaaaataaagaagacctatgcctggccctaaaagaagaatttcgtaaagaatttacccaagcctagaggaggttcctgacctaataagaagacgacccttcctttggtggcaattcctatctctatgattgattaccctcatctggcccctggtttgaacggctggaagcaatgaagttaaatgagtgtgtagccccacactccaaaactgaaactgtggatgtcagccatgaaggaagatcccacagtctcagccctgcttactagtgagaaagactggcaaggtttcctagagctctacttacagaaccagccctgaggcctgtgactatgggctctgaaaggggcaggagtcagcaataaagctatgtctgatattttccttcacta

SEQ ID NO: 310323 - DNA, 438 bp, Homo Sapiens
  misc_feature (11)..(11): n is a, c, g, or t
  misc_feature (426)..(426): n is a, c, g, or t
ctaaccaaagnaatggccaactttaaaaaaaacaaattctaaagatcaatctttcttggccaaagctttctccataagggttcatcccggcaaccagcttctttcccctgggtatgcttcatcccaggtacttcaccaggtgatggcagactcgtagatcagctgaccctgactgttttccagaactggcaccagaccaaagggatttttcttaaagaaccactcaggcttatttttcaggttgatattgatgacttcatgcctgattcccttggccttcaggactagacgcgtcctctcagcaaacgggcagaacctcatgctgtagatgcggattcgcagctccgggaaccggcccgggggcgcgcttcccttccccaagctcctggctgactccccggacatcgtggcgcagcgcagccgagnactgtgccgaaa

SEQ ID NO: 310324 - DNA, 975 bp, Homo Sapiens
  misc_feature (51)..(51): n is a, c, g, or t
  misc_feature (158)..(163): n is a, c, g, or t
  misc_feature (165)..(183): n is a, c, g, or t
ggtccccagggggaattcttcccttaagggggaaaaccaggccttattggngccccatgttttccactttaccccttacctgggggccccggcggcgcccaaaaaggaaaatggtctagaaaagcttcttcgaggggccgagggccggccgacatgtnnnnnntnnnnnnnnnnnnnnnnnnntttgctggggaatcttttatttggacaagacaaaaacatctccacactgttcccttttatacagaaaatggaacatctcaaatatattaggtttttctctttttcaacagaattcatttcaatctggtcccaggaactgcttctcattttaggattcacgttttagtaacacatatgcacccattacagccaaaaagagcatacttgaattttggatagtcattcattattatggtgaccataccaacatatggtaaaaaccctcttgctcttcccaccacgtccttcttttccagccagttctggccttctttgtacaagcctctatcatcaacttcattattatctcctttagtcagaaatttgatgtctccattatctttttcatgaactttgattactctgtgaactattggaatgtctcgtccttcaactttaaaaacaactatttcaccagctctgattgggtcttcccggaaatttgtgaggaacaggaggtctcctctgtgaaaggccggctccatactgccactcagcaccaccacgatggggctctcactgcctgtgagcacgatcaagcctttccatatcatgagtgcagaagacacgatcatggcgaagtttaaaacctggtaatagagctggcgcttgttcatcttcttcaggtccccgaagatatccaagccggacgcggggagatgagcccccacggcgcccgcacgcaccatagcagggtctccggggacctagcggcccgccggctctgggtggcacagacggctgcggagcccc

SEQ ID NO: 310325 - DNA, 1032 bp, Homo Sapiens
gtttttctgaaatgtgaccttggataagtttattaacctgttttataaatctgtattcacacagatataaagtgcctagcccatcacagcagagctctccgtagctcagtggttgttccaataagacatcagggattcttcagaagccagccttcagacctctcactgtgttttgagatcattattttcaatttggattaaaaaaacaaggggccccgtaaaacccttgaagtctttcctcatctccaggttttagggatgccacttgcataaaaatgagtggttcacaaggtcactgcccccagaagcaggcactggaaagaaacaggcagctcttcattatcccaagcagaacctctgtcaacttgcccattgatgggttccatttgcctgggcttggaatcccaaaggggaagaaccacctttaccggagtaacagtccaaagcctggggctgcagttggtggggcaactcttcactgtgcttgcacctgggctggggcaggatcctgaacctctcgggggcgtagcccgcggaacgtggtcggcttgttggtgaaggggtgccactggccctggatgctagggttgtcggtgtggaagggcttgcggatgcggatcacgtccaagcccgactggtcggccagcttctgcaccagcgtcgagatctcctcgaccgacttgcagtggatgctctcctcgcgcacagccccgttaaggtattcggccactactctgggcacgcagcacggacgcgagtttacatatattacgacccctggattccgtcgggcgaagtcgatcacctcccgctccacgaactccctggcgccgcgagacgaggcgccgtcgcggctgacgctgaagctcagacgctgcagctgctgcacatagcgacccagtccgttgtggagaacgctggccaagaagcggctcggagtcccgcgcgccgtcatagctacagcttggaggccgcggagcctaagcagcgaggagaggggggcgggactaaacctcgaggcttccggttccc

SEQ ID NO: 310326 - DNA, 1097 bp, Homo Sapiens
  misc_feature (754)..(754): n is a, c, g, or t
  misc_feature (858)..(858): n is a, c, g, or t
  misc_feature (900)..(900): n is a, c, g, or t
  misc_feature (979)..(979): n is a, c, g, or t
  misc_feature (981)..(981): n is a, c, g, or t
  misc_feature (991)..(991): n is a, c, g, or t
  misc_feature (995)..(995): n is a, c, g, or t
  misc_feature (1016)..(1016): n is a, c, g, or t
  misc_feature (1025)..(1025): n is a, c, g, or t
  misc_feature (1038)..(1039): n is a, c, g, or t
  misc_feature (1045)..(1045): n is a, c, g, or t
  misc_feature (1052)..(1052): n is a, c, g, or t
  misc_feature (1067)..(1067): n is a, c, g, or t
  misc_feature (1069)..(1069): n is a, c, g, or t
  misc_feature (1081)..(1081): n is a, c, g, or t
  misc_feature (1092)..(1092): n is a, c, g, or t
tttttaatttaaaggctttttattaggaaccaggggaatgagctgcttatccctctataacagtctagagcaggtcatcaggcccaggatggagagaggttatcaaaggtgctgtggtgtgctttgctgcacgtgcttagggcctggaaggaaaggtggtggcaacagaggttggcaggaactggtgttagtcaaaacaccaaaatcctgggggagagcccctctaccttccttctaactccacttgaggtgggagcattccaggagacagagaatgtgaccaggatgcagcagtgtcatctgaacccctggcttcgttcagtgctacttcacttgccagccctccactcttcttgccttttagtgattaggtatttgaagaactcatacacagaccatgcgatggctgtggaggggatctggtaaattactctggcctgcacccctcggaaataggcggtcaccccacctacttgatataccgtcctgaaggcactagccatgcctgtgatatgtcctgtaatgtgtgagttcaaagccaaggactcctgggtgttgagcagtgttttgcaaacgtccagtggggttgtggctgcggcagctacagctcctgcgcaagctccagagaggacgtgggagcttgggttgtaccgtctctgggggttaaagtgctcctgcaggaattcataggtcatgaagtgaatggcttggaaaggaacgttcatggtcagctgggtggtgtagctgcggtaanaaggcccggccccttcattttgccacactgcccgtacacagtctgtcacccggtggtatggtgagttgtacatctgcatcctctgcttgaccacttccgcaggnttcatggctgcatcatgaagtaatgttgccacacacccggcngcacctgcaaacaagaaaacaactgccacatgtaagggcaagagagttgacaactcattgaggtccccagtgaagggantnggtgtgctanatanagcggggaaaataacgttaanagctagtcnaaagatggggccnntgctcnaaatccngtttaagaaggtaantnttgtcccacaanttgtaaggtanaatgt

SEQ ID NO: 310327 - DNA, 730 bp, Homo Sapiens
tgggctgccctcatgggccagggtgtttattcacagagcaacagagtcagcacagggcagggaacgcccaggcctcagcatatcctgagacctgcagcctgtcccagcctgggcggggcaggtgtccggtccctggctagggtctgaccaagtgctggatgtcacgtgaggaagcggggccttgtctggggtggtctacggatcactggtgacagatgccgggagggtgacaccatccgcattgaaaaggatgttgtcaaagccaggggctgtggcctctgtgttgctctggaaggggcagctccccttcttctgcagccagcgccgtcccccaagtcccagcagcaccaggagcatgagcaataggagggcactgccaaccacagctggcacagacccgggtgcggctgtgttccccgggctgggggcaggctgctggcaatgctgcccagccagatactccacgtcatccagggcaatgggccccagggctggctggccgcccagagtggcttcaaacacgatctggaactccttggcactggctacctccacctgggcctccagccactggtgccgccgatgcccgcctgcgccccacacagccagctggccctgagcactgtgcagcagtaccttcagctcccccttgtagaagtgctcaggaaaacccatgtggtaccagaagcggaggcaggaggctggggtggccggcagaggctcgctgcgc

SEQ ID NO: 310328 - DNA, 630 bp, Homo Sapiens
  misc_feature (38)..(38): n is a, c, g, or t
  misc_feature (205)..(205): n is a, c, g, or t
agaaacaagtacaagtactggtgtgtgtttgttcttcnccaagcaatgcctactgcagctacttagtaccacttagaggtgaagggtgtcggggaagcaagttagatgagttaagtgtgatgcacaggaaaatagtatcgtagcctatcaaaggtccctctgcctgcctcaagtggcttgattcttcattggttgcatttctctntgtgttggatgacgcccttctgaatcagatcagggatttccactgccagccatggacccagccccagagccagagatgagctagtccaaagccacccctgtacatcgctgtctccatccagctcaggaactgcaatttctggggcagtagtaggatatgtgataggaatgtcaaactcgatgtcaaactcatatttcaggaggtcatggatataccagcaccaaaccaccgagttccttccttgttggactccagtcggaaccaatcgttgtcagcattcttgttgttctccacataccggataagggactgatattcctccttcagtcgctgcacccacaactcacgatctcggggtccggcgttagtcttcagcaccgggatctcagacacaacacgtcgcgtggcttcatccgccatcttgg

SEQ ID NO: 310329 - DNA, 1217 bp, Homo Sapiens
  misc_feature (96)..(97): n is a, c, g, or t
  misc_feature (99)..(99): n is a, c, g, or t
  misc_feature (102)..(105): n is a, c, g, or t
cggcgtatggtaataaggttccccggggcgggtaaaaggttatacgtctggttttttgacttacgtacggattggccacgtctctgccacgtgttnntnttnnnnaccagaggaagcagcttttattgatgggttatctccagaaaccagaaagactatatgtactcactttcagttacccccgtgcctccagaatcgcatgttgctccacctgggggcggatataaattacctctagattgtccaaagcccagtctttcccttccctgtgcagccttagaaactaagtagcagtactgtttggtgtgtgtttgtttcttccccagcaatgcctactgcagctacttagtaacaactagaggtggagggtgtccggggaagcagttagatgagttaagtgtgatgcacaggaaaatagtatcgtagcctatcaaaggtccctctgccctgcctcagtggcttgattcttcattggttgcatttctctttgtgttggatgacgcccttctgaatcagatcagggatttccactgccagccatggacccagccccagagccatgagatgagctagtccaaatttgggcacattcctggcccacaaaggtttgaaatgatccgtcaggcatattttgccacccctgtacatctttgctgtctttccatccagctcaggaactgcaatttctggggcagtagtaggatatgtgataggaatgtcaaactcgatgtcaaactcatatttcaggaggtcatggatataccagcattttccaaaccaccgagttccttccttgttggactccagtcggaaccaatcgttgtcagcattcttgttgttctccacataccggataagggactgatattcctccttcagtcgctgcacccacaactcacgatctcggggtccggcgttagtcttcagcaccgggatctcagacacaacacgtcgcgtggcttcatccgccatcttggaccagggcgcaagagaaacgcggaagtggtgttgcctgtagcttacctcaaggcgccgtcatctttactatgggaagatgagacgttgggttgctgtaagacctcttttgaataagatctttgttttcttgtcacctagttacccgcttgtgagtgcatcgagaagaacagaatgtaaacagattactccgtcctatatatgacacctatcattaaaatcaccgcataaggcaaaaaaag

SEQ ID NO: 310330 - DNA, 1773 bp, Homo Sapiens
  misc_feature (1535)..(1689): n is a, c, g, or t
  misc_feature (1747)..(1747): n is a, c, g, or t
  misc_feature (1757)..(1757): n is a, c, g, or t
gacaacaaagggccgcgggcggcgggcagtggtgtcccagtctcccggtgcttccctgaggctgaggcgcccggcctcccgcccgccgcgctccagatgaagtgtgagcactgcacgcgcaaggaatgtagtaagaaaacaaaaactgatgaccaagagaatgtgtcagccgatgcaccgagtccagcccaggaaaatggagagaagggagaattccacaagttggctgatgccaagatatttttgagcgactgcctggcatgtgacagctgtatgactgcagaggaaggagtccaactttcccagcaaaatgccaaggacttcttccgcgttctgaaccttaacaagaaatgtgatacctcaaagcacaaagtgctggtagtgtctgtgtgtcctcaatctttgccttattttgctgctaaattcaacctcagtgtaactgatgcatccagaagactctgtggtttcctcaaaagtcttggggtgcactatgtatttgatacgacgatagctgcggattttagtatcctggagagtcaaaaagaattcgtgcgtcgctatcgccagcacagtgaggaggaacgcaccctgcccatgctgacctctgcctgtcctggctgggtccgatacgccgagcgggtgctgggtcgccccatcactgcccacctctgcaccgccaagtccccccagcaggtcatgggctctttggtgaaggattatttcgccagacagcagaacctgtctccagagaagattttccacgtcattgtggccccttgttatgacaagaagctggaggctcttcaggaaagccttcccctgctttgcatggctcccggggcgctgactgcgtgttaacatcaggtgaaattgctcaaataatggagcaaggtgacctctcagtgagagatgctgccgtcgacactctgtaagtggcttctctggggagagtcctctggggggcaggacctctcgtcagccctgccagccacctgccaggcccagggctgccctgctttatgacgaggccatgtgaagcactgcgatgcagtcccccaggcccctgccacaaccctcagccaccctatagctgttgaatgggataccattcaccagggctgccagggagttgaaggtttggcgggcttccatggtgtgattgccaccctaaacccttgaggaaggacaaaatgcacaaacagctttgtcctcgctggcgcagggctgttcatgtgtgcaccagcccccttcttcctgagtgccgtctgtgcctcacattccgtgtggtctatggggcagtggggcagctccctcaggcccctttgcaccaagagtggcagtctgggttctgctgggggcggtgacctcgatacccagcaaggcccagggctcctgctgcaccccaggcactgggcagagagcaccacaaaggcagcagcgtgtgtcctcgccaacagtccgcatcccaggtgctgcattcgtgcccttttgggggaaggtaagatagaagtttacagaatttaagcatctgtggnnnnnnnnnnnnnnnnnnnnnnnnnnnnnnnnnnnnnnnnnnnnnnnnnnnnnnnnnnnnnnnnnnnnnnnnnnnnnnnnnnnnnnnnnnnnnnnnnnnnnnnnnnnnnnnnnnnnnnnnnnnnnnnnnnnnnnnnnnnnnnnnnnnnnnnnnnnaagacataagcatctggagcacctgcaaaagcctgtgcatggggctcgcgtgactganagtcctccgnccttgccgagcataag

SEQ ID NO: 310331 - DNA, 1260 bp, Homo Sapiens
agcggttttcttaagtgtctttaatactccactcagggcagcccctccctctactgagaggctcttggctctggccccaagagcagctggaaggccctggcctgacttcaccacttgatgtccaggctgtgtgtgccacgctcctggctctggtacgtggtatgcagcacctctcgggccttgggggagttgatcccctccagccactcctggtacagctcctgcacgtgtgcactggactccggacgccgcacagggatgtcagcgtaaatgccttccatctgccgcagcagggccttatccgcatgtccgtctggagtctgggcttggcctctgccatttaagcatcctccagcacaggcgaggacctccacaaagtggaatgggaacttgcccttcttaagcttcaggatcatgttctggatgtttcgaaagccataggctgcagcaaagcgtaacaccacctctccgttcttctcaagggtgacctcttggaagtctttgtttctcagggctcggtaagtgacctcctccacatcctcgttgaacagctccttggccgcatgtctgaagatgtgtgccaggtgcccgtctgagctggctccatcatgacgcgtcactttgtcctccttcaagtctccaaacagagtgtcgacggcagcatctctcactgagaggtcaccttgctccattatttgagcaatttcacctgatgttaacacgcagtcagcgccccgggagccatgcaaagcagggggaaggctttcctgaagagcctccagcttcttgtcataacaaggggccacaatgacgtggaaaatcttctctggagacaggttctgctgtctggcgaaataatccttcaccaaagagcccatgacctgctggggggacttggcggtgcagaggtgggcagtgatggggcgacccagcacccgctcggcgtatcggacccagccaggacaggcagaggtcagcatgggcagggtgcgttcctcctcactgtgctggcgatagcgacgcacgaattctttttgactctccaggatactaaaatccgcagctatcgtcgtatcaaatacatagtgcaccccaagacttttgaggaaaccacagagtcttctggatgcatcagttacactgaggttgaatttagcagcaaaataaggcaaagattgaggacacacagacactaccagcactttgtgctttgaggtatcacatttcttgttaagcctcgtgccgaattcgccacccagc

SEQ ID NO: 310332 - DNA, 1659 bp, Homo Sapiens
  misc_feature (1431)..(1432): n is a, c, g, or t
ggggttaatttataaaggaaagaggttttattgatctacagttttgcatggctgggaaggtctcaggatacttacaatcatgaccaaaggggaaacaaacacatctttcttacatagtggcaggaaggagaagaatgagagctgagtgaagggggaagctcctttataaaactatcagattatgtgagaatttactcactatcatgagaatagcacaggggaaaccaccgcaatgattcaagtacctcccactgggttcctcccatgacatgtggggattattggaactacaattcaagatgagatttgagtgggaacacagccaaaccatatcagtcattccacatattgagtgatttctctcttctattcagtattcttccacagagagggacccatagtcattaccttcaaggaacctaaatcctggtgtttttatggttacgggtggcatataatatacaggtaagccaatgttacaggatgttgtgaaactattcctattcttccataagtagccactaggaccacggctgaaaccaagaggcactgattaccacctcactctaaagagaattactgagtttgtgttcactgctggggccagatctctttgcagggctatgttaggctttacacaatgtgaccctctagtctgtacaaggagaggaatgcagagggaaagcgatttactggagtctctcgtcagtgacctggtggtgaatatatggtaatgggtaaatcccacttcacctaatgaagaaaaggagaaggatgcacttcattcttagaatctaagcaggcacaggaaagggaaaatctaggagaaaagcttacaaagactgtaaatgccttcaagaaggtgagagaaactaatatttggtttactgtcagcagtctgttcgggcggcattttgccaatatagccctatcctaagggaaagggaattgtggttggacaaccgagttctgagaaaggcagtgattgagcagctgaattccatccatttggtgggtaaggaccccagagtattcaaagtatcaaatggaatgtgactgaagagttatcttgctgatcttacccaggaggactgtcccctaggcaaggggacaccaaacacaatgaggcatgggataaggatttcgtgatgagaatcgggcagaactggagtttaatcctcatgtcatggtaaggccctctgaaattctctctacgcctttgagagactcagcatttagtttctgactcctagagtcccttagtagccagtcaacgtaagccaagttagtagctacagccgtcaggcacacaattacaccatgaacagtgaagtaaaaaaatgtcctttctttgctttcttcctctaatctcaatcccagaggcatgaaaacctggttggcaatattggcaatcacttctgaaccttcagnnttatccagttgaataataaaggtctaaaatttcctttatttgcttttgtcagagcaaattatgttaccaataacacaaccatttgtctgtgatgagatgtaactctttgtgactgaagaagaggttgaagtgtgcattgccacaccagtggtacttgatgctgatatgctcacaatttctgacaatagtaatacaaagattatttttccatacatcctgagatcccg

SEQ ID NO: 310333 - DNA, 964 bp, Homo Sapiens
  misc_feature (373)..(415): n is a, c, g, or t
gtcgaaagttagaaatggaagtgacgagcacacctgagtgaaggatgagagctccagctgcattttccagttgtattcccatgttgctgagccaaaggctgatctcaagtttattgttacatgcccatttaaggcttctggccattaacacttttgattttttttggcttgttgttttactagctattttcacaacactttcatagctaaacctattttactcagattgtatgccttttcaaaaatacaatagaaggtccatattccattatctagaaataagccaaagctcatatctaacatttattaagagagatggattatttttgttcattagttatctttataaataatttttacgtactttagttgnnnnnnnnnnnnnnnnnnnnnnnnnnnnnnnnnnnnnnnnnnngttgaacttcaaaatccctatcaccaggttattgtttaaaagcattggtttttatattatcttaaaagccattatacctgagtgctgaacaacttagaaacattcagtaattgttttgcatgctatttggtgaattcatatggcaatcgtttatacatacatgatggaatcaggtggcaggccaagttaaagagcaaggccagaaaagaacttaaaagagaagagaaaacatagacagtttaggaacaatagatcatgtcttctccatgatttggaggtaaactgattacctatcagctgataaatagagaaaggttttagaactcttcccttgagtagactaatgagaggtgtcagagaagatgttttctgttatttgtgtgctctccaggaaactttgagcattcagctgaggggccaagttggctgcctctgagaagaagcccttccacctccactccactgcacttgggtgccattcccctcatttgaatgtctccaagagatgagcaaaggtacatctacagagttcagggtattgagctcatg

SEQ ID NO: 310334 - DNA, 695 bp, Homo Sapiens
  misc_feature (591)..(600): n is a, c, g, or t
tccccatatctgaggagaacgtccactgagcttcttatctacagttacactagtgaagaaccgctgggtctggaatcagaagcctcaggtccttagttctgtcatcaactattttgcgaccttggacaaaagacttgatcactcacagtcccagtttcccacaaggttactgtaaagcacacaatttaaaaaaagacaaaatacacataatagtatgttaattgtactttgtattaaaaggcaaggtgatgttatgctgatgttatctgtcttatttttctattgctatgtggtcatttatttcagactttcataattttgctgctctctttagctcctgtagtgataatactcattattttgtgtgtgatggctggtattattggaacgatcctcttaatttcttacagtattcgccgactgataaaggtgagaattcagtttttaattttgctctaaataccagtgtgaacagctctaggagggtttattcctctgagttcagttaaactcagaagagaaacagaactgcataaaattccatctttttcaactggacacatagaagtcactgtgtttctctagcagaannnnnnnnnngcatttgcccaattaaagggaacctctaaatataagtctgtcccccattttcccaatgaaagatctccctaagtttttgtctaacttgctttcac

SEQ ID NO: 310335 - DNA, 462 bp, Homo Sapiens
aatttgtattttgttttatttttatttagaagtagagaatacagtaataggcaggagaacagggagttaggatagccaagggttggggcataagcaaaggaatagcaggtgcagccagtttgcataagcaagagaacagcaggtgcagctggttctaggcaagatcaggcagcatgcaggccacatcctcatgcctttatcagtcatcgaatacagtaagaaattaagatgatcattccaacaacaacaagcatcacctcaaaaataacacgagccatcgcccaccaattaatgagtgttatcccatttgtctgtgatgagatgtaactctttgtgactgaagaagaggttgaagtgtgcattgccacaccagtggtacttgatgctgatatgctcacaatttctgacaatagtaatacaaagattatttttccatacatcctgagatcacgagcggctcct

SEQ ID NO: 310336 - DNA, 522 bp, Homo Sapiens
gatattgaggaaatattaagattcttcttatagtatttaacctattagtgtaaaaaatatttaaaataatatatttacatatgtttaaaacttggcctccaaagtgctgggattacaggtgtgagccactgcgcccggccctaattagggtttttataaaaccaaaagaacttggcaacacccctaggtaccctttagaagcctccaattggctacagcctgtgaaggattggcctgtgaccaatcagaggctgaagtggagtcttagctcatggtcaagcagaggctgaagtggaaacttcttgtctttttatcacaggcatgaggatgtggcctgcatgctgcctgatcttgcctagaaccggctgcacctgctgttctcttgtttatgcaaactggctgcacctgctattcctttgcttatgcccctacccctggctatcctaattccctgttctcctgcctcactattactgtattctctacttctaaataaaaataaaacaaaatacaaaccgttaa

SEQ ID NO: 310337 - DNA, 553 bp, Homo Sapiens
  misc_feature (391)..(391): n is a, c, g, or t
  misc_feature (430)..(430): n is a, c, g, or t
  misc_feature (454)..(454): n is a, c, g, or t
  misc_feature (510)..(510): n is a, c, g, or t
  misc_feature (529)..(529): n is a, c, g, or t
  misc_feature (542)..(542): n is a, c, g, or t
gagccagctcgtgatctcaggatgtatggaaaaataatctttgtattactattgtcagaaattgtgagcatatcagcatcaagtaccactggtgtggcaatgcacacttcaacctcttcttcagtcacaaagagttacatctcatcacagacaaatgggataacactcattaattggtgggcgatggctcgtgttatttttgaggtgatgcttgttgttgttggaatgatcatcttaatttcttactgtattcgatgactgataaaggttttcatgcctctgggattgagattagaggaagaaagcaaagaaaggacatttttttacttcactgttccatggtgtaattgtgtgcctgacggctgtagctactaaacttgggcttacgttngactgggctactaagggactctagggagtcagaaaactnaatggctgagttctctcaaaggcntaggagaggattttcagagggccttacctggactgagggttaaactccagttctgnccgattctcatcacgaatnccttattccctgncccattgtgtt

SEQ ID NO: 310338 - DNA, 430 bp, Homo Sapiens
  misc_feature (396)..(396): n is a, c, g, or t
  misc_feature (408)..(408): n is a, c, g, or t
ggtttgtattttgttttatttttatttagaagtagagaatacagtaatagtgaggcaggagaacagggaattaggatagccaggggtaggggcataagcaaaggaatagcaggtgcagccagtttgcataaacaagagaacagcaggtgcagccggttctaggcaagatcaggcagcatgcaggccacatcctcatgcctttatcagtcggcgaatactgtaagaaattaagaggatcgttccaataataccagccatcacacacaaaataatgagtattatcactacagggagctgggtacagtgaaacgatgggacaagttgtccccgtttctccctttgtctgtggatgaggatgtaactcttttgtgacttgaaggaaggagggttgaagtnttgcatttgccnccccagtgggggaccttaatgg

SEQ ID NO: 310339 - DNA, 487 bp, Homo Sapiens
  misc_feature (104)..(104): n is a, c, g, or t
  misc_feature (416)..(416): n is a, c, g, or t
  misc_feature (448)..(448): n is a, c, g, or t
gtagagatagattttgccatattgcccaggctgttctcatattcctggggctcaagcgattagccaggcttggctctgaaaattctgggattataggcatgagncactgcccctggcccccaaaatgtttttaaaaataagaaatgcctattttaacttttaaccagagaatattttctttgcctttacaattttgtgtgaataaagttaacaacatatgctcttctgttttaagattgacacattttcttagggcatttgaaacaagcaatgggatagtttaaaatggaatgattttgattctttgtcaaatattaacatatctgcttcagggaaacgatggacaagttgtcccctttctcctataaagcgaaatttcaatgtaagtccaaataagtaagacgtacaaaaaaaanaatcattttggaatcgaactgttctgtgggtntccttttcttaatcatattttgagagttgttggtcaact

SEQ ID NO: 310340 - DNA, 1023 bp, Homo Sapiens
ttagtgtccccttaatttatttaaaacaatgaaaccagactcaaaagtttacaataggaagaaaatctaaacttcatctaggtatttcaagcctttcatttgacagaatcatcattataatacaatagaataggttaagttaatattaaacaaacgtagatgaattcaactaaagttttggatcagaattctcaaacaattctaaaaattatgctaacacacaaaagcaagcattcaaggaaacatttgttctttatcttgaaatattaatgagcagagatttttttccccatcattgagtcactggaactcattataatgaaaattgcattctgaaattgtacaacttaggcaggtatataatttattggagtgtccagtccacatgttaatttttcacttgactgaagtcttatgtcttctttgtgttctttccacatttggtttggtgaacagattctcattgatcacttgtctctggattttctatttcaacagaacttaaaggcacgtctgtgtcaggtgaggggagaggttttacatcagatgggcttttctttatcagtcggcgaataccgtaagaaattaagaggatcgttccaataacaccagccatcaccccaaaaataatgagtgttatctctggttcagagaaatgatgggcaagttgtaccctttctccggtttcctcttctggagggtaaacagttctaacagaaatttctgaaacttcatgagctctaggagtggctgcatatgtgtcccgtttgtgcgtatcatttgtctgtgatgagatgtaactctttgtgactgaagaagaggttgaagtgtgcattgccacaccagtggtacttgatgctgatatgctcacaattgctgacaatagtaatacaaagattatttttccatacatcctgagatcatgagctggttcctgaagttagtgcaaaaaactaccaaagacaactgcaagtgtcagtgtctgaccttagcctgctagctgttatcttccaggcccacctt

SEQ ID NO: 310341 - DNA, 502 bp, Homo Sapiens
aacggtttgtattttgttttatttttatttagaagtagagaatacagtaatagtgaggcaggagaacagggaattaggatagccaggggtaggggcataagcaaaggaatagcaggtgcagccagtttgcataaacaagagaacagcaggtgcagccggttctaggcaagatcaggcagcatgcaggccacatcctcatgcctttatcagtcggcgaatactgtaagaaattaagaggatcgttccaataataccagccatcacacacaaaataatgagtattatcactacaggagctggtacagtgaaacgatggacaagttgtcccgtttctccatttgtctgtgatgagatgtaactctttgtgactgaagaagaggttgaagtgtgcattgccacctcagtggtacttaatgctgatatgctcacaatttctgacaatagtaatacaaagattatttttccatacatcctgagatcatgagctggttccgtgactcgt

SEQ ID NO: 310342 - DNA, 622 bp, Homo Sapiens
  misc_feature (566)..(566): n is a, c, g, or t
  misc_feature (580)..(580): n is a, c, g, or t
cccttctgagttaatgtcaaatgacagcaaagcactgtgtggctgaataagcggtgagtgtttgcttgtgccacccgtgggtaaactgcccctcggtgtgtgtgcgcgcgcgcgcatgtgtttttgcttgtgtatctataaaatgtctgatttggtaaatgcatgcttacttcgcggtgttacccgtactacattgtctcactagacatgaaggagcttgtagctttgggtgctcgagatcacagaacattttcctttaaaaggaaatgatgccaataacttactacgaaggcggccgaggaacgtgtgtattggctttgtagcaaatgtaatgccctggatcttcctacgagtcctctggtactatgaggtactaacctccactgtaattaatcttaccgccacaaattccatagtgatcctccttccctcttcaaccttgtgatgtgggatcccagactttcctatctgttaacttaagggctgttttcaatcaaataattgttacgagaagcggactggcgcctgtagcactgctgttggagatcctaggagattgggtttgngaagtttttccttngagtctctgctattttaatggtttttgcgctgtcgaggcggt

SEQ ID NO: 310343 - DNA, 373 bp, Homo Sapiens
gacaggagctgatatccgtggagggtggtcagcggcgtcctggacgcctggttctgcccgggtctctggtgatgcaggctgacaatagtgggatgcgagtccagggcgatctgcaggtccaagatgtagtcgatgacgtgctgcaggaccatcttgctcaccttcttgttctgggggatgctgggcaccagctccttgagcttggagctccgggagatgcccaggctgtggtccgacaggctgtcctaacggacctcacgggactgaaggctttcatgctgaccgcgagggaaggcgagaccgggagggagctggctgccctgaagctcaggccgccgctgccgcctgctgagctagctgcgcttggcaccgg

SEQ ID NO: 310344 - DNA, 711 bp, Homo Sapiens
  misc_feature (98)..(98): n is a, c, g, or t
gtagtccacagaccagcaagttccattaaacacgtttatggtaacaattcagatttaaagacagacgcattaacatgtcagaacttactagcaatttncacgcacagctcaatctacagcagattctgaagaaaataaagttaaatagctcatacgaaagtcaccgtctgggctacggatctcctagtgacagcccagacgaccgcgggagtgtgcggcggcggggcggggaccccggagcaggtcttacctgcaaggacaggatgctgatatccgtgttgagggtggtcagcggcgtcctggacgcctggttctgcccgggtctctggtgatgcaggctgacaatagtgggatgcgagtccagggcgatctgcaggtccaagatgtagtcgatgacgtgctgcaggatttccatcttgctcaccttcttgttctgggggatgctgggcaccagctccttgagcttggagtagcagtcgttcatgttgtatagcaggctcatcgggtcgtccacaggggttttgctccgggagatgcccaggctgtggtccgacaggctgtttttcctaacggacctcacgggactgaaggctttcatgctgaccgcgagggaaggcgagaccgggagggagctggctgccctgaagctcaggccgccgctgccgcctgctgagctagctgcgcttggcaccgggctcggctcagaatggt

SEQ ID NO: 310345 - DNA, 618 bp, Homo Sapiens
  misc_feature (553)..(571): n is a, c, g, or t
gggattctgagccgagcccggtgccaagcgcagctagctcagcaggcggcagcggcggcctgagcttcagggcagccagctccctcccggtctcgccttccctcgcggtcagcatgaaagccttcagtcccgtgaggtccgttaggaaaaacagcctgtcggaccacagcctgggcatctcccggagcaaaacccctgtggacgacccgatgagcctgctatacaacatgaacgactgctactccaagctcaaggagctggtgcccagcatcccccagaacaagaaggtgagcaagatggaaatcctgcagcacgtcatcgactacatcttggacctgcagatcgccctggactcgcatcccactattgtcagcctgcatcaccagagacccgggcagaaccaggcgtccaggacgccgctgaccaccctcaacacggatatcagcatcctgtccttgcaggcttctgaattcccttctgagttaatgtcaaatgacagcaaagcactgtgtggctgaataagcggtgttcatgatttcttttattctttgcnnnnnnnnnnnnnnnnnnnattcacggaatcttttaagtgctgaacttatttttcaaccatttcac

SEQ ID NO: 310346 - DNA, 725 bp, Homo Sapiens
  misc_feature (93)..(93): n is a, c, g, or t
  misc_feature (167)..(171): n is a, c, g, or t
  misc_feature (174)..(174): n is a, c, g, or t
  misc_feature (176)..(176): n is a, c, g, or t
  misc_feature (180)..(192): n is a, c, g, or t
  misc_feature (196)..(200): n is a, c, g, or t
  misc_feature (276)..(294): n is a, c, g, or t
  misc_feature (691)..(691): n is a, c, g, or t
  misc_feature (709)..(709): n is a, c, g, or t
aaattccccaaagcccccttagttccaatggacccagggagtttttccttagggaaaaccaggcttatggacccatgtttcaccttaccctanctgggggcccgccgcgcccaaacggaatgggtctagaaaagctttctcgaggggccgaggtggccggacaaggnnnnnttntntttnnnnnnnnnnnnnttcnnnnnaaaaaggtccattcaacttgtcctccttgtgaaatggttgaaaaataagttcagcacttaaaagattccgtgaatnnnnnnnnnnnnnnnnnnngcaaagaataaaagaaatcatgaacaccgcttattcagccacacagtgctttgctgtcatttgacattaactcagaagggaattcagaagcctgcaaggacaggatgctgatatccgtgttgagggtggtcagcggcgtcctggaccctgggttctgcccgggtctctggtgatgcaggctgacaatagtgggatgcgagtccagggcgatctgcaggtccaagatgtagtcgatgacgtgctgcaggatttccatcttgctcaccttcttgttctgggggatgctgggcaccagttccttgagcttggagtagcagtcgttcatgttgtatagcagggccccatcgggtcgtccacaggggtttttgctccgggagaatgcccaggctgtggtccnaaaggctgtttttcccancggacctcacgggact

SEQ ID NO: 310347 - DNA, 463 bp, Homo Sapiens
  misc_feature (38)..(38): n is a, c, g, or t
gaagcctgaataacccgtgttgaagggtggttccaaangcgtcccctggaacgcccctggttcctgccccgggtcctctggtgaatgccaggctgaacaatagtgggatgcgagtcccagggcgatctgcaggtcccaagatgtagtcgatgacgtgctgcaggatttccatcttgctcaccttcttgttctgggggatgctgggcaccagctccttgagcttggagtagcagtcgttcatgttgtatagcaggctcatcgggtcgtccacaggggttttgctccgggagatgcccaggctgtggtccgacaggctgtttttctaacggactcacgggactgaaggctttcatctgaccgcgagggaaggcgagaccgggagggagctggctgccctgaagctcaggccgccctgccgcctgctgagctttgtgcgcttggcaccgggctcctagtgccgaat

SEQ ID NO: 310348 - DNA, 289 bp, Homo Sapiens
  misc_feature (78)..(96): n is a, c, g, or t
  misc_feature (253)..(253): n is a, c, g, or t
  misc_feature (261)..(261): n is a, c, g, or t
ttaaaaaggtccattcaacttgtcctccttgtgaaatggttgaaaaataagttcagcacttaaaagattccgtgaatnnnnnnnnnnnnnnnnnnngcaaagaataaaagaaatcatgaacacctgcgaaagagtgggggagaaaggcatgtttaagagaatgtaacctaagggcagaggcgggcgactggcgcgggaggaagccacagtttgaacatttaaccaaacactcaaagattgggcaaaccctggncgtccagntgcaacacacacactcgcctcgacagcg

SEQ ID NO: 310349 - DNA, 673 bp, Homo Sapiens
tttgcgctcagtcccagacttcaaggagttctactctgaatccaacatcaatcatgagggcctagagtgttttaggctgctcaaatgagataattgctgtttttgatgagctgctctccaagcccaagttcagtggggtggagaagatcaagaccatcggcagcacatacatgcaagccacaggcttaaatgcaacctctgaacagaatgcacaccagaatgctgaacggagctgcagccaccttggcactatggtggaatttgccgtggccctggggtctaagctggacgtcatcaacaagcattcattcaccaacttccgcttgcgagtggggttgaaccatggacccgtagtagctggagttattggggcccagaaaccgcaatatgacatttggggcaacgcagtgaacgtggccagccgcatggagagtacaggagtccttggcaaaatccaagtgactgaggagacagcatgggccttacagtccgtgggctacacctgctacagccggggtgtcatcaaggtgaaaggcaaagggcagctctgcacctacttcctgaacacagacttaacacgaactggacctccttcagttaccataggctgagattgcactcgccttctaagaacctcaataaagagactctggggtgtctggagcccagggtt

SEQ ID NO: 310350 - DNA, 1781 bp, Homo Sapiens
tttttcattcttcattttatttgcatgtcccaacaactcatctcaaatactaaattcaaaagaaaaactgtagttctcctcagcattagcactaatttatggtaacaatcatttcttttaaatgtctaacttatttaaccccttcattttaaattgcaaattaaagcatgtatttacatatttatatacaaaaaacttcaaaaacaaattaatccaaatcttggtccaagagtttccactttataagtggtatggtactatgctatatatatcctcttccaaaagtctcttaggacttggtaagttccaaatattcattcacaaatggttcccctttaagcttaatgaaccatatacttcatttctgagtaaattagaggaaatattacagaacacgctttgtacaatacagcaccactactgagaagggctcgaggttttgtaatccaaggttctgacttaaagcaaaaatacacggcatagattgcaacagcaaagaagtgtccaattaaaactagagggttaggagacaatacagaaagcagcccaacaggacccgcaacacattcgccaccaagtttgaaataaagaaaacaggcttttcttagttgatgcagggaatcatctgtggcagaaaataattcataaagagcctgagcaaggatattcacgacaaaggaatgagatgtttttcttgcccagtaaaatgattttttggcctcgaaaatagctgcatcatcataaaggtcagggataccctttagcagttttctccatagttttatatctttaaaagcaacagtcattcctccaccagtaagtggatgcctcatattatatgcgtctcccaaaagaagaacacctcgtttcttcactgatgaaggaggaaggaagcttgctggcatggacctcagatgagaattgtcagtggcttctaagaatggttctttcaggtgatcaggtatttgtgggtaaattttttcaaccatgtattctcttaaattccttggcatttctcctctaatgtcaacaagtactcgagtttcactggatgaaatctggtagatgagaactggactcgggttagctaaaataagttcagcatgatttgctttaaactgtggtgcattcttcataagaaagccaacaaaatgagatgatacagaaactttattggagaccaggcttttcctgaacttggagaaaagcccatctgcaacaacagtcagtggagcatggagttccttgatatctccagtctctttatccttgtactgaactcccatcacaacatcatcttcctctaataactgtaacacaacaccttcaataaactttgcattgggctctgccatagctgctttccggagactcatgatgaatcttccgtgatggaaagctcttccactctgcacttgattgttttctgacagagggtaaggaatctgaacctctgatttgctttcctgatcatgaatcatgtaaccatttacaacctgggcatcaagaccttccactgtatctccaagaccaaggtctttgagaacatgataaccacccggctgcaggaattctccaactattctgtcaggctcttttaagtctctctcaatgactgtcacctttcttccatctctggaaagcacagctgccaaagcagagccaagcacgccagctcccacgatgataacttctgggtcattctgagaagatgttgatgtacaggcagctgttcctattaagcttgtttctgaaatattggttccttttctgcgcctcct

SEQ ID NO: 310351 - DNA, 769 bp, Homo Sapiens
tggaggaaaaataccatccaatttatttcattacatggggacaaaaattcccataactctggaaggtcaagttacatcatcaaagttgtttatttaaaagtagaagtatgtgttggcaatcgtttccatatcagtcagaaaaattaggccggtttcacaatatggagtgtcctttctggtcaacagtattgcttcaggagagatagcatttcacagatctttcctgtaacttctagaaaagtcatccagccagatttaggttcaaacttctttacaaagccattttcccagcctccgttttgccttatccattctcctgtgttattcattatgaactccgcaacaaaatatgaaatctccttataggtatccacatccggggcaatttgctgtcgtagaagtttcttgatgagaataccttcaaatgcaaatatggttacaattcttccccagttaatgatgccgtcttcaaactccttttccatcacttggttgaatagtgttctggcagtgtctacggacacaacattaacattgtccaagcatgacttcagattcttttccacttctttttggactgagaacgcaacattttgtagcactctggacgttttgcttggacctgatccaggttgtggtatctgtaggacgcactgcagatagtcctgagccagcctgtaaatatatccaaattcacagtctgtcatcttctgcctggtggagagcaaagtcttgagctggctcaccttgaagctgttgaggcaatgtg

SEQ ID NO: 310352 - DNA, 824 bp, Homo Sapiens
  misc_feature (174)..(174): n is a, c, g, or t
  misc_feature (460)..(516): n is a, c, g, or t
agatcccaagcccctttggtcctgggcccgcggtttttctttgggaaagcaggttatgaccccagtttcccttaccctactgggcccggccgcccaaaacaaatggttctggaaacctttggggggcccggggcggcccgccaaggttttcatccaatcctttgggggagtttnggcgaaaaatacatacaatttattcattaaatagggacaaaatttctgtaactctggaaggtcaagttacatcatcaaagttgtttatttaaaagtagaagtatgtgttggcaatcgttttcgtaagagtcagaaaaattaggccggtttcacaatatagagtgtcctttctggtcaacagtattgcttcaggacagaagagcatttcacagatctttcctgtaacttctagaaaagtcatccagccagatttaggctcaagcttctttacaaagccattttcctnnnnnnnnnnnnnnnnnnnnnnnnnnnnnnnnnnnnnnnnnnnnnnnnnnnnnnnnnttggtccgcgttcacgttagagttaacgtcctccatcccggccccgctgcctccgccgcccgcggccctctcgctctcgcagcaacaagggaagagccggaggaaagaggcgtccacgccgctcactccagccgaggcccccgcatatagcagggccaggccccgtcgccagggttcccccagcgcgggtcccgaagcaccgctggccacagatgaaccgcctcctcagcgcaggtccgggattcggggaggcagcgccaatatccggtctctgcagccatcttccctccgtccctccgcccaccccc

SEQ ID NO: 310353 - DNA, 652 bp, Homo Sapiens
  misc_feature (553)..(553): n is a, c, g, or t
gagccgtcggcgcattggcacgcgtttttttagtctcgcaggttcaggggttttgtttttcttgcccttgtagaatttcttttagggcaggttgtacgggtttattgttccaataccacaagagacatacagaagcagtgctttctctgggcagcctcatggaccagatcagtgtcaaactgtacccttgagtgtccccaaaggttccagcagagggaagaagaggactggacatgtttgggcccctgttcccggtctttggtaaacagacgcttaagttgacaacttgggacttggccaatactggcattctaaatcaccacatcattcccaacttgtcactcatgcttcagatgacggaaaatgccacatcaggattaaatgagaaaaaaacctttcagataaaatgagacttgaagtcatacaaattttatacttgatctaaattaagcaagaaccctcaactctgtaataagtcgaaatacaagatataaggcaggaaacaaggcaagggaaaacacacacaggggcatctacttgctggaaacatgtnggagaagagcaagagcaggcatggctttgtttcttcccaaacctgctgatgtcaaaagtacgtcaaaggagcctaaaggtcccagagagcagggcccag

SEQ ID NO: 310354 - DNA, 688 bp, Homo Sapiens
cttcaaaaaaatgcataaaagaatttcaactcatgtgcatgccacacatttccatccccagtaacttattctccaaattggccttctcctcaaaccatgaatctatgttttgagtatctccttcatcatccaaggatgaaaaattgatgaaatccgagggggcatcataggaataagagcttttaacttgtgacattgtctcccacttaacgcagaagagcaggtttttcccagtatttgtaccacttttctcagcaggtcaccttctgtggtttaatcagtctatcaggcctacaggtctgactcaaagttgcaatcttctctttcaccccttttctgaaatcttgaagtctggcaaatatgtatcaagaaccgttattagccgacagcctcccgcaactctttttttcctccgtttcccggacggacttcacagcaaaatcctgtcgccaagagaagcgtggcccgaagcccctgctcgcaccctgccccgcctaggcggcgaccgagcaccgcaaccgcctcagaagccaggcctagcggcgcgaacggcgctaggggctggaaggtgaacttcagccgttccaaactccgggaggagggagacccgcgccctagctgctccctcttttcttcccacggctcacctagccctcgtgccgaattcgccacccaggcctcgctactt

SEQ ID NO: 310355 - DNA, 1009 bp, Homo Sapiens
ggagatccagggccacagttcagaggccgggttcccttgacttttatttcccagaacccgggtacttggcgtattggatttggccttatgcagccagttctctcccgtagccttggccagctcctctttttttctgctcttcctcctgtagtctggcctcctccaactgctgggctttttgggtttctacctcagccattctcttctccagctcctgccgctctttggctctcttctcagtagccagctgaaaaggttcctgaactagagaaccagaaaggccctcagcaactgatttcttctctttcttgggaacaaagggctcctgagagatgacggtgtttggacgagccttgaaacaagctgcttctttctgctgtctcagttcttcttccagctggtgcttccaagtctgtgccttcagagcacctctcctgtcagtctccaagcagaaaggttcaatctgggtcacattctttaccttcttctctggcaggttaatggtgtcaaaatgaggcaagggaagtgccttgaacttgggcacctcccctttctgcagttcttttattttcttctccttctgtaactgacgttctttgtctcgagaatcaaaggagaaagggcatatttccacagttcttgcctctgggatttggggcttaaaaggcaccccataatgtggcacaggttgagcttttatcactaccggttcgtcctcttcctcatcttctttggtgggcattcgaattctgttcttcaatgcaaaggctggtgacttggggacggtgattggaagtaccttcttttcaggaacacccacaacatcttccaaaatcttagtagggcaaggtctggaatgaaattcaaagtgttcatcctctgttttcttctttgattctcgctcctggattcttttctcaatttccaaatcaaagccaataggctcggtgggcctcgtgccgaattcgccacccaggcctcgggcttaggattgagggggcgccgaaca

SEQ ID NO: 310356 - DNA, 1814 bp, Homo Sapiens
ggccagaattcggcacgagcggcacgaggcatagggctcggcgtggtttcacaggtggtttcttgggcaagatgggcccaccttcaagtattctgggatcaagttcacgtgctttgaatttgtattgttgcaatttctcgagctcctcagcctccagctctgctgtacttttgcaggtcacagcccgtgcacggtgtttggtttgcagtacaggagtctgtgggtctctgcaaatcttggtcacagaagatttggagggtaacaggttaatatcatccttcttgctcctcaaatgatatctgttaggggttcgtttatggaagtcttcaacttgctgtgcaagggggcacatatgtagaaactgtttcatcaaatgttcttttctttccttgggacaggttggaaaggcttaacaatggtacatcccttagtcactcgggcaggagatgaaggatgctttcgtagttcagatgtaaagttcacttccttatattcctcctggttcttaggatgttgtttgattcgctcatctgtgcggaagtggaagtcaactgatttggtgacctggctcactgatttcttcacaggttgccctattccagccagagcaagtttcttgaattcttcattctttttccgcatctccaccacctcttgctgcattttcatactcttctccagctcttgctcctcagtactttttagaaacttctgctttgcaggtggcatacaaggcacagtatgtctacccttggctttctctggggaagatgcattcttttcagcagtatcttgatgagcactgccttcttcctctggcttctttttgttgttagaaactttcattttcttagagggtagaatttcatcgatgattacaggagtggcacatctcttggctttcatttttacatgatgcttttctttctgttccaaatccttctgagcagaaagcctaagagatcttctctgaggctgggctggagtttttcttgatatggctgcctcaacttccagggaagaacaagcatttgacggaatggattgttccacaagattttctttttctgcctctttgtagtaagtgttgtcaactggtttcaaaggtgtgacaatagcttgctgaagattagcctttctcaaaggagttttgccctgaaaaagccctccagttccattcttccccagtaacttattctccaaattggccttctcctcaaaccatgaatctatgttttgagtatctccttcatcatccaaggatgaaaaattgatgaaatccgagggggcatcataggaataagagcttttaacttgtgacattgtctcccacttaacgcagaagagcaggtttttcccagtatttgtaccacttttctcagcaggtcaccttctgtggtttaatcagtctatcaggcctacaggtctgactcaaagttgcaatcttctctttcaccccttttctgaaatcttgaagtctggcaaatatgtatcaagaaccgttattagccgacagcctcccgcaactctttttttcctccgtttcccggacggacttcacagcaaaatcctgtcgccaagagaagcgtggcccgaagcccctgctcgcaccctgccccgcctaggcggcgaccgagcaccgcaaccgcctcagaagccaggcctagcggcgcgaacggcgctaggggctggaaggtgaacttcagccgttccaaactccgggaggagggagacccgcgccctagctgctccctcttttcttcccacggctcacctagcctcgcctcagatctgacaacgaagcgcgagccccc

SEQ ID NO: 310357 - DNA, 2287 bp, Homo Sapiens
agagggaaagacaaaacgtatttattccaggccaggtcttaaaatgcacactgcacggttccctgttgttatcagcaccagtaaggaaagaacgtgccttaacggcagccccacccagagcctgctgcgtggctgctgtgaggctccccatgaatccacgcagtcttcttcctcactggtgcagttggtgaggttttctaccctcacagcaaagggatccttaactataaattcacggtatgcagagaagaggacagaatctgatttactgattgttcctcatttaaaccatgacttaatctctatcttaggatttaactatctttattttctggttaaaatttttaaaaaaagtggggagagggtgagagtcgtaaggggcaatagcaatagagattacactgtgctgacacagagactaaattctagtcagagtgaagacccatataaaaggccggctgatggtttaaaggaagtaactacatggagtctaatcgagacattcatgagttacatctcattattagccttagtaatgtaagaaaacaattctcaacaaaactggagtccacagttgtcaagtatgctttctcaggcacgggtaggtaaaagtctggagaaatgggttctctccatgcccaatgacaaagcaagacggtcctaggtttgaggttaagagcaggtcccattgccgggcggtatccgcagctcacagctgagtttagcagtggaatcgagtggagaatttgggagatacaggcacagtcagaggctggtcacttgactttatctccagaccctggtacttgcgtattggatttgccttatgcaccagttctctccgtagcctggccagctcctctttttttctgctcttcctcctgtagtctggcctcctccaactgctgggctttctgggcttctacctcagccattctcttctccagctcctgccgctctttggctctcttctcagtagccagctgaaaaggttcctgaactagagaaccagaaaggccctcagcaactgatttcttctctttcttgggaacaaagggctcctgagagatgacggtgtttggacgagccttgaaacaagctgcttctttctgctgtctcagttcttcttccagctggtgcttccaagtctgtgccttcagagcacctcttctgtcagtctccaagcagaaaggttcaatctgggtcacattctttaccttcttctctggcaggttaatggtgtcaaagtgaggcaatgggaagtgccttgaacttgggcacctcccctttctgcagttcttgttatctttcttctccttcgtgtaactgacgttctttgtctcgagaatcaaacgagaaagggcatatttccacagttcttgcctctgggatttggggcttaaaaggcaccccataatgtggcacaggttgagcttttatcactaccggttcgtcctcttcctcatcttctttggtgggcattcgaattctgttcttcaatgcaaaggctggtgacttggggacggtgattggaagtaccttcttttcaggaacacccacgacatcttccaaaatcttagtagggcaaggtctggaatgaaattcaaagtgttcatcctctgttttcttctttgattctcgctcctggattcttttctcaatttccaaatcaaagccaataggctcggtgggtggtttcacaggtggtttcttgggcaagatgggcccaccttcaagtattctgggatcaagttcacgtgctttgaatttgtattgttgcaatttctcgagctcctcagcctccagctcgtgctgtacttttgcaggtcacagcccgtgcacggtgtttggtttgcagtacaggagtctgtgggtctctgcaaatcttggtcacagaagatttggagggtaacaggttaatatcatccttcttgctcctcaaatgatatctgttaggggttcgtttatggaagtcttcaacttgctgtgcaaggggcacatatgtagaaactgtttcatcaaatgttcttttctttccttgggacacggttgaaacggcttaacaatggtacatcccttagtcactcgggcaggagatgaaggatgctttcgtagttcagatgtaaagttcacttccttatattcctcctggttcttaggatgttgtttgattcgctcatctgtagcggaagtggaagtcaacctgatttggtgacctggctcactgatttcttcacagattgcgaacgcgtgggtcgacgatatcccgaacttccagaccggtacc

SEQ ID NO: 310358 - DNA, 419 bp, Homo Sapiens
  misc_feature (367)..(367): n is a, c, g, or t
  misc_feature (390)..(390): n is a, c, g, or t
  misc_feature (404)..(404): n is a, c, g, or t
gctcagaaggatttggaacagaaagaaaagcatcatgtaaaaatgaaagccaagagatgtgccactcctgtaatcatcgatgaaattctaccctctaagaaaatgaaagtttctaacaacaaaaagaagccagaggaagaaggcagtgctcatcaagatactgctgaaaagaatgcatcttccccagagaaagccaagggtaggacatactgtgccttgtatgccacctgcaaagcggaagtttctaaaaaggtactgagggagcaagagctgggaggaggagtatggaaaatgcaggcaagggggtggttggagatgcgggaaaaaggaatgaaggatttccaaggaaacttgctctgggctgggnataggggccaacctgtggaaggnaatcagtgaggccnggggtcaccccattc

SEQ ID NO: 310359 - DNA, 419 bp, Homo Sapiens
  misc_feature (377)..(377): n is a, c, g, or t
  misc_feature (403)..(403): n is a, c, g, or t
ttcttcaaaaaaatgcataaaagaatttcaactcatgtgcatgccacacatttccatccccaccccaccctgccccaccctctacaggcacacatattcacacaccaaagggactccttcctgtaactggggaacagaatgtaaaaaaatccatccaagtggccaccgataccagaaataaccaaatgcatttacactcacaacatcagtcaactcacatgcacaaggagaagcgtctccaatcggagcttagagccaaaaattacaaatgggcagagacttgaggctatccataaggataattttaaaaatccttccactggggccactccccttcatttacaaaggttggcaaacaatcttgcttttaatggggnaaacgggcgttttgggctcttttccngggggacatgaggggg

SEQ ID NO: 310360 - DNA, 232 bp, Homo Sapiens
attaagaccaagtcatgcaataattgaatgtacctcaaatttttaggggagggtgggttagggactgatactcagattgtggataataattgaattggtttttaaaggcaacatagcattctacagcagggttaatctattatcaagaacagtcaccctggttaataacaagttttactgatcagttgctggttggttggttggttggcatgtgggtgtgtgggtgtatagg

SEQ ID NO: 310361 - DNA, 1702 bp, Homo Sapiens
  misc_feature (1536)..(1600): n is a, c, g, or t
gtagcacaattcaagtttattccatttgttcttgcaacacaaaacttaaaacacagtattatttagcattcggatgtacatgaactaggatacttatgagaaacccaactgcgtcaaaagtatgacattgtggaaaaaatgaactcaaatatatcaaaatgcacaaagcactagtcttcctccattaccgcttagaaagatatgattgtttctccatttacaaaatagaatcaggacaatttaaattttttatattttgcatgcaaaacactgcaattgcttatttatgtaggagggcactctcaccagcttcttctatacacaattgagtatacaatattgcatggaagaaaacagcagctcaactgaaatattagagatcaaaatcaaacagatacatacagatttaaaatccagtacttgggaaaagatatcaatgaataaaaggcctacttgtttgcagcttccacacactgcacctacctactacctctcttccatgcttaactgggtttagaaaggtgagctatgcgtagaagaactacttgggatattcaagtgctgtatttgaacgataagcctatagataacagtctgaagctgcaagggagactttgttagtacactactataaacaggtaaactacctgtttgtacttgatatagtgcatatgaaatgactgatttaatacaaaactacagaacatgcaaaattttttctgagatgttaagtattacttcagtggagaacaaaacttacttaacctttcgctaatgcatgtagtaccagaaagcaaacatggttttagcttcctttactcaaaatatgaacattaagtgttgtgaatttgtctgccaagtggttcagaaatacattataaataacctagttaaaaaaagaaactgtgaaccatcttggtcagtctattctattctatgtttatatgttattttctcaagcaatcgcttcataattatagggtttacaaaaaggtcgagaaagaaaagcgaaggcgaaatagcctctactgcattacaagcaacatcaggataaactgtacaaagaatcacatggtttccataccatgaatgtagaaagcagaccaggtttaggaatgataggacaatgcactctctgcaatagccaactacaacaaaacactttgaaagtaaaggtgaaaattatataaagggaaaaattcaagcctttaaatagcattatgtcaagaggtgaaaacaaaggtatcaaaacaccctgttgcactacgttgatagttatagactgatagagtgccctccattttcaatgaggatgtctccatattttagttcagtgatgtaataaagtactgattactgatttttaaccccaactcttaataggctgcacttaagacagcaaaattagccaaatacaacaaagtatttaaaccactactttgtgattgttttcttggatgtaggaaaattacagggttaggctagttgtaagtgaaaaagccacaggattaaaaaaaggactcatggggaaaaatnnnnnnnnnnnnnnnnnnnnnnnnnnnnnnnnnnnnnnnnnnnnnnnnnnnnnnnnnnnnnnnnncaactgatcagtaaaacttgttattaaccagggtgactgttcttgataatagattaaccctgctgtagaatgctatgttgcctttgaagaaccaagttcaat

SEQ ID NO: 310362 - DNA, 1043 bp, Homo Sapiens; identical to SEQ ID NO: 123326

SEQ ID NO: 310363 - DNA, 797 bp, Homo Sapiens
agagctcccgaacttccgaatttttgaaacgggaatgtttgccatgtaaatacccccagggggttcccataaaaaaccccggtccatggtgaatgggggagaaggggggcctgatccagggccttccctgtttggcttaacaaatttttacagcaggaaaacaaaagtattaaggtttgcaagccaggaagcaaagtgcatggggaataagccttgcagctttttccaaatgagacagagcccaaatcttttttcggagtcggttttcttcatttctattaaaccaaggtcctttttaggcagtcgaatttcatcccaaagccagagtgagctactttgtttgggggaacagtaacagttacctccaccactgactggctgccatctggattgatccggaaagatcccatctgaatggtcttcttggggtccacctgggcaatttcccattctagttcatccaccagagccctgcatgctccacagtggagatcctggctcctccgagcccaggcggttcccagcagggcccccagaagcagggccagccaaccccagcctttcatctttagcgtaatggggtcgctccacctctgctcccagggccgccgccgtggcccaagcgctggaagaccgctggactctcactttggccccagtggctcccgaaactacacctggctgcagggagcagggctgtccgggattctccagagcgcttcgccgcctgccacacacggggtgtcccggcgaccgcctgacccagctcccctgacgctaactggtacctaagcccc

SEQ ID NO: 310364 - DNA, 1939 bp, Homo Sapiens
  misc_feature (940)..(980): n is a, c, g, or t
  misc_feature (1898)..(1898): n is a, c, g, or t
ttgttaaaaaaagaaaagaagaaagacatcatggccaactggtaggttcctaagtctccttccatccagtcaagccagaagatgcccaggggagtagggaggtgtggggagggaggtgtaggggaaggagatatggagagggaggcagagctacagggagcgagccactggaaggataggttcatcccggtgacttcatggctgtgaccacaaatggggtagggaacaggacccaggaagcccctcatcccctagcacgtgggtcttctccattaggcacattcagtccactcttgcattctttcttcccaccctgactgctcagagaaatgtaccccacctccctagccctctgtgcttcaagtcttcctttgacccccttcgctctcccacagcagggctctcagctgccagccaaccaagcagatggtgcaacaaccagacctaaaggaaggacctggggaagaagagaaagggagcctggcaagtctgagctttgggagtgggtctggacctcgtgaccattactccatctgctaccccacgcttccttaggctcccaccctctggctagcttgagaggaaggacgatggtcaaggtacatgtctcttctcctctgactctgggaatgagatttttctactcccacaggcttgaactctccttataggagtgtctccacatgccaaaatcagaggaagtcagaataaaacctcccaaggctgaaaactagagctggcacgtagtacatggtcagtaaatgtttttaggtggctggatgagtgaaggaatgagtgagtgagtgaatccaggatcgatctggaaacacaccagggctcagacctcttgggctaagtgccagtctcagtcctcttgggctgtgtaacaccaaagagaacaccccaggctctggcttaccccaagggcacacccatgctnnnnnnnnnnnnnnnnnnnnnnnnnnnnnnnnnnnnnnnnngcgcatttgagggaaacttctgggccgcaggcagagacaggactcagactcagactccactctgggtcagctctgcagcctccagagcacaggagtagcaggggacgctgagtccctggcctgctggcaggcctcactctcgaaagctgtcagccagctggtggcagtccagctccccctttggctccaggccccccggaagcttcacccccgtcttccggtccacacaccagcacttgccacgctgcccatccagagctgggtgacactgcttggggtggaagttgccgttgcggtcgcagttggggatggggatgatgtagaggtcctcgtgggtgcggctctgtgaagcggccagccgctccagcgcccggtgcagctcgctctggcaggagccctggggcacaggccgggcatcctcccggggcgccccattgaccttcatcttgcccccactggtgctccggtctcgaattttggcgaagtgcttctgcaggcacctgcggtcatgggcgctacaggggctgaagctgttgttggggtggtcaccctcgtccttgtcagagggctgcaggctttcctggatggcctcgatctccgccagctccatgcacacgccttgcccgtgcatcagtgtgtgcaggggcttctccacccctcggggcgggtagcagcgcaggcccgagccgcaacggggggtgtacaccccgcagggcatccccaagcccagggcgcaagtggcgcaacagccgcagcccggctctcgcaccagctcctcgcagcccacgggggggcggcagcgcgctagcttctcctcggagcagggcgggcagtggatggcttcgtcgcccaggctcggcccgggcccggcggccagcctcgtgccgaattcgccacccaggcctcgctacttaggangggtgggggcgtgaggtggggtgtggatgggggaagaaagg

SEQ ID NO: 310365 - DNA, 406 bp, Homo Sapiens
agccatgctgactgaggccaagtggggcatcaggccaggctgatgtggtgaacagctcacagaaggattactttgagaagatagttttgtggcttttaaataaggcgcatgttatcagctccccttagctatggcccaggcctgccacggagggactttggtggagggaagtgccgtgcaggatgcaggggagtcaacagggtcaggaactctccagaaaaggaggactgctgtggctgaccagcctgttttcctatgagcacaaaagacacaggcatagctgcagaggagaaagcagccagagatgtgtggggaggggcagaaaagaggggctgccccttggattctggagagtcaaagcctcttaacaaggaatgaacaggaataaaagacagctgtgagtgtg

SEQ ID NO: 310366 - DNA, 560 bp, Homo Sapiens
ggtctgtgtcatagcagcttcttgtccagctttattgggaggccagcatgcctggaggggggccaggcatgaggtggggtaggagagcactgagaatactgtcccttttaagcaacctacaggggcagccctggagattgcaggacccaaggagctggcaggatggataggcaggtggacttggggtattgaggtctcaggcagccacggctgaagttggtctgacctcagggtccaaatcccagaactcagagaacttgtccttaacggtgctccagtagtctttcagggaactgaagccatcggtcacccagcccctggcctgctgggccacctgggactcctgcacgctgctcagtgcatccttggcggtcttggtggcgtgcttcatgtagccctgcatgaagctgagaagggaggcatcctcggcctctgaagctcgggcagaggccaggagcgccaggagggcaacaacaaggagtacccggggctgcatggcacctctgttcctggagcagctgcctctagggatgaactgagcagacaaggcacggagggtt

SEQ ID NO: 310367 - DNA, 478 bp, Homo Sapiens
ctaggagcagctgctccaggaacagaggtgccatgcagccccgggtactccttgttgttgccctcctggcgctcctggcctctgcccgagcttcagaggccgaggatgcctcccttctcagcttcatgcagggctacatgaagcacgccaccaagaccgccaaggatgcactgagcagcgtgcaggagtcccaggtggcccagcaggcagggggctgggtgaccgatggcttcagttccctgaaagactactggagcaccgttaaggacaagttctctgagttctgggatttggaccctgaggtcagaccaacttcagccgtggctgcctgagacctcaataccccaagtccacctggcctattccattccttgccagcttccttggggttccttgcaattttccaggggctttgcccttgttaggtttgctttaaaaaggggacagtatttttcagttgtttttcttaccccaactt

SEQ ID NO: 310368 - DNA, 451 bp, Homo Sapiens
ttttcatagcagcttcttgtccagctttattgggaggccagcatgcctggaggggggccaggcatgaggtggggtaggagagcactgagaatactgtcccttttaagcaacctacaggggcagccctggagattgcaggacccaaggagctggcaggatggataggcaggtggacttggggtattgaggtctcaggcagccacggctgaagttggtctgacctcagggtccaaatcccagaactcagagaacttgtccttaacggtgctccagtagtctttcagggaactgaagccatcggtcacccagcccctaaatagtcaggggaagcaacagagcagggcatgagaactcctctgtaggcaaccatggggacccacacccattttccccactgggacgacaccagtcaggaccacaccaccttttcaatttcattgggacgacagcc

SEQ ID NO: 310369 - DNA, 463 bp, Homo Sapiens
ttttttttcatagcagcttcttgtccagctttattgggaggccagcatgcctggaggggggccaggcatgaggtggggtaggagagcactgagaatactgtcccttttaagcaacctacaggggcagccctggagattgcaggacccaaggagctggcaggatggataggcaggtggacttggggtattgaggtctcaggcagccacggctgaagttggtctgacctcagggtccaaatcccagaactcagagaacttgtccttaacggtgctccagtagtctttcagggaactgaagccatcggtcacccagcccctggcctgctggaccgccaaggatgcactgagcagcagagtaaggtttgtttacggcagcatcacttgcaaacacatgagtaatgggtattgtgctacagtgttatattggctagaaagtcactaggtgacaggaatttttcagctc

SEQ ID NO: 310370 - DNA, 620 bp, Homo Sapiens
atcaatgatagccagtgtgcacactctgtagtattttccgcatgctgtgcccagttcaatattattgccactgtagtgatggacaccagttttagccaacatagcatagtactctatttcagatttcctcaaagctgggcagttgttagcgagaatgaccaatttcgctttgccttgtctgatcatcttcagagtctgcttgtaccccaggacgtacttcccacttttcataacgagttggagcctagagttgatcgactccagcgactttttctacaaagcaaacattaaatacggacctaagggcctcgcctgcaaccgcctcaaaaccggacccagctttttgaagccgagccccttaaacttccgaagtcgaggaccccaagtcattgagagggccactgggattccttctggggccctccaaatgccagcaggcatgctgtcacccccgtgggctcacatctgcccgccctggccaagacatctctccacgtgaatcgtcttccgggcctggcccgcctcactcaccgtcttctttgcggccaccatcttcctgccttaggagcgggacggcccccaaccaacagcagccgctaagatggccggggaacgagaaa

SEQ ID NO: 310371 - DNA, 548 bp, Homo Sapiens
ggtttttaaaacaagcaaattttattaaaggaaaattttgcaggtttaaggtttgcaggtgaaattttgtaggtgaaaaggtttacttttcaccagtctgttctggcatgcttctaatgatgtcagagtcacctggatcaatgatagccagtgtgcacactctgtagtattttccgcatgctgtgcccagttcaatattattgccactgtagtgatggacaccagttttagccaacatagcatagtactctatttcagatttcctcaaagctgggcagttgttagcgagaatgaccaatttcgctttgccttgtctgatcatcttcagagtctgcttgtaccccaggacgtacttcccacttttcataacgagttggagcctagagttgatcgactccagcgactttttcgtcttctttgcggccaccatcttcctgccttaggagcgggacggcccccaaccaacagcagccgctaagatggccggggaacgagaaaggaaagacttcccacaatgcaaagctcttcacggcagagccggaactccc

SEQ ID NO: 310372 - DNA, 438 bp, Homo Sapiens
aaaacaagcaaattttattaaaggaaaattttgcaggtttaaggtttgcaggtgaaattttgtaggtgaaaaggtttacttttcaccagtctgttctggcatgcttctaatgatgtcagagtcacctggatcaatgatagccagtgtgcacactctgtagtattttccgcatgctgtgcccagttcaatattattgccactgtagtgatggacaccagttttagccaacataggcatagtactctatttcagatttcctcaaaggctggggcagttgttaggcgaggaatgaccaatttcggctttgccttgtctgatcatcttcagaggtctggcttgtaccccgggggcgtacttcccactttttcataacggagttgggagccctaggagtttgatccggactccaggcggactttttcgggcttctttggcggg

SEQ ID NO: 310373 - DNA, 768 bp, Homo Sapiens
  misc_feature (107)..(107): n is a, c, g, or t
  misc_feature (115)..(123): n is a, c, g, or t
  misc_feature (125)..(141): n is a, c, g, or t
  misc_feature (184)..(195): n is a, c, g, or t
  misc_feature (199)..(199): n is a, c, g, or t
  misc_feature (202)..(202): n is a, c, g, or t
cccggtttccttgggaacccgctatgagcccggttccctttcccttttggggcccccgccccaaacgaaatgtttttgaaagcttttcgagggccgaagccggcccnccattttnnnnnnnnntnnnnnnnnnnnnnnnnnacctttgggggtcgcatatgggcgccctcctcgtcattttcannnnnnnnnnnntttnccnctaaaacaagcaaattttattaaaggaaaattttgcaggtttaaggtttgcaggtgaaattttgtaggtgaaaaggtttacttttcaccagtctgttctggcatggttctaatgatgtcagagtcacctggatcaatgatagccagtgtgcacactctgtagtattttccgcatgctgtgcccagttcaatattattgccactgtagtgatggacaccagttttagccaacatagcatagtactctatttcagatttcctcaaagctgggcagttgttagcgagaatgaccaatttcgctttgccttgtctgatcatcttcagagtctgcttgtaccccaggacgtacttcccacttttcataacgagttggagcctagagttgatcgactccagcgactttttcgtcttctttgcggccaccatcttcctgccttaggagcgggacggcccccaacctagaagagacagagaacaggacaggaattttaggatccggagttacaaatggcaacccgcaaagctccccgcgctgcctaaacctcggtcggtaggagcccactcccc

SEQ ID NO: 310374 - DNA, 810 bp, Homo Sapiens
cgtgggaaagctgtttactgcgttctcccgctgtgtgtaattgggtttcagtgtggctgaaacacagctttgccccaggctttggcacttccagccccaggagaggcgctgaaccccagcaaagggaatgtgttccctgtgggcagccggtgccctggtcactgcagttgcccaaggctgatatttccctgggatccagctggagatgttgggctgggaggccctgtggtcactcatactgcaggagagagaagaagggtacaggtgccagcttctccctgcccttaagcgaggtcagctccaccaggctcacgcactccaggacctcagcctgcaggcggcccagcagctcacaggcagcgttcatggttccaccagtggccagcagatcatccacgacgaccaccctctgtcctggctccagggcgtctttctgaatctccagctcagccttcccgtactccagggaataggaggcccacagagtggggcctggcagcttcccccgctttcggatgagcacgcagcccagtccaagctcctgggccagggaggggccaaagaggaagcctcgggagtctaggcctgcgatgtagtcgatgcggcccccgtgggtcgccttcaggtgtcgcgccaggaggccgatggcggcgcggaaggaggcggggtccttcaggacgggcgagatgtccctgaataccacgcctggggtggggaagtcggggaagctgcggatccgctgctcaaccagctgcagctcggagtcggccatggccgcgtgcgaagagccagcggcagcccgagcgcccc

SEQ ID NO: 310375 - DNA, 842 bp, Homo Sapiens
  misc_feature (37)..(37): n is a, c, g, or t
  misc_feature (61)..(61): n is a, c, g, or t
  misc_feature (143)..(171): n is a, c, g, or t
gaatcttccctctagggaaaacccaaggttattgggncccaatgttccaccttaccccttnctgggggcccggccgccgcccaaaccgaaatggtctaagaaaagcttctcgagggggcccgaggccggcccgacatgttttnnnnnnnnnnnnnnnnnnnnnnnnnnnnngggggaaaggctgtttacctgcgttctccccgctgtgtgtaattgggttcagtgtggctgaaacacagctttgccccaggctttggcacttccagccccaggagaggcgctgaaccccagcaaaggaatgtgttccctgtgggcagccggtgcccctggtcactgcagttgcccaaggctgatatttccctgggatccagctggagatgttgggctgggaggccctgtggtcactcatacaccagtggccagcagatcatccacgacgaccaccctctgtcctggctccagggcgtctttctgaatctccagctcagccttcccgtactccagggaataggaggcccacagagtggggcctggcagcttcccccgctttcggatgagcacgcagcccagtccaagctcctgggccagggaggggccaaagaggaagcctcgggagtctaggcctgcgatgtagtcgatgcggcccccgtgggtcgccttcaggtgtcgcgccaggaggccgatggcggcgcggaaggaggcggggtccttcaggacgggcgagatgtccctgaataccacgcctggggtggggaagtcggggaagctgcggatccgctgctcaaccagctgcagctcggagtcggccatggccgcgtgcgaagagccagcggcagcccccc

SEQ ID NO: 310376 - DNA, 856 bp, Homo Sapiens
  misc_feature (542)..(542): n is a, c, g, or t
agggcggcccgacaaggagccgctacgtatggcgactctcccctgcgggggggaaaaggggtttacgtgcgtcttccccccggtgtggtaatggggttccgggggggcggaaacacaagtttggccccaggctttggccatttccagcccccaggagagggcgttggacccccagccaaaggaagtgtgttcccgtggggcagccggggcccctggtcccctgcagttgcccaaggccgatatttccctgggatcccagctggagatttggggctgggaggccccttggtcactcatcctccaggagagagaagaagggtacaggtgccagcttctccctgccttaaggggaggtcagctccaccagggctcacgccctccaggacctcagcctgcaggcggccccagcagctcacaggccagcgttccatggttccaaccagtggcccagcagatcatcccacgacgaccaccctctgtcctggctccagggcgtctttctgaatctccagctcagccttcccgtactccagggaataggnaggcccacagagtggggcctggcagcttcccccgctttcggatgagcacgcagcccagtccaagctcctgggccagggaggggccaaagaggaagcctcgggagtctaggcctgcgatgtagtcgatgcggcccccgtgggtcgccttcaggtgtcgcgccaggagccgatggcggcgcggaaggaggcggggtccttcaggacgggcgagatgtccctgaataccacgcctggggtggggaagtcggggaagctgcggatccgctgctcaaccagctgcagctcggagtcggccatggccgcgtgcgaagccc

SEQ ID NO: 310377 - DNA, 794 bp, Homo Sapiens
ttttctagagtaatttgaagctcttggctcaacatttattgcccccttcctttgctcctcatgtcccagaatgccaccctcccagatggggacagagtgctactggtactggtgggaggggtaggtgctgtgtccgtcgtactcatcggtggtgaggcagcgcacatgaaatggcccaggtcatgtttggagatgacccttgagggccctcgtccatccagggtcactgtgtacgccccagttagtggctggtctcctatgtgtggcggcatcacagccacgtacttcaggcctgattcccgcagcaccttgtgcatccggatgtggtcatcagtcacagcctgcagtcgtgggggcaccttggtagggtcccagagcaggaaagccgaggtgcaggccacgaccttgtccacaccatgagccttcatggctgccacaatgttccgggcgccctcggacatcactgtcgtgggactgaggtcattgcgggtgcccagcagcacgatgacagcgtcctgcccagccacggtcttgtccacatcggctgcctgcagaacatctcccactaccacgtgggccggccggggcccctctgatggcagcctggaggagtcccgcaccagcactgtcacttcgtaacctgcttgcaccgcctgcgccagggtggtgagcccggtctggccagtggcgccgaagatcgcgatcttcttgacggccatcgtacgggatcgtgggggtgcaaggcctcagagtctcggcacgcgcgggaacccactggctgctgggcggcgctc

SEQ ID NO: 310378 - DNA, 1397 bp, Homo Sapiens
  misc_feature (897)..(1042): n is a, c, g, or t
  misc_feature (1263)..(1263): n is a, c, g, or t
  misc_feature (1377)..(1377): n is a, c, g, or t
gggagtgggttcccgcgcgtgccgagactctgaggccttgcacccccacgatcccgtacgatggccgtcaagaagatcgcgatcttcggcgccactggccagaccgggctcaccaccctggcgcaggcggtgcaagcaggttacgaagtgacagtgctggtgcgggactcctccaggctgccatcagaggggccccggcggcccacgtggtagtgggagatgttctgcaggcagccgatgtggacaagaccgtggctgggcaggacgctgtcatcgtgctgctgggcacccgcaatgacctcagtcccacgacagtgatgtccgagggcgcccggaacattgtggcagccatgaaggttcatggtgtggacaaggtcgtggcctgcacctcgggtgggtggtgggatcatggaggtggggctgaactggggggtactggggaggcagcccaggggcctctgaaaggtgacgctgaagccattccatgttactgtgcatttactgaacaccagctgtgtgcctgacccttactgggtgatgctggggacacagtggtgacctgtacagccctgggccctgctcacacaaggctcacagagagaggtggtaaacagatccatgatcaaactgacatccagatcatcggagctgggatgggggaggcaggcagaggggatagggccacaatgggagaaactacaggactatgggagcccagaggaggcgtccgacttaggctgagagaggtcagggtaggcctcccagaggaagtgatagagctgtggatagacactaggtctctgccctcacagagctcccgattatggggacacagacattaagcaaatagttgccctgtataatcatttatttatttatttatggttattttgaggnnnnnnnnnnnnnnnnnnnnnnnnnnnnnnnnnnnnnnnnnnnnnnnnnnnnnnnnnnnnnnnnnnnnnnnnnnnnnnnnnnnnnnnnnnnnnnnnnnnnnnnnnnnnnnnnnnnnnnnnnnnnnnnnnnnnnnnnnnnnnnnnnnctttcctgctctgggaccctaccaaggtgcccccacgactgcaggctgtgactgatgaccacatccggatgcacaaggtgctgcgggaatcaggcctgaagtacgtggctgtgatgccgccacacataggagaccagccactaactggggcgtacacagtgaccctggatggacgagggccctcaagggtcatctccaaacatgacctgggccatttcatntgcgctgcctcaccaccgatgagtacgacggacacagcacctacccctcccaccagtaccagtagcactctgtccccatctgggagggtggcattctgggacatgaggagcaanaggaaggggcaatcgaatgt

SEQ ID NO: 310379 - DNA, 657 bp, Homo Sapiens
  misc_feature (453)..(453): n is a, c, g, or t
  misc_feature (488)..(489): n is a, c, g, or t
  misc_feature (582)..(582): n is a, c, g, or t
  misc_feature (594)..(594): n is a, c, g, or t
ttttcaccacagtaactggaagacagtcagagaaggtagtcggggagggaggaacattctgattcatcttaaaaaataaagatctgcttaagtatcatttgcagtcatatcaagtttttttcaattctccttagtggccgtctccaagggttcatcttctaagccaaagcttagcttgtcagctagcccctcaaactgcttgctcacactgcccgcagagtccatgaacatgttaggaatgtctttgccaaagtaaatcttgctgttggaagcaatggccttgtacttcatcagctgcagatattcaggggttagcttcagcttattggcttcggctattttcataagcagtgtagcactcagcatctgcctttgccttctcccgggccagaaatgcagcatcttcaatttctgaaatcttcttctcagtctccttctccatcaccttctgcngtaggtgatctcagccacctggccactttttctgnntctgaataaatgatagtgaggattacggttctggcatttcagagtttgactaatttcacctttcacccgagctgagtgtcctggtgggccagnttgtctggagancccagagggcagctgtgagtgcacacaagggcagagtgggatatgccagtgagcacagctagt

SEQ ID NO: 310380 - DNA, 540 bp, Homo Sapiens
  misc_feature (453)..(462): n is a, c, g, or t
aacagtttacatacagcaataatttattctgaaatgttcatttagtttctgttgagacacaattcatgtctcattaataaaagagcagccatctcacctcaaataccagaatatacaacaaattacagcatagcaaaaattctacctactttcagataaaatctagttcaggtaaaatagtttcattcaatgttttacagttacacagatttttgttttgtttggagcacaaaatagtgtaaattattacactgtagctatctctatggcacatcatgtgaccacataactgttaatcattacttctgaaattgaaccatcagtttcattcatggcaggtaaaggcaaagcagggctggggtaaacttgttcatcggggaaccatattactgtggaatttcacagccacatgattaattatgatgttagatggactcacaaggacaaaaacannnnnnnnnngcataaataccaatttttccctgatgtaagtttaggcagggtataatctagaaatgattgataacagcgaaatatcat

SEQ ID NO: 310381 - DNA, 624 bp, Homo Sapiens
  misc_feature (537)..(537): n is a, c, g, or t
ggaaagctgaccaccactattggcaagttatgtgcccattctcaacaacgccaatatagatctgcttattatcctgaagatctctttattgacaagaaagtattaaaagttgctcatgtagaacatgaagaaaccttattcagccgaagaagggaactaattcagaagttgaagtctttcatcagcttctatagtgctttgcctggctacatctgcagccatagccctgtggcggaaaacgacaccctttgctggaatggacaagaactcgtggagagatacagccaaaaggcagcaaggaatggaatgaaaaaccagttcaatctccatgagctgaaaatgaagggccctgagccagtggtcagtcaaattattgacaaactggagcacattaaccagcttctgagaaccatgtctatgcccaaaggtagagttctggatacctggatgaggaagggtttggtggagactgcggtgatgatgaagatgagtgcattggaggctctggtgatggaatgatggatgatgcgcctgganacagtcagcaggcaacttcgaaggacaacgagaatagcacctttcacaacctcgggaacgttcattccccgctggcttctcaccagc

SEQ ID NO: 310382 - DNA, 2540 bp, Homo Sapiens
  misc_feature (182)..(195): n is a, c, g, or t
  misc_feature (211)..(273): n is a, c, g, or t
  misc_feature (279)..(336): n is a, c, g, or t
  misc_feature (366)..(375): n is a, c, g, or t
  misc_feature (395)..(410): n is a, c, g, or t
  misc_feature (451)..(466): n is a, c, g, or t
  misc_feature (512)..(546): n is a, c, g, or t
  misc_feature (571)..(606): n is a, c, g, or t
  misc_feature (609)..(613): n is a, c, g, or t
agagatttattttttctctaaaggcgcggcacagaggttttttagatcgtccccctcggggggattttagtgtttttcttctctgcccgcgttttgtagagagggtcgcccacctggcgcggggggaaaaatttcttataaaaaaatttcccgccctttttttcgaaaaaaggggaccacannnnnnnnnnnnnnatattttgtatttttnnnnnnnnnnnnnnnnnnnnnnnnnnnnnnnnnnnnnnnnnnnnnnnnnnnnnnnnnnnnnnncccccnnnnnnnnnnnnnnnnnnnnnnnnnnnnnnnnnnnnnnnnnnnnnnnnnnnnnnnnnngaaacccacaccccttgtctggtccccggnnnnnnnnnnggaagaaacggttgtccccnnnnnnnnnnnnnnnnggggcccccccccccaacaaaattgtttaaaaaattttttnnnnnnnnnnnnnnnncgaaaaaaggggatattgttttttatgtgttgttgaggaggggtgnnnnnnnnnnnnnnnnnnnnnnnnnnnnnnnnnnnggtttgtgtggtttgtgttgggggnnnnnnnnnnnnnnnnnnnnnnnnnnnnnnnnnnnntgnnnnnttatttgagcaatttattttttttcaaagaaatccatgcaaagagagaacgatagaaagggagggagtgagagagaaagacatggtaaccatgttctagcagccaaacataggagaataatttggcacaacttgatggttttttttctttctttgcaaaaggacaatctatatgctaccactaaaatgtatcttcctccaaaagataccatttgattttcgaaaacataacacatggttagtcctctacttcatggctggaggaggtatacaggataacaatgaccaagctgtagaagaatataagaaagtggttccctttatcgaggaagaccacagggtgctgtagggcagcacatgtgctgggcaccaggcagtcagtgcaccaggaagaagaagcacaccaccgagatggccatgctggtgagaagcttcagcggggaatgaacgttcccgaggttgtgaaaggtgcttatctcgttgtccttcggagttgcctgctgactgtttccaggcgcatcatccacatccagatcataggccagttctgcaaggaagcggagctgattcttcacttttatcattccatcaccagagcctccaatgcactcatcttcatcatcaccgcagtctccactttcaaacccttcctcatccaggtttttatccagaactctacctttgggcatagacatggttctcaggagctggttaatgtgcttcagtttgtcaataatttgactgaccactggctcagggcccttcattttcagctcatggagattgaactggtttttcattccattccttgctgccttttggctgtatctctccacgagttcttgtccattccagcaaagggtgtcgttttccgccacagggctatggctgcagatgtagccaggcaaagcactatagaagctgatgaaagacttcaacttctgaattagttcccttcttcggctggataaggtttcttcatgttctacatgagcaacttttaatactttcttgtcaataaagagatcttcaggataataagcagatctatattggcgttgttgagaatgggcacataacttgccaatagtggtggtcagctttcctgcattcttctggacatactggatagaatcatggattgttgaaaagagaccaagcagtacgttctccatgtcatagattctgtacatgccattcacaagttcttcaagggacagaatgtattctctccagtacttgtcaatctccaccacacctgccatacagccttgcatgaccacattgcagtaaccgccacagggtttaaccatcatcagtccctggcagtaagagcagtaccacattctggtgagcattcggccacagtccttactgaacttcaggtgatcagttgtgttgatcacttcaattccaagattcagagcctgaaggaagatcctagtgacttgcagtgacttggaaacctgggtcataataagcttggggaaattcccaaatactttcaggtcacgtcttgctcctcggaggcactcattgatgtccaaggctgaatcaggcaggcctgggttcattagctgggtatagatgactggaaacaggctgtcaaacaattcattgaccatgtcatctacattgatgtcagaacccaagatgtagagagacacatctgtgaaaaattcacccacaaactcaaaagcttgtggagtcaggcttgggtagttgttcttgaacatggcattggtgtagttcttggcatggcgaacaacaatttcaaaggcctcttggaaaaccgcagcattctgaataattaagaacttgagctccatatcttccatctttcttgagcagcatgttgggcccttagggagacatacttgcaaatctgatcctggcacgggagtttctggcacccacttgagtccggg

SEQ ID NO: 310383 - DNA, 955 bp, Homo Sapiens
  misc_feature (54)..(54): n is a, c, g, or t
cgtaagagccattcccccattttggggaggcattgggccccagtccttactganacttcaggtgatccagttgtgtggatcacttcaattcccaagattcagagcctgaaggaagatcttagtgacttgcagtgacttggaaacctgggtcataataagcttggggaaattcccaaatactttcaggtcacgtcttgctcctcggaggcactcattgatgtccaaggctgaatcaggcaggcctgggttcattagctgggtatagatgactggaaacaggctgtcaaacaattcattgaccatgtcatctacattgatgtcagaacccaagatgtagagagacacatctgtgaaaaattcacccacaaactcaaaagcttgtggagtcaggcttgggtagttgttcttgaacatggcattggtgtagttcttggcatggcgaacaacaatttcaaaggcctcttggaaaaccgcagcattctgaataattaagaacttgagctccatacttgcagactgaagcagctgttccatgttcaatcgtgctgttagttggtatttttcttccatctttcttgagcagcatgttgggcccttagggagacatacttgcaaatctgatcctggcacgggagtttctggcacccacttgagtccgggctgcagtctctggaagaaggagcggacttggtgacaggtggcgtccggcggcggcggcgggggctgcgcctgtcccgggaagtccaagctgagcagcatcgccaccaccaagcacgcggtgcgcacggtcccggccatcctgcttcgcagggagctaggagagcgcgggagagtggcagccggagcgagagcagtcccaggactcggcaagcctggcagtggccctgaggagcaagagacgtgctgctacccagccgctgcaaaagttcctcgtgccgaattcgccacccaggcc

SEQ ID NO: 310384 - DNA, 599 bp, Homo Sapiens
  misc_feature (24)..(24): n is a, c, g, or t
  misc_feature (43)..(43): n is a, c, g, or t
  misc_feature (53)..(53): n is a, c, g, or t
  misc_feature (74)..(74): n is a, c, g, or t
  misc_feature (175)..(175): n is a, c, g, or t
aattggccctggctgaactggttncccaggcgccatcaatccnacatcccagnaacaataggcccagttcctgncaaaggcaaacggaagctgaatccttcaacttttaatcaatcccatcaaccagaagcctcccaatgcaactccatcttccatccatcaccgcaagtctccnactttcaaaacccttccctcatcccaggtttttatcccaagaactcctacctttggggcaatagacatggttcctcaggagctggttaatgtgcttcagtttgtcaaataatttgactgaccactggctcagggcccttcattttcagctcatggagattgaactggtttttcattcccattccttgctgccttttggctgtatctctccacgagttcttgtccattccagcaaagggtgtcgttttccgccacagggctatggctgcagatgtagccaggcaaagcactatagaagctgatgaaagacttcaacttctgaattagttcccttcttcggctggataaggtttcttcatgttctacatgagcaacttttaatactttcttgtcaataaagagatcttcaggataataagcagatc

SEQ ID NO: 310385 - DNA, 3681 bp, Homo Sapiens
  misc_feature (1167)..(1176): n is a, c, g, or t
  misc_feature (1294)..(1351): n is a, c, g, or t
  misc_feature (1665)..(1665): n is a, c, g, or t
  misc_feature (1686)..(1686): n is a, c, g, or t
  misc_feature (1694)..(1694): n is a, c, g, or t
  misc_feature (2339)..(2348): n is a, c, g, or t
  misc_feature (2887)..(2887): n is a, c, g, or t
  misc_feature (2893)..(2893): n is a, c, g, or t
aattcccaagccatctaggttcattgaaccagggatttttccttggggaaacacacctagggaaccatggtttcactttaccctaccggggcccgcggcgcccaaacagaatggttgttagaaagcttcttggaggggccgaaggcggccggacaggtgtttttattatttgacggggggggttgtcggggttattaaataatttgtttattgtacggcatttacaaagaaaacagacaatgccctcagtagaaagaataaaaatgtatttagggctttatttttaactgacagcaaatagaaatcctttagtgagatcgtggcaatttgacagtattataattaagctcaataaaggtacatggggtacctggaagatcaagatctacagctgcctatttccacatctttcaatccatctggctccttaaataggggaaaaagcccttatttggtggagaagcatttccaaaatgaagttacaggttctattaaaacttactgtcacatcaactgttaaaatagggccttttgtgttttgttatttcaccttaatatcaccagaattcctgtaattccacaattgtgattttactatgtagaagataattcagttctagtctattgctttagatgtaaaaacagctgaaaacccaaagtggattagaattgctgaaggatttccctgccgttgtttgatacaatctattctcttgattcttgataggtgcatagaaagcctaacttaaaattctttctacaggaacatgtctgatttcaggagtacccaatgaaggatccgatgaatggctggccagttactcagagtaatatgtttatgagttaaatggattgcataacggcaccacttttcctttgtcactgtggtggataaatgacaaagtagattccaatctcctgtatagaaaggtggttacccaatagcctcactggtggcttgctagcagagcctcaagttgcacctctgtggctttctgtaaattcgagtcctacagccacttcgagaacgctgcaatccccaaggcccacttggtccatgctgaagaagcggctgtgaccccaatcctgcctctcttttgctcttcagtattacttactggaggaatatgtaatattctaggtcaagtctaggagaggctcatcctnnnnnnnnnnttgcaaagtcttttctcaattaaaacaaaaaagcctcaagtacatctcaatcatgtcaaaattatggttaaaaattgacattatgtagggaaatagcagcagagaatggctaatcttnnnnnnnnnnnnnnnnnnnnnnnnnnnnnnnnnnnnnnnnnnnnnnnnnnnnnnnnnntgccatcccacccctccccttggttctttcatttggggttatattaaagactcgagcctctgagaaaatcagaaaggcaaagccatagaggaaaactgcttcaaggccagaattttgggtaaggtaaagaaaaagctgtacatgaaagcaggggactgtttggaaaagaatcagaatctccaagatctatttttcgttaaactgggaaagcttctgaaacccagattctccgttctaccagtcatcctgatcctttagttatggggcaataaacgtcaagtgcaatgagtaaagtgccagccatggatacaaanacacgaaataatacaacacanccaaccanaataactctggtcttagggtaatagaagacatacaggaaaggactgtttatagaacacctgaggttctcaagaaattactattcaatggttctgtttttgcttacattaaaaatcagactgaagattcaaagatcttaactattaaaggatgaaaggaatttgacagtgctttgaacagtgataaaatggtacccaaatttggtgttcatatagctatttaaaaaagacagtagcttaaaagttgcaggaaaaaatgtgaacacagagaacaacagaaacagtccaggaagatgatgcagcccggacacagcaagtttaatgtctctgctgtacatagaattaagaccctttccccctcctcatccttatgctggcaataggatatgcactagaaaatttgactcttagagtcaatgaataaaaggatgggctcatacaccttcatagctcttttcaaaaaggatgcttataatttaaaggatgtcctaatgggaaggaaaggtacagggcaagaggctgtttcacattttagtccattagtctttggcagagcccaaccaaggccaaattcacctaggatgcccaatggctgtggggatctccacagggtcaagtaagcaaacccaaatgaacatgttggattnnnnnnnnnncaagatctagaaactcttgaaggaagagcttcaccctgaaaagggaagaggaaaatgcttgaaggggaagggcggagggtcagtgtgtgatctctgctgtggtgctgggcaggggcttaggagttaagccaagggtgccggagacactcggcggcagtggctctcttctcagggatcagctccaacatgggcagtaagaaatctgtgaagccagctgcctcttcctgagaccactcatacttctccactagaacctcaaaaaggccccaaggtttcagcttcgtgatatgtttcaggtcaccttttttggtgaaaaattccttggaatattttcctgccacaatgagcttgcgaggcaccttccccagaagttctatgatcaatgcaatgtgatcttcatctcgagtgtactcttcccctgaatgaggttcaaacaaatagtcacctgtggccagttcaaaggccatgcatgccgtgctccaaatgtcagcaggggtattatagccagatccgattagaacttccaaggaacgatattngcttgntttgaatatcttcagtgaaatgtttgtgcacccaacacagcatttccacagggtcagcaatcttcacccttgagcttttctgcattttttggctcaaggggattaacaagaaaatttccagccgtggattttcctttgttgtccagtggtccgttatgttcttgctcttgttcatcttcacagggtatctctgcccgaatgctttcttgaagttggctaatgtgttgttcactgaatgactgccctacagttgaggaagactggcacagccatggtgtctgacacctcagatgttataggtgtacaagagtctgtttcttgagatgtgctggctgtctccattttgggagcttaggaaactagattcctgattcagaatttgtggacatcacagtcattgagcattatgtagatcctctttatgtctcaatgtttcattattactgttctgagtataattaatgacttcaatcactccattgcaattaatttctgctgcaccaccctctgtatcacgttccataagcgtttgatcctggccaatggtacttgactctgtcgaagttctttcttgggtcattttattagttgggttctcgttcaagggtctttcaacaggactctctgattcttcttgcattgtttggtcttttattgcaccagggcccagactctttctccatatcgctcattatcctgcatagtcgcattctctagtaagttcatgtcctaggcgcgttctcgcttccttatgcaaagatccgaagcgcgtggatcgagcatactga

SEQ ID NO: 310386 - DNA, 1432 bp, Homo Sapiens
  misc_feature (944)..(944): n is a, c, g, or t
  misc_feature (946)..(946): n is a, c, g, or t
  misc_feature (1053)..(1053): n is a, c, g, or t
  misc_feature (1278)..(1279): n is a, c, g, or t
gaagatattcaattcttgacgtctctaggaaccttcagactgatggccccccgtctttcaggtggtcttaaagtggcacttggtaaacagtgtgtgtttaatccagcctttgcctctgactacctttaaggccaggacttgaagcagagttaaaggcctcccttcaaccaccttggggcgagttaagacccagcttacagaggcgttcaaagtagttacgcagttaggtctgaattaacccggaggattttattactccccattaatggtagttaaatgcccttcggtggataccatcaggttaggtagggaagaccttccagaggaaatctgttaatggggcaacgtttttatttctgtacatttacatacaaattttccccaaaggtacaacagatgcgacaccatgcagacacgcagctgtgaacgacagttcagaactcagcgttaagcttgtgctatgaacgagcaccgtcagagaattcccacccacacgtacagaaacacagtttttatattacaacctcaaggacagagggagggaagtgttcgccgctagacatgacacaccatactgcttttccaaaacacacgggacatgaaagcgaggtggtgccttctagacgagaggacagctgtagtgtggacctcccccgcacatgcgatacctcgggccgggcggtgtgacgtcacaggcccacttacggcacttgcagtttgggattgctcatttggctctaggaagtggtggtgtctgagtgcgatacttcccttacgaggtttgtttttgttttctttctgttctgtagccaaaccaatttaccagcccgtcttccagatgcaggtgattttactctcaagtaaacaaaaacatgtaacctttttccgtgtttctcttgggtggtaataattttagggcatttgataagagtttgacttcagananagaacaaagtgaagaaatgttcagctccatctcaggtgttcacatttgtgccataacttttattgaaaggctgacagggtaggctagcggaacggagggttgtgtgngaggagattagcagggggtgggagggtcaagttgaaacagtgggtgccctgcgaaagggtctccctattagcccaggaagggaacagcacagaggggttcaagcctgacagacggtgctgggaagtgggcagccgtagcagcctcccctgctgaacgcggcgggcccagatgcgtatcaggcttgggtgggtcctgccaccttgctcacttggtaccggatttcnncgggctgtgcccacagggaagtgttgctgctctggcaacatttcataaaggtgttgctcaacagcttcaggtatccctaggctgaagctgccaccaaacagcacccggcctcctcctcctcaggctgccctgggaggagagctgtgggaccgc

SEQ ID NO: 310387 - DNA, 483 bp, Homo Sapiens
tttggtataaatactttattaaagaaatattgtcattttcgttaaaaaatacattagagaagagagttttgggttaccagtctttcctcacagaatcacagtgtaagatattcatttcttgacgtctctaggaaccttcaggccacggatcagcagaacatacacgaacaagggaaaaaaattcctcttaattttactgatggccccccgtctctcaggtggtctgagagtggcacttggtaaacagtgtgtgtttaatccagcctctgcctctgactacctttaagaccaggactcgaagcagagtgagaggcctccctccacccacctcggggcgagtggaagacacagcttacagagggcgttcaaagtagtgacgcagtggaggtctgaatgaacacggaggattttattactcaccattaatggtagtgaaatgcccttcggtgggataccatcaggtgaggtagggaagacattcca

SEQ ID NO: 310388 - DNA, 982 bp, Homo Sapiens
  misc_feature (22)..(22): n is a, c, g, or t
  misc_feature (45)..(46): n is a, c, g, or t
  misc_feature (52)..(52): n is a, c, g, or t
  misc_feature (71)..(71): n is a, c, g, or t
  misc_feature (75)..(75): n is a, c, g, or t
  misc_feature (77)..(77): n is a, c, g, or t
  misc_feature (80)..(86): n is a, c, g, or t
  misc_feature (93)..(95): n is a, c, g, or t
  misc_feature (98)..(99): n is a, c, g, or t
  misc_feature (108)..(108): n is a, c, g, or t
  misc_feature (110)..(110): n is a, c, g, or t
  misc_feature (113)..(113): n is a, c, g, or t
  misc_feature (126)..(126): n is a, c, g, or t
  misc_feature (141)..(141): n is a, c, g, or t
  misc_feature (148)..(148): n is a, c, g, or t
  misc_feature (152)..(152): n is a, c, g, or t
  misc_feature (155)..(155): n is a, c, g, or t
  misc_feature (164)..(165): n is a, c, g, or t
  misc_feature (167)..(167): n is a, c, g, or t
  misc_feature (170)..(170): n is a, c, g, or t
  misc_feature (173)..(174): n is a, c, g, or t
  misc_feature (180)..(180): n is a, c, g, or t
  misc_feature (182)..(182): n is a, c, g, or t
  misc_feature (186)..(187): n is a, c, g, or t
  misc_feature (189)..(189): n is a, c, g, or t
  misc_feature (191)..(194): n is a, c, g, or t
gcatctgtcttgctggcgttcngactcatcccgccggcgggctcnncccgcngtgcgctcggggggctggntccngntcnnnnnnnccgtttnnncgnntggggcgcncnctngggcggcctgcgntcccgggccccggcncgccgcnccgnccnctcgggccnncnggnccnncccgcntngggnngntnnnncccaagccccttccctccctgtttcctggaaggcagcatgggggtgccaaggagcaggcagggaggggatggagaaataatactgtgctcgcttgccggcttgctcgctcacatataaaatgtaattctttcatttttacatttatacatccggcggggccagggaagggctggctggggaggggctcactgaaggacttcaccggccagggggcaggaggctttctgggggcagtccgacggggcagggccctatgccaaggggtcccctatctcgtcctcagggccccggcccaggagttctcgcttctcgtccgtgctggccagggagtggcgactgccatggccccccatgtaggagtgtggcatacacggggttggtgaagttggtgggcttgtcagggtccagggcaaagtcagcgtccagtaggcctcccacatcatcaggctctccgccttcgtacatcttgtaggtggggtttccaatctccacgttcatggccccgttggtcatccgttggtgctggaagcccttagccccttggactcgccgcttataccagaataccactccggccaccagaaccagcagcagcagcaacagcagagggattaggatggaggctatatgtcctggctgctgctggctgaagacgtgctcctcacaccggggccctgtcatgtggggtgggcactggcactcaggcatcattttgctgttcatggtacaggagccgccattgctgcagtgcctcgtgccgaattcgccacccaggcctcgctaccta

SEQ ID NO: 310389 - DNA, 1298 bp, Homo Sapiens
  misc_feature (14)..(14): n is a, c, g, or t
  misc_feature (90)..(90): n is a, c, g, or t
ccagggatggggcnaaaaggggagagccttggcaaattgtcttatacagggaggggaaaggctgcaccaccagctgctcccagtggggtncgttctggtgggagggtaggaggtgcagccccaagccctccctgcctgtctccctgaaggcagcatgggggtgccaaggagcaggcagggaggggatggagaaataatactgtgctcgcttgccggcttgctcgctcacatataaaatgtaattccttcatttttacatttatacatccggcggggccagggaagggctggctggggaggggctcactgaaggacttcaccggcagggggcaggaggctttctgggggcagtccgacggggcagggccctatgccaaggggtcccctatctcgtcctcagggccccggcccaggagttctcgcttctcgtccgtgctggccagggagtggcgactgccatggccccccatgtagagtgtggcatacacggggttggtgaagttggtgggcttgtcagggtccagggcaaagtcagcgtccagtaggcctcccacatcatcaggctctccgccttcgtacatcttgtaggtggggtttccaatctccacgttcatggccccgttggtcatccgttggtgctggaagcccttagccccttggactcgccgcttataccagaataccactccggccaccagaaccagcagcagcagcaacagcagagggattaggatggaggctatatgtcctggctgctgctggctgaagacgtgctcctcacaccggggccctgtcatgtggggtgggcactggcactcaggcatcattttgctgttcatggtacaggagccgccattgctgcagtggccgacgcaggtcagacagctgggggccacccggccatccgtgcagttgcaggtgacatccccactctgcttgttgaccacacaggccccttcgagacagcggctgcacttgttcacctcacacctcgatccctcaaagtaggcagtgcagcggcattgtcgggagccatcagcagccatctggcatgtgccaaagttctcacagtagccagagcactgccggtactggcagcggtcgcccaggaagccgggtaggcatcggcactggggctggttgccctggttgacagtgcaggtgctgttgttggcacagtagcccgcacacacctgctgggtgcatttggggcccgtgaagcccgtggggcagtccctctcatcctccccatctccgcagttgtcctgcccattgcagcggaagatgccgggaatacc

SEQ ID NO: 310390 - DNA, 458 bp, Homo Sapiens
  misc_feature (44)..(44): n is a, c, g, or t
  misc_feature (51)..(51): n is a, c, g, or t
  misc_feature (218)..(218): n is a, c, g, or t
  misc_feature (344)..(344): n is a, c, g, or t
  misc_feature (358)..(358): n is a, c, g, or t
  misc_feature (435)..(435): n is a, c, g, or t
accggtaatttattcatctcgcatacttcagcccaacaggggantgacacntgcatctgtgcaggtctacccgggggttcactctggagcacagggtcgcgaaggcaggcttggtagaaatcagagggtggggtaaccccttggtcccttgagggatatgcttgactaattcaaagagtttagcagtctgttgggggcatgaaagccattaggctganggacctggtgggatgcagcatgaaattttaggtgtcacagtacaattgaccctgatgctttaacatcagacatttattttaatggatgactaatattttgagaggctgagagaagcctttttgagncatttgtaataaanggcttaggggcatgagacattagggaaggccacaattatgagtaatgaaatgtggaggctgatgagaagctactgcncccatttgttttagcagggggca

SEQ ID NO: 310391 - DNA, 477 bp, Homo Sapiens
tcaatttcttaaactttcacaacattcagaagtttttctgcattgtgtcttctctgatgtctaaaaagatttgagctttgactatacgatttcccacactgaacgcattcataaggtttctccccagtatggattctctgatgattaataagccccgaattctggctaaaggctttcccacattcaagacatttgtaaggtttttctccagtgtggactctctggtgttgcacaagaatggaacttcggctgaatgctttcccacactcaacacatccataaggtttctccccactgtgaattctttgatgaagaataagggctgagccctgactgaagtgttttccacattcatcacatatatgttgtttctttcgagagggatttctctttctttcaaacctgcccttggggaaacaggtttctccatatttaaaaatttgaggaacacccatattgagagtgccaggaacttca

SEQ ID NO: 310392 - DNA, 1497 bp, Homo Sapiens
  misc_feature (1411)..(1411): n is a, c, g, or t
caataaaaaaactcagcagaaaccaaccagtacacttttatttaaggacctgtagctgtgcaggatgcaaacatctgggcatcagtgactttcctcctgcccccggtttgtccctgatggtggcagaagatcccagctgaccacggcccctttctctggggtcagagggagaagacaggcgcagtcagcaggggcagctgttgcaggtgggagggatattttcccacaggaacaaaggtctccatgatgatacggggtctctatagtcatgttgagagcctaatggcccttggcataattgctggtgtcggggtagaaggtgtcttggagtttgctcaagtggttgagagggagggaggtgccatagacttggaggaactggcacgaagccaaggatacaaatccaggcagggctgtggggcaggatagagagcagggccttctactgaaggagtgactcaggaaggaggaggggaaggtgacaagcccctgggcaggagccctgtggccgtgggatcattttaaattgagaccagagagtgagcagtccagggcagctataaccttggctagaaagggcagaggcagatgggcctgctccatctcgcctcttaagaaggtgggcaggacggagatgccacagtggatgccacagctgccacagcctcctgtggagaccaagcaggaggcctggctctcagccatgcaggatggaaagaaagattctattccaggaggggagctgccctggaacgccccaaggacagccaggacccactgttcattcaggattcccgcattttctcctacgggagctaacgcctgtgcctgggtcctggcagcgctctggactccacactctcctcctgggtttcacctttgtaacaggatccctgcagaccacgcccacgacaaacactgtctccagagggcaggacaaaggaagggcacggcgccgggcggtggtgtggttgcccatcaggaagaggccgacttctcccggtgaaatttcctgcacagcagcaatggcggggccaaaggtagctttgacctccacgcgggctcggatccaggccggcagcttggccaggacagggggccgggcgtatcgctggtccaggagcactatgctggcaaaatccttctggtgcctgatggccctgcctatggactggttgacggccttcatgcacaggttctccaccagagccttccctgggggtgcctggccgggggctctggggagggtttgatccaagtaggccatcttctcctgcagctctgcagacctgatgttggggaagggcatgcccaccatcaccacacaccggcctaggttgtcagagaagttgatcccttcactcatctttcctccaaccacagagaggagcagggcccctgtcacggggcntctctcctggccacaggcccaagctcagcatgacgcccgcacctggatgcacctggaatacgccagcagcacctgctccacctggt

SEQ ID NO: 310393 - DNA, 867 bp, Homo Sapiens
  misc_feature (149)..(150): n is a, c, g, or t
  misc_feature (152)..(167): n is a, c, g, or t
  misc_feature (169)..(217): n is a, c, g, or t
  misc_feature (219)..(224): n is a, c, g, or t
  misc_feature (226)..(226): n is a, c, g, or t
  misc_feature (228)..(249): n is a, c, g, or t
  misc_feature (251)..(297): n is a, c, g, or t
gattcaacccctcttgttttttgcgcgggttttttctgtggaaaacgataatatgggcccgtgtttctttcggcgggggggccgcggcggccccacaaaaatgttttgaaaaaaatttttttagggggaaaagagccgcccccaaaggnngnnnnnnnnnnnnnnnngnnnnnnnnnnnnnnnnnnnnnnnnnnnnnnnnnnnnnnnnnnnnnnnnngnnnnnngngnnnnnnnnnnnnnnnnnnnnnngnnnnnnnnnnnnnnnnnnnnnnnnnnnnnnnnnnnnnnnnnnnnnnnggcactaatgctgcttttaatggcggcgcaatagagaagtacaaggttttactagcttgagctactagaaggtgtaaaagatgcccgctgacactaccaagtagcctcttaatagaaatgtagaaaatatacaggacagggtggagatgagctcttgaatttagtagggtgaaagagttaactgccaacccggcactatcattgtacttgtttggagaaaatctgttttgttctggtgatgatggttttatcttcccttttagttgggtgggaagtaacagaaaatttgtttccccaaaagtttgacattttcttgttaatacacgtttcatttcagtacgatgccaactgttaagcctgcaggaatcctcctgggtatttctgaattgtgctgtgtgcatgtgtgtttgaaagctcaaacagcttgtcttcttacagcatcgagttgtttgctttattgttagacacaatattagcagtgtatcctttccgtattccctaccatcgaacccattaagatctaaaatccttgtcaagtatctggctttaaaagttgggagatggtagttt

SEQ ID NO: 310394 - DNA, 384 bp, Homo Sapiens
  misc_feature (359)..(359): n is a, c, g, or t
cactaatgctgcttttaatggcggcgaatagagaagtacaaggttttactagcttgagctactagaaggtgtaaaagatgcccgctgacactaccaagtagcctcttaatagaaatgtagaaaatatacaggacagggtggagatgagctcttgaatttagtagggtgaaagagttaactgccaacccggcactatcattgtacttgtttgggaggaaaatctgttttgttctgggtgatgatggttttatcttcccttttagttggggtggggaaggtaaccaggaaaattttgtttcccccccaaaagttttgaccatttttctttgtttaatacacggttttccattttccaggtncgggatgcccacttgtttaggccct

SEQ ID NO: 310395 - DNA, 879 bp, Homo Sapiens
aagctgaaaatcacaggctgatagcctccattttaattaatattctactattcacacttctattggtttttaaagatggttttatataaggtatttcataattacaattttaaaatgcagtctgtattcacattaatgaacaatttcaactaatttttgacaagggaaaaatacacatactttgctttactctcatataaaacactgattatttggctgtagtaatccagatttaagctgttgacgagtcttcgtaaaggacttcatctaccttcatgtcgttttcattcactgggacctggaggcaaatctgttctttgaaagccaacgccagggtgtagggcttcacttcctgatgctgcaaacagcgcttcagataggcatcatagtagcccttgcccctccccagtcggttgccatgtttgtcaaacccaaggcctggcatgaagatgagatcaagtccccctgtggacaaggcctcctcccgaacatcaccctcaccaggctgagggatattccaggatgttttgggaagtaaagaaatttcctctggtgattctattctcaccatatccatgtgattgctctggaaccggtaccgagggatgaagcagattttgcctcgttggaaaatgtccttgatgatctcttctgtctcaatttcatcttgcatgctcagaaagatggaaattcttttggacttttgatactcactgtgggcaatcaccttctggctcagtacgcgggactggcgtagccgctcctcggcactcatcgcccgcagacgctgcttcagctctccccgcaggctccgcttggcgctgctcaccgctgccgccgccatctcacgcccaagccgagtccagtcccgccctcccc

SEQ ID NO: 310396 - DNA, 483 bp, Homo Sapiens
  misc_feature (416)..(416): n is a, c, g, or t
  misc_feature (428)..(428): n is a, c, g, or t
ttttttggtttttaaagatggttttatataaggtatttcataattacaattttaaaatgcagtctgtattcacattaatgaacaatttcaactaatttttgacaagggaaaaatacacatactttgctttactctcatataaaacactgattatttggctgtagtaatccagatttaagctgttgacgagtcttcgtaaaggacttcatctaccttcatgtcgttttcattcactggggacctgggagggcaaatctgttctttgaaagcccacgccagggggtgtaggggcttcacttccctgatgctggcaaacagcgcttcagataggggcatcataggtagccccttgccccctctcccagtcgggttgcccatggttttggtccaaccccagggctggggggaatgaaggntgaggatccaantcccccctgtgggggacaaggggcctccctccccggaccatcacccctcacgggg

SEQ ID NO: 310397 - DNA, 1795 bp, Homo Sapiens
  misc_feature (80)..(80): n is a, c, g, or t
  misc_feature (82)..(82): n is a, c, g, or t
  misc_feature (105)..(143): n is a, c, g, or t
  misc_feature (148)..(429): n is a, c, g, or t
ttggagggggtgcccgaaggggcggggccccggaacaaagggatttctctttttttcggtgtgcgatttttgtctgtttngnaaagggggcaaaccttctcggcnnnnnnnnnnnnnnnnnnnnnnnnnnnnnnnnnnnnnnngaggnnnnnnnnnnnnnnnnnnnnnnnnnnnnnnnnnnnnnnnnnnnnnnnnnnnnnnnnnnnnnnnnnnnnnnnnnnnnnnnnnnnnnnnnnnnnnnnnnnnnnnnnnnnnnnnnnnnnnnnnnnnnnnnnnnnnnnnnnnnnnnnnnnnnnnnnnnnnnnnnnnnnnnnnnnnnnnnnnnnnnnnnnnnnnnnnnnnnnnnnnnnnnnnnnnnnnnnnnnnnnnnnnnnnnnnnnnnnnnnnnnnnnnnnnnnnnnnnnnnnnnnnnnnnnnnnnnnnnnnnnncgtccctattttagaaatgagaggagtgactgcacataggaaaaatgccacttttagcaattcaaagtggaaaaacttcttttatataaaaattatcccaactcccaccccttggctctcagtgttgcatctcccacagaggtaaagttgtgccattttcccacggctttaaacaaagcaaaacaaaaccaccaatcctaataacccccctccctgccccgtctccacgctgtggggagagggctctagcccctcagtcggacttctccttctccttcatgtgcaagaagacgatgctgaagatgaagagccccagcatcatggagaaggcgctggcgtagtaggggtaggccgaggggatgaagcgctcatactgcgtgtgctggagtggccgcacggatacctgagtggaagagtacaggtgtgtgtagcctagccggttgtaatccactttaaactggaatacaccatacacgtcgggcaacttgaactgaacactgtatttgccacctttcttcttcaggaaggtcctcacaaaaggatcaatgcggacaaactccagctgaatgtcatcgccatcaaaggggacccatttgccatttgagagctgctggatcacgatgctatactccactaggtcagtgacagtgtaggcattgggtggggctgtctcgcccacccgatgatgggacacaggccccacacggaggacaccctcctccttgaacacccagcgggagagggccacagctagttcatagttgcctgtctgggaatacctctgggagccgggcgccgccttctgcactgctgagttgaagaaggagtcgctgaagaagtcgagggagccgctgaagatgacgcgggcattgttcctggcctggagcccagcaatgaggagggtgttcttccccaccgcatgtggatactgggtgataggcttgtccgggaagaaggagtaagaggtggaagagcccgtcaggatgtccagcaccaaagggttatcaggatcggccaccatcccaacacctcgaaagaggatgggatttagagatgatttcccaacgatggttggggccttcagcaggttctcagtgtcagccacgatgagcgtatgctggccaaggtctgagatgtcatagttgtgatggtcaatgacagccgttttctcctcgtcaaactcaatcccgcactcactgcccagctctcgaagagggtcaccaatgtcggagctggcagctaccagcacactgcctccgccgtcaataaaggcactgatggtctccacgttgatgttgcctccaaaatcttctaccgaaggggagaaaatgatgagattgtcatagaggaattccccatactttat

SEQ ID NO: 310398 - DNA, 926 bp, Homo Sapiens
ttctgggaaatcccttgggggagccggggccccccccttttgccattgctgagttgaacgagggagtcccctgaagaagtcggaggaacccgctggaagataccgcggggcatttttcctggccctggagccccagcaatgaggaggggggtcttcccccaccgccatgtggatactgggtgataggctgtcccgggaagaaggagtaagaggtggaggagcccgtcaggatgtccagcaccaaagggttatcaggatcggccaccatcccaacacctcgaaagaggatgggatttagagatgatttcccaacgatggttggggccttcagcaggttctcagtgtcagccacgatgagcgtatgctggccaaggtctgagatgtcatagttgtgatggtcaatgacagccgttttctcctcgtcaaactcaatcccgcactcactgcccagctctcgaagagggtcaccaatgtcggagctggcagctaccagcacactgcctccaccgtcaataaaggcactgatggtctccacgttgatgttgcctccaaaatcttctaccgaaggggagaaaatgatgagattgtcatagaggaattccccatactttatgagagacaggctggggtcatcagcggtcttgaatgtgagctcaaagccccggtccttcaggctccggaagaaaagcgaatgagtctcccgcacgttgaggttgtccagcagcactaaggtgcggggtccgctggcgcaaaccgcgccaagcaagggcagcagcaaccaaaagagggcccaagcccgggccgcggtgctgggctccatcttcctcctcctgccgaaggacccagcacctgcacaccggaagtaccccatctacggtagcccaatcgcggctcgtgcccgtggagcactacccggaagtgatcgg

SEQ ID NO: 310399 - DNA, 562 bp, Homo Sapiens
gaacaatacagttttgtgaggggcctgaaggcttttatttgactggtccatagggtggggggtgcaccccctacagggccaccttggggtccacttccccgggtccctggcctttggccaactctgccgccttcttctcccgccgcttcttccgctggagcagcctccgctcccgctcaaactccttcatgcgcatcacatagtcgcggtgctcgcagtagtcccagtcgtgccgctcctgcttgcaggccaggaagttggggaagctgtcacgcttgcacttgagcagccggatgaggtggtgggcgcagtagtcccgcagctggagcctcagctgcgcgtccatcatctcctgctgtgtggccaccatctcgcgctccttgcgttcggggaagccgtagtctggcgggaaggttggcatctgcagggggtcgggctccaccgaggcatcgcccaggtagcgccggaccaggtgcgcccccatggctgcagtcgctgcagatccctgcagcagccgagggtcacctagctcctacccggaaccactgacccctcagtcccc

SEQ ID NO: 310400 - DNA, 777 bp, Homo Sapiens
  misc_feature (76)..(76): n is a, c, g, or t
  misc_feature (168)..(185): n is a, c, g, or t
  misc_feature (187)..(196): n is a, c, g, or t
attgtggtggggaattcccaaaggccctttggtccatgggcccacggattcttccctaaggaaaccaagctattgnacccatgtttcccttaccctacttgggcccggcgccgccaaaacgaaaggttctagaaaactttctcgaggcccgagggcggccgacatggnnnnnnnnnnnnnnnnnngnnnnnnnnnncggtgtggcaacacgtttaattctgtggccaggctagcctgtctccaaggcctggtggacagcacgtcaccagaggctgccgcaggagcaggcagggccagccctgcaagaggagtgcaggcaaaggcgggggctctgaagtggctgctggaggcagcaggccccgggctgggagtgctcagtagccgtcgttagcccaggtgacctcgtagtcggggtacttggctttgattttctcagttgaaatggcgtgctgggcaggaccataggccatggaatagccgtacacgtgaatcttcttgtcctgactctggtgggagatgcgcccgccgcccagacactcacagtcgcagccttgcttctgcatgtcgcccgacactttgtcgtagatgtccgcatggtactcagcccacttgtagccgcgcacgatctccttgctctctgcagccggagccccggagcggggagccgagtggactcggatcagcacatacttgaagacgccgtcggagtcgatgtccacatcaggaatgagagcgaggtccgccaccgccatgttcctcctcccggagtcccctccc

SEQ ID NO: 310401 - DNA, 1083 bp, Homo Sapiens
gggacttccggcagcaggtggtggggccatggctgcccttctccgagctgtgcgtaggtttcggggaaaagctgtgtgggaaaggcctctccatgggctgtggtgctgcagtgggcaggaggatcctaagaggtgggtgggcagcagttcacccatctcgaaggagaaactaccaaacgcagagactgagaaattctggatgttttaccgttttgatgccatcagaaccttcgggttcctgtcacgactgaagttggcacagactgccctgacagtggtagctttgccaccaggctattacttgtactcccagggcctcctcactctcaacaccgtgtgcctcatgagtgggatatcgggctttgccctgaccatgctgtgctggatgagctatttcttacggagactggttggtatcctgtatctgaatgagtctggcaccatgctgcgggtggcccatctgaacttctggggctggcggcaggacacatactgtcccatggtagatgtgattcccctgacagaaaccaaggaccggcctcaggagatgtttgtgcgtatccagcggtacagtgggaaacagaccttctacgtcaccctgcgctatggacgcatcctggacagagagcgtttcacacaggtggtttggggtacatcagatgctcaagtgaacaactgggacctggacctctgggtaaccctgggtcgcctggattaacaggaaggctgagggtgtgggcaaggctgaagaaaggggactgggtacttggagactttgcctgggcccctgggaacatgtgttttgtggtgaataaattcacaaggcaagagctggtgtacaggtttaggaaaaaggctctaagcaagttcttacagcacttgtttgtgacattcagtcagataatggccagaaatttttgttaagagccagttcttagaaagacctatgcccaagtcacccataaagtccattggtgtgaaaagagaaaaggaaaaaaggtgtggccggggggaccgtaaaatttggaagcccaaaattctcagttcctggccttttggtcctggggaacaggtttattgaat

SEQ ID NO: 310402 - DNA, 1122 bp, Homo Sapiens
ctctatgcagtccttgtttcctgccatttaattttagatgaaaatgagacatatgagtacactgaaaagtaacatcaccatctggaaaattatacataaggaaaatgcaataagggaatatagatccttcagcccctattccagtactctttaacaactctgcttccttggacgggaattcatgaggtataatacttaaggagattttcatctgtaggttttaggattttcttatcggccatattcaccacccatcctggagcaagaccaaagaaaatctgccttggatccttcctagtacagagcattttgaagagttcatctttagtgatatcaggtaagatataaccatacttcctggcgagttcaagtcgtgcttcaggaaatttggcaggatccgccaggtacccacggttctttgcatcagtgtaatatggtaccagttcttctggtggaagcattctttttggaatgggttgtccacgaagaaagaatggaacaggtttgcatacaatgtccagacttcttggatcatagaaggctgtagtaacaacaccaccatttttttcaatggcagcaatagctagttctgaagccaactgtacttcaatattaacttttgccgtaaaggtgtcagcaccctcctcaaccagctggacaccataatcccttttaagtggctggatggtcacacctctcccattgacaagctgggttaagtcaataggttgactaggatcaacacgacccaaatcaataagatactgcagtctattgagactcaaaggcttatactggcgtctgaaactatgtccttcgttaaacccgtattttgggattcggatgtaaaatggagtctggcctccctcaaagcccaagcggggccgggttcctctttgcctttctcctttatggcctctgccacattttctacctcttctccgacctcttggtcttctctccggtttcttggagccgggattcggctttaagttggccaggctcacacgcggcaggccccggagtaggtccagggcccgggccccaccgccctgcaagggaccggccataacccgcagatccaagaactttcaagggcgccctgagctgctcggaggcccc

SEQ ID NO: 310403 - DNA, 360 bp, Homo Sapiens
  misc_feature (21)..(21): n is a, c, g, or t
aaatcaaataaagatactgcnagtctaattgaagactcaaaaggcttaatatggcgtctgaaaactatgtccttcgttaaaacccgtattttgggattcggatgtaaaatggaagtctggcctccctcaaaaagcccaagcggggccgggttcctctttgcctttctccttttatggcctctgccacattttctacctcttctcccgacctcttggtcttctctccggtttcttggagccgggattcggctttaagttggccaggctcacacgcggcaggccccggagtaggtcccaggcacgggccccaccgccctgcaagggaccggccataacccgcagatccaagaacctcgtgcc

SEQ ID NO: 310404 - DNA, 356 bp, Homo Sapiens
  misc_feature (283)..(283): n is a, c, g, or t
  misc_feature (338)..(338): n is a, c, g, or t
gcagtccttgtttcctgccatttaattttagatgaaaatgagacatatgagtacactgaaaagtaacatcaccatctggaaaattatacataaggaaaatgcaataagggaatatagatccttcagcccctattccagtactctttaacaactctgcttccttggacgggaattcatgaggtataatacttaaggagattttcatctgtagggttttagggattttcttatcggccatattcaccacccatcgtgggggcaaggcccaaaggaaaatctgccnttgggatcccttccctaggtacagaggcatttttgaaggagttccatctttaggnggatatcaggggaagggt

SEQ ID NO: 310405 - DNA, 645 bp, Homo Sapiens
ggtataattattatttttaatgtccagaatgtgtaatacaagggccagagcttcctcctggactcaattttataaattctcaattggttggtgaggccaatagggatactttttcttgtctaatttggtttctgggaaagcttcattcaagtcctcaatggtcatctgatcaaatggaattaagttcttcatcttctccatctctttctcatattctacaatcctggcctttgagagagacacccactcagcacaagatttcacatcttctttttcttcggcatccacctgggcagtatatttatcctctggcacgggaaccttcagcgcattaaacttcttctcaaagtcatccaccaagccagccttggccacattggccttgtagtaagcccagtcgatagctggtggattctcaggtaaagcagccaacctggaggtgagggtctcattccaggatttcagggaactagcaatggccttttggttctggggtatgatctctgcaaaagctacccagtcaatggtttttagagcaagttttcgcccagccattttgggatccttcaccgaccctggctgcccacggtcctccgaatcaagtgttggaaaccccccacccctcagcccatcgtgaaacgacag

SEQ ID NO: 310406 - DNA, 471 bp, Homo Sapiens
ttttaaggtatgcactaataaaaatttaatatcagaaaacagcatttttttaaccattcacaattaaagtggaaagagacaaaattataaggcagccatccatggaatgatttcatgtttacaagggatccagaaaaagggacatttaaaatcactgttccagctattgaaccaggggaactgcagtcttatcccatgagacttctaacttgctggaagatgccacaagaaaaaaagatcaaagccaatctccttgtgttaagccactgggttaggctgagtatatctagagaattcctaaatggttgtctagttctttcccacaagttacacatttccttcaggcctcctgaggtgaatctagatgtctcaggtacaaagaggttttaatttcacagcatctcccacagtgcactttgggtgatgtggaccattctgtattgagcagaaattttctaatggaaggaaggt

SEQ ID NO: 310407 - DNA, 403 bp, Homo Sapiens
gccctttcttgtgccccttctgagccatcaggaagtcaaagttcaaacagcagccctcagagcagttggcaacatagtgactggcaccgacgagcagacccaggttgttctcaattgtgatgtcctgtcacacttcccaaatctcttatcccacccaaaagagaagatcaaataaggaagccgtgtggttcctttccaacataacagcaggcaaccagcaacaagttcaagctgtaatagatgctggattaattcctatgataattcatcagcttgctaagggggactttggaacacaaaaagaagctgcttgggcaatcagcaacttaacaataagtggcagaaaagatcaggttgagtaccttgtacagcagaatgtaataccaccgttctgtaatttact

SEQ ID NO: 310408 - DNA, 2809 bp, Homo Sapiens
  misc_feature (1285)..(1285): n is a, c, g, or t
  misc_feature (1515)..(1515): n is a, c, g, or t
tggtttgaaaatttagaggatatttatttctcaggaaggtgcacaacagctggcaggcactgctttccctgctctaggggattcctctctccttttccaagaaatcccctctcttcttagaagtgcccatgggaggctgggatgtgaaaagaaaccatacacaacactccagagccttaaaaaaataaagcaacaacctcctccacacgaatacacttacaaaataaatagacggataaaagagaggccacgtgcctcccatcccggctgtagggctgcttggggatagtggggctgggtggctcggtcccacttctcccagccaggatgatccaaaggctaaatggaatggaagggccctggcttcagagagaggatggggcaggacctctcctggtactcagcagggaagacactgggggcacgggtagggaacaaaggaacaaataaataaataaatagaacccaacagcactctcagaggcctaagggcttagggtgaggctcaggggggccctggggcctgtttccctgaaaataacagatccagtacaggcagaaagaacagaagggaaaacacaggccacacccacctggcctgcagagcccagccccagaaggaggcctcaaatcagctctacagggaggaggggtggggtggggatgctgagctccacactagctgctctgagcctgctctctggccctggaggtgcccgaaggctagggaccctcccatccctgtgttctctgcggccagcagagcctcctccctcactctccagccttcatcctcaccatctccaccagaggaaaccgtagctatctccgaggtgggctctttcctaggaaagttgaggcagagccctctcctcctattcttaatggtcttcctgacttggggcatcctgagggtcagctgggagaagtccttgtgtaactataaataatcaaaacaatccaaccccatgtccaacctctgctccacttggccacaggtgcccgcactatctccaggtagggctgcattctaagctcccttcaggccaacagggagaaggtgtcagacagaagcaagtacagagaagggggcaggagctgctggaatggacagtttgggcaggaggccaaactggacacacaaagaagtccaagggtccctcctggagaagtgtggccagctgggggccagagagcacagggttggtgtggctggccactcagctgggcagcaacacgtgctccaggaggtaggtgagggagtcccagtgcttccagaggaggnaacaggacgaggaccaggagggtggtgctggttatgcgcaggggtgtcttcatgaggggcgtgatgaagttggcgatggtggacacgaacaaccagcagcacggccatgagcgccaggatcacgttgatgaacttgcccagcagcgcccgcgcgttggcattctccacgccctccagctgtaccacctgctgctgttgctgctgcagctccagcttggtgaccccgggtncaggcaggaactccacggcctcctggatgtcccgtgcccttttataggactggtaggccacctttttcttccatgctggccagttcctgcttacaggttcgtcatctcgttctgatgaagctcagtcaggtcgttgagctgctcctccagccgctcgtacctgtagcgctcctcctgcaggcactgggtcatgtaggtgtagtccctctgcagctgagtcttcaggtcttccatggagtcctccaggtgagactgtccctccttgatctcccgtagctcttccagcagagcatccaggtttccaggagcaccatacagtgcattggacttagggctccccagcgccccaccaggcccagccccagagttgctgcctgccccggctgagctggcgctggcgctggagcactcatcatcgctgccatgcttggggctggcgacgagtgtggcactgccgctcagtgcccgggctgcctcctcagggggcccatcttccagggggtccttcaggtgggcgatgttgtcagcactgccaaacttgttgcggatgaggctggcaaactcccggggcttggacaccacggcggtgtgggtggcctgtgagaggccagagaggctgcccttgacgccctcccccacgccgcccccaaagccgctgatgcctgcgcgcacgttggcgcccacgtccttcagcccctgctgcatgtcccgcagcacgtccttgggctgccgcgagggcccgttctgctcattctccttcaggcgccggcggtagtgctccagcttcttgtgcagctgggcgctggtctgggctgtcttctggttcttcttctcgcacccttgcttgctgcgtgccccctgctgcttgtccgcgttgttggcccgtttccgctcctctgcctccttgtcgtcgcgcgcctcctgctccctcttgctctgctcggtgctcttccggctcttctggtgccggtggtccctggcggccttggtccgctgggggtccggtgccccctcgggcccgtcccggctgctggggccgtcggtgtccccctggccggcggggcggctccgggccccccggtctcccttatcgacagcagtctcttcctccttggacttcatcttgacagtgccagcaggaaattctgtgagtggccagcagagggggacagaggtccacagctgaggacaatgagcagtgagcagtgtcaccggctggccagctgagtcctggggcctgctggatctctctaatggcagcttctcacagcagaactgtcgttcagaaagacat

SEQ ID NO: 310409 - DNA, 461 bp, Homo Sapiens
  misc_feature (207)..(207): n is a, c, g, or t
  misc_feature (440)..(440): n is a, c, g, or t
attgaaaatttagaggatatttatttctcaggaaggtgcacaacagctggcaggcactctttccctgctctaggggattcctctctccttttccaagaaatcccctctcttcttagaagtgcccatgggaggctgggatgtgaaaagaaaccatacacaacactccagagccttaaaaaaataaagcaacaacctcctccacacgantacacttacaaaataaatagacggataaaagagaggccacgtgcctcccatcccggctgtagggctgcttggggatagtggggctggggtgggctcggtcccacttctcccaggccgggatgatccaaaggctaaatgggaatgggaaggggccctgggctttcaggaggaggagggatgggggcagggaccttttcctgggtacttcaggcaggggaaggacattggggggngcacgggttagggggaacaaa

SEQ ID NO: 310410 - DNA, 1739 bp, Homo Sapiens
  misc_feature (434)..(486): n is a, c, g, or t
tttggaaaatatttattaaaaaactagtgaatgtggcagaaaaacaaaaccaacacacagctttaaatagcaagcatatgacacaccggttataaagcttttccaactctactgatttagtctttcacaccagctactgttgaggagggcttccgagggaagccacgtgtaaacgggtcatctgtactagtggtgagcaaaactaattacatgagaactatcaatggccatatgacttgctttcctaggcaatccacccaaaacataggtgagtggccaaatctcaggcgtgcgttcatgtggatctatagttctagttttaatttgagggttgggggaagttaggggatgaaacagtagaaagacaaacagtatcggcagagggcaaccttaaagcacctttaaaatctggaccctttcccacaatttaaccnnnnnnnnnnnnnnnnnnnnnnnnnnnnnnnnnnnnnnnnnnnnnnnnnnnnnttggcaggctccctaaatctgcaattttaagataagcactccgggtgattcagtgtctattagccagccatcccaatttccagaaacactgtttaaaatgcattaaaacaattcctacctcccacaaacaaaagtaaaggaatctgctgacagtcactgtgcttttgtcaatgtcaagggaccaatatgggaaggcaggcaggaaggggcctcccattcctaacacactgatctatagaagccctgtgcaacagcctgtcaagtgttgtttagggagtaaatacaattcaataagagttgttttagatcacagaacagcatccaaatcaccaacaggccaaccccattcatcccaggttaatgaactttgttgggtcgaagccagatgggacactgctgttcaaacaaaacacgggtaattgtgggtcctgacttgtgaagacatatggaataaaacatctataaaaacctttattaaacatagagcactatgcccaaataattttgaaggtttacgaaagtcacatcatggacaacatgtagaaatagtaacattgattccaaggttcccattatctgcaaaaagatgtgctatggctgtgtcgaaaacaaggcagtcgctgttcatgatggccgcagccacaccgtcatgaatcgaacggggcgtggcctcccaggtcaatctccgccggttcccattcaactccagtctgtaggcaaagttctcggcttgcttgcgggtgccaatgagcaggacgatggcaaaaaactgctggtggccttcgtacttctcttgtttctccagcaccagcatgaagtgatggccaaaacatgactgcatcatcacccagtcgacagcccctggcaagttaatgtctgtagctagaaagacgatgtcttctccctgaagggtggtaatgctcttgtgggcgtgcatgagatgggacatcacagcttccagggacccctgccacttgcaggaagcaccaggacatgggcaggagtagggacggtattcacatatgtcttcatgttctggtttctccgtatggtgcagggtcagggaacagcccgtggtggcatacttacagggaaacaggactgccgaggccaccttctccatagccaggttcctgatgctgggcgtcagggcgcccctgcacgtcgggcagcagctcaacttctggcggcattggttacacaccaggtgcccggcctggcactgcagaataggaggcaggacatagtcaaag

SEQ ID NO: 310411 - DNA, 1343 bp, Homo Sapiens
atttggtgagaaatatcccacaagccccttagttccatgggcccagggattttcccttaagggaaacacagttatataccccatttttccgttttacccttacttggaaccccggcgcgctccaaaacaaatagtccttgaaaaggctttttgaagggtccgaagggcggccgccaagtttttgggtcactgtgttcctcttttgtccggcgggagggaatcttttaatagaaaaacacacgtgcaacagtatcaacacacatctctcgcaatcctgacagcgctgaacttcagttcttcaccttggggggtggcctgtacactcccacgaccacggcatggtctctttcatatggctcaagggtcaactgctcctgcggcttcatgttctcctgttgcatctttttcacttcggaggcaaacacggcctcggctgaggctgtggagtcaatgcagttggccttaatggaaatcacaaagtgtcctccattacgcaggaaggtgtgggcattcagggccacaatccgggtctggtctggctgggccacatcagcaaagatcacatccaccattgcgatgagcatgcggtatttgtgtgggtgtcgagcatcctcgatcacaggaatgatgttggtcctcttcttggccaagttaatgaggtcacggccagagcggtgggagaactcgactgcatagactagaccatccggaccaacgatgtcagagacatgggagaccgtggtgcccgaggcagccccgaggtagagaaccttagcccccggtttgatgtggatctggtccacaccacccaggattgctgctgctagcttggagcggaaggggttccaggctcggtactcaattttgtcatctccttccgaaatcgagactctcttctctccataaactgattccccagggaccaggttcttggtgaccagtgcatcttcctttcctcgacaaatgaagacaccctcatgccgatgcggctccaccatcacattcttccccgactggtttcctctttttcctccccgaccacgaccccggttgccaccagaatggaagcctccaccacctcttcctcctcctccaccgccgccgccgcctccacctcctcctcgtccacgacctctaaagcctccgcctcgacctcggcccccgccaaagccccctcggcctccacgaccaccacggtcaccaaagccccctcggccgccaaagccacccccacggggactgaatcctggcttcatggcgagccctggtttgtgcggctccggagtccgcggcgttcacaactccacgagtccggggctttcgcacgtggaaaagagcgcccc

SEQ ID NO: 310412 - DNA, 486 bp, Homo Sapiens
  misc_feature (14)..(14): n is a, c, g, or t
  misc_feature (26)..(26): n is a, c, g, or t
  misc_feature (57)..(57): n is a, c, g, or t
  misc_feature (69)..(69): n is a, c, g, or t
  misc_feature (100)..(100): n is a, c, g, or t
  misc_feature (106)..(106): n is a, c, g, or t
  misc_feature (475)..(475): n is a, c, g, or t
tggaattcaatgcnattgcccttaanggaaaatcacaaattgtcctccattacgccngaaagttgtggncaattcaaggcccacaaatcccgggtctggntactgnctggggcccacatccagcaaaagattcacatcccacccattgcgaatgaagcatgcggtatttgtgtgggtgtcgagcatccctcgaatcacaggaatgatgttggtcctcttcttggcccaagttaatgaggtcacggccagagcggtgggagaactcgactgcatagactagaccatccggaccaacgatgtcagagacatgggagaccgtggtcccgaggcagccccgaggtagagaaccttagcccccggtttgatgtggatctggtccacaccacccaggattgctgctgctagcttggagcggaaggggttccaggctcggtactcaattttgtcatctccttccgaaatcgagactctcttncctgtgccgaa

SEQ ID NO: 310413 - DNA, 542 bp, Homo Sapiens
cagtggggagatcagtcatggccaggagggttggcaaccaggagagatcaccagcggctagagcaatgttctgactcctcccaagctctggagagagaaaggggcaggaatggccaggaccagaaggcaggaggcgacagtcagggccaggcttgtctcagtctagctccctagaatccctctcctgaggggcccctctgctgggccctcccatgagaacctctgtggacccacaccagccaagcgtgtgctgcgactccagggatggccaagaggatgagccacatccttctttgggattgatcagctaaatctaagctaagctgagctgctgattcctctaagaagctaaaaggaggatgatgggagtattaggggaaaggagagaggatctgtgcagaggtggggaggcggagtcctgcagggcccttctgtccctgcccctggctgtgccaaatggaactggaatagttgtgggcaggctcgtccttaggctgtattggcaactgggtttgtagctggacccgctggtggtgcacggg

SEQ ID NO: 310414 - DNA, 2042 bp, Homo Sapiens
ttttgaaaaggaaacatttggagatattttatttctgtgataaggaaatctcacataaaagtctttatcatttcattaattcacaaaaagtgttaaatcagttaaaattaaagagaaaagttcacaccgaatgaaagactcgttttgtcttctcttcccctgaagtaatttaaactcccaaagcagcacgagtttttgaaatcagtttttgtccctcttcagcaaagcagacttcctgttcctggccttggcagcatttctccaacaggcctgagaaatctgcaatgacagcctcaagttgttcctctgttatttgtggcttttgcttcacaaggttaatgagaaactcttgcttcatcgtttgcagcgctacaccctgagcttggcacagatccttatggaaaatgaacttgtcatcagagaatgcaggagggacatatgtttcatccaccaccaagctgctgaagcatggcctcctgttggcatatgaagaagtgcagcactggccaacaccagggtttactggagtcatttcatgtctgatacataagtgtccgataataatgtcagccgctccctcgccacaggccaatagtttgtcctcactgagttggcaacaagtggctgctgtggctgccatttttctggtgatggccatcagctccgacgaggtcagctggggggctttctttgtgtaagcaacgagaaacgcattttgtaagtaatattctcctagtttctggaagaggccgcagcttcgctttgccaatgcttggctctcctggatgtatttctgtaattcttcttctcctttatcttggcattcaagagggttttcagtctggaaacacttctccaataactcctggtatcctttagcaactcttagaattactgagacagcaagctgaggatgtcttcttgaatattcatgaacaaaacttgccaagaagatatttttttcccctgaagaaaattggttaaaatctctatctcctaaaaacctgtttagatttggagatagaccttcaggtttttcatcattttctgcatgaattatacattgaccacgttccagcgtggtcagtttgcagcattctgttattttgtttgacagagtgtcttgttgagaacatatgtaggacatgattttttccccatcctgcagacaatccagcacatctcctctgcaacagtgctcatgtacatgggccacatccaggactagtttctggatttcagtaaaattaactttggtaaacttctgactcagtttagtaacagttatggcttggaaagttcgggtcccaaaatttttcattactgcacatgcatgttgatttaacaagctgctttctcttaattcttttgtaactgttgctgcctttgtttggaagcattcaactgcattttcagctttgcagcaagatggaattattttgtcatagcgagcagcccaaagaagaattgtaggtgcatacaggaagggatgccttcttgctatctcataaatgaatttgttcatgaatgtctccctgtcttcttcatatgcttcacagcttgtgacaggttctggaacttggaaaagtgggatcgatgctggagtgggctttttgtgtgcaagaaaacagttatgtcttccctcttcactttggctgcagcagtctgaatgtccgtacttctccaaaatttctttctcatggcaaagttcttccagaaaggcaggtagctggttttctaaacaccctgaagactgttcatctccagtgggtttctcaattgcagtcaatgcatctttcaccattttgcttacttccttgtaagtggcttcttgaacaaactgggcaaaaaatatggtagccaggtcagctaaacttatctctgcagtacattggtaagaatccaatatggaagctattccatattcatttctatgcagtgttctggattcagtaaaatttagtaggaaaattaaaaaaattgattccacccacttcatggttgctagttattttgttattggcagtggtggaagcacaacc

SEQ ID NO: 310415 - DNA, 344 bp, Homo Sapiens
gccaataacaaaataactagcaaccatgaagtgggtggaatcaatttttttaattttcctactaaattttactgaatccagaacactgcatagaaatgaatatggaatagcttccatattggattcttaccaatgtactgcagagataagtttagctgacctggctaccatattttttgcccagtttgttcaagaagccacttacaaggaagtaagctggtgaaagatgcattgactgcaattgagaaacccactggagatgaacagtcttcagggtgtttagagaagtacggacattcagactgctgcagccgtgaagagggaagacatctgttttcttgccc

SEQ ID NO: 310416 - DNA, 648 bp, Homo Sapiens
  misc_feature (631)..(631): n is a, c, g, or t
ctgccaataacaaaataactagcaaccatgaagtgggtggaatcaatttttttaattttcctactaaattttactgaatccagaacactgcatagaaatgaatatggaatagcttccatattggattcttaccaatgtactgcagagataagtttagctgacctggctaccatattttttgcccagtttgttcaagaagccacttacaaggaagtaagcaaaatggtgaaagatgcattgactgcaattgagaaacccactggagatgaacagtcttcagggtgtttagaaaaccagctacctgcctttctggaagaactttgccatgagaaagaaattttggagaagtacggacattcagactgctgcagccaaagtgaagagggaagacataactgttttcttgcacacaaaaagcccactccagcatcgatcccacttttccaagttccagaacctgtcacaagctgtgaagcatatgaagaagacagggagacattcatgaacaaattcatttatgagatagcaagaaggcatcccttcctgtatgcacctacaattcttctttgggctgctcgctatgactaaattccatcttgctgcaaagctgtgcagttgaatgctttctcanacgggcagcacagttcc

SEQ ID NO: 310417 - DNA, 358 bp, Homo Sapiens
gagagaactagtctcgagtttttactttttcttttcatttggagatattttatttctgtgataaggaaatctcacataaaagtctttatcatttcattaattcacaaaaagtgttaaatcagttttaaagagttaaactcccaaagcagcacgagtttttgaaatcagtttttgtccctcttcagcaaagcagacttcctgttcctggccttggcagcatttctccaacaggcctgagaaatctgcaatgacagcctcaagttgttcctctgttatttgtggcttttgcttcacaaggtttgagctcttgcttcatcgtttgcagcgctacaccctgagcttggcacagatcctttgg

SEQ ID NO: 310418 - DNA, 1036 bp, Homo Sapiens
  misc_feature (896)..(897): n is a, c, g, or t
  misc_feature (955)..(956): n is a, c, g, or t
  misc_feature (960)..(960): n is a, c, g, or t
  misc_feature (973)..(973): n is a, c, g, or t
  misc_feature (982)..(982): n is a, c, g, or t
  misc_feature (996)..(996): n is a, c, g, or t
  misc_feature (1002)..(1003): n is a, c, g, or t
  misc_feature (1008)..(1008): n is a, c, g, or t
  misc_feature (1015)..(1015): n is a, c, g, or t
  misc_feature (1018)..(1018): n is a, c, g, or t
  misc_feature (1026)..(1026): n is a, c, g, or t
ctgccaataacaaaataactagcaaccatgaagtgggtggaatcaatttttttaattttcctactaaattttactgaatccagaacactgcatagaaatgaatatggaatagcttccatattggattcttaccaatgtactgcagagataagtttagctgacctggctaccatattttttgcccagtttgttcaagaagccacttacaaggaagtaagcaaaatggtgaaagatgcattgactgcaattgagaaacccactggagatgaacagtcttcagggtgtttagccagctacctgcctttctggaagaactttgccatgagaaagaaattttggagaagtacggacattcagactgctgcagccgtgaagagggaagacataactgttttcttgcacacaaaaagcccactccagcatcgatcccacttttccaagttccagaacctgtcacaagctgtgaagcatatgaagaagacagggagacattcatgaacaaattcatttatgagatagcaagaaggcatcccttcctgtatgcacctacaattcttctttgggctgctcgctatgacaaaataattccatcttgctgcaaagctgaaaatgcagttgaatgcttccaaacaaaggcagcaacagttacaaaagaattaagagaaagcagcttgttaaatcaacatgcatgtgcagtaatgaaaaattttgggacccgaactttccaagccataactgttactaaactgagtcagaagtttaccaaagttaattttactgaaatccagaaactagtcctggatgtggcccatgtacatgagcactgttgcagaggagatgtgctggattgtctgcaggatggggaaaaatcatgtctacatatgttctcacaaganntctgtcaaacaaatacagaatgctgcaactgacccgctggacgtggtcatgtataatnntgcngaaatgatgaaanctgaaggcntctccaatctaacnggtttnngggangggtttnacnatttcttnggggaaaaaa

SEQ ID NO: 310419 - DNA, 511 bp, Homo Sapiens
  misc_feature (483)..(483): n is a, c, g, or t
ttaaaaggaaacatttggagatattttatttctgtgataaggaaatctcacataaaagtctttatcatttcattaattcacaaaaagtgttaaatcagttaaaattaaagagaaaagttcacaccgaatgaaagactcgttttgtcttctcttcccctgaagtaatttaaactcccaaagcagcacgagtttttgaaatcagtttttgtccctcttcagcaaagcagacttcctgttcctgggccttggcagacatttctccaacaggcctgagaaatctgcaatgacagcctcaagttgttcctctgttatttgtgggcttttgcttcacaaggttaatgaggaaactcttggctttcatcgtttgcaggcgctacaccctgaggcttgggcacagatccttatgggaaaatggaacttgttcatcaggggattgccgggaggggccatatgttttcatccaccaccaagctgttgtagctngggctcccgttgggcatatgtaggagtg

SEQ ID NO: 310420 - DNA, 4579 bp, Homo Sapiens
  misc_feature (245)..(245): n is a, c, g, or t
  misc_feature (261)..(261): n is a, c, g, or t
  misc_feature (278)..(278): n is a, c, g, or t
  misc_feature (328)..(328): n is a, c, g, or t
  misc_feature (337)..(337): n is a, c, g, or t
  misc_feature (1065)..(1152): n is a, c, g, or t
ttgaacgatctcacccatctcggacgcctcgtagtgataacacgcgacaattaagtgtttttgtcatccccactcacacatacagtccccaccacacatggactgcaattcagcgcccgcgattactctagccgcggagaaacacagtgggtgcgcgcgcatcatattacacacctctcatacagagggtggcggtgttagtagtcgcggagagaaagatcacattgtgtgttgtagcgggccangtagggacgacgcagncaaaaaatatcctcacnctcgcggggtgagtgggtgaattcttccacgcccctacacattattcacntataaattnattatgaggaacaggtttgtggtcgcgcccaccattcttgttacacgcaagaaggagcagttgtttgggtatatggggaccctcaccctagttttgttgttgtgccctctgcgccatgggcggcgggccagaaacgataatgttatgaattgctcgcggcgaaagagaggcgtcgtagagacacacgagtggagtaaaatagtgttaacccacaggcgccagggggcgcgacagttcacgacgacggtctaacacccgaccaagtcacccaccatttctggggaggagggcatatctcccccggtatttgggcgcggaggagactccattatataattgagatgttccataccccagtgacgttccgcccacaccaccagtgtccgcgcggccgcgggccgtttctcacactcctatttctcccccgggcctccccgcgtggggggcgccccgctcggagagaggaatcccacggtgaatgcgcgcctgcggaaaacccccactccgcgggcatttgtttacagatacacatctctggtttcgcggcggcgggaggttttttgtttgtggggggggaatcccaggccctatggccaagggacaggggttttcttagggaaaccgggtttggaccaccggtccggttaccttaagggggcctggggggcccaaacgcatgggtttgggaaagtttcttggaggggcgtgggggggcgccacgtgtttcnnnnnnnnnnnnnnnnnnnnnnnnnnnnnnnnnnnnnnnnnnnnnnnnnnnnnnnnnnnnnnnnnnnnnnnnnnnnnnnnnnnnnnnncagtgtttaagtattttattaaatcagacaaggaatctccacactgttgcacataacagcttttatacaatgataaggacatatcatttgtttacaaagaaagtctaaaatttcaagaacattcaaagagctaacacagtaaaggtcatgcaagttctagaatagtgaatcatgacagaactcattcattttatcctttacctccaaaaggcccatctccttaacgagaagacatctcaagaccaggagcttgtcactagtctgatatttcattcaggaatattgagcctgttagcacgtactggcttgataggaagtaactcaaccctaactgtagaaaagggttttctgaagagactcactgctgcaaaatgcatgccctgtattcatattgtgttatacgatgaacatgccacatgctttcatttaagtacgtgtgcgtaacacccgaaccaggaatctcagctatgaccttttcacttagctacgctaaatgtcagtccaagataaaagaggagattaaagataaaactgaagattaaagagactgtgagtagtgacacattcaagtgaggctgtaaatctaggtaagtgacactaagaacctgaagagaccctatgaacttttccctaggaggccgtttccaactgccctatgacaaacagctgatcatcacgtttataatgatggttcactcacggagcttcgaacttattcatacctacatttaattgatcaccacgaatgggtaggcagacgtgtcagaccttcaggggactctccttccccacagcccccaaaccttctatacaaagtccctctgctttaagtcaaaaggtcaattctggattaaaacttgtccgcactaagtttataggaggtaacatgcaaataatgtgataaagttaaaatgacttgtcaatagcaaacattataaatgtatgctactatctcattaagtagaggacctggagaaaccataaaggtaacaaaaacccaagctaaatttcaaattttgtagtaatttcattttacagtggttgaatttacccacccaatgcttaatgaccacaaaatgtttctgcaactaaaactaaaagatagggaattataggagttgggatacatgttagatactaacgatcttcaagctttgaagatgtcattgcatgaagaaaattatgggaaacactgttcccgataattacttacacccttagtgtaacatatggagatcactgtctccgatacagacactgtggtaggtaaaaactaccttgttctttatacattatggaagacactgctcccgataatgtgttaggattgtgacaaaggtactggaaattttgcaaaatgggaattagagttacaccttggataaactgagctataaaattttgcaggagtactaccacagcctttaagtgacattgatttataacttggtcacaattcactgcatttaggaaaaccagcattcttatctggtcagtgctcgcttcttagcaacccctaattaaatttaattcatctctaaatcttagcttcaactttattcaattacatttggctgacggctgttttctaaaacccttaagtgttgaccataaatgcaaaacttccagtatctgttgggttttattagcagatgctgcttttatttaaaaaaaaccgacagtataactgtcataattatggaaggcactgcttccgataattatattctattaaaaaaacaccatttatagtgaactctgtcactgataaataaacaataaatatctcagtgccaaaaggacagaaagctctcccctaagattaacactttggccaaaatttggcagcatattattctttaaagtctgacaaactgagtctgcaactaaacacctgaaactggttctctttcaatgtgctttggaagaaacaaaaataacaaagaactaaatggaggcttatgggggaagggacagaggaaaagaaaatatactaagtctttggcttctggtcccctcttttcataaatgacactgaggttaacatattaaggccttattcctgcaatcaacagttgaacctcattttatccagcagaaggacctccatttcagacctcattggcaagaaaacaagcccatctcttctgaaagttaactgtttctttcaggaatgaggaaaccagctacattccttatggaaaggcttagatctcatttggagaaggtctttcaacctggtatctcctatttagcatcaaatgaagttggaggatcactcaaagtaagcgaccacttacaaccttcagcagagaccagcccttaggattcagagagatcattcacataactggtttctgacattttcattaacaacaacaggaaagaggcagttcccattacaaagcacttaaaattctagagataggggaatattccatcatggacattttttaagtggttattcactttaacttgaagtacaggttatctaccctgtattaaaagctgctgcctaaagacatctagtagtaccaagatgatgggatggaattttaacatcaggttttgtagccctactgaaaatttagcacgatcagcacaagtctagaaaccagactaccctgctgttctcatggaagctatgggtatcacatttaaaactcattgccaatgtcccaaacgtcaccagagagggcatttgcagctccctgaatagtccaagtagctagagccaactggtttctgaacagcgtttcattaaaagcaccgttattttgtttacgcagtttcaagttctccagtaaagctggcagcgtgtgagagccggagccccagaagacatgtcggaaaggagactcttttggagatacgtagggagagaggaagtgatactccactctcatgacacgatcattgagtttcttcatgacaaatctgtctgttttctcagcattcccgaaatctgttgttagtctggaagtagcacggaagaagtctccacgagcagaatacagccactgtaaactcaggcccatttcctttatgtctgctctgtattggttcagatccctcacaaatgaaagcagttggctgttgtacctctcatagtccaggttcaattcaacatcatgggttagtttaatcacgaactgaccagcgacctctgcagctgctcgtgccactttgttcaactcaggaatcctctcaatcagttccttataggtgtccatggtggtacccaaataaggataatctgtgtcctcgcaaaaacagaaagaaactgctgggattccagaatatgcaaggaaagggaaagcagcattgtctaaagtgagtttctcaagctttgctggcccagttgctgtcctgatatagaaattgctccagtaaccggatgcttcacattttgcattgttttctcaat

SEQ ID NO: 310421 - DNA, 445 bp, Homo Sapiens
  misc_feature (22)..(22): n is a, c, g, or t
  misc_feature (32)..(32): n is a, c, g, or t
  misc_feature (53)..(53): n is a, c, g, or t
ctgaaggctgaccctaaacggncccagtgacnccccctggacagagtgccccnaccccctaatagcccaacagggttagcatggccagcacagatcgctgcttttattgatgcaaatcaagcctgctgcttctcctccctgcagacttagccaaggaactccaagatgcatgactgggacaagaaaaggtgagactccacatggaaatgccttgccctaaaccttgaatgactgtgagatgcgatctgggagtgcatctgtcaagtctttgtgttttccttcactaacctcagaatactgggctctattttatcaagcgctgcagtttcatgcctctgtgccgtcaatgctcagcttctgcaacaggacaccaaacttgatgcagaaagccaaataggtcaattatgcaaatctcctggtgccatattaaatttcttgattgatg

SEQ ID NO: 310422 - DNA, 1232 bp, Homo Sapiens
aagctgggccctgggtccaaggcacgacaggcaggcaggtggtgcccatgggaatgcggagaacctgctccctcgcgcaggaggcgccgacccggcagtccgtgagatcctgctgggacttctgagaggcctggtgagcttgctcctggagcccgcttccttgcacctcttctcagtcgtctttagctaaagcagagaggctccttcactccggacttagctgggctggtttccccgagtttcataggtggtgagagcagttttccaagtcttcatctctgctgctggtcccccaagtcaccggcagagcctccatggcttccatttcaacgctggccagcgggggagtttgccttgacttgaggtagcatgccaggagagacacagcgctcagcccacacagcaaggacagtggacgtggagatagccacagtggtgtcgctgtggccctgtggatacacacctggcggctggtgggaggcggatgctgtgagttcccaggtcttggctgttgtctgagagggggtgccgtgggaggactcatgactgcttatctctgtggttcctgtggaaggtgattttgaaggcatcagctgggagcccgggacaatagctgctgttgtggccgctgtgttgtttgagctgggagatgaagctgcgggctcttttccagaaggggagaggctctctggctgtggggtcacccctgccgtcgttactgtggagggtggcgctggcctttggtgaaccagggcagggtctctaatgcatttgagactgggggttgtccagtgggcgacattcgtggccttgttcaacacgcactccgtcaggctggacgtgccggctttacgcttgaaaccagagttacaaatgtaccgctccctggagtacaagctgtagctcttgacccagatgtctgcgtgttccacggacatggggggagggcacgtgatgcccacgcaagcccgggagcctcccggtcctccgcgctcgtcgtgctctgggacctccagtgtgcactcggtccggtgtccccactgcgaagagagtgggcaaagtcatcggagagcagactctctccagccctctctgcggctcggatccacttgacctcgcccggcgctggtcgcctccagctgctccgccttcggctttcctggtctccctccggggccctgcgctcggttgtgagcggccggcctgggtgagtgcccgcggaggtgtgtccc

SEQ ID NO: 310423 - DNA, 1001 bp, Homo Sapiens
gacccccagaccagggaatttgggtgggaggccccccgcccttggtgggcggcccgggggcaccggaacccatcccctcaagattttgccctttttggcaaggggtaagtcccccggggtccaggcatccaggaaaccggttgaagggcttgttaggctgattccaggtcgaacagcatttgaccccacctgtgagtggtccagctcatttgacgccgacatgccgctcagggtttgcagccctgggagtgcagccccagggccatgtggggggggaggccctcagggccactgcggggctcccgcctggctgggagggtctcgggcactgcggggctctgcctggctgggaggcacacccaccactggctgaccgtctggcgcccctcaaagtcgggtggggaggtggctcatgcggtgcatggtctccatcagctctcgcaggtcgggctggatctcatccatggcgcggatctccaggcgcagcttgtccatgaccgtgatgaagagcgagaccacgtctgcgatgcagcggttgaggttgcccttgtcgtccttgatggtgatgggccggtcctccttgatccgctccatggccagcgggcagtccaggcggaacttgcggcagaattcgtcaatagagctgatttctgagccctggacctgcctgaaggcagctttgtattggaccaggagccgggagcaggctgcagtgtactcgctgggggagacacagtccttgatgtaggccttctccagggcttgcattgtcttcaccaccgcaaacagctctgccatgttgtcgtacttctccctctcccgggcgttcttgtacaacttcacttcctcatacagctccggcttgttcccaggggctcctatgcccggcgtggctgggatcccatgaaacatcctctaggctctggggggggcacagcactgagacctggacggctcgcggtcgggaagatggcgccgggggcggggtgcgctcggtcagc

SEQ ID NO: 310424 - DNA, 830 bp, Homo Sapiens
tttggaaggtcggagagcatctttattgtggggaggggcccggcccaaaagttctgacaccaaagacagacaccagacaggcagctgcagacagtgagttgtgtggatgaccacggcctgtgtggcggacaggggaccaggagccatcgcctcagactctgcccttctgtgcaagggctagtgccccgggctcaggcatgcaggaagcggttgaaggcgttgtaggctgactccaggtcgaacagcatctgacgcacctgtgagtcgtccagctcatctgacgccgacatgccgctcagggtctgcagccactggctgaccgtctggcggccctcaaagtcgggtgggaggtggctcatgcggtgcatggtctccatcagctctcgcaggtcgggctggatctcatccatggcgcggatctccaggcgcagcttgtccatgaccgtgatgaagagcgagaccacgtctgcgatgcagcggttgaggttgcccttgtcgtccttgatggtgatgggccggtcctccttgatccgctccatggccagcgggcagtccaggcggaacttgcggcagaattcgtcaatagagctgatttctgagccctggacctgcctgaaggcagctttgtattggaccaggagccgggagcaggctgcagtgtactcgctgggggagacacagtccttgatgtaggccttctccagggcttgcattgtcttcaccaccgcaaacagctctgccatgttgtcgtacttctccctctcccgggcgttcttgtacaacttcacttcctccctcgtgccgaattcgccacccaggcctcgcttctt

SEQ ID NO: 310425 - DNA, 1487 bp, Homo Sapiens
  misc_feature (385)..(385): n is a, c, g, or t
  misc_feature (395)..(481): n is a, c, g, or t
  misc_feature (1287)..(1287): n is a, c, g, or t
  misc_feature (1396)..(1396): n is a, c, g, or t
  misc_feature (1411)..(1411): n is a, c, g, or t
  misc_feature (1418)..(1418): n is a, c, g, or t
  misc_feature (1420)..(1420): n is a, c, g, or t
  misc_feature (1457)..(1457): n is a, c, g, or t
gatagataacctatttaggtccttggtctgtttttcaatcaggttgtttgatttttgctattgagttgttggaattccttatgtattcagatatttgccccttcggccatgtaggttttgcaaatattttctctcattttctgggttatcttttcactcggttgattgtttcctttgctgtgcagatgctttagcgttaaatgaagccacacttgtctattttcccttttattgcctgtgcctttggtgtcatagccaagaaatcattacctacatcaatgtcaaaagctttatccttctatacacttctagtagtttatggtttcagttgttacatttaggttttcaattcattctgagttgatgtttctacatggtgtgaganaaagatttannnnnnnnnnnnnnnnnnnnnnnnnnnnnnnnnnnnnnnnnnnnnnnnnnnnnnnnnnnnnnnnnnnnnnnnnnnnnnnnnnnnnnntaataaactttcttttttttacttaaaccactctgtgtcactgagctgatttcacctttagcctgataaaatcattgtcctctccaccctgattcctacaggagactactcaccccataacctcaaaaacctcttcatgaggatggtgagtcacctgaatcctgaagtgaattactcgctattccattggtactcatataggacaccagaatctagacctccagagaacagcaggacccatcttcagaaaataagaagcatttgttccctgagcctgttgaatcaaagtgcaatttctattctttttggaatgttaaaaagtaaatcataatatttaagcaggtgaacccacgagtaacatagcagggtctttcttgtcattattagctccaacctagtacagacattaaaggtacagatgtatactagcatgaaactgggagaacaggagcattcgagcaaccttgagaccaatgggcctctcttgtaaaatgcacacctcctcttactgagattgaggaaggtttcttgtctccgagccttctcccagtagagctataaatccaggctggctcctccctccccacacagctgctcctgctctccctcctccaggtgaccccagccatgaggaccctcgccatccttgctgccattctcctggtggccctgcaggcccaggctgagccactccaggcaagagctgatgaggtggctgcagccccggagcagattgcagcgcacatcccagaagtggttgtttcccttgcatgggacgaaagcttggctccaaagcatccaggctngaggaaaaacatggcctgctattgcagaataccagcgtgcattgcaggagaacgtcgctatggaacctgcatctaccagggaagactctgggcgattctgctgctgggnttgcagaaaaagaanaatgagntnaaaatttgctttgagagctacaggggattgctattantcctgtaccttctgctgaatttccttttct

SEQ ID NO: 310426 - DNA, 480 bp, Homo Sapiens
tttgtaacaaggcatttatttgggatgaggaaaggaaattgagcagaaggtacaggagtaatagcaattccctgtagctctcaaagcaaattttgagctcatttttctttttctgcaagctcagcagcagaatgcccagagtcttccctggtagatgcaggttccatagcgacgttctcctgcaatgcacgctggtattctgcaatagcaggccatgtttttccttgagcctggatgctttggagccaagctttcgtcccatgcaagggaaacaaccacttctgggatgtccgctgcaatctgctccggggctgcagcaacctcatcagctcttgcctggagtggctcagcctgggcctgcagggccaccaggagaatggcagcaaggatggcgagggtcctcatggctggggtcacagatcctctagctaggcagggtgaccagagagggcagacagcagtcctctgtcccagatcttc

SEQ ID NO: 310427 - DNA, 988 bp, Homo Sapiens
  misc_feature (313)..(351): n is a, c, g, or t
  misc_feature (889)..(912): n is a, c, g, or t
gactgttttaagatcatttattagaacggtcattcagaagccattgagacatcaggcagcagaaaggcaggtgggatggagcaggccctgtgaaggaccaagaacaaagtaatagccacagttatgaaatttcattttattctgataaagactaatatatgcttgataacctagtgataatccataagtttggtatttcacaacattttttagaaagcacataagattaacattcaaataaggcattatagaaagttttataaagaatgaagtgtttcctataattcttttaaaaaaccttggttcatcttgnnnnnnnnnnnnnnnnnnnnnnnnnnnnnnnnnnnnnnnaataaaattttccccccaaaacacataagaaccacttactggcacttgtattttaagtacctgggaaaaaaacggaacagatttttaaaggcaataacgacttgtaagacggcttgtttcatttgatttggcacgaagtaaagtaagagtaaatatgccatggaagacataatcaagtttttcctccatctctcatatttccccacttctaccagaccacacagtacatcagcaaccatcctttagattccaatttttaaatggctgctcagacgacaccaatagagttctttctccttaaaatatggtggcagtgaatgctaacaggtatcaatttctttgatcaggaacaaagaactccttcaggaaactcactttcctggtccttgttaacctatcatgtaaattctttttattggtacacctgtttactaattataattgattgctatttatgccaagggagcatttcccaggcatgcctcatctatttactaacaacaaagtatgcttactttatttacatagtgccacgggnnnnnnnnnnnnnnnnnnnnnnnnattggcgggggagatggtactataacttgttatttatcagggcagatcacacatttggatcaaaaagaaaaaccag

SEQ ID NO: 310428 - DNA, 586 bp, Homo Sapiens
gatccaaatgtgtgatctgccctgataaataacaagttatagtaccatctcccccgccctttaaaaagagaagaaaaaagaggaaacccgtggcactgtgtaaataaagtaggcttactttgttgttagtaaatagatgaggcatgcctgggaaatgctcccttggcataaatagcaatcaattataattagtaaacaggtgttccaataaaaagaatttacgtgataggttaacaaggaccaggaaagtgagtgagtttcctgaaggagttctttgttcctgatcagagaacttgatacctgttagcattcactgccgccttattttaaggagaaagaactctattggtgtcgtctgagcagccatttaaaaattggaatctacagtgattcctgagtgggcagcaagggtggctgctgatgtgctgtgtggtctgggagaagtggaggaaaagcccgatggcgtctttcacggcgtatttactcttcctttacttgatgccaagtcaaatgaaacaagcgctcgtacaagctgttattaattgcctttaaaaatctggtccgtttttttacaggtacttaaaat

SEQ ID NO: 310429 - DNA, 1696 bp, Homo Sapiens
  misc_feature (248)..(249): n is a, c, g, or t
  misc_feature (813)..(836): n is a, c, g, or t
  misc_feature (1119)..(1119): n is a, c, g, or t
  misc_feature (1121)..(1121): n is a, c, g, or t
  misc_feature (1131)..(1132): n is a, c, g, or t
  misc_feature (1136)..(1136): n is a, c, g, or t
  misc_feature (1167)..(1168): n is a, c, g, or t
  misc_feature (1193)..(1193): n is a, c, g, or t
  misc_feature (1195)..(1197): n is a, c, g, or t
  misc_feature (1221)..(1221): n is a, c, g, or t
  misc_feature (1246)..(1247): n is a, c, g, or t
  misc_feature (1251)..(1251): n is a, c, g, or t
  misc_feature (1256)..(1256): n is a, c, g, or t
  misc_feature (1265)..(1265): n is a, c, g, or t
  misc_feature (1304)..(1304): n is a, c, g, or t
  misc_feature (1321)..(1321): n is a, c, g, or t
  misc_feature (1335)..(1335): n is a, c, g, or t
  misc_feature (1344)..(1344): n is a, c, g, or t
  misc_feature (1364)..(1367): n is a, c, g, or t
  misc_feature (1370)..(1370): n is a, c, g, or t
  misc_feature (1372)..(1372): n is a, c, g, or t
  misc_feature (1375)..(1413): n is a, c, g, or t
  misc_feature (1437)..(1437): n is a, c, g, or t
  misc_feature (1440)..(1440): n is a, c, g, or t
  misc_feature (1446)..(1446): n is a, c, g, or t
  misc_feature (1469)..(1469): n is a, c, g, or t
  misc_feature (1515)..(1516): n is a, c, g, or t
  misc_feature (1518)..(1518): n is a, c, g, or t
  misc_feature (1520)..(1520): n is a, c, g, or t
  misc_feature (1532)..(1532): n is a, c, g, or t
  misc_feature (1535)..(1537): n is a, c, g, or t
  misc_feature (1541)..(1541): n is a, c, g, or t
  misc_feature (1554)..(1554): n is a, c, g, or t
cccctgttttttatattttgggaacttaaaagagattgtgcccaaatgtttcgggaaatctaaaaaaggcattcggtttgaaaaaaatataggtgttttgttaagcaggttatccctcaaaaaccttcaccgatgtctgaaccctttaaaacattctgttagagcaaaaattaaaagagccattttggtagtaatctaactttttgttcagttaataagtggttgataaagttttccatattttctgnnaaaagttaaaaaaaagttacatgtcatttggagaaaatacgtaatcagaaatttgtgcatagattgatgccaaaaaagacatttccagcattgtggaacatggtgagacactatataaaattccagaaagaaagcaactggatttacagatttattgtgagacacaaattcactgctgcctttacactaagaaatgtatatgttaaccatatatgctgtatttattttgtcgttaagcatactttcagtttactcagaattttcaatttgctataaagatgtatcaattagcatatagaaaaatattactttaagatgacttgtttcctttgaaaatacctgtgtactgagggttatgatttgtgtcaaaaattgacataagtgcttttacaagcaccaaagttgaatgaattttcaacaaaatgtaattaaagtctatgttttcagttatgactcaggttaagaaatgtgttttaggatctacttgctggtttttctttttgatccaaatgtgtgatctgccctgataaataacaagttatagtaccatctcccccgccaatnnnnnnnnnnnnnnnnnnnnnnnncccgtggcactatgtaaataaagtaagcatactttgttgttagtaaatagatgaggcatgcctgggaaatgctcccttggcataaatagcaatcaattataattagtaaacaggtgtaccaataaaaagaatttacatgataggttaacaaggaccaggaaagtgagtttcctgaaggagttctttgttcctgatcaaagaaattgatacctgttgcgcattcactgccaccattttttaaggagaaagaccgctattggtgtcgtctgcgccgccatttaananttggcatctnncggntggttgctgatgtcctgtgtggtctggtagnngtggggaaatatgagagctggaggnannncttgcttatgtcttccctggcctntttcctcttcctttccttcgtgccnnctcncctgncccacgccntcttccacgtcgttcttgcctttaaaactctgttccgtntttttccccggtccttnccctccccgtgccngtacgtggntcttatgtgttttggggggnnnnttntnttnnnnnnnnnnnnnnnnnnnnnnnnnnnnnnnnnnnnnnncaagatgaaccaaggttttttaanagnattatnggaaccccttcattctttataancctttctataatgccttatttgactgttactcttatgtgctttctnnanantgttgtgaaatnccnnncttntggattatcactnggttatcaagcatatattagtgctttatccgcctaccctgccctttcatccctgtggctcttcctttgttcttggtccttccccgggcctgctccatccctccttcctttctgctgcctgatgtttcaatggcttctgaatg

SEQ ID NO: 310430 - DNA, 991 bp, Homo Sapiens
  misc_feature (173)..(173): n is a, c, g, or t
ttgcgtgtgcaaaacttcctctttactgttcaactccttacaacttgcataaaggcgtcatttctacctcagagctgggggaagtcataattagtgtaccacccatgtgctgggcacagtgaattttaatgcctcccctttagaggagaggttatgataatgtgaagaccccnccccaccacaaaggttgtccggcactttggtgcaaaaaggattggtccaatcttgtgctggcttggggtacagaaaggcactgaagttggtggctcaaactcctctgggctggggtggggcagaggtgaacagggaagtaagtggtttgggacaggcaggtttggatgtgggcttgggttcttgctgacggaggtagttggtcctgcgtgggggatggggtggtaagggcagcttgagcctcaggctgggtggatgctgctgtgctggcccccatctgcccagctcaccagctcactgctctggaaccacagctggatctcccgctgggccccctccacggagtcgctggcgtggatgacattcctgctgatgtggacgctgaagtcaccccttatggttcctggggcagcctcagccgagtcggtgtgtccaatcatggcccttgaggcgcggacgacattgtacccttcccagaccatggccaccacaggcccagagctcatgtagcggatgagggcagggtagaagggcttcctccgcaggtcctggtagtgctcggcaaggacgctctctggtgcctgcagcatcttcatccccaccagcgtgaagccccgcctctcaaagcgctggatcacgtccccaacgagccgccgttgcacgccatcgggcttcaccgccaccagggtccgctcccgggtccaggagggccctcccgagccgtggcgcactagcaggctcgggcccggggcccgcgggccgcagcgcagcccccgcagcgcggagcgccagaagaggccgcccatgacgcccggcccgc

SEQ ID NO: 310431 - DNA, 1717 bp, Homo Sapiens
  misc_feature (447)..(459): n is a, c, g, or t
  misc_feature (508)..(508): n is a, c, g, or t
  misc_feature (1677)..(1677): n is a, c, g, or t
  misc_feature (1682)..(1682): n is a, c, g, or t
agatgtgttaaatataggagagcggtggttcggggtgtcaacagtgacgataatgtggtgggaaaggggtgtatgcggggatgcagagtatttgcacggggcaaagggggtgaaaacggtggggtggggttgttgcgtacgaatgggggtccggaaaggacgggaggataacggtggaaggaaaaaaaggggggatggagatatgcaagtgacgttaagggccacgggaaattaccacgggggaaaaaaaagaagggggaataaattgcgggggccggtgggtttggcgacacgaaagggtgttaagtggcgggggaaaagatcccaaagccactaaggtctgggggcgcgggagctccgggggaaagcagagtaaggggcgaggtggcccagacgtggatgggggtcggggggccaaaggaaatggtttaaaggaaccttgcgaannnnnnnnnnnnncaagacaagggaattaggggggttgggttgtaggtatttagggggattnttgtgtgttgcaatgagataacgttttattttaattctcaccatttatatacaaacacaagtgaataaaacacatcgcaaaatggtaaaatttcatatttagtatttataggtgcatagtttcatgctcacatatttttaagtattatatatattaacaaatttcacaatacgtcattattcttagacagtatcattaaaagacacctaaaaatcttataatatatgatagcaaatcactaacaacttctgaacaacagcaacaaaaaaatagtgaggatttagaaataagtggtagtcacttaggtgtttttaatttgttttaacatcgtagattgaagccacaaaatccacagcacacaaagaccctgctaccatgtattcacttcagtgaaagggaagcaccgaaatgctgagtgggggcaggtacagatacttcaatcactgctgatggaagacttcgagatacactgtaaaaactttgagaaatgtcatgactgggcacattggaactgagcacttgtacaggatggaacatctgtcagcagatctcaagaaactgggagcaaagatatttcttaggcttcaggttcgtagtcttgatacccttcctcagaaggcatttcataagcctcattgtcaggatccacaggcatatcttccagaattccttcctgtggggctccttcttcattcttgcccaactggtcctttttgacaaagccagtggctgctgcaatgctccctgctccctccactgtcttctgggctactgctgtcacacccgtcaccactgctcctccaacatttgtcacttgctctttggtcttctcagccactgttgccacaccatgcaccactccctccttggttttggagcctacatagagaacaccctcttttgtctttcctgctgcttctgccacaccctgtttggttttctcagcagcagccacaactccctccttggcctttgaaagtcctttcatgaatacatccatggctaatgaattcctttacaccacactgtcgtcgaatggccactcccagttctccgctcacgagggtggaaaggcagaaggcttgaaggcaaggcgtgagggagcgcccaggacgctctcggaggggccgggccggggtctgcgctgcagcccgcacgcacctcacttncgcgntcgcggcgctcggtcgctcgccccctcatcccggg

SEQ ID NO: 310432 - DNA, 1001 bp, Homo Sapiens
  misc_feature (843)..(852): n is a, c, g, or t
gagcccctcgggtttcgccccagggtttttccacttttccagcggagaaaaggggaaaaggcccccccaaaaatgggcaaaagtgggggggccacgggtaccagaattactttccaaattcgacgtgccttaaatggaaaggatcttcccagaattaccccctgtaaaaaaacctttgaggaaaaatgttcaatgacctggggccccattggggaacctgaggccctttgttccaaggaatgggaaacattcggttcaagccagattcttcaaggaaaccggggaggcaaaaggatatttctttaggggctttccaaggtttcgtagtctttgataaccctttccttcaagaaaggccattttccattaaggccctcaatggtcagggatcccgccagggcatatctttcccagaatttccttcctgtgggggctccttcttcattcttgccccaacttggtccctttttttgacaaagccagtggctgctgcaatgctccctgctccctccactgtcttctggggctactgctgtcacaccggtcaaccactgctcctccaaacatttgtcacttgctctttgggtctttctcagccactgttgccacaccatgcaccactccctccttggttttggagcctacatagagaacaccctcttttgtctttcctgctgcttctgccacaccctgtttggttttctcagcagcagccacaactccctccttggcctttgaaagtcctttcatgaatacatccatggctaatgaattcctttacaccacactgagtccctctgcttctccacaactccgactcctccccgcctctctctttttttnnnnnnnnnntttaaacaattcccaaataatatttaataggaaagaagaaggaaaaggagcgcacaggaagggcggaggcggcgacccgggggggactgtccccagaggaggccgctgtgagccggcgacgcgaggctgggggagtgggaggcaaaccc

SEQ ID NO: 310433 - DNA, 563 bp, Homo Sapiens
  misc_feature (405)..(405): n is a, c, g, or t
ttttttttgaaaggtttaaacgctttattgtgcccaaaaaaaggcccatggaatgaagggaagagccgcgcagccctgagcccggagcgattgtttgtcgcgcacccaaaggcaaggagggtggggagctgggaaaggatgcgcggcctccgcttccccgcgcgcctgggcccggccaaccagcgaccccgcccggtgggcgggcgcggcctcggccatcggcgcctaggggccagtaaccatgacgacggccgttgccaaggccgagagccaatagaggcgtcgccggggctgtttcaaaaacctaaagcaaacaacgaaaaacgctacatcgttgggggaggggaaagactgagaggacccggggcccctccctgaggctcagagcacagcttcgggccccgngcggcgtgagccgtacaaaatctacgtcacttggggtagaaaaacaaaaacaccgaaaagcccacgcgccgctctgaccggccgacacgctcacttgcggcccttgggcactttggggacgctggcttggccgccttcttcaccttcttgcccccggc

SEQ ID NO: 310434 - DNA, 599 bp, Homo Sapiens
acaagttatttttttggggttcatgtaaagggttttggccttgacagcaacaccctttattcagcaccaggaatacccttcgcacagaaccagcgagcttcacgtgctcagcttccccgcggaaatgctcacaggatgctgcgggacccccggcgtgccacacgctctagtggtggtgctgtctgaactggagcccacagtaaccgcatgtgccggtttttgtttctttgtccaagtttatatacacttttgggtggccaagagctcccccgccgccatcgcacgctatcacccgagtctccacctcgctcacgggctgctctgctatcaaatcaatggcaaagttttcattcacctctttctgacgacctacaaaccgaattctcctgtagtctttatcatcataaacctggccagtgtgcgtgaccttctccccggtcggcgagacccgcaccccgaaacacctggcgcccaggggcaggctccgcgccgcctcgccacaccggttcagcagccggcagaaggtcatcgccgccgccattttgcgccgctggcctttccccggccgtatggccactctgcgttgataccatgcttcc

SEQ ID NO: 310435 - DNA, 1057 bp, Homo Sapiens
agaacaattccccatttttttcttttgatttcaagagctccatttttcttaaatcaaagtgtgactatataggggcctgagattaaggtgtgagcctacagaaaggggttcaaagcacctacttggtatatgttagtgaaatcgatagatcagaagcacaaaaagagtatttatcattccacatggtctgaaacaagacacaaagctagaagtcccccatataaaggtttggggttaaagcatttctatgtctgtgccaacaaggagaacttccaagtatagccatggccatagggtgtgactggtaaaagatctgggcatcttggattcaaagatcttatcattgctcacagaaagcccttgtacatgtctgggctttgggccagggcaggttagcctaaccatcaacaaccttcctaatcatcaccagtaaactgggaaattatccactgggatagacacagagtgctctagggagagatggtagagcaaataccaagagaacaactcatttgacatatagacaaccaactatctcgtgcacaattagtaattaaaattctctctcaagacccatgtaacctggcgagttattgggtcaataatataccatgtgtgaaaatatgaaaatcatcacaaaagagcatgatgatggaggctccatacctcagtttagcattttctagctatgttgactcagatcaaatgtagtacaatcaggaaaaaaaggatggataacaataactgtaatgacggtcacaggaaaatagcaaatacgtaggatgagggaagttactttttcttcttgatgaactcacagacaaagtacatggtaagatggcactctgtgtcattccatctgccagagctcagcatctccacacagtcctcatgaccataggggtcgctggttccccctcattccagttgctatagttctgcagtggagtgttgtctgtgaacatgtactgtccctccctttcaaggtcattcacgccaatgaacacccgaaagaagccactcttggcaacatagtcagcgatgagtgtgttggcag

SEQ ID NO: 310436 - DNA, 1131 bp, Homo Sapiens
  misc_feature (111)..(111): n is a, c, g, or t
  misc_feature (115)..(115): n is a, c, g, or t
  misc_feature (120)..(120): n is a, c, g, or t
  misc_feature (308)..(308): n is a, c, g, or t
  misc_feature (496)..(506): n is a, c, g, or t
  misc_feature (676)..(676): n is a, c, g, or t
  misc_feature (689)..(689): n is a, c, g, or t
  misc_feature (692)..(692): n is a, c, g, or t
  misc_feature (694)..(694): n is a, c, g, or t
  misc_feature (696)..(698): n is a, c, g, or t
  misc_feature (700)..(701): n is a, c, g, or t
  misc_feature (703)..(709): n is a, c, g, or t
  misc_feature (711)..(713): n is a, c, g, or t
gttgtacctacataccacaacgaaggtggggcgaagttcaaactaacgagggtggttgctgtcttctagaaatatatctcggcctcaccactagtgggcaggcaaagtttnttantgcgngggttttttcttcacttccaccaagtggcgcccccgcttatttagtgagagaaagatggggtgtttttccacccacattgtgtgggcggccccaaaaaatatatggtctgtaagagtgggaaaatatttaccacacgcccctatttttctttcttcgctattataaaaatattggcacacaggcgggncgggggggccggggagaaatttgtcggaattatttcggaggcgtcttggcctttgggagaacttccccctggttgagaaataagatttcccgcggtaaaatggaccctctccaggaaaactttcccttttttggggattttggtttcaaagaaacccgtcttcgggttttgccccccccgggggccgnnnnnnnnnnnattggggggggggaaattccccaaagccacttagttccattgacccagggattcttccttaggggaaacccagcttatggccccagtgtttcacctttcccttaactggggccccgcggcgcccaaaacgaaatggtctaagaaaggtttcttggagggcccgaggcggnccgacatggtttnttntntnnntnntnnnnnnntnnntcataaataatgtactttattttattgcatatggctattaaggagggcatccatgatcaatacagactaaatacaatgcactattctagtccagtttattctcgtctccagcagcatcacattgacccctatatacagcgtgtacagtggaagacagagcaagataagttaagtctcttgtcatatcacaatagcaagaaatatatttaacatcttgatatccagaaacaatacgtacccaaaaagaaaacactgtttaataactgttaaagtttatatagcaaaaaatattttaaatttaaggtaagtcaggcaaaatgtacaaagacccaatatacattgtgaagttttagcaaacataacatttatacattttggttccattctgtaaactaaattaaaaatgtaaatattgccc

SEQ ID NO: 310437 - DNA, 743 bp, Homo Sapiens
  misc_feature (690)..(690): n is a, c, g, or t
cagcctgcgggtcccggctggggctgcttccggtaggagagcggtgtagagcgagcaggtctcagctcctcgtcatgtcatacggtcccttagacatgtaccggaacccggggccctcggggccccagctccgggacttcagcagcatcatccagacgtgcagcggcaacatccagcggatcagccaagccactgctcagataaagaatttgatgagccagctaggaactaagcaggactcaagcaagctacaggaaaatctgcaacagttacaacactccacaaatcagctcgccaaggaaacaaatgaattgctgaaagaattagggtccttgccccttcccttatctacttcagaacagcgccagcagagacttcagaaggaacgcctcatgaatgacttctctgcagccttaaacaatttccaggctgtgcagagaagggtatctgggggcaaagagaggagcagctggtctcatttgacagccatgaggagtggaaccagatgcagagccaggaggatgaggtggccatcactgagcaggatttggaacttattaaagaaagagaaacggcaattcggcagctggaggctgacattttggatgtcaatcagatatttaaagatttggccatgatgatccatgaccagggtgatctgattgatagcatagaagccaatgtggaaantcagagcacgtcgaaagagccactgacagtacagcgagctgcttctatagaaa

SEQ ID NO: 310438 - DNA, 676 bp, Homo Sapiens
  misc_feature (227)..(247): n is a, c, g, or t
ggagcagtattcacattttttatttcgaggtgtaaaatatacgtggccaacattgttactttcatccacagatggaatagctgggaagtataaaaacctgtacatgacctttagtgaagattatttgtcatcaaattacccatatccaagtttccatgggcctggaatttcctttccacttgatagaagtatatattaggaagtccagttaatagtatttttatttnnnnnnnnnnnnnnnnnnnnngaatcagcagagtcaagttgtcttagtcttaaggctttctggatttcttccttggaggaggtcaggatcttcccaaggcctgggtcctcgaatattcttccagtcatcaaacttggagtctttgattttctcatattccgactctaaagatattttattctctttcagttttttttcaagctcaggatccattttactcttcacagcatcatatcggatttgagaaaactcacgaagaccaaaagaacctccaacaatcagcaacaacatggggactccatagccgagagtcttgttcttgcgaaaagcacgcatcaccgcgggtgcaaacatgagtgaactcttccatcggctcagaactccaagcgggcctagcgcagactcccaaatctcagcagctcacgctctcaccaagacgagtacgtcccc

SEQ ID NO: 310439 - DNA, 751 bp, Homo Sapiens
  misc_feature (251)..(272): n is a, c, g, or t
gcgggaggggtggttaaaaaataatacgggtgggccccaaccaattggtttaacttttccatccccccaggattggaaataaggctgggaaaagtaataaaaaaaccctgtaccaatgacccttttagcggaagaattattttgtccatcaaaattaccccatatccaaagttttccatggggccgggaatttcctttccacttgatagaagtatatattaggaagtcccagttaatagtatttttatttnnnnnnnnnnnnnnnnnnnnnngaatcagcagagtccaagttgtgttagtcttaaggcctttctggatttcttccttggagggaggtcaggatctccccaaggccggggtcctcgaatattcttccagtcatcaaacttggagtctttgattttctcatattccgactctaaagatattttattctctttcagttttttttcaagctcaggatccattttactcttcacagcatcatatcggatttgagaaaactcacgaagaccaaaagaacctccaacaatcagcaacaacatggggactccatagccgagagtcttgttcttgcgaaaagcacgcatcaccgcgggtgcaaacatgagtgaactcttccatcggctcagaactccaagcgggcctagcgcagactcccaaatctcagcagctcacgctctcaccaagacgagtacgtccttaactcacttccttttccttggttatttggtgctcggtccttagtccc

SEQ ID NO: 310440 - DNA, 456 bp, Homo Sapiens
  misc_feature (195)..(195): n is a, c, g, or t
aagggggaatctggaatatttcaagataaggtccaattcttccattgtctcgtaatccaatgcagagatgtgaaatgtaagatcatctgaaggagagctttggttcaagtcaaatgcatgcctcaacctaggcagagccaaagagatacttgtatgatgtaagtcagattatgtcattcttctggttcaaaactnctccaataaataggctcaccattcccttcagagaaaagccaaaggacttaaaatggccaacaaagcctatgatctgcacccccctcctccctctacctcacttcatctttctccctgactcacttggtttcagtcctacttgcctgatatgttccctcaattacattcccatttcaggacatttgcactgactgtttcctctgcctggaccccacttgctccagctttgcacatggctacctcccttactttcttcaggcg

SEQ ID NO: 310441 - DNA, 1663 bp, Homo Sapiens
cagctttcttcaggaagaattttaatggtttaaaaatatgtatgtacaaaagcagcaccagcatttggtgcttccggtccacaggcgccacgtgtcttccaggactatctctgtggccagttgtacctgaagcctctgtctgactttccagttggaaaggacatgcttttgtttcccaccgactgtttaatttttttggctgcaatgcatttcttgccagacggggtctgtttatttggatcaaactgagaagaaactttggatttgctgtttccagcaaaagccttgaagtctgactggctgtagtcgtaaggcgtaaactctttttctggtggctctgggtcctttggcttcttggaaattttgagtcgtttcttctcttgtttctgttctgtggtccttgggtcgcttgttgctcgctctctcttctttgcagcattttctagcacgacctgctgtcggacggagatggcctgttctgctgcagctttgcacgcctcctttgcctgttcccgggcagctgtttgctcagctgccttcttcttgacagcttctttagagtctttttgtacttgtacctgggccagcttccaacggttgctgatttcatagattttggttgatggatcgaacttcgctgcctgagagacgggagcacggtgtcccagtgagggcagaaacatcctaaatggattttcaaaggactccatgatgttctgggcttttttctgtgcaactgtcaatggaccctttttactgtcttcagcactaggttcattaaataacgtgatgacagctgtggcaatcaggcatgtggtacccagcaagttatcttctttttcatcagggaagaggctcgcctgcttctgaactggcacagatccactggttgggatgattggatagccatccggaggggcatgggagcagtcgtgaggtccaaagagaacattctccaatctctcagcactgggcagcggtccgctcttcttcactccggctgcaacttcagacttgagcaggggcatctctcgggcctgctggattaaaaggtgcatttcgttgatctgctgccgcacaaggggcggtactgggttgcagcaagctatgatgccctgaggttccttaggcagttcttcagctattttcagcatcatgtggtttggcagtacatatccgtaactttcatcttccctgcgagctgttttatccctccaggcaaacagcagctgaaaggctgtcaactgctgtgtgttaaggtgcttcttctgcttcctatagagttcaaggtaggactcatccgtgaagataggtttgatgaatttcttgaggcagatgtccctgctccgttgccacaccacctgcagctgcacgggctgcccgttgccgcgctcccacatctccagcctcattttgtcatagatatatagcaggtaatgggtgtcatcccgggcgtagctgagcatctcctcgggcagagggcgtattctccaatcagccagctgatattgcttgtttgagtccacgttgcagtagagtttcaggagatgatcgagtgagtgcctgcccaggttaagaaggcgtgctgcctgatgagtatcaaacatgtttactacatacaacccaaagtctttctgtagccattctatgtctgaatcagcac

SEQ ID NO: 310442 - DNA, 1706 bp, Homo Sapiens
agcaagcgctggtacggtccgaatcttgggatatcgtcgacccacgcgtcgcggacgcgtgggggagtggtgtgattcccgaccaagatggcggccgtggggcgagtcggctccttcggttcttctccgccgggattatcctcgacttacactggcggccccttgggcaacgagatagcgtcgggcaacggtggcgccgcggcaggcgacgacgaggacgggcagaacctttggtcctgcatcctcagcgaggtctccacccgctcgcgctccaagctccctgcggggaagaacgtgctactgctgggtgaagatggagctggaaaaacaagcttaataagaaaaattcagggaatagaggagtataagaaaggaagaggattggaatatttgtacttaaatgtgcatgatgaagacagggatgatcaaacaagatgtaatgtttggatcttagatggagacctatatcacaaaggcctccttaaattttcactggatgccgtatctctgaaggatactctagttatgctggttgttgacatgtcaaaggcttggactgctttggattctttacagaaatgggcaagtgttgttagagaacatgttgacaaactgaaaatccctcctgaagaaatgaaacaaatggaacaaaagttgattagagacttccaagaatatgtagagccaggagaagactttcccggcttctccccagagaagaaatactgcgtcacaagaagacaaagatgacagtgtagttttacctctgggtgcggatacacttacacataacttgggcattccagtactagtagtttgcacaaagtgtgatgccattagtgtattggagaaagaacatgactacagagatgaacattttgattttattcagtcacatatccggaagttttgtttacagtatggtgcagcacttatttacacttcagtaaaagaaaacaaaaatatagacttagtatataaatacatcgttcagaaactatatggatttccctataagattcctgctgttgttgtggaaaaggatgcagtatttattccagcagggtgggataatgataagaaaataggaatattacatgaaaattttcaaacattaaaagcagaagataattttgaagacatcataactaaaccacctgttcgaaagtttgtacatgagaaggaaattatggcagaagatgatcaggtgtttcttatgaagctacagtcccttttagcaaagcaaccaccaactgcagctggaaggcctgtggatgcctcaccaagagtcccaggaggctccccacgaacaccaaatagatctgtatcatctaatgttgccagcgtgtcacccattcctgctgggtcaaaaaaaattgatccaaacatgaaagctggagctacaagtgaaggcgttctggcaaatttcttcaacagtttgttgagtaaaaagactggctctccaggaggccctggtgtgagtggtggtagccctgcaggtggggctggaggtggaagcagtggtttaccaccatccaccaaaaagtcaggccagaagcctgtcttagatgttcatgcagaactagacagaattacacgaaaaccagttacagtttctcccacaacacctacatctcctacggaaggagaagcttcttgaagataccaaataaagccatttattctgttttctgggataatgtaaa

SEQ ID NO: 310443 - DNA, 1646 bp, Homo Sapiens
attaagcaacatgacctgatatacacagctaacaagtggcagagccaggttacctcattattcaaactccagaggatgttcttttaaccagatcgtatctatcttttaaaaaattgtttagttcatgcatgggaaacacttagtattcctggcatattaaaatgtttaataaattggaactgttatcataactacattaaggatgacaccgatcatcaatttagtatcttttgttgttcaaactgtgaaataccaagtatacaataatgagaggaaaattcccgctttttttcccacaacaatcctgttaaggttgataatagatgacagcaagtcaatagcaaatttttatttcatgtgaatttttttgtaagaatagtgtgggtataagttttggggtttaaaaaatgaatgaaagttctgttgatgaaaaaagtagaatttagaattaggagtctagtaaggttgaagtcctatattgtacttatttataaggctcattctaatgatagaattataactatgtagatatgttaattcattttcatcatctatttttgttctactagtggcaaatatattcactttaaaccagctaaccacagtttataagattcatattcaccaatttattattttagtgtttgatggctaaaataaacatcagaataaactttcagggagtattttaaataagacatcctaggactaagacactgagagactccattaagttcctaaatatattaacaaaaaatgtattgagcaaatattctctgttgggctccatgtaattcctattatcattgaccattatgaaatctaataatacccatgagtatgtctaataaccataaagtagaccaggaaaaatcaaccaagttgtgttagaatagaaatttttaaagaaaaaaatgcaaagtacagtccaatgtttaggcaagaattagagggttgaaaccaggcttatttattttcatcttctttctgccatcttttaaccaaccttctcagaataaaatgtgatttttgagacagaatgaaacacatatccaaattttaatacagtaagaataggtatcctgaataaatgagaactctagaaaatcaaggtttcaaaattctacccttcctgggagttaaagaagtttggcagaaacagaacaaattaatcagcagattcatcacctgccaattttttctgtacaattttcttgattctgggagcatctgggtccaggcagattttcctcccatccttcagtgtggctatcacttcgacttggttgcaattgggttccctttcccgatcacttcccaaactttggatgtttttgggatgaattcccagaggttgtctttatacacatgcagcggagttcagcatacaagtcactgtctagactttcctctttgcctttcgccaagtttctcttagtttgtcctttggtggaggaagccagagcagtcagcagcaatgacagaagcagcagcacctgcaaggcatgaagtggtctcgcactgttacaggaaggggtggtatcaagtctgaggctcatggtggagaaggctgagctagagttgtttccagaaccagaagacctctgagtgagggtgagttgctgcctacaagtctgcagataagt

SEQ ID NO: 310444 - DNA, 663 bp, Homo Sapiens
tccttctttcacaaaattactttatggacaggtttcgaacatgtcactcaacctcaaaacatggtgcaggctttgttgaaaggtttgagtgggatttggcttttgggggaatatattttagaagctggagaaaatatcttttaaatttttttccccagaaagccataaaaaagaggattcaggcaattgttaaaattagctattcaaatggtgataggcatggccgtgtccacaatatctgcaattctacagtcacgtatgatgcctagttgaaatccaatacatcccagaaaagtgaatatttggtggggaatcccggaaaagaaaaaggaaagcaccattgcccataattatcttaaaaatatcatcatttcttggtttgttcttctgaatttcataagccttctttagggccttccaaataagagtataacttgtaagaatgatcagaaaaggaaacaggaaacccagtatatttttggtcaggcccagcctatcgggagggttgaattttgggactcataatggaaagcacaaactgtaatattggtgttctcaatgaaaaatacatttcgatggattatagctggcaaactgccaagcctgccagcagccaaatgatgatgcaggtgactttggctacaagcattgtgcgtcgaaggc

SEQ ID NO: 310445 - DNA, 377 bp, Homo Sapiens
cataaaggtatttagaatatattaaatcgttagaggagcatcacgtgccggttttcagctattagcaactgtgctacacttgcacctggtactgcacattttgtacaaagatatgctaagcagtagtcgtcaagttgcagatctttttgtgaaattcaacctgtgtcttataggtttacactgccaaatcaatgcccgtaagatggcttatttgtataatggtgttactacagtcacatataaaagttaaactacttgtaaaggtgctgcactggtcccaagtagtagtgtcttcctagtatattagtttgatttaatatctgagaagtgtatatagtttgtggtaaaaagattatatatcataaagtatgccttcc

SEQ ID NO: 310446 - DNA, 999 bp, Homo Sapiens
  misc_feature (72)..(110): n is a, c, g, or t
cgcaataaaattattttattttaaagtaaatataactttgccagattttaatcaattaacagcagtttagannnnnnnnnnnnnnnnnnnnnnnnnnnnnnnnnnnnnnnctttttttaaacaggaaggcatactttatgatatataatctttttaccacaaactatatacacttctcagatattaaatcaaactaatatactaggaagacactactacttgggaccagtgcagcacctttacaagtagtttaacttttatatgtgactttagtaacaccattatacaaataagccatcttacgggcattgttttggcagtgtaaacctataagacacaggttgaatttcacaaaaagatctgcaacttgacgactactgcttagcatatctttgtacaaaatgtgcagtaccaggtgcaagtgtagcacagttgctaatagctgaaaaccggcacgaaaactttactgccctttggaaactggacagaacaatctggaactctcatctcctgttgctcctctaacgatttaatatattctaaatacctttatgtggaaataaaaaataacaggacaaaagcaggctagggagattgcatttctgtcagtaaaatttctcaaatcaacacattcatcgagtttctgacattgttcttcgagcagccgtcatctgtctaatgcaaaatgtggctttgctttgtcttgttgcaaaaggaaagaaaagcttttgttcagagctttagaaaagtcggttcagtccacataatgcattttctccttcaattctgaaaagttagctaaggctcatttggtagtgaagtgctgcagaggaatgttctcttgctccttctttcacaaaattactttatggacaggtttcgaacatgtcactcaacctcaaaacatggtgcaggcttcttggtggatgagcttacattatctgaggggcggtaggaaagcgtgctcatttttgttgaaaggtttgagtgggatttggc

SEQ ID NO: 310447 - DNA, 1697 bp, Homo Sapiens
tctttttttgttccaatacaactttatttatcaacatggaaatttacgttttatataatttttacatgttatgaaataatattcttttgtgcttctttatgaactatttaaatataatgccattctggccgggcgcagtgggaagagataccaagtccagcatcttcagacaggcagaaggcccctgccttccactcggtgatggtgtcagggactgttactcctacctcagccacacctgctgagtttaccaccaccaaatcccagatccatgtctcagggaagtactttcgtacggtctccgtgtgaggctcttcaacatgcaccaggcgtgcatggcctcttcccattacatctgactcataaaaacctacacgtagaccttcaggtccatgcatttcatactgttgaagctgtggacacattttgggtttacgaatctttgagttggtgaatgcctttaagcccatgtcctctaggaagctgtacatatccttttcatttgtacttgatactggagtatatgtgattccattaatatagacattatgacgattgatgcagtcttcatcgtcctggtcattcaaaggcccagggaagccagtgaggtccttttctggtagcaggttgtaaaccgaggacgccgagagctcagcatcaggcttcatgagcagcacgctttggtccacagcacggagggcgcagacggactgaggagccgctgtgactcgcaggtgggcgtgtgaggctgggagactttgtgatgggctgaagctcaaatccaccttgttggccagacaattttcaacatcatattttgcagaatccccaatcacgtccccggtaggtaaaacagcatagatgagcaaccgagcgacaggagcaatgtctgacttcacagggattgagatggaaaaatggcccttcatgtcttcctgcttcacaagcagtccatgagtcccagttcggacaatgcctccctttgccattatcagataatagaaggagagcttcttcagccccagcagggtgcctccattcagaatataatgtgcctggactgtctgagtatggccacagggtagttcatgagacatgggctcaaggtggacaaagctcttgcttggggagaacacaagataagcagtgtgatgtgcctcttcgtgttcttctgacacccactggtagccgtaacagggactacgatccttgtaattgaccctaacagtaagagaggtacccataacattggtggtgttgatagagaactgtacaaggccatgctcatccgtggtagcattggagtaatagtttgcttcatttcctctgatgaatatgactttatttggtatagggacgcctttcccatctactaggcgcacctgcccaaagaagggaattccctgtcgaaagtgtgagtccactttcacaaatgagagtttggttatggttcttgtgatttcactggactgccttccagtcaattccaccactgttccttcttcttggatctgggcctcagtgtgaagtttcatttcatactccttcctcttcagctggaagaccttggtttttacttgctgatagaagcagccatggctgtttagctgtccactgaatttctcacagaaagcctgtgaatcttcaccgtggcagtcggaagcgtcactatactttctgcaaatgctcacagtcac

SEQ ID NO: 310448 - DNA, 272 bp, Homo Sapiens
gagactgcatagggtcggctgggagactttgtgatgggctgaagctcaaatccaccttgttggccagacaattttcaacatcatattgtgcagaggtgcttgaccacactctccatgtggttctcctctctctgcaaatcatgcggcgaaactcagaaggaagctgtgccttctgtgcaggaaggggtgggggccaggagccacagaggaccagcatcccacaaaggacgcgaaggaggtcacagccctccctacacctgtgcatctcagtc

SEQ ID NO: 310449 - DNA, 823 bp, Homo Sapiens
  misc_feature (55)..(55): n is a, c, g, or t
ttcctttctctcccctccccctggattcttgtcatttcgaaagtccctttctctntccccagtcattgtcgggcccccaccccgggtcggctctctttctttgccatctctttctccgggcccctgtcatggtctcgatccctttgtcctcgagtcccagtgtctttctcggggatcgagatcgctcccgcctttcccgttttccctctctatagaggtcgtttttaccaactggcaagttaataggttttcgaaaaggccggtcccgtcccccaaatctcagttgcccagactccttttttcccccaagaccgcctccaagtcgccgagggatccaccctttgagagtcctttccagctcgtagtccacaaatatctcatgctggtcaataaccaggccatcagcatctcggtaagctttgatcacggcacgctcctccttgtattcgatgaaggcgtagccctttgaaaaacctgtgaccaagtccctgaccagccgaagccgccggatgtcaccatagcgggaaaagacttcctttaatttgtcctccttggtctgcaagtttagtctggccacaaacagggtgaggaggggatctcctatgacacctttgttggggacatatcgtgccagcattgccctccagaccgcgcggtcgtgtgggtcttcatcggtgccatcaatgctgcccgctttgagtggatcatactccttggcgatgggcatccaatcgttcatgttctctgcaaagcttgggctcccttccgacggagacaggcgagcagctgcaggcgacagcagattctccgcgccggcctcccc

SEQ ID NO: 310450 - DNA, 505 bp, Homo Sapiens
  misc_feature (26)..(26): n is a, c, g, or t
ggaagtttaaagttgtatttatgaanggccatgggacgtgaaaaaattctgttttttatcttgagccgcagcttagcttgggatattaggattagccagtcactggagtggaacgtttcccagtggcttccgtaaagtaccctggattcctcttccctggattacttagagagcggcttcccgagcatagccgctgcgaactgtaaaagctttgtggtcagtgaactcagttaagaaagtgctggcgatggtgaaagtcaagcccctttagatggtggttctttcgtggaccgggtgccttctctttgtgagcagattacccagtttggcgtcaaggggttgttaggcattccttcttccaggaaaacatttcctgaggctgtaggactcaactatgagaggcagttgtgaaggaggaaagataatgtaagaattaactgtggtaatataaggcgtttgtgaatagaaacaagtggagaagcagttgtagagagataatttgtaa

SEQ ID NO: 310451 - DNA, 784 bp, Homo Sapiens
aaaagagagaagacgggaaaggagggtgttagttggatgggttatttttttttttgggagagcagctttattatcatggctggggatagaacgggttcctctccctgggggctggggtcttccactggttaccacccgcagcggtcctggaggcaccacgcagctcagtgctggcttagctgcggggcagggccttggagaaggcgaactgtccagggaagtagaagctgtgggggtcctcaccagcccgctgcaccctgaggcactgggtctcctggtgctcctcagcctcccgcagaacttgggtctctatggggcagtggaccaaccggcccagaactttgtcctcagagcccagtttgatgcaggccaggcatttccgtttcctcccattgggcctgactttgcactcgggtttcttccagtccctcttccggcagcttgtctgctgcagcttaaattccagcctcacaaatattccagctgggaagggcgtgtccacggcgctctccacactggtctcctggaaggcccactgcacgggcgggtgcttgtgaaattcctccagggccacctgcaggccccggcgctgggcttccgtgagctcggcgacgcccacgcccaccgcacccagccacagggccagagggatcagcagccgtcgcatgcttccgtgtcaccctggccgtccttccctgcgcctggaggtctcccctgaccgtcccgcagctgaaatcttggcctcgctgtccgcctcttcccgctcttcttctcgcggggcggc

SEQ ID NO: 310452 - DNA, 991 bp, Homo Sapiens
  misc_feature (10)..(10): n is a, c, g, or t
  misc_feature (12)..(12): n is a, c, g, or t
  misc_feature (21)..(21): n is a, c, g, or t
  misc_feature (23)..(23): n is a, c, g, or t
  misc_feature (41)..(41): n is a, c, g, or t
  misc_feature (43)..(44): n is a, c, g, or t
  misc_feature (46)..(48): n is a, c, g, or t
  misc_feature (67)..(67): n is a, c, g, or t
  misc_feature (70)..(70): n is a, c, g, or t
  misc_feature (111)..(111): n is a, c, g, or t
  misc_feature (121)..(121): n is a, c, g, or t
  misc_feature (145)..(145): n is a, c, g, or t
  misc_feature (147)..(147): n is a, c, g, or t
  misc_feature (358)..(358): n is a, c, g, or t
  misc_feature (375)..(375): n is a, c, g, or t
  misc_feature (847)..(847): n is a, c, g, or t
ctcatcctananggtgctctnanccccctggtgcctaccantnntnnnttagctgcggggcagggcnttngagaaggcgaactgtccagggaagtagaagctgtgggggtnctcaccagcncgctgcaccctgaggcactgggtntnctggtgctcctcagcctcctgccagtgcccaaaactgttcaggcagtgtaggaggggtgggcagtgccagtggagggctgccagcatcctccacatcccctccacatcccttggagaatgtccaaacaggcacagcgctttctagcccccactgccctccctcctgcttggccaagctttagcctcgagaccagcccataggctcagcttncatccatcttcccagcnctgttaccacctgtgcacccttgccccttcttacccgcagaacttgggtctctatggggcagtggaccaaccggcccagaactttgtcctcagagcccagtttgatgcaggccaggcatttccgtttcctctgtgggggagcggggagcatggggtgagcagaggaaaagggtgagggaggcctgggcatcatgagggtgggagccagggctgcccatcatgggaccagatccccaactaaggccctcgagcccaggagcaagaggtcatgcaggccagcaggtttcaggcacagccaccctagaatgtcagaagtcagacccatgcagttttcaaactatggaactttcatgtgtgtgcaggcaggagtccttcccagatgggttgtgtggcacatgcataaaacacgcatgtatgtggtttgtatgcaggagtgtgggtggatgggtgtgtgatgtatgcatggatgcgnctgcttgtgctcgtgtgaaggcaataatccttctccgatgggttctttccacccatcgccttcagtgtggttcagctgtcacctattctatttatttatttgtaagatttgatttttgaggtgttgattctttgttatagccca

SEQ ID NO: 310453 - DNA, 367 bp, Homo Sapiens
gaccaaattattttactgaactgacaagtgggtttttgatttgtcagttgcttggttgaactggatcaagtcgatagttgcttgacaaactcaccaactttagaatggccaatcgtctaaacaagtgtcagagctgattgaaataaaccaagcattgttgggctgaattatggagagacccgaggagtgactcagcctaaagcgttgacccagttgtgagcagctcacaggccctgcaggaggagcaggccagcgagggagacacaagcagattgtcctgccagggaggggcgggagggccacccaggccacaggggcaccaaagcaaaaaagcagattatgaggcagctcacccctcccagcactg

SEQ ID NO: 310454 - DNA, 730 bp, Homo Sapiens
gtgtattttgggtctggcagcaacctgagacggagatgaaggtgtgttgtctccattaactacatacgagcagcatgagttttggactagagtgcttgtaggtacatgattatctattccattcgtgccttcaacagccaacctggcagttgtccttgctgaaggctctccattttcatgtaaggcatcaccattttcctgtatttctatggttggagatgagctgcagtttgttatattttcttgctcaatcgaccaatccatcaagcacaactgtcaattcaccagtttgtgctatgccattcttgttttccaaggaaagttttaagtgttctttcactctttccaattttctagtgtgtatcaacagagcgtgtttcaaatctatcgttgcttttcctaatagagcatctgcttttaaagtgcgatggctccaaacttgaaattccaatgtagtctgtggcgtaacatttacagttagctgttcatcccattttggattagaagaactactggattttgctgtttttgtaatttctccatctacaactacttctgtatatattgctgttccgaaccagttcttttttcttttaagtttggcactagaaacagttacctgtaactgcaaccttccactgtggttattactagtatcagaccttggtgaagcagtggccatgtcccaaaattcagctaaaactatgtatcaggaactgctagacactgg

SEQ ID NO: 310455 - DNA, 336 bp, Homo Sapiens
aaacaagaaactctgctataacaaacatttaggttaattatgatggtactttcactgtctcttctttattaagtgtggttatctccaatagtaaacaagttcatttcacaaaggctgttactaaatgacttatgtatgatgttatctacaattctcaaactgtaacagtacagacttgaacttttaaattgtctgtaaatcatcatctatgccatgaatgtttaaatataatatatatttaatatgaaaaagctaaagcacaagtgctttcacccacccctaaattctgttttgggccctcacagattcggaatgcattttcatccaccctttttc

SEQ ID NO: 310456 - DNA, 411 bp, Homo Sapiens
  misc_feature (46)..(107): n is a, c, g, or t
atatatagtgttaccttgtgcacatgatataacttaagtcttaatnnnnnnnnnnnnnnnnnnnnnnnnnnnnnnnnnnnnnnnnnnnnnnnnnnnnnnnnnnnnnntgaggatagcctcatgccaggcacagagtacacagtaagtgctcaatacttaactattattgttagatgttggtttgcttattcttctggctctgatttttttcccctttactctttttgtttttggttgcatttcaaggtgaaacttcctacatccgagtttatcctgagagaagcaccagctatggctactcacggtctcggtctgggtcaaggggccgtgactctccataccgcaggggttccccacactacttctctcctttcaggccctactgagacaggtgatgggtttttttctttt

SEQ ID NO: 310457 - DNA, 1011 bp, Homo Sapiens
  misc_feature (34)..(34): n is a, c, g, or t
  misc_feature (108)..(108): n is a, c, g, or t
  misc_feature (128)..(128): n is a, c, g, or t
  misc_feature (168)..(186): n is a, c, g, or t
gatctccatagtagagcaacccacaaagacaganctgatttttttcccataatcaggggtgaaaaatatacaacttgtttctgaaccaaaaccacaatttctgcagtntaaaatgtttcactgctaanatggccctggtagaaattatgtagtattttttcttctttnnnnnnnnnnnnnnnnnnntttcctaagacactaaatcctcaatctggaatgtagattctgagcacaaagcagctcagttaacctaaaaaataaagaaaaaattcccatcacctgtctcagtagggcctgaaaggagagaagtagtgtggggaacccctgctttggtatggagagtcacggccccttgacccagaccgagaccgtgagtagccatagctggtgcttctctcaggataaactcggatgtaggaagtttcaccctcatgagagcggaatttggtgtcatccagtttacgcagggcatattccatgtcttcttttctgagatactcgaccatccccactccatccttctgcacatcagcataacagacatccccagcttctcgcatgtgatccttcaggtcctgccagctgcctgacggaggaagtcctgaaacaagaactcggaaatcagatcttcttgtaggaggcccattcctcccaccacggggccacccaccccgacctccataagtcctggggaactccacacgaagccgacactggccataatcataaccatttcttccataaatagcatcctctgcatctcgggggtcctcgaagcgcacgaaggcgaagggcacgaggccgtgccggttcttgagctcgatctcgcggatgcggccgtacttgtagaacaggtcctccaagtccttctcgcgcacgtcggtcggaaggttccccacgtagatgcgcccgtcgccctcgccgccgcgctcgtccgcccagcccgacatccgcaccgcccgacgccgcgggcccgccgcagccccctcgtccgaattcgccacccaggcc

SEQ ID NO: 310458 - DNA, 630 bp, Homo Sapiens
  misc_feature (527)..(561): n is a, c, g, or t
aaaagaagaaaaaaaactacataatttctaccagggccatattagcagtgaaacattttaaactgcagaaattgtggttttggttcagaaacaagttgtatatttttcacccctgattatgggaaaaaaatcagttctgtctttgtgggttgctctactatggagatcaacagttactgtgactgagtcggcccattctgtttagaaatatattttaaatgtttagtaattgacatgtgtggttgtccttgattaagttcacagatttcaccaaataggcacactaatttaaaaaatcactgagttgtagtcataacttgtacccagttaggagcaggggtagataactttatttatatggggatagacagttgctctgatgttggtttgagaacgtaaactccaagagcgggttctgggttctcttttaattcaaggccaagcttgtaaattaggctgctttaaagaaaaaagcattgcagataaaggaagggaatgggaaaaataaacacacggtggcttttgcnnnnnnnnnnnnnnnnnnnnnnnnnnnnnnnnnnncagaggatcctttaggccaggagctcgcgaccagataggcaacatagcaaaacccccacctctactcaa

SEQ ID NO: 310459 - DNA, 937 bp, Homo Sapiens
  misc_feature (81)..(97): n is a, c, g, or t
aaaaattaaaaaaatttcctaagacactaaatcctcaatctggaatgtagattctgagcacaaagcagctcagttaacctnnnnnnnnnnnnnnnnnttcccatcacctgtctcagtagggcctgaaaggagagaagtagtgtggggaacccctgctttggtatggagagtcacggccccttgacccagaccgagaccgtgagtagccatagctggtgcttctctcaggataaactcggatgtaggaagtttcaccctcatgagagcggaatttggtgtcatccagtttacgcagggcatattccatgtcttcttttctgagatactcgaccatccccactccatccttctgcacatcagcataacagacatccccagcttctcgcatgtgatccttcaggtcctgccagctgcctgacggaggaagtcctgaaacaagaactcggaaatcagatcttcttgtaggaggcccattcctcccaccacggggccacccaccccgacctccataagtcctggggaactccacacgaagccgacactggccataatcataaccatttcttccataaatagcatcctctgcatctcgggggtcctcgaagcgcacgaaggcgaagggcacgaggccgtgccggttcttgagctcgatctcgcggatgcggccgtacttgtagaacaggtcctccaagtccttctcgcgcacgtcggtcggaaggttccccacgtagatgcgcccgtcgccctcgccgccgcgctcgtccgcccagcccgacatccgcaccgcccgacgccgcgggcccgccgcagcccacgtcgccgccgccgcctcagcacgggtccccccgcagcgtccccgcgggctccgaggcgccctcgtgccgaattcgccacccagccccggggggagggggcgccgcgaggcgcgcgcagagta

SEQ ID NO: 310460 - DNA, 573 bp, Homo Sapiens
  misc_feature (26)..(26): n is a, c, g, or t
ggggagctgagtctccgaagccttgnttttcacatgcaagggactgggttacatccccaaggtgagggggtggagtctggtctgctccactaaccagggtctcctcctcctcttccttcatcgcttctcctggagtgtgcggcctaacaaggccatccttatgccttgcaaagcaccctcaaaagctgcaccacagcctggagaataaaatatcctcagccctgatgcctccccattatgtaacacccaaccgctctcacctacaccctgaggtctattcactgcatcccagtgatacaaagtggaggccactgccttctgacatctggctcaaaagcccagtgtctgtttccatttatttccctggaatttcatttaaaattggtatagagaaactggcgtgtgggagaccctgtggccggcacccaccttcacacgaggactaagctctgatttttttatcttgcccaaattcctacctaaggggtctagggagtcgcgccttacaaatcataaattctcatcagatgggttttatttgaccctgtatatcatgacttatttttaatctgg

SEQ ID NO: 310461 - DNA, 981 bp, Homo Sapiens
  misc_feature (376)..(389): n is a, c, g, or t
  misc_feature (391)..(420): n is a, c, g, or t
gctgggccctcttgccctacgaagaccgtccgcacctcgcgcccaattggcgccttcccaaggtcaaatgctcttcaaaaccgcgaaccagaacccccaacacacgtttctttttgaactaagatccggcattgtcgtgcgtacacccaggctgacttccagtgcaggcgctgtttgcattagggacggccatcattcatacgatcatcgtagtcaaacgcagcaccgaacacgcggtagtctccagctgagtaatctaacatttctgttacaatcgttagcttgctgaagcctagatcaatgacaagaatgttcacgtaagataaaggattgtgaggccaagttgattgtgcagggaagctctcagcagacttcnnnnnnnnnnnnnncnnnnnnnnnnnnnnnnnnnnnnnnnnnnnnaggggtgcctggctcttagttgatgatctcctggactggaaagaaaggaaggaaaacaaaggggaaaggggcttctttataggatgtggattctcctcacaagagactctgcagggcaagttcaaggtagggcaaagaaatatatttgggggttaaatatttttgcctcgtcttgtaatgttatgccatagtcagattaaaaataagtcatgatatacagggtcaaataaaacccatctgatgagaatttatgatttgtaaggcgcgactccctagaccccttaggtaggaatttgggcaagataaaaaaatcagagcttagtcctcgtgtggaggtgggtgccggccacagggtctcccacacgccagtcagaaccctgcccctgtgctttctggtcatctctgcttctgtcacatcctttttttctctataccaattttaaatgaaattccagggaaataaatggaacacagacactgggcttttgagccagatgtcagaaggcagtggcctccagctttgtatcactgggatgcagtgaatagacctcagggtgtagg

SEQ ID NO: 310462 - DNA, 264 bp, Homo Sapiens
ttcagtatttaatgccattttattcacatgctcccatgttctccctccctcccattgtagccttgctgcccaggggagggatatgtcttcctttatgcatctgggaaaccaggaacagaccatcctatgcagccctgaagaccaggctcctttgggcaaaaggcaagactctggcaggtgggtcaatgctctctccttggagcaagaagccagcttttggggaaggcaggtcctgaggcaggcactgccctcgtggtcttcccc

SEQ ID NO: 310463 - DNA, 1477 bp, Homo Sapiens
ttttttattgatatcaggtggtttattgatattgaaactccacgcccctttcaccacagaccacctgttggccataaggctatggtgccagcgatctctcccactaacagagctggccaggtcccagggcctagcaaacctcccagagtggtctctaggtatggaggaccccagaaaggggaaggggctgtgattgaagggatgctactctctgattaaccgacagtatgaccgtcacattagggtcagctacactgcagggctggggtgtgtggatatctgtgctggggtctgggctccgtggagagatgtgtaggggtaatgagaaattgatcagcaatgagaggtggactctgagccacctccctgaccctgaatcattcaagcgaggagcagaggagctcttgactgggggacggggatgtgaggatccccagggcctcagaagttgttatcaatgttccagacatccccgctaagcgcattggctgccccttgcagcgtccaggtgagcagggctagctgacgccggaaacggctctcctggaagccagtggaggaggtggccccgggggtcccggagctgttggagcgcagcagccgcaggtggtccagcagggcgcccagcgtgtggtctccacggcccatgaagatgtggcggaacggggagtcggctggcgacacgtactgggaaaggaagtagaactccacccgcattatgcgcacgttgtacatgcgtgtcagtcgctcgtctctctcctccgagctgtagatctcctgccgcagcttttccgccgcccggatgtagtccccccgcgccgagtacacccactgcagggtcagcccgcgggccttgaggtccccagagaactcgttgaggtttccgatgtgcctgaggacgacgtccccgtagcggccgaagtcgaggggcagcaggcgatcgtggctgagccggatgaggagctgccctgcgagctgggccacggcttgggccacggcgggcaggcggccttgcagcactttatgcaggttctcataagtgtcctcctttgtgtgcaggaatgggtaggcctggtcgtcctccataaaggagaactcgacggcagggactcccacaaaggccgtgaaggaataggcactgctgtccatgggtaggggccggatcacctcagcatcccagctgggattggtgaacaccacctgttcatagagagtctgcccactgtggttgggagaatccacctgcttcaggacactctcaatgagacttgtcagaagggggctggtcttggcatgaaacttgtcatcccccagcactgcgttgtccaggctcacgtacactacggctttgaggtgcagcacgctgaggtagccctctagccactccgtggagcccacgcttccaaagtcaccaccgtcccagctgatgaagaggagacttctgcggggccggaagccgttgctcaccatggaggaa

SEQ ID NO: 310464 - DNA, 1378 bp, Homo Sapiens
tgaaggtttatagaatatttatttcttttttggttgcagctatctccttcccaacctaccactgctaagactgtttcataagatgcacttctctacactcagctaatgaggtgtttcaatcagcagttgttctttggatgaggagccgatattgttttaaagcctattattttcttgggtgggtattctggagcatggggagctgaaagtgttgcaaggaaactgctgtgtgaaatttgatcaggtccttggtattcatttttatgtttcaataactgatttattttttcccccttgtacttaagatttaacatgtgttgtatttccagcagttcaaatctaattgtgtcgaatttccaggattggaggaaaagttgctccctttcagccctcctactagaagcactggagctaggctggcgggcattggaccctagtaggtatagcaggctgtgaagagcgactgggtggaagcagccccagaagaacccgtgtgaacatactgtcctttggccgcctggcagttagccatggcccgcttcataaaagcctcctgggttgcctccttgtttgcagccttgccaccccaggcagccagtgcactggcctgcagggcccgtccataagagaaacttagtttccagggctttggtagagggcaaaggttgatagcattgaggttgagagtggcatcctcttcactcatgccaccagacaaaaagcagatgccaggaacagctgcaggaacagtacggtggagagctgttacggtggccatagctacttgttctggagtatacttcttggtgcaggcatgtccagcagtcaccatgttgggctttagcagggtgccctccaggtaaacatgatggtcattcagggccttgtagacagcagccaggaccttctcagtaacatactggcagtgttccaggtcatggtctccatcaggaattacctctggttcaacaataggtaccagtccattctgctgacagatgctggcgtagcgagccagggcgttggcgttttcctggatagcgaggctggatggacactggtcggcaatcctcagcacagcacgccacttcccaaagtcaacaccatctttcttgtactgagcacagcgctctgagaggccatcaagcccttgaatggtggtttctttgtttgttcctgcaagaggagcacctccttggtctaacttgattcccaccacgatccccttttccttgaggatgtttctgaacagctttccctggctgtccttctggtagagggtctcgtggaaaaggatcacacccccgatgctctggttgatggaactgccggcggttctcttcagtgttttccaccttgatcctctgcaggcggttcc

SEQ ID NO: 310465 - DNA, 673 bp, Homo Sapiens
gcctcacccacagcttttgatatctaggaggactcttctctcccaaactacctgtcaccatggcccaccgatttccagccctcacccaggagcagaagaaggagctctcagaaattgcccagagcattgttgccaatggaaaggggatcctggctgcagatgaatctgtaggtaccatggggaaccgcctgcagaggatcaaggtggaaaacactgaagagaaccgccggcagttccgagaaatcctcttctctgtggacagttccatcaaccagagcatcgggggtgtgatccttttccacgagaccctctaccagaaggacagccagggaaagctgttcagaaacatcctcaagggaacaaacaaagaaaccaccattcaagggcttgatggcctctcagagcgctgtgctcagtacaagaaagatggtgttgactctgggaagtggcgtgctgtgctgaggattgccgaccagtgtgcattcagcctcgctatccaggaagaacgccaacgccctgggtcgctacgcccgcatctgtcaagcagaatggactggtacctattgttgaacccacgggtaattctgatggagaccatgacctttgacactgtccgtatgttactgagaaagtccctgctgctgtctacaagggcctgatgaccatcatgttt

SEQ ID NO: 310466 - DNA, 1436 bp, Homo Sapiens
ctcacccacagcttttgatatctaggaggactcttctctcccaaactacctgtcaccatggcccaccgatttccagccctcacccaggagcagaagaaggagctctcagaaattgcccagagcattgttgccaatggaaaggggatcctggctgcagatgaatctgtaggtaccatggggaaccgcctgcagaggatcaaggtggaaaacactgaagagaaccgccggcagttccgagaaatcctcttctctgtggacagttccatcaaccagagcatcgggggtgtgatccttttccacgagaccctctaccagaaggacagccagggaaagctgttcagaaacatcctcaaggaaaaggggatcgtggtgggaatcaagttagaccaaggaggtgctcctcttgcaggaacaaacaaagaaaccaccattcaagggcttgatggcctctcagagcgctgtgctcagtacaagaaagatggtgttgactttgggaagtggcgtgctgtgctgaggattgccgaccagtgtccatccagcctcgctatccaggaaaacgccaacgccctggctcgctacgccagcatctgtcagcagaatggactggtacctattgttgaaccagaggtaattcctgatggagaccatgacctggaacactgccagtatgttactgagaaggtcctggctgctgtctacaaggccctgaatgaccatcatgtttacctggagggcaccctgctaaagcccaacatggtgactgctggacatgcctgcaccaagaagtatactccagaacaagtagctatggccaccgtaacagctctccaccgtactgttcctgcagctgttcctggcatctgctttttgtctggtggcatgagtgaagaggatgccactctcaacctcaatgctatcaacctttgccctctaccaaagccctggaaactaagtttctcttatggacgggccctgcaggccagtgcactggctgcctggggtggcaaggctgcaaacaaggaggcaacccaggaggcttttatgaagcgggccatggtaagatgctgccacctcttatctacttgatgatgttcacatttggggcttgactttccaacacggagaagcattgttttcttcgggccaagaaggtatctaccaatagtgtctattaggcatttgaaaatgtggcagtagaggtcagtatgaggattgaggctagagagaattttgaattatccacactagagtatagttgatgacaggagactgaaggacaatttcaacagaaacacttcagagggaaggagataagaggaccaagaactgaacctaggatactttttattttgggaagatgaagaagagaagcaaccaagaaaagcagcgattatattgtagggtgaaccaagcattctgggaataaagacagaaga

SEQ ID NO: 310467 - DNA, 974 bp, Homo Sapiens
gctgctgcctcacccacagcttttgatatctaggaggactcttctctcccaaactacctgtcaccatggcccaccgatttccagccctcacccaggagcagaagaaggagctctcagaaattgcccagagcattgttgccaatggaaaggggatcctggctgcagatgaatctgtaggtaccatggggaaccgcctgcagaggatcaaggtggaaaacactgaagagaaccgccggcagttccgagaaatcctcttctctgtggacagttccatcaaccagagcatcgggggtgtgatccttttccacgagaccctctaccagaaggacagccagggaaagctgttcagaaacatcctcaaggaaaaggggatcgtggtgggaatcaagttagaccaaggaggtgctcctcttgcaggaacaaacaaagaaaccaccattcaagggcttgatggcctctcagagcgctgtgctcagtacaagaaagatggtgttgactttgggaagtggcgtgctgtgctgaggattgccgaccagtgtccatccagcctcgctatccaggaaaacgccaacgccctggctcgctacgccagcatctgtcagcagaatggactggtacctattgttgaaccagaggtaattcctgatggagaccatgacctggaacactgccagtatgttactgagaaggtcctggctgctgtctacaaggccctgaatgaccatcatgtttacctggagggcaccctgctaaagcccaacatggtgactgctggacatgcctgcaccaagaagtatactccagaacaagtagctatggccaccgtaacagctctccaccgtactgttcctgcagctgttcctggcatctgctttttgtctggtggcatgagtgaagaggatgcactctcaactcaatgctatcaactttgcctctacaaagcctggaactaagttttcttatggacgggcctg

SEQ ID NO: 310468 - DNA, 630 bp, Homo Sapiens
  misc_feature (367)..(367): n is a, c, g, or t
  misc_feature (379)..(379): n is a, c, g, or t
  misc_feature (390)..(390): n is a, c, g, or t
  misc_feature (504)..(504): n is a, c, g, or t
ggatccccgggctgcaggaattcggcacgaggcctcacccatcagctttgatatctaggaggactcttctctctcaaactacctgtgaccatgggccaccgatttccagagcctcacccaggagcacgaagaaggagctctcagaaattggccagagcattgttggcaatggaaaggggatcctggctgtagatgaatctgtaggtaccatggggaaccggctgcagaggatcaaggtggagtttcattaaccagagcattgggggtgtgatcctttttcacgagacacctctatcagaaggacaggcagggaaagctgtgtcagaaacattctcaagggaaaggggatcgtggtgggatcaagtanaccaaggaggtngctctcttgangaacaacaaagaaccaccattcaaggcttgatggccctcagagcgctgtgctagacaagaagatgtgttgacttggagtgcgtctgtctaggattgcgacagtgtcatcagctngtatcagaaacgcacgcctgctcgtcgcagattgcacagatgctgtctatgtgacaagtatctgtggactgctgacatgcgtgtctgaagctgtgtgtcagctatgctagtactgagacttagcac

SEQ ID NO: 310469 - DNA, 662 bp, Homo Sapiens
cgcgagcctcacccacagcttttgatatctaggaggactcttctctcccaaactacctgtcaccatggcccaccgatttccagccctcacccaggagcagaagaaggagctctcagaaattgcccagagcattgttgccaatggaaaggggatcctggctgcagatgaatctgtaggtaccatggggaaccgcctgcagaggatcaaggtggaaaacactgaagagaaccgccggcagttccgagaaatcctcttctctgtggacagttccatcaaccagagcatcgggggtgtgatccttttccacgagaccctctaccagaaggacagccagggaaagctgttcagaaacatcctcaagggaacaaacaaagaaaccaccattcaagggcttgatggcctctcagagcgctgtgctcagtacaagaaagatggtgttgactttgggaagtggcgtgctgtgctgaggattgccgaccagtgtgcatccagcctcgctatccaggagaacgccaacgccctgggtcgctacgccagcatctgtcagcagaatggactggtacctattgttgaaccagaggtaattcctgatggagaccatgacctgggaacactgcaagtatgtactgagaagtcctggctgctgctacaggcccctgatg

SEQ ID NO: 310470 - DNA, 384 bp, Homo Sapiens
ccgagttccaatccaaataattctttggaggatggtgaccagatgctaaagtttccaacacatactaaaatgtctctgggtccgagttaagtttgattttcttctgtgagtactatgttggggttactagagttgtggacagctggagatccccaattagaactctaaacactgcttgaatttcttcattaacccaacttagagacatctttcttaatgatttatgcttagatgccctaaaaaggcagtagctaggttctgaggcagctagaataatctctagaaagaaatacagtaattacgggtttgtatttattttttatctcattctgatttataccaattgcaactgttgaatctcctcctaaggaaaggataacagtg

SEQ ID NO: 310471 - DNA, 1153 bp, Homo Sapiens
  misc_feature (1082)..(1082): n is a, c, g, or t
ctcgtgccgaattcggcacgagctcacccacagcttttgatatctaggaggactcttctctcccaaactacctgtcaccatggcccaccgatttccagccctcacccaggagcagaagaaggagctctcagaaattgcccagagcattgttgccaatggaaaggggatcctggctgcagatgaatctgtaggtaccatggggaaccgcctgcagaggatcaaggtggaaaacactgaagagaaccgccggcagttccgagaaatcctcttctctgtggacagttccatcaaccagagcatcgggggtgtgatccttttccacgagaccctctaccagaaggacagccagggaaagctgttcagaaacatcctcaaggaaaaggggatcgtggtgggaatcaagttagaccaaggaggtgctcctcttgcaggaacaaacaaagaaaccaccattcaagggcttgatggcctctcagagcgctgtgctcagtacaagaaagatggtgttgactttgggaagtggcgtgctgtgctgaggattgccgaccagtgtccatccagcctcgctatccaggtacctattgttgaaccagaggtaattcctgatggagaccatgacctggaacactgccagtatgttactgagaaggtcctggctgctgtctacaaggccctgaatgaccatcatgtttacctggagggcaccctgctaaagcccaacatggtgactgctggacatgcctgcaccaagaagtatactccagaacaagtagctatggccaccgtaacagctctccaccgtactgttcctgcagctgttcctggcatctgctttttgtctggtggcatgagtgaagaggatgccactctcaacctcaatgctatcaacctttgccctctaccaaagccctggaaactaagtttctcttatggacgggccctgcaggccagtgcacttgctgtcttgggtggcaaggcttgaaacaaggaggcaacccaggaggcttttatgaaggggccattggtaactgccaggtgggccaaggacagtatgttcacacgggttctttctgggcttgttncacccaatcggtcttcacaagctgctatacctacctagggccaatgccctgcagcctaacttcagggcttt

SEQ ID NO: 310472 - DNA, 595 bp, Homo Sapiens
  misc_feature (447)..(447): n is a, c, g, or t
  misc_feature (476)..(476): n is a, c, g, or t
  misc_feature (495)..(495): n is a, c, g, or t
atttatttcttttttggttgcagctatctccttcccaacctaccactgctaagactgtttcataagatgcacttctctacactcagctaatgaggtgtttcaatcagcagttgttctttggatgaggagccgatattgttttaaagcctattattttcttgggtgggtattctggagcatggggagctgaaagtgttgcaaggaaactgctgtgtgaaatttgatcaggtccttggtattcatttttatgtttcaataactgatttattttttcccccttgtacttaagatttaacatgtgttgtatttccagcagttcaaatctaattgtgtcgaatttccaggattggagggcattggaccctagtaggtatagcaggctgtgaagagcgactgggtggaagcagccccagaagaacccgtgtgaacatactgtgctttggccgnctggcagttagccatggcccgcttcatanaagcctcctgggttgcctncttgttgcagccttgccaccccaggcagccagtgcactgggctgcagggcccgtccattagagaaacttagtttccagggctttggagagggccaaggtg

SEQ ID NO: 310473 - DNA, 687 bp, Homo Sapiens
cccatctgtacaggtgtgaacgttggcaaggtccccaggccagaagataaaaccagaaaagctaccctaaccccaggctctctaaggaagccaacacctagaagtgtctgacaggaggcgtgtgtccttggccccgatgaggctgcgggccatccctgcagtcttggctaggcggctgagagccaggcctggtggacgctctgggcccaggtgttgagcaaggcggtgaccgagtgcttgtccgggagctgcagcagcctggaggtcatgcagcggtgcaccgactggaggaaggggttggcgtcgtactgccactgccggtctatccacagcgggctttgggcaggatagtcagcgggcacactgagctccagtggtggcacacttgggaggtccttgtcatccagcttgcagatcaggtggacagtgccattgttgctgcagtgagaagggtccaggtttaccaggaacttggggtccagcctggccacctcaccctggagcacactggggatgctctgccgctcatcatcctcaagcctgcgcttccgggtgcacaccactggggccgtgatgggtgggccgtgaatggcggtcatggctggaacgaatgtgcggtacagggaatggttgaagacaggtgagcggatgttggccaggacggcatccaggagcggctggcctcgt

SEQ ID NO: 310474 - DNA, 584 bp, Homo Sapiens
aggacaaggagctgcgcgcggtcctcctgcgacggttcgctcagctgttgcagcgctattgctggtgcgcccgagtcgcgagcatcctcccggagcctctcatccggttccgtaaggcagccctcatcggccagagagggccggtagaggaagatttcttgacgcttttctcggctcggatggcagagacctggtgctgtggacaaggcttgcgaacttgtgctggcctggccctcctggacgctcgcccagcttgcagaccaggtggacggtgccattgttgctgcagcgagaagagtccaggtttatcatgcacttggggtccagcctggccacctcgccctggagcatgctggggatgctctgccgctcatcgtcctcaagcctgtgcttccgggtgcacaccacaccgccatgtcattcttgagtttctccagggcgatctcacactttggcaaggtcttcaggggactgcttggagaggtctgtcacaatgtccagaaggctcttcatcttgctcaggtccttttttctgtcttcactcttgtctatcttgttgaccacgcggtgcaggggcttgatgt

SEQ ID NO: 310475 - DNA, 1271 bp, Homo Sapiens
ctacctccatgtgcctcccctcctgcctctggagaggtagccctttggttaatggcaacccaatagggtaaccaaccatcccattttagcattgagagcattgtgtcctgggagacccttccctggaatgtaaataatcctggttttagcaacaaagtgtggaaggttggaggaaatgcacaaaacccgtaagttttagagggtctgaaagcaacattgtctatcaaatggatacggcacagattattcatctttacttgttgtcacccatttgaccactgatattggcaaccataatttgtagttcagaatggtcatccatccatcgttgcatcattcaaagtgatgtggcttaagtgtatataatgattattaatagttcatcttcgactttgcctgtggattaattggtgtgctttgtaacaagatagtgctagtttaattttttaacattgtgaatattgtgaccatgttttctaagaggtcagataatgagaatggttataataccaatgcaaccatgaccccatcactgaagaagaaggctaaacgactatgtaattttgatgatggatggaaggacacatactactgaactaggaaggtaaataaccaaaacagagcatactacataatatacagaaaaaaatttgagattggacatggtggagaaggggatgtgcaagcacatatggagggcaaatctcacaagtaagatgggacaggtgaatgcttctaaaccaatcaaaaatacctttgtttccccaaaagacaccaatgctcagttataaatagcagctgttgaattagcatgggcataccaggcaaataagcctgcattgtcatagcgttcccttgattgctctatgaaactgagtaaagtttcatttcctgatacaagaattgcagctaaaatattctctggacaaagaagaagggaaattttttgataacagatgtgttggctccttacagtataaagccaatttctgtcatatctcaccaacaatgctggtttctacagtacatcaattttaagaaatatgccgaatcatggcagcagaaatatgttacctctatctgttaggtactatgacttgaaaacaggagtgtgaaatcatattcttcatttctgtgaggattttaatgaaactgctgacatcattattgttgatattttgtctaatacctagacttagctcatctatctgtgttgtggcagacagtatagatgtgttatcatcaatgccttggcatctatatacacctgt

SEQ ID NO: 310476 - DNA, 454 bp, Homo Sapiens
  misc_feature (19)..(19): n is a, c, g, or t
  misc_feature (37)..(37): n is a, c, g, or t
  misc_feature (43)..(43): n is a, c, g, or t
  misc_feature (48)..(48): n is a, c, g, or t
  misc_feature (58)..(58): n is a, c, g, or t
  misc_feature (75)..(75): n is a, c, g, or t
  misc_feature (100)..(100): n is a, c, g, or t
ggaatttaagccccctaanaccggcctttacccctangcaatnagggnaatacccccnccctattaaataaattnaattggaaaaaataacccccccacnttccctcattgaagatcctattccctaaaataagtacctttttacagtttggataaaataaattttatcaagatttgtagagagcttaagagatggctgactagatgccagctggattgtgccttctctcatggagaagaacccaaaatattgagtaaaccttcacacttggaacaagtgttttaagagaaaaaaacaaaatttaacagagaggtgacagaagacagcatggttaaagaggaaggaagcggggctggctgctcagcatcactgggcatcaggaccctgctcctggacctggaccagacccaaggaaggagtgagtaaaggaacttcagagcacccacgttcccg

SEQ ID NO: 310477 - DNA, 2233 bp, Homo Sapiens
tttttttcacagtaaatgtggctacatttatttatctctagtatgggagacatggcacacactgtcctccaggtcacagggaggcaacagcaggagggactgatggcattcatcatggatttgaaaggtcaggctttgagaaaattaagccctaacattagcccagggcacccctcatatgtcttgaggtggcttcttccctggacatcaagaatggtgctagttgtgtaccctccttgggagaggtaaggaattagtcacaccactcatttctgtgcttggtattcagatgaggggcctggtggagaaaggcttgagtgacagagtcaggtgtgcaaggatggggtcaccggagcgggaggtgcttaggacgcgctgctcaggtttgctgtgaagagtggggaggtgagaccctctaggtaacagcagacacactacagttacagtgacttctatgagcttacagcatgggctattgtgcagaattgattccaacaagcctctcttcttggtcgtttctaagctcctctcatatgggcctcgaattcagattggtagcgtaaactacgtaaatgatgccagaacatctctgttctcgttgttggaatggaaacaaaatgagggtgcccccaaggcacttcagacacctagacctccacctctaggacctgctggggttggccactcttcccatgaagagcaggcagctggtgcgatgctcgtagatgaggaaaagaaaggggcggtcgacagtgaagcggacttgggtggacagcggcatgaaccccaccgtggtcacagtggtggcttgggtgccttcctcgttcactgtgatcgtgccttggtgcttgaacaggtcgatggcgatcctttggtctgagatgcctgccatgttgccatttttgtcaaacagcatcctgatccccatcaacttcagggactccactagattgtagttcttctccagcttgaatttcggcagaagcacttctcgagttctgtttgtcatgcttttttgccatctctccaccacccggggtgtcagttgcgcttcgagggtcttcatcccagacatcttgtgtgggaccacaattagcatgctgatgccccccacgtattccagctggaggatgtcgcagtccagctcctggtcatttgctgcgaggaagttccccttggtctgcatcatggaaaccttaactacctctctctcattcagccggaagttgtggttgtgtgtcatttccactgggaatttattcacccaggatcctttgaagtagatgcagttgagaatcatcatctgggtagcagggtctatattctccagagcatcttttatgaggcccttggtgagcttcatgatgtggttgttggtttttgatatgaaggcagggtctgagaagtcagctatctgggcctcagcaaagtaatactctcttactttagttttgaagtcaagcaggattggaaactgcttctggatataaaggtcattgactgaccgcagtgtgtacccaaaattcctcctgaagaggcgatgagtcagcttacggaagagattatgaatggtcgtgatttcatacttgctgctggcattaacaaagtctttaaaatgcaaaatcgagtgcacttgttcatgggtctctcccttcagacctaaggaaatcatacccatcgcagtagaaatgccaacgggtgctatgaagatgttatcgaaagtgttgacctggtctttcagcactcggtagaggttgaaagcgaacttggcgttgaggatgttaagacgctggatccggctcttgccatgaaaaagctggaggatgttcccagcactcacatcagagtctgtcggggaaactgacagactgtcgacgatgtcgatgtagtcgtcgtcttcactgaatatcttctccaggtccagatagtcgtcgtcctcctccccctctggaatccagtcgttggtgacggtgttttccttgtggaagtcggcagggagaagaggcatgctcaggtttttgttatttaactgctcccactggggatctgcagactgagcagtttcccctcctttctctagctgatccagcgggcctttgctcccaccccacgcagatgttatgatgaggaaaatgagaagtgcgtttaatgagtgtttcattttggcggagctaaagctctgtgtttctgagaagtggcgcttccagagatgaaagcagccaaggtcattccc

SEQ ID NO: 310478 - DNA, 727 bp, Homo Sapiens
ctgaatgagagagaggtagttaaggtttccatgatgcagaccaaggggaacttcctcgcagcaaatgaccaggagctggactgcgacatcctccagctggaatacgtggggggcatcagcatgctaattgtggtcccacacaagatgtctgggatgaagaccctcgaagcgcaactgacaccccgggtggtggagagatggcaaaaaagcatgacaaacagaactcgagaagtgcttctgccgaaattcaagctggagaagaactacaatctagtggagtccctgaagttgatggggatcaggatgctgtttgacaagcaccaaggcacgatcacagtgaacgaggaaggcacccaagccaccactgtgaccacggtggggttcatgccgctgtccacccaagtccgcttcactgtcgaccgcccctttcttttcctcatctacgagcatcgcaccagctgcctgctcttcatgggaagagtggccaaccccagcaggtcctagaggtggaggtctaggtgtctgaagtgccttgggggcaccctcattttgtttccattccaacaacgagaacagagatgttctggcatcatttacgtagtttacgctaccaatctgaattcgaggcccatatgagaggagcttagcgaccaagaagagaggcttgttggaatcaattctgcacaatagcccatgctgtaagctcatagaagtcactgtctgtgtg

SEQ ID NO: 310479 - DNA, 651 bp, Homo Sapiens
gttttgctgggataggcaaagtcttttgggacacgagttcttcaaaggtggtggaagatgaacaaacccatcctcggggctgaaaagtgagggccttcctgaactatgccaattgccagagggactttcctttcccaagtacggcattcccgaatatacccagaaaaggggtggaagaatgtcagaagaatggcaagcatgaacatcacattcacctgcagggagagcagaagtgaggtgaaatcccaggaattctgaacaacagaactgttgctcaatgaagcaagcactggtccattccatgaccaatgaagggaccagaagtctaccgagtttatattctacttttcacccagacactatggtgccctggaggaaggactttcagttacttttcattctgcactatcggttggggtagaggaggaatatcaagcccatttcacagataaagaaacagaggcctagcgagcattcaatgacatgttcaaggtcacatgggaagctggtagaggcaccagctagaatacacagctgattactaggtcacctgatgtcacaatcaagtctgctgttttggcctttcgtagtagaagtggttgtagtgtttagatatctgtttggtcttgcttcttgtattgcatttttttc

SEQ ID NO: 310480 - DNA, 1139 bp, Homo Sapiens
  misc_feature (721)..(747): n is a, c, g, or t
ttttttgccttagacacagaagctttatttttctataaaattattcccgagagaaattttcttttaaatgcccaaagtaaataacttatatcccttcttgaaaacatccccaaagatagtctgtcagaaatccttcggtcaagcaggtcagctggctcccatggcccttggggtggcctgactctgtcactattcctaaaaccttctaggacatctgctccaggaagaactttcaacaccaaaattcatctcaattttacagatgggaaaagtgattctgagaccagaccagggtcaggccaaggtcatccagcatcagtggctgggctgagactggggcccagggaaccctgtctgctcctctttttcccagagctgtgagttctcttagccaaggctgcactcttgagggagagcccaggaagcatagctgagggccatgacaacctcactcttcacctgaaaatttaacccgtggcagaggatccaggcacatataggcttcggagccaaacaggcctaaagaaatagttgacacacttcctcccccaggtcatctcccctggagtcaagggtctgccaaggctaagtgcaaggagacacttctgttttgaaataaagaagttccacatgcctttgctttgagtctgtgtgatatcaatctgcttggcaactgagattcttttcttgctgcgcagacgtccttgtgtgtctttatttnnnnnnnnnnnnnnnnnnnnnnnnnnntttgctgggataggcaaagtcttttgggacacgaggtcctcaaaggtggtggaagatgaacaaaaccatcctcggggctgaaaagtgagggcttctgaactatgcaattgcagagggactttctttccaagtacggcattcccgatataccagaaaggggtggaagaatgtcagaagaatggcaagcatgaacatcacattcacgtaaaatgggtcattctgaagggagcctttgatgagggtgaagatggggaactggagcagagacaccacagccgacaaggccatcaccagcccaaagagcttgccaaagtgctctgaagggaaagcaagggtgaggaaggccgcgttgctcccatagaggaaggagcggctgatcacttgcaggatcc

SEQ ID NO: 310481 - DNA, 618 bp, Homo Sapiens
  misc_feature (514)..(546): n is a, c, g, or t
  misc_feature (566)..(566): n is a, c, g, or t
  misc_feature (569)..(569): n is a, c, g, or t
  misc_feature (594)..(594): n is a, c, g, or t
ccacccatatttaatttttcccaagttgctggtagaagagaaatttaaaagtggatcaatcctcacagagagagttctttttgttgttgtttattgaaaaaaatgcaatacaagaagcaagaccaaacagatatctaaacactacaaccacttctactacgaaaggccaaaacagcagacttgattattgcctgtgtagtctaaagattctgccaatctgattctgctgcccgagttcctattttttcaagaaatgtaaacaactacttgatatgattcataattttaaaaaaatttacaaagctccttcatttttgtcaccaaaataatacatttgagagagatttgtagaaacaaccagcctggggctgagatcctgggcagaaatttcccgtgagcatcaaaaggcgtcagtcaggccgcagctctggctccagttcccgaggtttgttgtctcctcacccccagctgccaagcatccccccaacacacactgatgggcccagcggtggannnnnnnnnnnnnnnnnnnnnnnnnnnnnnnnnctgacgggtcccgcagtttngcnccctgaccctcggcttataaatacnggtcttgctttgtgggtgggtgcc

SEQ ID NO: 310482 - DNA, 410 bp, Homo Sapiens
ttttaggatttttagtattttaatataatacagttccaatcagtgtgtctggttcatttcagttccttcactgccaaaccggggggcagggactgcttcagtttctctgccttctctttgtcagtgatgaccagggtgtaaaggtatctgctgcatcgaactttaaacttcacgttgtccttatttttcttgatcttgacagatttggcatcctttcgtcgggctgtgagcaggaagtccttgatttcctcaattttccgaggcatggcgacgaggcgcgctgggctctggcgcggaccaggacctttctcacccacgtatcaccctagagacactcacagcaagcagcaaccggggaaaaggacgaaaaagaacgagacttccgtttccgggcagttaaaccctccccc

SEQ ID NO: 310483 - DNA, 604 bp, Homo Sapiens
tttttaggatttttagtattttaatataatacagttccaatcagtgtgtctggttcatttcagttccttcactgccaaaccggggggcagggactgcttcagtttctctgccttctctttgtcagtgatgaccagggtgtaaaggtatctgctgcatcgaactttaaacttcacgttgtccttatttttcttgatcttgacagatttggcatcctttcgtcgggctgtgagcaggaagtccttgatttcctcaattttccgaggcatggcgacgaggcgcgctgggctctggcgcggaccaggacctttctcacccacgtatcaccctagagacactcacagcaagcagcaaccggggaaaaggacgaaaaagcaggaacgggaccggaagaagaggaagcgaaaggagctgtgggcgaaagagaaggccaggaaggctgaggcagccatggaggcccaggaggtggtggaggccaccccagagggggcctgcacggagcccgggagccgcccgggctgatcttcaataaggtggaggtgagcgaagacgagccggccagcaaggcgcagcgcagaaagtcagagagaaagagacagagaagga

SEQ ID NO: 310484 - DNA, 1106 bp, Homo Sapiens
  misc_feature (877)..(908): n is a, c, g, or t
ttgcgggctctgagcaggcggcgctcggcgcgggccgccttcttcctgcgcaggttctgccgccgccggtcctggcgctgctgcatcttctccaccacgccggccgtgcgcttctcccaccggcgctgccgctgcgccctgcgcttctccttgcgcttcagggcctcctgcagcaggcgttcgtcgtcacggatcttcacgccctccgccttgtagaggaggttggtccacttcatcttcgcctccagctcctgcgccttcccctcatcctggccgcgcagctcgtccgagccggctctgccgtgcctgcaggcgctccagcagctgccggtagttcctcccggtcagcggcgtgaggttccccttcaccctctgcctcttctctttttctgcgtgcgccttgctggccggctcgtcttcgctcacctccaccttattgaagatcagcccgggcggctcccgcggctccgtgcaggcgccctctggggttgcctccaccacctcctgggcctccgtggcctcctcagccttcctggccttctctttcgcccgcagctcctttcgcttcctcttcttccggtcccgttcctgctttctccgccgccttttctccaaggcggcaggggacagctccttggcactgccctggccccgggcctcctggatcttctcatgcagtcgctgtcgcagaacatccagagcaaagacagactcaggctcagtggccaggccatctgcagggttccctgctgagctggaagcccaagctgcttcctctttggctgcctcaggcctcctggccccagaggctgctggagatttctcccccaaggacttggccttgtgctcagcagccttctcttctcgcttccggaannnnnnnnnnnnnnnnnnnnnnnnnnnnnnnnggggccctgcagtttctgagccttgagttttgccagcccgcgtgcgcgcctgctgttccggggccgaatgggagcagatcttcttggccaggctctgcaggtaggcgtccttggcgagtagagaggccatggcggagacccgggccgttcacgactcacaccttccccgctgcgcgtgcgactctcaccacctccccc

SEQ ID NO: 310485 - DNA, 626 bp, Homo Sapiens
  misc_feature (360)..(456): n is a, c, g, or t
  misc_feature (458)..(461): n is a, c, g, or t
ggggcccggaaacggaagtctcgttctttttcgtccttttccccggttgctgcttgctgtcctggtccgcgccagagcccagcgcgcctcgtcgccatgcctcggaaaattgaggaaatcaaggacttcctgctcacagcccgacgaaaggatgccaaatctgtcaagatcaagaaaaataaggacaacgtgaagtttaaagttcgatgcagcagatacctttacaccctggtcatcactgacaaagagaaggcagagaaactgaagcagtccctgccccccggtttggcagtgaaggaactgaaatgaaccagacacactgattggaactgtattatattaaaatactaaaaatcctannnnnnnnnnnnnnnnnnnnnnnnnnnnnnnnnnnnnnnnnnnnnnnnnnnnnnnnnnnnnnnnnnnnnnnnnnnnnnnnnnnnnnnnnnnnnnnnnannnntttttcggccccctcgaccctaaaaaactttttttccccctcctttggccccgagggcccttaagaaaattaaacttggccaccgcggcccccaagaaaaaccggggggtaataatggtttgaatacaaacccttaaaaaagccccggggggtactttacccttt

SEQ ID NO: 310486 - DNA, 1016 bp, Homo Sapiens
  misc_feature (323)..(323): n is a, c, g, or t
  misc_feature (335)..(344): n is a, c, g, or t
  misc_feature (453)..(474): n is a, c, g, or t
  misc_feature (512)..(528): n is a, c, g, or t
  misc_feature (530)..(536): n is a, c, g, or t
  misc_feature (541)..(645): n is a, c, g, or t
gcgggcgcacaaaagggttggttttatatcctccgcgcgcgggggaatataaaagggtgttcatcacacaccccccttttttgggaggggggtcttcccacatgggggggcaagaaaggtttttatagagaatttcccaccccccactttctcccactaaatatcccacacagggcggggggcggaaaaatttttaatattaagaaaactcccgcctggggcaccccctccttttgataaaaaatatccccagaaaagagcccctcccagaacaccccccttcttggggatttgtttttttaaacacccctccggtttctccncccccggggcgnnnnnnnnnngggggggagaatccccacccccttttctttttgcccccgggttttttctgggaaaaccactttatgcccccctttttcttttttccttgggggggccccccccgccccnnnnnnnnnnnnnnnnnnnnnnttttttgaggggcgggaggggcgcgcaaaatttttttnnnnnnnnnnnnnnnnncnnnnnnnaaaannnnnnnnnnnnnnnnnnnnnnnnnnnnnnnnnnnnnnnnnnnnnnnnnnnnnnnnnnnnnnnnnnnnnnnnnnnnnnnnnnnnnnnnnnnnnnnnnnnnnnnnntaggatttttagtattttaatataatacagttccaatcagtgtgtctggttcatttcagttccttcactgccaaaccggggggcagggactgcttcagtttctctgccttctctttgtcagtgatgaccagggtgtaaaggtatctgctgcatcgaactttaaacttcacgttgtccttatttttcttgatcttgacagatttggcatcctttcgtcgggctgtgagcaggaagtccttgatttcctcaattttccgaggcatggcgacgaggcgcgctgggctctggcgcggaccaggacctggcagtggattgccccagattacctttctcacccacgtatcaccctagagacactcacagcaagcccc

SEQ ID NO: 310487 - DNA, 446 bp, Homo Sapiens
  misc_feature (135)..(135): n is a, c, g, or t
  misc_feature (272)..(273): n is a, c, g, or t
  misc_feature (275)..(276): n is a, c, g, or t
  misc_feature (283)..(300): n is a, c, g, or t
attggagataaaaacagcgaagtcccacataccataccctacaagacacaaggtgcgcagacgacgagccttggctatgtaccggcgctgcaggaagaggctgtccgccgggcctgggctgctccagctacgcgnggaggcggccccattgcaaagtgcagtttctccgcggaggtggcggtgggtcagtggcagagggccatggtttccatgttaaggaagcggacgtgcatcttggtctcaatgtcgttttctttgatttttgttttgtnntnntttctgnnnnnnnnnnnnnnnnnngttcaggttccatttgtcccatgcacacgctggccgcctccatcatggccccgtcggcgatggagcgagcggactccttctcgatgtgagggtttccgacagcagctcctcgaccactttacatttcgatattcttccagagtgat

SEQ ID NO: 310488 - DNA, 631 bp, Homo Sapiens
atattggagataaaaacagcgaagtcccacataccataccctacaagacacaaggtgcgcagacgagccttggttatgtaccggcgctgcaggaagaggctgtccgccgggcctgggctgctccagctacgcggggaggcggccccattgcaaagtgcagtttctccgcggaggtggcggtgggtcagtggcagagggccatggtttccatgttaaggaagcggacgtgcatcttggtctcaatgtcgatcccctgccagatcttcaggaagtcctcgaaggtgatcccctcgtacacctgatcaggctccatctgccccatgcacacgctggccgcctccatcatggccccgtcggcgatggagcgagcggactccttctcgatgtgaagggtttcccgacagcagctcctcgaccacatttcgatattcttccagagtgatgcggccgtcgctgtccgagtcgtacatgtggaacagaaatctcagcttctccttccgggacagctccacctgttcctcgtccatggtggtgtcgatgggccggaagtaggacatgatggtcaggaagtcctcgaaattgatctcatcagccaggccactgggtcccttgcgcaggttcctgttgtcgg

SEQ ID NO: 310489 - DNA, 320 bp, Homo Sapiens
agtgcgacctggcttaaggagctggaggggttcctaatacacatttaattcagtttctcttccctaagaggctgccggagttggggcctcctccagcagagaccctcggacccctgcagggcctggacttggggtgaacagggcttcagtcagcgcaagtattccatttgcatttggtaatttttcatgccacctatttatgaatatataaatctttataccaaatctattttttaaaacatggaaaagttgcctttatggaaacttggcagagccagagtgtacacattcctaaaccattaaacagatttctataacat

SEQ ID NO: 310490 - DNA, 603 bp, Homo Sapiens
tcaacaattacaaaggcaggtatagcgaaggagatactgagaagttaaagatgtaccattctctccttgggaatgactggaagacgattggtgagatggtggcccgaagtagcctctccgtggccctcaagttctcacagatcagcagtcaaagaaatcgtggtgcttggagtaagtctgaaacccggaaactaatcaaggctgtcgaagaagtgattctgaagaagatgtctccccaggagttaaaagaggtggattccaaactccaagaaaatcctgaaagttgcctatcaattgttcgggaaaaactctacaagggcatatcttgggtagaagtagaagctaaagtgcaaaccagaaattggatgcagtgtaaaagtaagtggacagaaattctaaccaagaggatgactaatggtcggcgtatatactatggcatgaatgccctgcgggccaaggtcagccttattgaaaggttgtatgaaataaatgtggaagatactaatgaaatagactgggaagatcttgctagtgccataggtgatgttcctccatcttacgttcaaactaaattttctaggctgaaagctgtctatgttccat

SEQ ID NO: 310491 - DNA, 352 bp, Homo Sapiens
caggcctcatgcgctaacaatagagttcttctctagttaacagaaatcctctctctgtctgtactgtccacaacaactattacaaactctgtgttagtatagtaagtgttccaggaagaacgaagagattcttggccaccaatatcccacattaggaaacgtgtattattaatcactatctcttctacattacttcctattgtaggagatgtatgtacaacttcattcatagaaaattggtaaagaatggtagtccctgcattatccagcccaacaatgataactttgtgctcctggtgattgaacagtctccatattctagtgaagagaattcccattctcgggcagcgga

SEQ ID NO: 310492 - DNA, 1115 bp, Homo Sapiens
  misc_feature (383)..(391): n is a, c, g, or t
  misc_feature (413)..(481): n is a, c, g, or t
cggagagtggggcgggcaatgggaggggggatatctgtctctattgtcctcccgcaacaaaaggggtttattcgtccggctttgtgcgcaatgcgtggataaaaactacggtgggggaaaaacacggggtaatattaggcggggtggggggacgccaataaaatctggcggttattccgcattgggaacagggcgatggcgtggaataatagtgtgggtacaatgatgaggggcgagacactaggtgggaaggtgttgcaagaggttatagctcgggcggggatactgaactcgaacagatacgatggtggggtggagggtgacgatgccgatagattaggggaggggtgtggaatacagaaacgtgtgggggtgagcttgtnnnnnnnnnaagtgcacggtgagcttgagannnnnnnnnnnnnnnnnnnnnnnnnnnnnnnnnnnnnnnnnnnnnnnnnnnnnnnnnnnnnnnnnnnnnaaggttcagaagggaatgggctacatggagacaagggcacgggggggtactgcccttttggggttttggggcggcaggaggggtgcataaacgggaggattggggtggaaggaccttcagagggatagagagtatggggggagcagagaccaggggcaggtggtgtgttcaggagtcgtggggatcggtgtgtttttcagagtctccatccctgagcagtgggtcagggaaggtctggtgagctgaagccccagccctgtcttcctccactccccttgcacccaggacacactcacacacctgagggaatccctggggctttgaactcaaggaagggcacccgcatgaagatgggagctcggtgacacttttccaggtcaccgccctggtagatcatgtccagaatctggctcacccaggtggtgccggacttggggtaggtgctgatgagcaggtcatcaggccgggcctggaagctctgcaggggccccagtgcctctgcaaagtacttgatgagtgggacccccttcacgtactccagtggcgggcgggaggtgtcctggatcagctccatgttcctgagctcttgggaacctggcctcgtgccctcctcgcccgcagtggctgattgtgg

SEQ ID NO: 310493 - DNA, 1017 bp, Homo Sapiens
ggcctgggtggcgaattcggcacgagggcaaggagagaacaggtcaggttcccgagagctcaggaacatggagctgatccaggacacctcccgcccgccactggagtacgtgaagggggtcccgctcatcaagtactttgcagaggcactggggcccctgcagagcttccaagcccgacctgatgacctgctcatcaacacctaccccaagtctggcaccacctgggtgagccagatactggacatgatctaccagggcggcgacctagagaagtgtaaccgggctcccatctacgtacgggtgcccttccttgaggtcaatgatccaggggaaccctcagggctggagactctgaaagacacaccgcccccacggctcatcaagtcacacctgcccctggctctgctccctcagactctgttggatcagaaggtcaaggtggtctatgttgcccgaaacccaaaggacgtggcggtctcctactaccatttccaccgtatggaaaaggcgcaccctgagcctgggacctgggacagcttcctggaaaagttcatggctggagaagtgtcctacgggtcctggtaccagcacgtgcagggagtggtgggaagctgagccgcacccaccctgttctctacctcttctatgaagacatgaaggagaaccccaaaagggagattcaaaagatcctggagtttgtggggcgctccctgccagaggagaccatggacttcatggttcagcacacgtcgttcaaggagatgaagaagaaccctatgaccaactacaccaccgtcccccaggagctcatggaccacagcatctcccccttcatgaggaaaggcatggctggggactggaagaccaccttcaccgtggcgcaaaatgagcgcttcgatgcggactatgccggagaagatggcaggcctgcaagccttcaccttccgcctctgaagctgtggagaaggggccttcctgggagtcccctggcccaaaggggaatggtggccgaaatc

SEQ ID NO: 310494 - DNA, 1117 bp, Homo Sapiens
gccttgttatttgggacccccatggttccggggtagaattgccccattttccctttggccggggatttcgaggagcccctttttcccaggttcagaaggcggaaggttaaggcttccagccttcccctttttttccccaaaagtccggcatggaaggcgcttcattttgcgccagcggtgaagggtgttcttccaggtcccccagcccaggccttttcttcaagaaagggggagatgctgggttccatgagctccctggggggacggtggtgtagttggtcatagggttcttcttcatctcctggaacgaggtgtgctgaaccatgaagtcccacggtctcctctggcagggagcgccccacaaactccagggatcttttgaatctcccttttcgggttctccttcatgtcttcatagaagaggtagagaacagggtgggtgcgggctcagctcccaccactcctgcacgtgctggtaccaggatccgtaggacacttctccgaccatgaacttctccaggaagctgtcccaggtcccaggctcagggtgcaccttggccatgtggtagaagtggtagtaggaaactgccacatcctttgcgttgcgggcaatatagaccaccttgaccttctgatccaacagagtctgggggagcagagccaggggcaggtgtgtcttcaggagtcgtggggccggtgtgtctttcagagtctccatccctgagggaatccctggggctttgaactcaaggaagggcacccgcatgaagatgggagctcggtgacacttctccaggtcaccaccctggtagatcatgtccagaatctggcttacccaggtagtgccggacttggggtaggtgctgatgagcaggtcatcaggccgggcctggaagctctgcaggggccccagtgcctctgcaaagtacttgatgagcgggacccccttcacgtactccagtggcgggcgggaggtgtcctggatcagctccatgttcctgcgtcaggggccagagccaggcccgttccctgagctcttgggaacctggcctcgtgccctcctcgcccgcagtggctgattgtgggtgttcctcgtgccgaattcgccacccaggcc

SEQ ID NO: 310495 - DNA, 1197 bp, Homo Sapiens
atttttttaacagaatctcactatgttgcccaggttggtctcgaactcctgggctcaaatgatcctcccacctcagcctccaaattgctgggattacagacatgacctaccgtcccgggccctcaattcatattttattcttgagccgcttggtcaggtttgattcgcacactccctctgcagtgactccaggagcccctctcacagctcagagcggaagctgaggctgcagcctgccatcttctccgcatagtccgcatcgaagcgctcattctgcgccacggtgaaggtggtcttccagtccccagccatgcctttcctcatgaagggggagatgctgtggtccatgaactcctgggggacggtggtgtagttggtcatagggttcttcttcatctccttgaacgacgtgtgctgaaccatgaagtccacggtctcctctggcagggagcgccccacaaactccaggatcttttgaatctcccttttggggttctccttcatgtcttcatagaagaggtagagaacagggtgggtgcggctcagctcccaccactcctgcacgtgctggtaccaggatccgtaggacacttctccgaccatgaacttctccaggaagctgtcccaggtcccaggctcagggtgcaccttggccatgtggtagaagtggtagtaggaaactgccacatcctttgcgttgcgggcaacatagaccaccttgaccttctgatccaacagagtctgggggagcagagccaggggcaggtgtgtcttcaggagtcgtggggccggtgtgtctttcagagtctccatccctgagggaatccctggggctttgaactcaaggaagggcacccgcatgaagatgggagctcggtgacacttctccaggtcaccaccctggtagatcatgtccagaatctggcttacccaggtagtgccggacttggggtaggtgctgatgagcaggtcatcaggccgggcctggaagctctgcaggggccccagtgcctctgcaaagtacttgatgagcgggacccccttcacgtactccagtggcgggcgggaggtgtcctggatcagctccatgttcctgagctcttgggaacctggcctcgtgccctcctcgcccgcagtggctgattgtgggtgttgtgtggggaatgcagggttgttctctgagctgagggtttccta

SEQ ID NO: 310496 - DNA, 809 bp, Homo Sapiens
  misc_feature (262)..(262): n is a, c, g, or t
  misc_feature (427)..(427): n is a, c, g, or t
  misc_feature (629)..(629): n is a, c, g, or t
  misc_feature (642)..(642): n is a, c, g, or t
  misc_feature (716)..(716): n is a, c, g, or t
  misc_feature (767)..(767): n is a, c, g, or t
gcacaaggccaggttcccaagagctcagacagcacaggaaggtcctagaggttcctcagtgcagctggactctcctggagaccttcacacaccctgacatctgggccccgcgccacgagggtgctttcactggtctgcaccatggcccagggcctggggattttgaacagctccgcaggtgaatgaaagggaacgggcctggctctggcccctgacgcaggaacatggagctgatccagggacatctcttcgcccgccactnggagttacgtgaagggggtcccgcttcattcaagtacttttgcagaggcacttgggccccttgcagagtttccaggcccggcctgatgacctgctcatcagcacctaccccaagtccggcaccacctgggtgagccagattctggacatgatctaccagggcggngacctggaaaagtgtcaccgagctcccatcttcatgcgggtgcccttccttgagttcaaagtcccagggattccctcagggatggagactctgaaaaacacaccagccccacgactcctgaagacacacctgcccctggctctgctcccccagactctgttggatcagaaggtcaaggtggtctatgttgcccgcaacgcanaggatgtggcggnttcctactaccacttctaccacatggccaaagtgtaccctcaccctgggacctgggaaagcttcctggagaagntcatggctggagaagtgtcctatgggtcctggtaccagcacgtgcaagagnggtgggagctgagccgcacccacccctgttctctacctcttc

SEQ ID NO: 310497 - DNA, 1216 bp, Homo Sapiens
ttttttctttaacaaaatttttatttaataaatggttaaaatcgcagtgccaaaaatacattgacatttagcaatttcactgaaaggaagaaactacagaatgcacggtttcagaaagctattttaagttatttacaaataaagtatctaaaactcaaaaacaggctctgtatgctatatctagtttatcccttcccgaacaaaatttctgttatttgggcaaattcttaaaccatggtttaaaccgtaatggttacaaaccacaaacacatccatccagagactgaaaccgtttctatccggtcagtggcaaaactgttgaaagggcaatagttgaagctgttgggttttatatagtgtgaactctgataaatattcctaccaggactaaaacacagcacgctttgcgggcatggctgactcacaaaggttgtaacaaacaagaactactcttcactcgacaccatggctcagaggccaccgagaagcacgagtgactgacagctcctctgcttacaaacgaatgaaacccaaagtggatgtcgttctcacagcactgaaagtgcttcaggactcacactgatccaatactaactttcttccctattttacacatatttttctactgtccagtggaaatcattttctgttttggctaaacaacaaatactagtttataacaggaatggtaaaatctgtgagaattctgctcgatttaatacaagatcactactttctttagaatggtttctgcgtgtttctacgtcaccctctgtatttttagcttccagtttcctggtaaggaataagttctccttcccagtcacactcggggtcatttacacgtttctgggatgcccttgctcgtccatggaggccaggtgcgtgcagtgactcactctgcctcttccctcttctcaggaccagtccccgaaccttctgccttgcagatcctcctgtttccgccacactctcgcgctcgggagcgagctcctggatcatacagctgcaaggctggccggtctccttctggaaagccgttcaggctcgtggtgagctctgtgcctcctgccgtcatccacatggtatctttgtgcttcagattcttgttcttgagatctctccacatccctgtgctctttatcactgccgctgtgtgaccatgactgggagctgacgtggaggaggagcttattgataacctcagacgttccag

SEQ ID NO: 310498 - DNA, 832 bp, Homo Sapiens
  misc_feature (111)..(144): n is a, c, g, or t
tttcatcagggagaggtttgcggggcggttttttaccgtccgccattttttatttgtggggtggccgggtttcctgggtaagggaataaggttttccttttcccaggcgcnnnnnnnnnnnnnnnnnnnnnnnnnnnnnnnnnncctttggttcctcccatgggagggccaggttacacgcaggggaccgccattgtactttttcccctgtttctcaggacccagtgccccgagactttgtgcccttgccagtccctcctgtttcccaccaccctctcggcgctcggaagcgaggctccgtggatcaatgcagggggcagggctggccgtccttgttttcccatcccctcttatttgggtgctggactgtcgtcacacctctgcgctcttcccagtctctccatggcctcccccggagccccgctgtcctggctccccttcttccctctgtcttggccaggtcctttcccccatctctgctcatcctcactccttctggaaagccgttcaggctcgtggtgagctctgtgcctcctgccgtcatccacatggtatctttgtgcttcagattcttgttcttgagatctctccacatccctgtgctctttatcactgccgctgtgtgacgtctcctggggctcctccagcgagccttccatgggcctggcttttacgactgcaccgggggcacaggattcctgcttgccacctccagtatcaatctcctctcctctttcttttggtttctctgtggttggttcctctcccttttctggtttcttaagaagcttaatccttacttctttctctgcaattttcttctgtttatctg

SEQ ID NO: 310499 - DNA, 389 bp, Homo Sapiens
gaagcacccacatacagaatctcggggagagtgcagtatctgaagagctccatcttcctggaaatcctggaccttcgtgatcatcttctcacttggagcatattcggatttcgaaatggtttcaaactcattccgaaagcgttgaatatcggcatcaggtacaagatttttgattactagaaacccattttcttcataaaattttctctgttccagggttagaacattattatccagagtatactggaattgttgaggatggaaactggcagaggaaatagtccctgaagtgggatgagctacgacagccccggccgaggggcggccgaggtggcccagaacaatctgcagacgggcggcggcgcgaagctgctccatggctgcggcgc

SEQ ID NO: 310500 - DNA, 1581 bp, Homo Sapiens
cttgtccgagcaggaatatccactttatttggactccatgacaccgttcctatgcccttgactagatgtgaatgtattatacattgttctagatttgggggaaaaaaatctcttatgacataaaattggtagggaatgggtttatcagaaaggggatacaaaacataccctaagctccaaatcattcacttcttcttgggtaaagagctaactgaatgaaagaaattgatttaacacttaaattagacaccaaccacctttattggctgccaccctaaattagttttccttaaaacagtaatatttcacttttactgttttttttttccattaaagcaacaccattgtgctgcaaaactaactctatgcaattaagtacctgatacatgttttctgcttttaacaagtgatagaaaaggttacatcatctcattaagaaaacattttccttagacatttcgtttggttttggttttctgttgaaagagttatagcagatggctatttcaaagattggttctttctcctttcacaagtcgagctcgaaacatccaaatatccttcaagttcacgctattttcagctccaaagaatttatgtgctattcctacaacttccttctcgatgttttcttgactggtgcccttcacgtcaatgtagtggcaatcggcactggcgaaatggcaggaaattgccttccggaatccctgggttttattctgaccagatccgtggatgagcaaaggatggaagaaaacagtgtcgcccttctccatcaccaggtgcacccgggccttgttttcctcgtagtcctggatcccgtggaacattttgttaactcccccctcccacttggggtaatcgtggggcttcagggagcccttgtgtgtgcctgggagcacaaccagacagccgttgttccggctgatgtgctccatcgccgtccaggcgcaaacgatgagatcgctgggcctgaaggggaaatagtgcaggtcctggtgcagggggtgacgggacgtcttcttgccagaatctggaggtttgtttatcaacattgtgtgcatggccataatattaggtccagtgaagcactccacatatttcagaatctcggggagagtgcagtatctgaagagctccttatcttcctggaaatcctggaccttcgtgatcatcttctcacttggagcatattcggatttcgaaatggtcacatctctcattactgttaatcctaatggtttcacctcctttctgcagattttttcaaactcattccgaaagcgttgaatatcggcatcaggtacaagatttttgattactagaaacccattttcttcataaaattttctctgttccagggttagaacattattatccagagtatactggaattgttgaggatggaaactggcagaggaaatagtccctgaagtgggatgagctacgacagccccggccgaggggcggccgaggtggcccagaacaatctgcagacgggcggcggcgcgaagctgctccatggctgcggcgcggcctcgtgccgaattcgccacccaggcctcgcggcgtgggcgtgat

SEQ ID NO: 310501 - DNA, 2453 bp, Homo Sapiens
  misc_feature (78)..(109): n is a, c, g, or t
  misc_feature (1944)..(1944): n is a, c, g, or t
  misc_feature (1972)..(1972): n is a, c, g, or t
  misc_feature (2371)..(2371): n is a, c, g, or t
  misc_feature (2410)..(2410): n is a, c, g, or t
ttgacgcggggagagatttaatttacatagcagccacttggggtccagtcagagctggggcagtgggggaatctatannnnnnnnnnnnnnnnnnnnnnnnnnnnnnnngggagaccagtcctcaccaacccttggatgggctcccaaggttgtgcagaagatgctccagtcaaaaggatagagacatttgggaataaggctgtccccaagttgggggaagtccacggcctggagtggtggcctacatggtggcccaggggtctgagagaccagtccatgtcctgggcgagtcctcagcctggtggccctagaggaagccttcgcggcggaactgttcctggaggagggcgcggtactggtcaaatcctccttccacacgggtgacgccgcctccttcgcatacccacaactcccggcacaccagcctgataaagcgctcatcgtgggacaccagaatcacaccacccctgaaattgttgagggcacggcccagagcctcaatggtctccatgtccaggtggtttgtgggttcatccagaatgtagaagttggggcagggcatagtcatctgagcaaaggccactcggctcttctggcccccagacaggctggcaagaggacgcatggccagttctccggagatgccataccgacccagctggtgacggtactcctcctcaggccgcccaggaaacttgcgtgccagcagttccacagcactgacgtttaggtccagctgctccacatggtgctggctgaaatagccaatcttcagattcctgtgagcgtgtctgatgccccgaacaggtgccaggtcccccaaaagcagcttcagcatggtagacttcccagccccattctctccaaccacacagatgcgagactcgagatcagcagacacagagaggcgactgaagatgacgtgcttcggatcgtagtagaaatccacctcatctagctgcagaattggcggcgagaacttctcaaacccatcagggaacttcattacgacctctgattccttgtccacaggcttcagctcaggcagcttctccagcatcttgagtttactctgcacttgagaggccctgttggcattgtagcgaaaccggtcaatgaaaacctggatgtgctggcgatactgctgctgcgcctcatattcacgctgctggttgagcagccgctcctgcttactcttgatgaaggtctcaaagtctccccggtaaccatctagccgctggctgtgcaggtggatgatgtctgtggcgatggcattcaagaagttgcggtcgtgggagacgactaggatggtggagggccacgtctgcaggtaattctccagccacaggatggccctgacatccagcatgtttgtaggttcatctaacagcagaagatctggcctagcaaagagggcccgggccagggccagcctcatcctccagccacctgagaactcccgggtgggctgctgctgcattttaggggtaaagccaagcccagcgagaatgactgatgccctggcaggtgccttgtcagcctcaatctcctccagtttggcatagatttctgccagctctgcagctttagagccctccgccctgccagcagcaatctgggcagtgagctcccgctccctccgtagcaaatccttttgcacactgtcactctccagcacactctgcagggcaggagtgttatctccagcaacttcttgctcaacgtgcagcagggaaatgtgggctggaacccgcagactccgggtggccagcatcttcagtaacgttgtcttccccaacccattccgccccaccagcccgtatacggcggccccatgccaggttaacatccgctccagccagcagtactctatcgccaaaagacacatcaaagttctcaattcgcacatcataggatttgttcttgccagatgattccaaccnactctcctttctgctgcctgcctggctngctgatgcctcttctaagactagagggttgctggtcttgagcgtgtccttctctgagcgcttctcctgctttgccttaagtcgagcctcggccttctctaacttctttgcattaactgtcgaggactgttccctctttagcagtcctggaagtttggttccacagtcgtagttctccgttatctttgacaactggataggggcgtccagtagcacctggctatttccctggctttgtggctcagccagacgcagagtgttgtacatgcgctggcacacggccctgatgcccgcgtcatccttgctgtccccggacacctcttgcaatagttcccctacagcttccaccaggtcatccacagactcgaagtccgcgctgccgctgtgcaagacgccggtnacgtagtcgaagacctgtccgtcaatttcggggaactcntccgcaggatttcggcgcaagtcgccatgttccatcccgggaa

SEQ ID NO: 310502 - DNA, 1512 bp, Homo Sapiens
  misc_feature (51)..(51): n is a, c, g, or t
  misc_feature (263)..(285): n is a, c, g, or t
  misc_feature (1292)..(1292): n is a, c, g, or t
  misc_feature (1318)..(1318): n is a, c, g, or t
  misc_feature (1364)..(1364): n is a, c, g, or t
  misc_feature (1378)..(1378): n is a, c, g, or t
gatctttttgtagtttgagaatagacctattcaagagctatcagggttaanagctgcactgaccaaagctgtacttttaaaacacaacccctgggctagtgatgtctctacttgctctatgagccttttgccagcctcagaataggcgaggtaaccttgaatttcagggccctggaaactctagctgaaacctgcctttcctaatgctcacacaagcaccaggtaccctgagcttatactgagtccagtggttcctattttannnnnnnnnnnnnnnnnnnnnnntgagtaacatgaaacttggcagtagcagagagcactgaagttcacatgcaagttctaatctaaagttaagcagtctcttatttgtttcgggactctgatttgactctttttctgatgctttcggcatgtctgcagcctgttctcctagcctgctgcttggagtcaggttgagcatcagtgagatgaagacagtaccttttcctctcacattggcagaatagcacgcactagatgcctgaccttgagctctagtctcccctttaaatcttaccttggcagtaacacattattcctcattcaataatttcaatgctgaaactgaactctattactaatgccttccaatcagagttcctgatggggatgcctgtgggatggcccacacctgggggacctggcagatggggtgagttgggtaaggaagatgatgcttagttcctgatagatgctacagatgtagtttggcatttcagtttttgtccagtttgattttcactggggtttgagtcacagcaagctgtgtatgaacttgtgttttgtggtgacacattaataatcaaattgctaaaaccctgaatctgcttattcttcagcttcacctctgcactaaccccttacccttatggtacgtcaggattttaactagtactgctttgttgactttgggaaatggtgccactcaaaagcaacttcctaacttgaggaataactcctttgtagtttactttctggtactggttggtgccttgtattgggatacagctatattcttagctcaaatgtcctctttttgagagcaaagtagttatccaatggtgagacgagaccctgacgctcatagaggccattccttcctgggtgttcggaccagggctctgtgttcagggaaaaccttctgggtggactttgtaagaatccagtttccaaggttagattcacatccttaatcttgcagagactagaatttcacagctcgctttggaacatattcgaattcagccagttanaatcagagaccagtcgtgcgggaggnggcggtgttaggagagtattttaaaatctggcactttcaggatatntgtgagactctaangtaagatcagaataaagactggtgtgtttgtcgtggttgtcaggcctatctgttaccacctctaaaatattggggtggaataaagctgggttcttgcaagaaatggcgaaccttgggggttgacagaaggtggc

SEQ ID NO: 310503 - DNA, 1778 bp, Homo Sapiens
  misc_feature (31)..(31): n is a, c, g, or t
  misc_feature (101)..(101): n is a, c, g, or t
  misc_feature (225)..(343): n is a, c, g, or t
  misc_feature (355)..(429): n is a, c, g, or t
  misc_feature (552)..(552): n is a, c, g, or t
tccggaattcccgggatcggttacggaagangcgcccccggctggggagggggctggatgcgcgcgcacccggggggaggccgctgctgcccggagcaggnggagggggagagtgcggcgggcggcagcggcgctggcggcgactccgccatagagcaggggggccagggcagcgcgctcgccccgtccccggtgagcggcgtgcgcagggaaggcgctcggggnnnnnnnnnnnnnnnnnnnnnnnnnnnnnnnnnnnnnnnnnnnnnnnnnnnnnnnnnnnnnnnnnnnnnnnnnnnnnnnnnnnnnnnnnnnnnnnnnnnnnnnnnnnnnnnnnnnnnnngtcccccgagtnnnnnnnnnnnnnnnnnnnnnnnnnnnnnnnnnnnnnnnnnnnnnnnnnnnnnnnnnnnnnnnnnnnnnnnnnnngagccgctccctttcccgtcggggagcgcggggccggggcccaggggaccccgggccacggagagcgggaagaggatggatttcccggccctcccccccggatggaagaaggaggaagtgatncgaaaatctgggctaagtgctggcaagagcgatgtctactacttcagtccaagtggtaagaagttcagaagcaagcctcagttggcaaggtacctgggaaatactgttgatctcagcagttttgacttcagaactggaaagatgatgcctagtaaattacagaagaacaaacagagactgcgaaacgatcctctcaatcaaaataagggtaaaccagacttgaatacaacattgccaattagacaaacagcatcaattttcaaacaaccggtaaccaaagtcacaaatcatcctagtaataaagtgaaatcagacccacaacgaatgaatgaacagccacgtcagcttttctgggagaagaggctacaaggacttagtgcatcagatgtaacagaacaaattataaaaaccatggaactacccaaaggtcttcaaggagttggtccaggtagcaatgatgagacccttttatctgctgttgccagtgctttgcacacaagctctgcgccaatcacagggcaagtctccgctgctgtggaaaagaaccctgctgtttggcttaacacatctcaacccctctgcaaagcttttattgtcacagatgaagacatcaggaaacaggaagagcgagtacagcaagtacgcaagaaattggaagaagcactgatggcagacatcttgtcgcgagctgctgatacagaagagatggatattgaaatggacagtggagatgaagcctaagaatatgatcaggtaactttcgaccgactttccccaagagaaaattcctagaaattgaacaaaaatgtttccactggcttttgcctgtaagaaaaaaaatgtacccgagcacatagagctttttaatagcactaaccaatgcctttttagatgtatttttgatgtatatatctattattcaaaaaatcatgtttattttgagtcctaggacttaaaattagtcttttgtaatatcaagcaggaccctaagatgaagctgagcttttgatgccaggtgcaatctactggaaatgtagcacttacgtaaaacatttgtttcccccacagttttaataagaacagatcaggaattctaaataaatttcccagttaaagattattgtgacttcactgtatataaacatatttttatactttattgaaaggggacacctgtacattcttccatcatcactgtaaagacaaataaatgattatattcacaa

SEQ ID NO: 310504 - DNA, 428 bp, Homo Sapiens
  misc_feature (397)..(397): n is a, c, g, or t
  misc_feature (410)..(410): n is a, c, g, or t
atcctagtaataaagtgaaatcagacccacaacgaatgaatgaacagccacgtcagcttttctgggagaagaggctacaaggacttagtgcatcagatgtaacagaacaaattataaaaaccatggaactacccaaaggtcttcaaggagttggtccaggtagcaatgatgagacccttttatctgctgttgccagtgctttgcacaccaagctctgcgccaatcacagggcaagtctccgctgctgtggaaaagaaccctgctgtttggcttaacacatctcaacccctctgcaaagcttttattgtcacagatgaagacatcaggaaacagggaagagcgagtacaggcaagtacggcaagaaattgggaaggaaggcacttgatgggcagaccntctttgttcgcgnagcttgcttggataccag

SEQ ID NO: 310505 - DNA, 790 bp, Homo Sapiens
  misc_feature (116)..(116): n is a, c, g, or t
  misc_feature (144)..(144): n is a, c, g, or t
tttaattaagtgggaatagttcttggtactccagaaaggtcctttcatccagggagggtttgtagcgccttttgggtatgtcctaaagggcgcccaagatttcacttttccctgcnggatattgttcttgtttggatcaatcancccctgctacaaatggtttcctggaactgctgattgagcatctgagtactaacatcaatcccagaaagccagcagccatagccagggtggctatgataccacccgattgcattttcaaggcggccaacctgttttgcattttctatgtatgcagccatgtattcatatgcagcagcctgagcatttactcgggtttcagtgccctccacaggcaaagcaaaactgtccataatgatcatggtttcaccatccacctttcctagcatcagacccatcacttccaagttgcctcccgatctggcatgcatcaccatcttcagcagagccaatgctgagattttgcagtacttaaagtaatggtgatccttagtccagggcttcgccgccaggatttcttgctgctgtttcttgtcgtatttgtagatttcatcgatactctgagcttcctgcatgttgttggccagttcccaggttttctgggccataccgctcccggacgccgccatcgccgaggaagcggagaagttgtcgtctctacaaccaagacgcaactttacctcgctaggtttccgggtgtgggccttgaccctccgcaccacgggaacaaactcttacctagactcttggggcagccatgacacctccc

SEQ ID NO: 310506 - DNA, 1271 bp, Homo Sapiens
tcattttaaagagctttattacaggatattaatatttaggacacttatattgggtaactggttttaaagtgttacttgaatatttttctcatactgtctttcaggtaaagtacttctcagagactgtttaagagatgttaatttgattaaacagtttatccttaataacctgagacatcaatccatggatagcttctatggtagttttacagctgtctcttgtagctttggcaagtttgtcttctgattttcggtcatgcgtttctaaacccaacatgaaactccctcgtcccagctgggcttctgactgctctaacttttcagacaaatcaaagacctgaccagtggtatagtctgcattagtaagcaagctagaagaactcaacgtattcacccagtatttattccacaacagctcaagcaatttgcgatccaaagaggatttgaatatgagacttctaaggcataatattgtttgcagtgtacaccaaaatcttctattttattaagtggaatagtctggtactcagaaggtccttcatcaggaggtttgtagccctttgggtatgtcctaaaggcgccaagattcactttccctgcggatattgttcttgttggatcaatcaccactgctacaaatggttcctggaactgctgattgagcatctgagtactaacatcaatcccagaaagccagcagccatagccagggtggctatgataccacccgattgcattttcaaggcggccaacctgttttgcattttctatgtatgcagccatgtattcatatgcagcagcctgagcatttactcgggtttcagtgccctccacaggcaaagcaaaactgtccataatgatcatggtttcaccatccacctttcctagcatcagacccatcacttccaagttgcctcccgatctggcatgcatcaccatcttcagcagagccaatgctgagattttgcagtacttaaagtaatggtgatccttagtccagggcttcgccgccaggatttcttgctgctgtttcttgtcgtatttgtagatttcatcgatactctgagcttcctgcatgttgttggccagttcccaggttttctgggccataccgctcccggacgccgccatcgccgaggaagcggagaagttgtcgtctctacaaccaagacgcaactttacctcgctaggtttccgggtgtgggccttgaccctccgcaccacgggaacaaactcttacctagactcttggggcagccatgacacctccc

SEQ ID NO: 310507 - DNA, 1093 bp, Homo Sapiens
  misc_feature (327)..(346): n is a, c, g, or t
ccgtttcggtttggcttctccaaccggtaaaacgggtaccttcccgggtggaatcaaaagccgcgggggcagccagggggaattaaaggggagcgcatcccaaatgagccaagggaagagtgggggtggacaaaaaaaacccaaggaaatgttcctttgaccccaaggttctcagccagaaggtttgaagtccttccctgcgttaagagtttgcaatgggtgtttacccacaccaaggcatccagagtgtcacagctggtcttccctgggcaaaaatccaagtcactaatttagtgcaaagggcaggttcggttttcttgtttcttnnnnnnnnnnnnnnnnnnnnttttcattccactgccctgttccttttctccaaaaagaggaaagggaaacccagcccccggtgtctgcgagtccatgggttggtgatgtgtccttgggctaaagcattatgtaaacatacaaggtagcagcaccactcctagaggaagtctggccgactgagccgggcggcaggacagcaaacggctggccgtctggcagtggagtctgtccccttcggcagcttcttcctctgcttggctgggttgtcctttgtttttactgcagagccctgggaagattcactgaggtgataaccactcagtggctcacacggaggcaatgacaatcatgaggtggggagagatgttggagatgctggcaaggaggtcaggggccaggcgggacaggtgactctcagagaactcacagggcgggaagatctgcagcacgtaggcaggctgattggagccagggttgggaacgttgatgatccctgccgcctgcttggcctgcaggtaagtgatgaaggcagccttgagggactcggtctggctcacaacatcctcttggtcacggccacagggcagagccagcagcagacagtaatctgtctccaccgtcatccttcgggcaaccccttccagctgcgttgcctccagccgcatcctctgggcgatccttagtgggggccctccttcagaaaggggcagggaccgatgggccaggacgttgtgccagatcccggaaatccggaccggtccagccg

SEQ ID NO: 310508 - DNA, 367 bp, Homo Sapiens
tcggcaacgagcggcacgagggtgtttgatgttgtgagccagaccgagtccctcaaggctgccttcatcacttacctgcaggccaagcaggcggcagggatcatcaacgttcccaaccctggctccaatcagcctgcctacgtgctgcagatcttcccgccctgtgagttctctgagagtcacctgtcccgcctggcccctgacctccttgccagcatctccaacatctctccccacctcatgattgtcattgcctccgtgtgagccactgagtggttatcacctcagtgaatcttcccagggctctgcagtaaaaacaaaggacaacccagcctgggtgacagagagagagtctttctcaaaaaaa

SEQ ID NO: 310509 - DNA, 1955 bp, Homo Sapiens
  misc_feature (703)..(718): n is a, c, g, or t
tttttgaaacatttctctaaaactttatttcaaagttattcacctcaccgttaataaggtgtatgattaatgctctgtgccagtatttgcaggcctgcccattgccggcaatggactttgagaaaacccatttcctggcacccaaaagttaaattactcttttcaaaacataccgatctccccaacacttgcaaaagtattacatgcaccattttgccaccattctttaaatcagaacttacattattaatctacatcagtgaatgttaaatgaagtcattttaacaaattatgactgtacaaatcaaaatactactagttaatattagacaagagtatcttacaaacactactattacatattaccttgcaatctgaaacattatatttcatatttgtgtatatttattttagataactgaaacttcacagaatttaacagcaaataaagtttaaaaaatttagttctgtacattagttccaactatccctattttacaatctataaggctcatgtcatagttcagcaccaaaaagatctacacaaaactgtttaaccaatcttcttatctatcctgtgtgatagttttgtttgttgttgttttttaaggtaaaagtcctacttcagaccttgaagtggaatacttctagtcagactaggtaaaaacttgggtcataccttattttcattgaacagataccnnnnnnnnnnnnnnnnggaaaaggaaaagagctgtgttacaccatgaatttaggttgtcagcctctatgttgaatttataacactgaagcatcagaaatagcctaataatgccctgcccctattcttcccttccattttaaatttttaaaaaagtaaccagaaaaatgtttcatttattctttaaaataaggtgcaaagaaggactgcaacaacaaactccctcatccacacctccaataacatctcactgttgttcagcataatctaccatgaactgattcaggagcacacctagagctatattcacagctcctgaatgtaccatgttttctataccagaagcctcttcaatggcagtgtttctctgttcagaggtcattacaataacttttgtcactgctggcctggacttaacattccagattccagagccagtgttttattgtcccagctcttttcttcctctttaggatttatcaattttagaaaaagggcatgtttgttttgctattttcaaagggtttgtgcgtatcacattttaccacattttaccccaattttaccacactggggaatgttgtcacattccccaagctagaaatgttttccaaaaaccacaggtactttctgtaatcttgttgttcaaagtacaaaattcttacatgttaaaaaattttttaattggagattagtacctctgctttcttctgacagaagtacacaattcattataccatgtttaaaaaccaaacatcatgcatacaaatggccaaagaggtatgaagttttacagagcccttaacatcattcgagtacatttggcattggccagaccacaacaggaagcatgtcagcaaatagagcaaagagactttcccaagtacacgatagtcatccaggctccatgtcagtcacataaaaatttacataacatgtaatcctttaaaattatccccagatatcccattcctccaactgttcccatacccccaccccatgcccaccccaccctgaagtcttgcacctcacagagtatcttaatgttccccattactaatgacagctgcttcaggttctgctgctgtggcagggagtcttggtactttcttggcagggcttggaatatgctcagttgctatgtttgaaatgacaagtcctaatcttcctccaaagtggcaccatttgggaggggacgccgaggtaagtttcttctgtgttttcaccaccctaactaagtaacaagtttcttcaa

SEQ ID NO: 310510 - DNA, 537 bp, Homo Sapiens
aggaaaaacaaaatattaaaataagccctttctccccatcaaaaggaatcacattctcaaaggattcctacaatatacaaaattctgaaacaaaaccataggagtggaaaagacaccttgttacttattttaaagtaatcatatttagagaaagacagcaaaaggagtttctggccttatgggctttaattttttactttgattttcagcatttcttagcattagttattgggagtgaagagaataacttgtttccgaagtttgggatattcctgggaaaagccctggtcttttcccatgataattcctcaaaaatagttggttgaaaacagatggcatgaataaaaatgctatacatccacctgttcctcttttcatgattttcacatcaaaagcacctgaagtatcaattgtgttcaacacagaatagcactaggggctgaagagaggtgatatcacttgccataatatcagctgaggtgacatgggatctaaactacccaagaagtcttcactggcaaacctgcctgacaccag

SEQ ID NO: 310511 - DNA, 1311 bp, Homo Sapiens
atatgggggaaggaaattcgccaaaggccacttaggttccaagggcccagggggttcttccctaagggaaaacaaggttatcgggcccatgttcccctttacccttactgggggcccgcggcgcccaaacgaatgggtttagaaaagcttttttgagggccgaaggcggcccgacaaggtcaaatttgagttgcatgggtgtgatttgggaaaaataggctttattttaaccagtggtattgtctgacatcctatacggcataactgattacagccaagttcatgaatacaaataaaatagcaatttccctcattctctcttttgttttctgttcagagaaatcaggagatgggagcattatgctcagaaaccgaagagctcttccaagagctccagcttagagtccaggcttccagagcatgcagcctcctaacacgtatgtggtcacatgtgcaaagacctttattacaaaatattcagagcagtatttctgtaggaaatcacacgagcatttacaaccaaacatggctgataaaattcatcttgctgtggatggtgaggatttgaactgcaataaaggagatgaggcctttactttaaaggttcactttccttgaaagggggagagtcccgggtgagagggaatcgccatcagtctgcctccttccttcttgctccagttgactcagggggtccaccctgtccctctggagtacatgtatcactgcactgattgagaaatggaaacaccttggcccaaatacaagattctgtcacacagccaacactggaagtgactttatactttcttattacacaaaaggcttaaatatatgagtcctcatgtagaacaaaatgcctgaaattcagcaagttatgaaaacgacacttctccacccctgaggatattttatctttataaagttgaaaatacaaaatattaaaataatttgccctttctccccatcaaaaggaatcacattctcaaaggattcctacaatatacaaaattctgaaacaaaatttatttctccccaaaccaagaagtcaatgttaagctgccaagaagacccttttccataggagtggaaaagacaccttgttacttttttattttaaagtaatcatatttagagaaagacagcaaaaggagtttctggccttatgggctttaattttttactttgattttcagcatttcttagcattagttattgggagtgaagagaataacttgtttccgaagtttgggatattcctgggaaaagccctggtcttttcccatgataattcctcaaaaatagttggtt

SEQ ID NO: 310512 - DNA, 987 bp, Homo Sapiens
  misc_feature (46)..(56): n is a, c, g, or t
taaatttacacagacgtttaattagctttatttacagagcagggannnnnnnnnnncagtctccaatggtgcctagataacatcattaggcaagaatgccagtttaaaagaaatctatgcagaatcctaaaaataacagatgttggtgctcctcaagaagaggcaagcttgactatatcagcagctctctatgcctcagttactcagaagcaattctgttgcagtctctacatcccatgattttgaagacaaggccactattactgcattcctatcaaagcccatagcacataggttttctatttttttggtgtattctggactagaaactggtgctccagcatacacatgtgcccaaagtcgagctgtctgtttgaacatttcgggattttgtttgtactgatttgctactacagcatcctgtggatcatctggctctgcagctgccaatagtgcttgcaatgacaataataccgtgcggagagtcattgcagctgcccattgatctttcaggatatccaaacaaatagcccctgtgacggaactaatattaggatgccatattttagtgataaaccggaccttagggggattaaatgggtatgtttctggtatttttatctctagttggtatcttcctccttcatatggtgtgtctggaggtcctgctatttctcctcttaattctgtaaaattctcatctacaagatctactttaatttgatttttgctcgtctcctcgctcttcagcacctccttgaactcccgcttgattcgctgcaccgcgatgttggccatgtctccgcccgcagctgattcgtacccgcctcctccgccaccgctacgaccaccgccaccgccgccacctcttcctccaccgcctcctccctcggcgattcagacctgagcacacgaacactgccactaccaccccggccgccgcgctcgcctcagtgtggaatcacctccgcgcccggccaccaaaat

SEQ ID NO: 310513 - DNA, 750 bp, Homo Sapiens
tccagaaaggcaatttctgttggcagttctctaccatcccccaggattttggaaggccaaggcccactaattactggcattccttatcaaaagccccatagccacataggttttcctatttttttggtgtattctggactagaaactggtgctcccagcatacacatgtgcccaaagtcgagctgtctgtttgaacatttcgggattttgtttgtactgatttgctactacagcatcctgtggatcatctggctctgcagctgccaatagtgcttgcaatgacaataataccgtgcggagagtcattgcagctgcccattgatctttcaggatatccaaacaaatagcccctgtgacggaactaatattaggatgccatattttagtgataaaccggaccttagggggattaaatgggtatgtttctggtatttttatctctagttggtatcttcctccttcatatggtgtgtctggaggtcctgctatttctcctcttaattctgtaaaattctcatctacaagatctactttaatttgatttttgctcgtctcctcgctcttcagcacctccttgaactcccgcttgattcgctgcaccgcgatgttggccatgtctccgcccgcagctgattcgtacccgcctcctccgccaccgctacgaccaccgccaccgccgccacctcttcctccaccgcctcctccctcggcgattcagacctgagcacacgaacactgccactaccaccc

SEQ ID NO: 310514 - DNA, 588 bp, Homo Sapiens
  misc_feature (22)..(22): n is a, c, g, or t
  misc_feature (75)..(75): n is a, c, g, or t
  misc_feature (100)..(100): n is a, c, g, or t
  misc_feature (127)..(127): n is a, c, g, or t
  misc_feature (155)..(155): n is a, c, g, or t
  misc_feature (573)..(573): n is a, c, g, or t
cccggggaacccaaaaaaaacnggtgccccccaagcaataacaacatgtgcccccccaaaaaacgaagctgtccngtttggaaaaacatttccggggaantttggtttggtaacctgatttggcccnacctaacagccatccctgtgggaaccancctgggctcctgcaagctggcccaatagtgccttgccaatgaacaaataaataccgtgcggagagtccattgccagctgccccattgatcttttcaggatatcccaaacaaatagcccctgtgacggaactaatattaggatgccatattttagtgataaaccggaccttagggggattaaatgggtatgtttctggtatttttatctctagttggtatcttcctccttcatatggtgtgtctggaggtcctgctatttctcctcttaattctgtaaaattctcatctacaagatctactttaatttgatttttgctcgtctcctcgctcttcagcacctccttgaactcccgcttgattcgctgcaccgcgatgttggccatgtctccgcccgcagctgattcgtacccgcctcctncgccaccgctacgac

SEQ ID NO: 310515 - DNA, 1494 bp, Homo Sapiens
  misc_feature (126)..(126): n is a, c, g, or t
  misc_feature (209)..(209): n is a, c, g, or t
  misc_feature (286)..(286): n is a, c, g, or t
tccaaatgtgccaggtgggaccccccccaggggttgggagtaccaaggccagtggcggcggggtgacagaggctgttctttctgtcactgggctccaaaggggcaggagcagcggggtggacacantgaaatgcaagactgactgtgcgctacaggccgtgctgagctagagcctctgcctggagggaaagtaccaagctcccaggcancagcttacgaaattctggctactacaccaagtctaaatacatgacgattttcacaacatcaatgagaaattgttctntaaagtctgaataaataaattctagcttttcttttcagtgtcttaaaaacaaagcaaaacagacatgagcaacatgaagtgatatgtttatccaactgtgtgttgttgaatcaacttttagttaaaatgttagagagggacaaataagtacagtgtgtcgatgtgcggtgctgtgagggcacagaccagtgatcagaacacaacacctgcggcctctcccatcctgacaaagtctctgcatgccaactccagcgacagggtgctaggacagcgcagggatgaaatactgaagggacacgtcttcatgaagcagatcaaaatgcaccatcttgttattcacaatattgcataaggcctttgtgggatttacttgttgtccagcaagaaactgtaggagcttcctaatatctatgtgcacttcagccatgtgttccacgttttctgtctctcatgggtgctttcaggaggctaatggagggatttccaagatctttaaaatgagttgtaacacatactaattcagtttctattttcaaattcaattctccatctaggtttgcttcaataacaaggtgattgctgatgtttttcattttttccacaacactcttcatagtcttcaagactggtaaataaatactaacatcaggatctgggaccaccggttcttgtaagtccttccacaatttcctaggaatcacctttatggggatgtcatgggtcacaatgcggctactgcttgacatagataacagctccacggagaccgtgaggcagggaaagtgtttattagtcagtttgattttcaaagccctggcattctgggcagtcttcaaggctcgagataagttttccgatgttagctctaaataaatctcattgttttctgcagagacaccctccatttgaaattcgttgaagaagttctcctgttccagctcacaccacatgctcactcctccattagccagcttgtcacaaaggatgaagttaagcttatcagggctgatgcggagggtgcaggttttggcaagcttggctatcatgttactgattcgtgtgaagtggttcagacaggccccgtccacgatcttggcccgaaacttcatggccgcggatggcgcagccgcggcgggcctctgtgggtaacagaaaagcgtcgcgccctgagtgtccccgcccggaaacacggcagcgcgaacagtccc

SEQ ID NO: 310516 - DNA, 415 bp, Homo Sapiens
  misc_feature (197)..(197): n is a, c, g, or t
aggcccaaacatccttttccccaaaactgcctggtaaagtaatatgccatgtccccaccccccagctatacccagggttaacagaacaactgcctaacaatgaagggctgatccctgattgcccctcaatccaggcaggaagctcaggcagttaccctacagaaaggtgcttgcagaaaacactggttatttgaacnagacaagtgccatgggagccaatgcctatccccagaccttggtgtgaagaaggaagatgcctcaagttagtagatgttgcttcacaaaggtctcttctgttccagctccatgcaggagttatgaatgtgggtttttttaatcactcatgtgacttaaatgcaaactttgccacattttttattaaatgtgtacatttgggcaagttccttaacctctc

SEQ ID NO: 310517 - DNA, 606 bp, Homo Sapiens
gttagtagcgttttaatggcagcagccccaagaggagagtcagagtctggtctgcccccggagcaggaggcttgggcttggagggcccatcccagcagacctaaccatccacctccttccattgaactgaggccaggaaagtgcggatttccatgggttccagcgtgatgttggccgggtccagctggtacggagtttggtggggtgtggggcctgtgtttgttgtccacttgagcctggaggctgcctcgcggagctggttggccaccagcgtggtctcctgcaggcgggtgatggtgaaggtggagaacaggtccctcaagttcaaggtaacgggggcgctcaggttacgtccggaatcctctcctacggcaaactggtgctccaagcgcagcagcaccatttcggggccccagctggccagcgtgagcaggtgcaccgagggcggcaggtccctgcgcagccctgagaactgcgtgcgcggaggagccccgagattgtaggcggcgccgccacccggggccagcaccacctgaggggccaggacctcctgctccgccaggagccggtgtccggcggctgctgctggacacagcccaggctgca

SEQ ID NO: 310518 - DNA, 456 bp, Homo Sapiens
tggttttccccttcagaccattcccggagtaataaatccagttggagcagcagtgatgagaagaggggatcgacacgttccgatcacaacaccagtaccagcacgaagagcctcctcccgaaagagtctcggctggacaccttctgggactagcagtgaatcgggacacaaaccacccaccccattgggagaaaaacccagacgccaggaaaagaagaaacaacaaaggcaggagaacagccactttcagacttgaaaatgacaaaaccctcagttgagccttagccccggcgcgggggctgctacactacaggacacccagcatcggctttgactgcagactgttcacccacacgagccctgtgcttttggtgtaaataatgtacaatttgtggatgtcattgaatctagaggactttcccctttttatatttgtattaactttaacttattaaa

SEQ ID NO: 310519 - DNA, 1187 bp, Homo Sapiens
  misc_feature (73)..(125): n is a, c, g, or t
  misc_feature (150)..(162): n is a, c, g, or t
  misc_feature (197)..(205): n is a, c, g, or t
  misc_feature (225)..(280): n is a, c, g, or t
gtgggggtccccgccctttttttcagtggcgggttttttggggaaacaggagtggccctgtttccttccgttnnnnnnnnnnnnnnnnnnnnnnnnnnnnnnnnnnnnnnnnnnnnnnnnnnnnncgccaacgaaacagctatttccacnnnnnnnnnnnnnggggggtcctttcgccaaagaaatggttttgaaannnnnnnnnagggtcgtggcgtttcttcnnnnnnnnnnnnnnnnnnnnnnnnnnnnnnnnnnnnnnnnnnnnnnnnnnnnnnnncagtttcaaattttatttcattaacttaaaaggtggacataatgtttattttaaatctaattgaaatttatctgaaacaacttatttcaagtaacttattgtacagtccattgtccatttaaaaatattttcttccaaaaaactgcattgaaagacaaaaaaattcttttatacggcatatacgcgagatgcaaacttctgatgtaaatttgtttcactgtcaactccgatgataaagatgagaggcacaagggttcacagttcagttaaatgatgcaaacaaaaagcttctgtttccctccgatacaaattagaagtctccattcatgtctcttacagtagtaccacatacttgatgctgatactaggttacttctttttctttcctttcccttttttacttccctctccttgttgaagactttggtcagcacctcctgttttttgtgtccttgtttttagtttaggtatcatttctgctgcatacaacattactgacttacgtgatgggaactgtacaaggcagaggctcccatcttcctgtttgagctggacccggactctgcctctgtattggacatcacgattccattctctagagtacattttatttttctcaagaaatacgttaagtccaactgctgaacatacatcttgaatctctgtagctgtaggattttcaacagccttacttatggggattcgccttccctctgcgatggtcttcttattatttaaataagcaggatagatacaaataaacctgtcctggtcggccggggaccgcgcggcagcgcaagccatcttcacaagagtctcaacaacccaggagccgcagggagaaacccggcagaaacccgggaggaacccggctctgagtttccgagacagcccgcttttccgcccc

SEQ ID NO: 310520 - DNA, 1312 bp, Homo Sapiens
  misc_feature (895)..(895): n is a, c, g, or t
  misc_feature (899)..(899): n is a, c, g, or t
  misc_feature (1056)..(1056): n is a, c, g, or t
agaaaacataacaatatattactaacattaataacaataatgtaaaaggttaaaatataataccacttgaagggctttctacattgaaatactcaagggaacatgaggaaagatggccatccagtctcctttgccaactgaggtgcagactgagttgtggaaggtgggtgttgatggaacccagcattacaatattgtgtagaactagtctcctaatatacctcactctgcaacttacggaagctgaggaagatcagaaaaagaccacactcctcactcagaatatttattatattctgccccatggggccttggcaggaaaagggacccaagctatacccctactccttttccaagctactttcctgaaccaagggacaggattctaagagaatcatgtatctcaaataagccagaatgtatctggggaagaatagccattaatttcctagacctgacactgggtttatttgtgtctgccaggaagacggggagtcagtgagaatcgtaaatggacctagatgaggggaaataggatgggcccttctttatcacagcttgagctcaaaaaggttgggatcaacaggtgtttaaaaaagagaggaggtaaaagggaggatgggcaggggatagaggaaggtcaggggctgggttcacccatatcacacagcattgtaggaagaagcagggtaaccatttgagttctcagcctggaacagggaggtgagggctcagcacctagagagaggagaatcctaaggcctctctttcaactctattgtgattagatgcaaaagccctttccctttagagaattcagaatggtctgtctgaaggcaagagagcatagtgacagacctgtagcccccagcccagggctgtttctccccattcntcanaagctctgccaggagaacttatagaaatacagagtcccaggtctctgcccctcctccccagatccaagagagggagtagagacaaggcacaaagaccctggacgtaaaggtgaacatcagtgtggccacatataacattattttgagaaaggaaagnaaagtgcatgccccaaaagggatgccttccttcaccttgcaggtagctggaactttgatagtggcagaaaccacaatggagtagggttcacagaaatggcctgtgaaacagaccctattcctagagagacagaggaaaaacctcagctggtatggcacaatcttgaatgggatgacagagggcagcgggcagacttctcccgcaggtgacactcctgcctcaggtcccaatggttctgctgactccagatgttccc

SEQ ID NO: 310521 - DNA, 426 bp, Homo Sapiens
  misc_feature (121)..(121): n is a, c, g, or t
ggcggggatagcaccgtttattaagaaaaatcaagacaaagaccacaggagggtcccttctaggacacagaggccaggcgtcccaaccccacagtctgggggccatctggcaggatggcancttgagctggatcttcaggctcctgcagatggggcagggtggtcatatccccctcctctctctctcagtcgtgagtcctgccttcccccacctaaggcactagctcttcctgagcaccagcggcatccgtccgtccgttgtctgttggaggagtccctgggccttcacttccagatgggtggggatgtggcctggggtgggcggggccgtgtgcggggccctatcagtgcttggctctgcctgtagcagctcctggtaagagttggggtgggccttcccttacagcccctgagggagggaccccc

SEQ ID NO: 310522 - DNA, 378 bp, Homo Sapiens
  misc_feature (327)..(327): n is a, c, g, or t
  misc_feature (337)..(337): n is a, c, g, or t
  misc_feature (351)..(351): n is a, c, g, or t
gcggggatagcaccgtttattaagaaaaatcaagacaaagaccacaggagggtcccttctaggacacagaggccaggcgtcccaaccccacagtctgggggccactgcaggatggcacttgagctggatcttcaggctcctgcagatggggcagggtggtcatatccccctcctctctctctcagtcgtgagtcctgccttcccccacctaaggcactagctcttcctgagcaccagcggcatccgtccgtccgttgtctgttggaggagtccctgggccttcacttccagatgggtggggatgttggcctggggtggggcggggcnggttgtcggnggccttattcagtngctggggctctgcttgtaagcagctcc

SEQ ID NO: 310523 - DNA, 489 bp, Homo Sapiens
aggacaaaaatgagttccacaaacatgtggagtttgatttccttattaagggccagtttctgcgaatgcccttggacaaacacatggaaatggagaacatctcatcagaagaagttgtggaaatagaatacgtggagaagtatactgcaccccagccagagcaatgcatgttccatgatgactggatcagttcaattaaaggggcagaggaatggatcttgactggttcttatgataagacttctcggatctggtccttggaaggaaagtcaataatgacaattgtgggacatacggatgttgtaaaagatgtggcctgggtgaaaaaagatagtttgtcctgcttattattgagtgcttctatggatcagactattctcttatgggagtggaatgtagagagaaacaaagtgaaagccctacactgctgtagaggtcatgctggaagtgtagattctatagctgttgatggctcaggaactaaatttt

SEQ ID NO: 310524 - DNA, 1259 bp, Homo Sapiens
tttggagttgttttttagaaagctgcagtttgtgaatttctcttgctttttaaaacagaatatttccaaaacttgggcatcaatgcttggtcttttataggtgggggatagaagactgggccatcttcacagactctcagaccccagctctcggcggccccatttgccagccagacttcctgcttgggggacggctgctcccccggctcggtgcagttttgcagctgctggtcttgcttagtgaggcacagttctatctgaccaattgtctgtacttcctcatcctggcttggtggaaggcactggattttgggtatcactccatatactctggcaagggcatctttaaaatctgcaacttggtagtaattgatggatggttttatccccaattttagaagcacactgttgaggtccagctccctgtagagttccaggcttctgccgaaagtacttcttctgggagttgagcgcatccacctgggcggcgcaggtcccatgcttttcccactcatgcttccagaagcggctgcgattgggaaacgagtgaattacgtcaggccagtatgccctcatttctggcaaaagatccttaatctcttctaaattgaagggccacgatctattacatccttcacttttatcgggccatagtccatgtattgtccagtaatccggagggtctctacagtcgttttgaattttctcgcatactgtctcaggccagtgctgaaccataattagttttttccactcatggttgtcacgcaggcgcttgtccgcaccgcccaggcaaagcaacgccaggcagaggcagcccagcagggccccgcgcagggctgcagggcgcatggtgccgacctgcggagagaacgctgccagctgccgctccggctcccacttcccacctgctgcccgaggaagacttccgggagaaacgctgtctccgagcccccgcgccgccgcgctccctccgctgcagcagcggccaccgggtgcgcccggagccctgggacggcctaaaccagtatctcgcgggccccgcgccgggctccgggaatggccgcagcagccctggcgacccgggcccctcggagctccccttcaggatcgtgcaccaagcgcgcacgtcccgggctctgcttcgcgacccacagcgaccccagctcctccgcgctgcagccgccgtccgcccacgaccacggtcagtcgcgttgctcccagcccagggcgccctgcgggcctgcaccggagcagag

SEQ ID NO: 310525 - DNA, 800 bp, Homo Sapiens
aagaagggttttttagaaaaaatttcttcgtggggcgcgagcggccccccaacaaaaaaactacttggagcccgcgagtccacacgaccagaggccgtcgcggccgcgcgcggggggggctggtcttcctcctgttccgccgcgccgtcgcccgccgctctcgcgtgggttggcctggcgggtgcccggctttctgtgcctggcgcggggggcccttcgccggggccgcttttggcccgttttttagaaagctgcagtttgtgaatttctcttgctttttaaaacagaatatttccaaaacttgggcatcaatgcttggtctttttaggtgggggatagaagactgggccatcttcacagactctcagaccccggctctcggcggccccatttgccagccagacttcctgcttgggggacggctgctcccccggctcggtgcagttttgcagctgctggtcttgcttagtgaggcacagttctatctgaccaattgtctgtacttcctcatcctggcttggtggaaggcactggattttgggtatcactccatatactctggcaagggcatctttaaaatctgcaacttggtagtaattgatggatggttttatccccaattttagaagcacactgttgaggtccagctccctgtagagttccaggcttctgccaaagtacttcttctgggagttgagcgcatccacctgggcggcgcaggtcccatgcttttcccactcatgcttccagaagcggctgcgattggaaacgagcctcgtgccgaattcgccacccaggcc

SEQ ID NO: 310526 - DNA, 951 bp, Homo Sapiens
ttttttacatacaaagtttggatttttattgaaatcttgttaggtatcaaacaaattctgctttcttcagataaaaatattctctcagatgtctccagataactgctaagtctaaattggtccttcaatgtcttatttttattgtcctcgtgaaatgttcatatacagttaagatgttcccaaaaggatttttatcgtgtaaaggagcgtacatgacgacctctaccactgcctccactaacaaactttcctcttgagcctccactgccgctatttgcactagcccaggaaggtccaagtcccccacgacctctagaagcacggtcccgaggacttgggcggtaacctgtagaactaaggggtcgtaatggtggaagagggcctctgttaaaattgctctggcctccacgactttcattgtaatttcctcgaggagtattctgagcactccaactggagcctcttgttccttcccgacgactgtagtttccttttgaagcaggtggtgtgaaaaacctattctgactgtggaaagcaccccgtcctcctctattgcctgaaaacccaccacgggaagaaatcttctgtgatactttgagtggccgttttggtggaggtattccatcttgaggaaccacttctttactttcagcagcaacaaagtcatccacatgcatagatggtggtctacttgtgttctgttttctctgacgaaaaatatcatgaggtcgtataccctgtccaaatcctcccctgccccttcctcttggtggtggcacaacatgagctcttttggcaggttcaatgtattcagattttccacttgacgttataaaggtctcatgcttgtgcttccccaagtttgaatcctttagtagtcttggttcttcctggagatgatggttctgacaaaaatgcctcgtgccgaattcgccacccaggcctcgctcc

SEQ ID NO: 310527 - DNA, 779 bp, Homo Sapiens
ttttggggtcggaagtggtttttattggggcggcagggggctgcgggcccggtgggggcgttcacccgatacaggtagtcagccctggatgtgggcggggatctcgggcctcccacttgtcccccgttgttgagcaacttctccttgttgtacagcagctcctcatgggtctccgtggagaactcaaagttggggccctcgacgatggcatccacgggacaggcctcctggcagaagccgcagtagatgcacttggtcatgtcgatgtcatagcgggtggtccggcggctgccatcagctcttggctcagcctcgatggtgatggcctgggcggggcagatggcctcgcagagcttgcaggcaatgcaacgctcctccccggatgggtaccggcgcagcgcatgctccccacggaagcgagggctcagcgggcccttctcgaacgggtagttgatggtggccggttcccggaacaggtagctcagggtcatgcccaggcctcggaagagctcagtccacagcagggtgcgggctgcccggtcagtcactgacttcatgtccatctcgggatcctgcatgttcacatacttgtaggtggctgccactgcactgctgtggaggctccggccaccaggaggtcctgcacgtgcagcctgggccagggcccgcagcagcataggcgtggtcaggcagcgcatcttgaagcgccgccgctacttgccttgccaagcaggccagtcaatcgggaggcggaggctacactgtaggacgctgccatt

SEQ ID NO: 310528 - DNA, 793 bp, Homo Sapiens
  misc_feature (62)..(62): n is a, c, g, or t
agcgcgcccaacgaaatggttatgaaagcttttgaggccggaggcggccgacagttttttgnttgccttctgactcatctttggggtggagtggttttattgggcagcaggggctgcgggccggtggggcgtcaccgatacaagtagtcagcctggatgttggcggcgatctcggcctcccacttgtccccgttgttgagcaacttctccttgttgtacagcagctcctcatgggtctccgtggagaactcaaagttggggccctcgacgatggcatccacgggacaggcctcctggcagaagccgcagtagatgcacttggtcatgtcgatgtcatagcgggtggtccggcggctgccatcagctcttggctcagcctcgatggtgatggcctgggcggggcagatggcctcgcagagcttgcaggcaatgcaacgctcctccccggatgggtaccggcgcagcgcatgctccccacggaagcgagggctcagcgggcccttctcgaacgggtagttgatggtggccggttcccggaacaggtagctcagggtcatgcccaggcctcggaagagctcagtccacagcagggtgcgggctgcccggtcagtcactgacttcatgtccatctcgggatcctgcatgttcacatacttgtaggtggctgccactgcactgctgtggaggctccggccaccaggaggtcctgcacgtgcagcctgggccagggcccgcagcagcataggcgtggtcaggcagcgcatcttgaagcgccgccgctacttgccttccc

SEQ ID NO: 310529 - DNA, 480 bp, Homo Sapiens
  misc_feature (24)..(24): n is a, c, g, or t
  misc_feature (37)..(37): n is a, c, g, or t
  misc_feature (43)..(43): n is a, c, g, or t
  misc_feature (49)..(49): n is a, c, g, or t
  misc_feature (73)..(73): n is a, c, g, or t
tgttcaataacgggttggttccgncggcttgccaatncaactnctttgnctcaaccctcgaatggttgaatgnccctggacggggcaagatggcccttgcaaaagcttgcaggcaaatgcaacgctcctcccacggaatgggttaccggcgcaagcgcatgctccccacggaagcgagggctcagcgggcccttctcgaacgggtagttgatggtggcggttcccggaacaggtagctcagggtcatgcccaggcctcggaagagctcagtccacagcagggtgcgggctgcccggtcagtcactgacttcatgtccatctcgggatcctgcatgttcacatacttgtaggtggctgccactgcactgctgtggaggctccggccaccaggaggtcctgcacgtgcagcactgccagggcccgcagcagcataggcgtggtcaggcagcgcatcttgaaggccgccgctacttgccttgc

SEQ ID NO: 310530 - DNA, 1429 bp, Homo Sapiens
ttgtaccgttaactggcaccttgagggttttttaaccgccgcctctgttttgttgtgtcttttccaagaacaggggccctcttttgtgccccagttatttcctgaactccgtgggttccaatgtgaagcgcccgttccttcagccctcccaaaaatggttgagcatttgtaggcgctgtatcccaccacttcccagcctggttgcattttatgtgtatccgctgtaatcgtgaacaagtttgtgaaaatgttctacccaaattgctggaatatgtcttgtcccgttccgaacccgaggaccctcatttcgtgccgtccctctgtcacgtgtgggtctgaggccttggggggccttggcttttgagtaaaacaggactgttgcgcggaagtgaatcaacgtggaagaactttctcaagggtggcttcaatagaaagcacctgttggctttgcttccttccctctcccttgggttcaccactgctctggggaaaggccagatgcccaatccgttgaggaatgcttcaaaccagcttttcgttttaggggcacccccatgggggaaggacctgtgggctgtcacccgacaacccacgtgagggccccctggctttggaagtgggcttcagaccccagttgaggccttcccttcccgccggaagttggccatgggccctgaaggtcttacgccaaacttcatgagagactctgggccacaaccacccagatacatcactcccaaatccccgactgacacagactgtgagagagtgaatgttcgttgctttaagccactacgtgtgggtgacttgttaaggcagcaacggatgaacacactgcagatactacttatgagccatttcaaataggcagtttctgtcagccattggaacactctcctagacttgcaacattctggagctgaaaggacgcctgggtcacctgtgccactccagctacagtcacagtaaccaagccaccagcatgatcaacatccgggcacggagcaggtttcagtgaggtttaatgcaacgtgcattaaaatatccaagctgttttcagaaacataagaagcctgaagctgagctgtgggtttcctcttgtccatcctgaggcttgggctgctccagatgcagcaggtgctgaggtgggaggagctagcaccaccaggcaccagagcagtctgtgaagggtttgtgtaattaattatccttcttaaacttgccattgatgtaaggtacccagtccaggatcagccgccaatcggtggcccacaccagccccacggcgcccacagcgccccatgtgtaggccgtcgggacccagttcttgaccagctcccggtagcgtgggcccaggaaccgggtcaccatcgcggcggagtcgcaccctcaggatgaccctgtccagctgacccggctacactgcccc

SEQ ID NO: 310531 - DNA, 1531 bp, Homo Sapiens
ggaggttcattggataggacctccaggatgggaaacttatttttttgaaaacagggtttccttccctttcagggagagattcatgcgggaccttaaactgtaggcaatttccagtgccacctgggcagtgatccttttctttgcaaaagtactgtctctttgggttccagtaagttggaccaccacatgcacatcattttcccctggaacctggtcactgactaacacagacaattgggactccagagcctcaagagccaggagagggcacagtacatacagagggagtcaaatgggatctcattttgagtcctgccttccgcacactcagaacggcagccccaaggcccggagtgtccaggggcttctggcctgaggtgaatctgccaggcccaagaaggcacaaaggtaggagcacagagagccccattcccacaggcgggcggcccagcagcaccagtggaagctcagctgtcctccagctgctctcggcagacagttcagtgcacagtttatgccctagctgaaaaagatctcccggacgtatttcagcacatcctcttcctcctcctcctcagggctcctgctacaggcagagctggaaccccccggcctctgggaagggctgaggcctggagccagtgcctgtttcccactgtcctcttcctcactgctgctcccagaacttgtgtgaggcgacacggagcagggaggggagtgctctgggttatcagcccccgccagggccggctgctcgcaggccttttcctgtttgcggctctcaatcaggattcccagagcaacatcaactatctcagcctcattcatgcagtacacagtccttgtcgcagggagtcagattcgcaggagtcttctgaccagagctgtcgcaccttgctgctgccactggcactgctgccattctcatcctcttgggggccttcattggtgccacattctttgtagccacctgggctgtcagccatgagggaaggaccctcgttttagtctcggattgtaaggtttccatctctgtaccttctcacaaagaagagtcagggcccaagcttaatgacctgttttttaattcaggaaggtaaatctcgttctctcgtcacacccggaattacaggtccatttgtcctcagtgggagcttgatctttgattcctgtgggaggcccagagggcgggtgagtgcggagcggaaggcgcgggcgaagcaccgcaggggcctcgctgaccccgccacacgccgggcagggctgcaacggctccttccgactggagcggccgcgcgctcctccggccggctactggcttccctgctctcaggttcccgtctccggctctcgtgccccttcttagcttccagagcggagccgggaggcaaattccaagcggttgtgggacccacgcctcacccggaactttaagccctgccgtctcgcctggcgcccaaactctgcggacctccactggccgcccgcctcttccggccccgcgcgctccagggtcccgcgggctcccgtt

SEQ ID NO: 310532 - DNA, 847 bp, Homo Sapiens
  misc_feature (193)..(217): n is a, c, g, or t
acccggggggttttttgccataggagaaacccagggtaatgacccccggtgtcccatgttgccctaaagagcacccggggggcccaaaaggaaaaggtttagaaaaggttttttcaagggccaaaggcgcccgacaatgttttttgggtgcggtgccaatatggggggtgcgtaggtgtcaacaaacttgtgnnnnnnnnnnnnnnnnnnnnnnnnngcacatgccatacacacgcagtcacattccagtgtgacaaatactccttcaccaggagacagcgctaccactccgggatcttgaagactctctacagagagcctaggcctggcagtcttcacagatgacacccaacagggagcacgtttattaaagtgggaaggggtggggtacaccccagggtgtatactgacagggacctcatgcaggcccagagctctgctgcaccctcttcatcagctcttcatcctgcatagacaactctgtcaactttttgcccatccgctcatggatgtccaggtacttagagacacatcggtccaggcacacagactcgcccttggagagctctgcttccttgtagtgaggaggcacacacttccggtggcaggcactggtcattctgttgtacatatcggccatcatctccacctccagctccgcagccagctgttgggccctgagaggatccatctcagcctagcaccgtggaagggatctccttctggcctcctaatccactgcctgggacggatcacaatgcccacggagaccccaacttctgacaaatactataacgttacccgcctcccgagaggctccagcggaagcacgtgggttacttccccc

SEQ ID NO: 310533 - DNA, 335 bp, Homo Sapiens
  misc_feature (47)..(47): n is a, c, g, or t
  misc_feature (50)..(50): n is a, c, g, or t
acatacacacacagtcacattccagtgtgacaaatactccttcaccnggngacagcgctaccactccgggatcttgaagactctctacagagagcctaggcctggcagtcttcacagatggcgcccagcagggagcacgtttattaaagtgggaaggggtggggtacacccggggtgtattactgacagggacctcatgcaggcccagagctctgctgcaccctcttcatcagctcttcatcctgcataggacaactctgtcaactttttgcccatccgctcatgggatgtccggggtacttaggaggacacatcgggtccgggggacacaggac

SEQ ID NO: 310534 - DNA, 278 bp, Homo Sapiens
atggtatttgctggccatgttttatttgtcctttttcttcaaacaggataaccaaagatacagacagtattcaataaaataaaatagatgaaacaaattctaagagactgcgatgccacatgctacgtttaacctaattttattcatgcttgccttgggatggggaatagatcattcagtaaaaacatacagtaaaaacaaaatgtcttatcatgtacaactttcaaactacaataatgatgtaccttaattacttccatgcacacagtctaacattg

SEQ ID NO: 310535 - DNA, 668 bp, Homo Sapiens
  misc_feature (617)..(617): n is a, c, g, or t
gagtgcgcgaagatgcgaaaggtggttttgatcaccggggctagcagtggcattggcctggccctctgcaagcggctgctggcggaagatgatgagcttcatctgtgtttggcgtgcaggaacatgagcaaggcagaagctgtctgtgctgctctgctggcctctcaccccactgctgaggtcaccattgtccaggtggatgtcagcaacctgcagtcggtcttccgggcctccaaggaacttaagcaaaggtttcagagattagactgtatatatctaaatgctgggatcatgcctaatccacaactaaatatcaaagcacttttctttggcctcttttcaagctgaaggcctgctgacccagggtgataagatcactgctgatggacttcaggaggtgtttgagaccaatgtctttggccattttatcctggtaaaggagctgtgggcttaataagctaatatttcgtgtgatagtttctgtaaagctctgggcacagggcattattatagttgggcagccaggtaactgatttaatctcatgtttgagttttctttgattgcatttggcttgtttattgtgagcattgaatacctctggaagcctttctaagtnttcctttaatggacctataggttttaattacacgaatactgcggattgttc

SEQ ID NO: 310536 - DNA, 346 bp, Homo Sapiens
  misc_feature (47)..(56): n is a, c, g, or t
aggtccctctcattttattaagtgttatgctgcacaatcacacgagnnnnnnnnnntccatcagcaagagatatacctttgcttaagttccttggaggcccggaagaatgactgcaggttgctgacatccacctggacaatggtgacctcagcagtggggtgagaggccagcagagcagcacagacagcttctgccttgctcatattcctgcacgccaaacacagatgaagctcatcatcttccgccagcagccgcttgcagagggccaggccaatgccactgctagccccggtaatcaaaaccacctttcgcatcttcgcgcactcacacttccaagcagtgaag

SEQ ID NO: 310537 - DNA, 748 bp, Homo Sapiens
  misc_feature (545)..(545): n is a, c, g, or t
aagagactttgtaagatgaggagagtgggtttaagagttagagggttgctgcaattccttattgagaggacagagctggaaggaattattgatcagaggttttacttaaagtccacgatgactccacagattctgtttgaagccactaccaaagaaagaattctcaaatgtttactgtagctaaagaaaaactgttgagaaagaaatgctgtaactctaatgtgctataaattcttctgaggcttgctgtgggctaatttattaatttaaaaagtattttttgtctttcttagggcctccttgaatctagtcactctagagatagaatacacaatcttgtcctgatgtttttacttgcaactcacaatcttgtttggtggtttagttgcaggtttcagagattagaccgtatatatctaaatgctgggatcatgcctaatccacaactaaatatcaaagcacttctctttggcctcttttcaaggtaattttcattttatggatgaactgattggaaggaatgtgttcatttttctgcctagttntgatggcgtgttaagttgatgggatgaaaggtaaggggttgttgaacaggcttgagccctaacaggagcccgctcagcccctcatttgatacgcctgcctctcaacccttccgatgcatctctctggtccctcttcccttcataggcaccatcctctccgccggccttccgccactttccctcgccgccggtctccctttccc

SEQ ID NO: 310538 - DNA, 1433 bp, Homo Sapiens
  misc_feature (426)..(426): n is a, c, g, or t
  misc_feature (1061)..(1174): n is a, c, g, or t
  misc_feature (1248)..(1313): n is a, c, g, or t
  misc_feature (1327)..(1352): n is a, c, g, or t
  misc_feature (1411)..(1411): n is a, c, g, or t
  misc_feature (1413)..(1413): n is a, c, g, or t
gcggcgtttgcttcactgcttggaagtgtgagtgcgcgaagatgcgaaaggtggttttgatcaccggggctagcagtggcattggcctggccctctgcaagcggctgctggcggaagatgatgagcttcatctgtgtttggcgtgcaggaacatgagcaaggcagaagctgtctgtgctgctctgctggcctctcaccccactgctgaggtcaccattgtccatgtggatgtcagcaacctgcagtcggtcttccgggcctccaaggaacttaagcaaaggtttcagagattagactgtatatatctaaatgctgggatcatgcctaatccacaactaaatatcaaagcacttttctttggcctcttttcaagaaaagtgattcatatgttctccacagctgaaggcctgctgacccagggtgatnaagatcactgctgatggacttcaggaggtgtttgagaccaatgtctttggccattttatcctgattcgggaactggagcctctcctctgtcacagtgacaatccatctcagctcatctggacatcatctcgcagtgcaaggaaatctaatttcagcctcgaggacttccagcacagcaaaggcaaggaaccctacagctcttccaaatatgccactgaccttttgagtgtggctttgaacaggaacttcaaccagcagggtctctattccaatgtggcctgtccaggtacagcattgaccaatttgacatatggaattctgcctccgtttatatggacgctgttgatgccggcaatattgctacttcgcttttttgcaaatgcattcactttgacaccatataatggaacagaagctctggtatggcttttccaccaaaagcctgaatctctcaatcctctgatcaaatatctgagtgccaccactggctttggaagaaattacattatgacccagaagatggacctagatgaagacactgctgaaaaattttatcaaaagttactggaactggaaaagcacattagggtcactattcaaaaaacagataatcaggccaggctcagtggctcatnnnnnnnnnnnnnnnnnnnnnnnnnnnnnnnnnnnnnnnnnnnnnnnnnnnnnnnnnnnnnnnnnnnnnnnnnnnnnnnnnnnnnnnnnnnnnnnnnnnnnnnnnnnnnnnnnntaatagctgggtgtggtggcatgcgcatgtagtcccagctactcagaaggatgaggtgggaggatctcttgagnnnnnnnnnnnnnnnnnnnnnnnnnnnnnnnnnnnnnnnnnnnnnnnnnnnnnnnnnnnnnnnnnnaccctgtctcaaannnnnnnnnnnnnnnnnnnnnnnnnnaaaccagagctgacaatgacactctggaacattgcataccttctgtacattctggggtncntggatttctactgagtggat

SEQ ID NO: 310539 - DNA, 721 bp, Homo Sapiens
  misc_feature (214)..(500): n is a, c, g, or t
cggcccaatcttttttctcatatgcatacacatacccagtcttggagataatcccaaaaggaaggaaaagagagtcatagttcatagtttattacaaatgcatattatccaactcagtagaaatccatgtaccccagaatgtacagaaggtatgcaatgttccagagtgtcattgtcagctctggttttacatatatattaaatgtatatatgnnnnnnnnnnnnnnnnnnnnnnnnnnnnnnnnnnnnnnnnnnnnnnnnnnnnnnnnnnnnnnnnnnnnnnnnnnnnnnnnnnnnnnnnnnnnnnnnnnnnnnnnnnnnnnnnnnnnnnnnnnnnnnnnnnnnnnnnnnnnnnnnnnnnnnnnnnnnnnnnnnnnnnnnnnnnnnnnnnnnnnnnnnnnnnnnnnnnnnnnnnnnnnnnnnnnnnnnnnnnnnnnnnnnnnnnnnnnnnnnnnnnnnnnnnnnnnnnnnnnnnnnnnnnnnnnnnnnnnnnnnnnnnntgattatctgttttttgaatagtgaccctaatgtgcttttccagttccagtaacttttgataaaatttttcagcagtgtcttcatctaggtccatcttctgggtcataatgtaatttcttccaaagccagtggtggcactcagatatttgatcagaggattgacagattcaggcttttggtggaaaagccataccagagcttctgttccattatatggtcc

SEQ ID NO: 310540 - DNA, 657 bp, Homo Sapiens
  misc_feature (29)..(29): n is a, c, g, or t
  misc_feature (53)..(53): n is a, c, g, or t
  misc_feature (92)..(92): n is a, c, g, or t
  misc_feature (133)..(133): n is a, c, g, or t
  misc_feature (146)..(147): n is a, c, g, or t
  misc_feature (158)..(158): n is a, c, g, or t
  misc_feature (196)..(196): n is a, c, g, or t
  misc_feature (224)..(224): n is a, c, g, or t
actattcaagaaattctccacgtatttanggtcatttaagaattcatgaaccntaagctgttcctcctttacaatgcaaacctgtaaaatanaatctaatttagcaaaataactgagaaatataaaatttcanttagaaacatgannagagtaattanaaagaatcactatcacagccttactgcaacactgtgtnctgtggcatgcactgctgatagccaacnattcaacacgtatttgaatactttacatgccaagaaatagcctgtgtgtgtatatacagaaatgatcagaatactctaatgacaaaataaaccagataaaggtctttgctttttacttagtagaaaacaaatcatgttgcctttaaatacaattttaaaagcaatctcaaggttacacataaagcacccaatcactcacctccaagagaaactggcagatgttttttctttggtcaccttgaagctgaataacctctccgtattcaggatgttcaatcacagtaccattacaggcaaatttctggaaaagtgcataaatatacaacaaaatttagtcaactactatgaggttttatttcaccgtatgaacagaattaaccatttcagtaagctagatcatatttagagaaacagattttgtctcctataatcc

SEQ ID NO: 310541 - DNA, 1699 bp, Homo Sapiens
  misc_feature (158)..(170): n is a, c, g, or t
  misc_feature (564)..(573): n is a, c, g, or t
  misc_feature (650)..(659): n is a, c, g, or t
  misc_feature (684)..(699): n is a, c, g, or t
  misc_feature (852)..(860): n is a, c, g, or t
tgcccccgggtcgtgtttgcccgcgccccttttttcacccgcttatattatcgccagagatagcggagaattcgggcgcgcggacaaagacacctgcaccccaggtttccccacaaatgggcgcgtcgtggaggaagacagccgtgtttggtggtcannnnnnnnnnnnnacgtagtaagcgggggccccccaactttgtatgttctgagcgggcggggcacatacaaataacaaatcttctctaaaccccccctgttgtgccctcccgtgggccaatatatttttaccccacagggggcgccaaagggcggatgaaggcccccgggccgcatggagcggtttcaataatctccgggttggggaggggttttccacatctggggcggggaggattttgaggggaaggttccacgcgtgatttttgttaagcaggcccagggcgcggggggcgaaattttagatttgaagcccccgctgggacccccgcttaataaatccccgaaaaatgcctccgaaaccccccttggattattttctgagccggccgcttgcccccccggggnnnnnnnnnngggggaaatccaacccgtgtgtctgtgccggaattttttggaaaacaacttgggaaagttttctttccttctggggnnnnnnnnnnaaaaaaagtgtttgaaaaccttttnnnnnnnnnnnnnnnncgcacggttttttttctttactgggatctttttttcgggttcctggtttcgttaggggattttttggtaccatatgttaattcgcggcgcggggcgggtgttttttcttttgcttagatttgggagcataattgctcacaaagattcatagannnnnnnnnattgttaagctgcaacgtacatggtttaatacaacaacaaaaaaaatttaatcaagtgaaacgtaataaactgaacaataaacactcaaaacattttccattggaaacatgtaaagacaatatgaggttttgttaccatcttactgcaattttcttatgtgttactagtctacataccccatgttttctgtaatcatgcagatgtgaatggaagtttgaatgattaaataaatgaaaagtccgtttactgcagggaatcatttcacaaggcagccaaaccgggtttagagaacaaaactattcaagaaattctccacgtatttaggttcattttagaatccatgaaccttaagctgttcctcctttacaatgccaacctccaagagaaactggcagatgttttttctttggtcaccttgaagctgaataacctctccgtattcaggatgttcaatcacagtaccattacaggcaaatttctttttgaaagctttcacaagtttctttttgtcataatcatctgcaatgccctgaacagtagtcagtgtctttctgccgttccgttgctggattcttatatgaatgtaatcctcagtccctgccgggagtaagtcgtcacccttagttgcatcagcaaaggggtcgaaagattggaggttctggatagtggacatgcgatactagtgtgaggccggtgaggggataaaattcctgcggggcccgcccggatcaccttgtcaggaggctgtagtggcgagaaaacggaaataaataagaaaacgcttcgccctggggttgggattaggctggagtggcggcggcggaagccgggaggaggc

SEQ ID NO: 310542 - DNA, 1558 bp, Homo Sapiens
tgcatttggaatcaaatacctttcgattgccaagatttctatttttggatgtaattttaactacagaattcagcgcttgtcgagactgtatataagccaatcctttccgtgaaacaatctcccttaaacagtacatatgtgttgcagtaaccaacagatgactgggaaacatgtgtccactttcttttacttctttacaaggaaaatgatgtttgacatctggtttgtttatccaagtctgaatgtttacaacctcttttctatcatcatctgacattgaagaactgtcaatttcatctgtgtcgtattcttcttcatccccaatgctgaaaacaggctttacgccacggtaaggcttgcccactctgtcactgctgctcacatgccgatccacaggagttgatgtattctctataaaactgataactttttccctgacattaacggattttgtcttcaaagccacagtcattttatttactagtgatttcattcctctatcacttgagccattaggagattcaccatcaacagaattgatactgctccttgagcctgaggtactagcaatccaatggccatatccattttctggtccatccacattaatgtctgccaggtgctgccataaatcctccactggcaatactcacatattctttgtttttctgtaaaaagtgtgccaggaccatgttcatatacatgtcttcttcctccctgccactgcccataaaacagaggtgctccccaccagctatggagccagactcaatggactgcttctgtgcttccagcaaggattttactgactgtgcaaactcagatggattctgaagcatcaggtctgaatccaagtggaaagcagttgataaatgcccagcattatattgttctgcaggacggcaatccaccacaaagaaccggactccttccccttgtagctgattcgcttgaagggtctctgacacggagatggccagacaaagagcctgactcagatctgcatcatcatccttaattcccaacaaagtactaccaaagagatggtgattatccttcctaaaagaagccggtgttttgctgcaataatactgagccagagagaaaaggtcttctatatcttctatattcagactggatggagtattttccaagaactctgaaatattatagactgataacctcttctttgctgtctgactcttgtgttaaaataacttcttttgcattaacaaggataattaacattaagaaataaataaaaaacggatctgcttgttgtagatatccatcccatattgcctgagtgacttcagtggaacagtaacatgcaaaaagacttccaagcttaatcttagtgtatgaaatccaaaggcaaaacatgtgaattcaagggacaatggagccacatattaactgtgtgacttaggacatgtcaacctctttaaagcttccatttttacttccagttgagtgcataggagtctggagtaattttctttgtatcaagataagaacaaagctcaggctcatggtattggatgagcaacctgaagag

SEQ ID NO: 310543 - DNA, 1291 bp, Homo Sapiens
  misc_feature (1205)..(1213): n is a, c, g, or t
ctccacagttattgttttattcttgttctcttgtgtcgtttacagtgtctctcacaaaagaagaactccctctggcaggggatgtgactagggactcattgggccagcaacaaccacaaaagaatctaggcattagaatgaactactggaacctgagtcaaagacctgttagtgataatttgcccattttctggcctctagttgcttgaataggggtaagacagggaaatattaaatgattgtgtactgagatggagacgtggaagatctggccctgatggaggatcagagggagcaggttgggtgaaagcccggttttaagcctcttgttctagggaccacgttgagtgacagggtgggaaaagatgcatcaataaggaaatgtggcagtgttgaagagggacccagctgtggacagggaggagggacagggtgctgaacacgcctgagagaattcttccaggtggcaagggtggggaaaggggtggatgcattcattctgtccactccttcttaatcgacaggttccactcccagctgaggtggtcttgcttgtcatcgtcggtgaagaaggacttgttgtggtacgtgcctcgggccagcatgcccttgggagcctcctcaactggagtgaggaactcatactcctcaggccgaggtccatagctgccaaccataaatgttgctttatccactttcaccccagtcctgtaggtgtgctgaacgtatttcaggcctgacacaatatccctgttcactttgaagtgaattttgactctatattcagaaccttcctttaacacaatggtttcctttttgagggcttccagatctccagtaaggtccatggtgattggtcccggggcactctcacaaaccagggtgagccgggtgacaacgacattgggggctttcggatctgtcaccacaggaccatctcccagcagcgttttcttgtacttaattagactctcatcatctttgtccatttcctgcagctctttcagggacttctgtggtggaggcttataattgagcttgctgtccagctcatcatcgtcatcctcctccacatgtggctctggggctttttcagtcattctgatctatttattcagtgcttcacgtctctgtccggggtgcctctgtctctcaactctgacttctgagtactggcagttagaacaggaaggaagtcaatgagnnnnnnnnntgttttagacctacttgaagaggaaaccctgggctgtctcaaatcctgttcctttgcactgcctatctcttgatcccc

SEQ ID NO: 310544 - DNA, 836 bp, Homo Sapiens
agattgccatccaattaaggggaaaaatgtggccagtgttgaaggaggggaccccagctgtgggaacagggagggaggggccaggggtgctgaacccggcctgagagaaattcttccaggtggcaagggtggggaaaaggggtggatgcattcattctgtccactctttcttaaatcgacaggttccactcccagctgagggtggtcttgcttgtcatcgtcggtgaagaaggacttgttgtggtacgtgcctcgcgccagcatgcccttgggagcctcctcaactggagtgaggaactcatactcctcaggccgaggtccatagctgccaaccataaatgttgctttatccactttcaccccagtcctgtaggtgtgctgaacgtatttcaggcctgacacaatatccctgttcactttgaagtgaattttgactctatattcagaaccttcctttaacacaatggtttcctttttgagggcttccagatctccagtaaggtccatggtgattggtcccggggcactctcacaaaccagggtgagccgggtgacaacgacattgggggctttcggatctgtcaccacaggaccatctcccagcagcgttttcttgtacttaattagactctcatcatctttgtccatttcctgcagctctttcagggacttctgtggtggaggcttataattgagcttgctgtccagctcatcatcgtcatcctcctccacatgtggctctggggctttttcagtcattctgatctatttattcagtgcttcacgtctctgtccggggtgcctctgtctctcaactctgacttctgagtactccc

SEQ ID NO: 310545 - DNA, 483 bp, Homo Sapiens
  misc_feature (25)..(25): n is a, c, g, or t
  misc_feature (125)..(125): n is a, c, g, or t
accccaaatcctgtaggtgtgccgnaacgtatttcaggcctgaacacaaaaatcccctgttccactttgaaagtgaaattttggactcctaatattccagaaccttccctttaaacacaatggtnttcctttttgaagggcttccagatctcccagtaaggtccatggtgattggtcccggggcactctcacaaaccagggtgagccgggtgacaacgacattgggggctttcggatctgtcaccacaggaccatctcccagcagcgttttcttgtacttaattagactctcatcatctttgtccatttcctgcagctctttcagggacttctgtggtggaggcttataattgagcttgctgtccagctcatcatcgtcatcctcctccacatgtggctctggggctttttcagtcattctgatctatttattcagtgcttcacgtctctgtccggggtgcctctgtctctcaactctgactt

SEQ ID NO: 310546 - DNA, 663 bp, Homo Sapiens
tttcaatgttcgtttgcccaaatcaactttggcatactcttcaacaattttcatgtgttcttctggattgtagccattccaccgatccctcttcccatcatagtcaaacatcagttgaggctggacatgttcatctggagctatattagtacctgtaaatttggctccaactcgcctaggtctctcaaagcagtctttctttttgtgtgtcatggccccacaattttcacatgctcctttgcggtacttagtaattatggaattctcttttacacccctcttgtaccattctccagatgagctgaactgcttttgtttttctggttgtggtctctggtgttttaaagtaggtctttttgaaggatcaatataccatggcactgaagaaatatactgaggaatatgggggttgatgtcttttccttcttcatcaacttctgcaggagcattgcccaattttcgctgttcttctagctccttcttctttctccagtcctctctggtcatcttctttggttcttccaaactcatttctttggaccccgataggggtgcagcattaactgcatctacaactgtggctgacatggttatctggcctcctccagccccgccgcagctagccccaagtccatccgacagaatccaagccaatctcgtaat

SEQ ID NO: 310547 - DNA, 896 bp, Homo Sapiens
  misc_feature (880)..(880): n is a, c, g, or t
gcagcctgtcgcttgccgggcagctgttgagtcggtgacctgtcctgtgaggagcagtgaggagaatgaataccttccaagaccagagtggcagctccagtaatagagaaccccttttgaggtgtagtgatgcacggagggacttggagcttgctattggtggagttctccgggctgaacagcaaattaaagataacttgcgagaggtcaaagctcagattcacagttgcataagccgtcacctggaatgtcttagaagccgtgaggtatggctgtatgaacaggtggaccttatttatcagcttaaagaggagacacttcaacagcaggctcagcagctctactcgttattgggccagttcaattgtcttactcatcaactggagtgtacccaaaacaaagatctagccaatcaagtctctgtgtgcctggagagactgggcagtttgacccttaagcctgaagattcaactgtcctgctctttgaagctgacacaattactctgcgccagaccatcaccacatttgggtctctcaaaaccattcaaattcctgagcacttgatggctcatgctagttcagcaaatattgggcccttcctggagaagagaggctgtatctccatgccagagcagaagtcagcatccggtattgtagctgtccctttcagcgaatggctccttggaagcaaacctgccagtggttatcaagctccttacatacccagcaccgacccccaggactggcttacccaaaagcagaccttggagaacagtcagacttcttccagagcctgcaatttctttcaataatgtcgggggaaaccttaaaggggtttaggaaaattggctcctcaagagtggaaaattcaagttattcnaaagtgttaacaggcc

SEQ ID NO: 310548 - DNA, 795 bp, Homo Sapiens
  misc_feature (112)..(112): n is a, c, g, or t
  misc_feature (140)..(140): n is a, c, g, or t
ctgggggttcgttgctgggtatgtaaggagccttgataaccactgccaggttgctcccaaggagccatccgctgaaagggacaggtacaataccggatgcggactctggctntgggcatggagatacagcctctcttctncaggaaagggcccaatatttgctgaactagcatgagccatcaagtgctcagaaatttgaatgttttgagagacccaaatgtggtgatggtctggcgcagagtaattgtgtcagcttcaaagagcaggacagttgaatcttcaggcttaagggtcaaactgcccagtctctccaggcacacagagacttgattggctagatctttgttttgggtacactccagttgatgagtaagacaattgaactggcccaataacgagtagagctgctgagcctgctgttgaagtgtctcctctttaagctgataaataaggtccacctgttcatacagccatacctcacggcttctaagacattccaggtgacggcttatgcaactgtgaatctgagctttgacctctcgcaagttatctttaatttgctgttcagcccggagaactccaccaatagcaagctccaagtccctccgtgcatcactacacctcaaaaggggttctctattactggagctgccactctggtcttggaaggtattcattctcctcactgctccaggtccgagtgcctctccaggcgatccgaggagaccttgggtggactgagacacggccccacactaacctacggcccaaaggcagagttctcgcgacaacccc

SEQ ID NO: 310549 - DNA, 895 bp, Homo Sapiens
tggaagagaaaaattgcccagggtctctgtggaagagaatttttggaacttgtttctcccaagaggttcttgcttttgagggtaaggcacaattccctggggggttcggttgcttgggtaatttaaaggaagccttgataaacccccttggccaggtttgctttcccaaagaagccatttcggtgaaaagggaacagttacaataccgggagggtgacttctgttctggccagggagatacagcctctcttttccagggaaggggcccaatatttgttgaactagccatgagcccatcaagtgctcaggaaattgaaatggttttgagagaccccaaaatgtggtgatggtctggcgcagagtaattgtgtcagcttcaaagagcaggacagttgaatcttcaggcttaaagggtcaaactgcccagtctctccaggcacacagagacttgattggctagatctttgttttgggtacactccagttgatgagtaagacaattgaactggcccaataacgagtagagctgctgagcctgctgttgaagtgtctcctctttaagctgataaataaggtcccacctgttcatacagccatacctcacggcttcctaagacattccaggtgacggcttatgcaactgtgaatctgagctttgacctctcgcaagttatctttaatttgctgttcagcccggagaactccaccaatagcaagctccaagtccctccgtgcatcactacacctcaaaaggggttctctattactggagctgccactctggtcttggaaggtattcattctcctcactgctccaggtccgagtgcctctccaggcgatccgaggagaccttgggtggactgagacacggccccacactaacctacggccccc

SEQ ID NO: 310550 - DNA, 402 bp, Homo Sapiens
ctctttgtgttgagattatgggtttgtgggcttttttaatataaaattctttatttttaaaattttctatgataaagagttccttattttctaaactttctatgatgaagagactattaataaatatgtttccagactgcaaccaaaaagttaacaatgacacatagtactactgattagtaactaactccacctactgctgtgtctactgtaggaaacaataaaagcagcaacagacctgactgttctccaagggctgcttttgggggtaagccagtcctggggggtcggtgctgggtatgtaaggagcttgataaccactggcaggtttgcttccaaggagccattcgctggaaaggggacagctaccaataccgggatgctgacttctgtttaatcacc

SEQ ID NO: 310551 - DNA, 1146 bp, Homo Sapiens
  misc_feature (324)..(324): n is a, c, g, or t
  misc_feature (615)..(630): n is a, c, g, or t
tgatgattgattgatgattgatagtaaattatttcaggctttgcaggctataaagtgctgcagctccttagctttgctgttgttatagtgtagctggagccatagacagttagttagttagttatgagtgagcacagctgggtgccagtacaattttaatgatcaagactcgtggcaggcagaacaaaccatcatttgttgatcctctgcttgaaagcacgaataagtgagaacagagcagtcatatggtttcagaaagtggttattctgggatttccaggattaaattttgtaaaactactaacaaaacaccccccaggaaanctattttggtataagaaacgacatatccctaaatagtgcttatttaacttcattataaatacatctacttaacaaaaaaatatattttgtgatcttgaggtcacttcgtttaggtcattatctcaacccaacctccccaaactctggtttgagccaatatgtgttctattgttctcagagcaccagccgactgtacaacaattgttgttataaaaatgtttattgtttaccaaaaccagtggacctcttatcaaatgctgcttggtaacaaaatctatcacagttttaatnnnnnnnnnnnnnnnngaagctaactatttgtctcattgtcattagttagactttctgcaaggtcacttaatccagacttattcagtgcattaatcagattctcaggtgttgcatgaactccctcttgatcttgccaggcaaccaggagctgcttagctctcatcttcatgtcttcactgtcacactcaatctgcctaatttctgagtctttcatttccaagtagggagccagaatcttccattgttcacccagcttgttggcaaatacctctatttgttctcctgttacaggtttgtctcgccgaacatcaggactttcattttccttcagtagagcatcattatcttcctcatcttcatcctcacctgtttttatttcttcagaaggaggcggtaattccttggctagctttattaccatattttcaagatattctggtaaacttttaaactgctggttggttggctggaagaagtgagggcttctccgtgctaatagtctcagggctctccaaccataatttgaattgt

SEQ ID NO: 310552 - DNA, 889 bp, Homo Sapiens
  misc_feature (727)..(818): n is a, c, g, or t
ttttaaaattaagacaagtttattgagtaaaaaaatgcatacattggaacggcaaaacatcaataaggccctaaaacaaaaaatacagttatgctttaacaaattcttagcaatgtggcccacgctttttaaaaaattgacgtgttggcagtgtttgttagaacattgacgtacatcccaaatagtaataaattcagtatgaaattatacgcataaccttactcaccatactactttttctcccaaactattgtgacttctttttgctctctgattaaaacaaacaggtaacatccttacacctttgctccatcccttgggctttaaaaagaatggctgtagttagttttgattcactatatactctctgtacttgaggaagagtaagctgtgtttaaaagtgcccttttccatgtcgtcatgtaccaataccctctgcatttcaaaatgttgactcagatgtttttccctctacagaactagaaaattgtccccccactttggtctatttactcatttgaagacaaaccagggttactaagagttttacataagttatttctttagagtgacgaagtgttagtttacttcttgcttagtggagacaaaaattgtgagataaagaggaaggaataggatgtacacatttacccatcaatatagcacccagtgttatttcagcaggacccttctgttagcatctaaggtaaggttaggacagtcaagnnnnnnnnnnnnnnnnnnnnnnnnnnnnnnnnnnnnnnnnnnnnnnnnnnnnnnnnnnnnnnnnnnnnnnnnnnnnnnnnnnnnnnnnnnnnatcaagaccatcctggctaacacagtgaaaccctgtctctactaaaaatacaaaaagttagttagttagtt

SEQ ID NO: 310553 - DNA, 730 bp, Homo Sapiens
ggaaggtgggatcttgggggcctgggcctaggctccatggtaggccagagagtctagactttctctgccaattttttccctttcccatttctatctggttagggaacagcccgttttgaagggtatcctcctcctggccatcacaacccctttccccagcacattctggagcttcaaggtactcataaaacttgtgtttattgaatttcagcctctgtggcttcttcaataaaatgttggctcccatgccttcaactcttctttgggcatgagaccagtgggttggaggatggggagtgtgggggttgggatgacatgcattgccctgcagggtgcctcggaggtagcagggccagccatgagaacaaaaagctctgttctttttgtcccttgggcctggcattggcagtcctagcaccacacagtggacagcatgcccaccagccccattggtaccagaagtctcatatgctagtcctttctttagcaccatctctagaagaagcagaagcaccttattcagtaactcatttgagcatggcaacagatcctatggtagggcctcccaagaggcttcattatccatttgggaggatgaacagactgaggcccagagaagggaaagccacatgcccaaggtcacacagcaagttaatggtgaaggttttatcagagcccagggcagactcagtggcttcctatccagggctcttcctcgtgccgaattctt

SEQ ID NO: 310554 - DNA, 927 bp, Homo Sapiens
  misc_feature (249)..(426): n is a, c, g, or t
  misc_feature (708)..(708): n is a, c, g, or t
ctttgggcatgagaccagtgggttggaggatggggagtgtgggggttgggatgacatgcattgccctgcagggtgcctcggaggtagcagggccagccatgagaacaaaaagctctgttctttttgtcccttgggcctggcattggcagtcctagcaccacacagtggacagcatgcccaccagccccattggtaccagaagtctcatatgctagtcctttctttagcaccatctctagaagaagcagnnnnnnnnnnnnnnnnnnnnnnnnnnnnnnnnnnnnnnnnnnnnnnnnnnnnnnnnnnnnnnnnnnnnnnnnnnnnnnnnnnnnnnnnnnnnnnnnnnnnnnnnnnnnnnnnnnnnnnnnnnnnnnnnnnnnnnnnnnnnnnnnnnnnnnnnnnnnnnnnnnnnnnnnnnnnnnnnnncagtggcttcctatccagggctcttccccacagctcgtcaccactgccccaacccaaggggcacctttatttacagaatcctccccaaccgtgagaggggtgcccagcagcccactgcattctgggaagtcaactgttcctagaagcctaatactcaaggatgtatgagcagagggagcgggttgtggcagctactccgtccctaggcagagggttcgatactcccagcttgagttgcagggcgtgcccttctgctctcccagcctctgctgcagagcttcntgtggagggcctgcctccactcccacttagttctgaacatgcttcatgggctatctctccctcatgaagactggtaggggcactctatctctccacgtcatggatggtctgtggcagctgtgcatgcctcgtctctgtcagcagtagggcggtgccgacagtcagcagggcgatcacgccataagtatagcttggacagttacagcctctctacatcca

SEQ ID NO: 310555 - DNA, 467 bp, Homo Sapiens
  misc_feature (134)..(134): n is a, c, g, or t
  misc_feature (294)..(294): n is a, c, g, or t
ggcgtgaggaggaccagggttgtgggtgcgtgtatgtaggaagtgttgggttaaggacacgtgactaacaagccccatacccccagatcagttgcaggcttcctcacctgaagcaccgtagggtacaaactctngaagtgaacaggtaggcagtggtgaaggcagcttcagaaaaagctttccccatcactgccaggacagtgctccaggacttcatatcagaggacactagcagtctagtgccgaacgccagggccgtgcccagcagtgtcccggcttgcgtgaggcggcgtncctgcgtagcgcaccgacaagtagaccagcagcttggagggcagttccacagccccgaacaacagctgtgtctggtacacgttcagccccagccccgacacatccagactcaggccgtaataggagaagttcactccgaacctgaaaggagtctcagtgctcactgtgccgaa

SEQ ID NO: 310556 - DNA, 1387 bp, Homo Sapiens
ctcataaaccttgtgtttattgaatttcagcctctgtggcttctttcaataaaatgttggctcccatgccttcaactcttctttgggcatgagaccagtgggttggaggatggggagtgtgggggttgggatgacatgcattgccctgcagggtgcctcggaggtagcagggccagccatgagaacaaaaagctctgttctttttgtcccttgggcctggcattggcagtcctagcaccacacagtgaccagcatgcccaccagccccattggtaccagaagtctcatatgctagtcctttctttagcaccatctctctttctctcccacgtccttggatggtctctggcagctgtgcctgcctcgtctctggcagcaggagggcggtgccggcagccagcaggcgatccccccataagtaagcttgggcagtgacagccacactccatccagcaaggccgccagtggggccaaagagccccccagccggcccaccagtgcagtcagccccatccctgtctgtctgagcaccgtagggtacaactctgaagtgaacaggtaggcagtggtgaaggcagcttcagaaaaagctttccccatcactgccaggacagtgctccaggacttcatatcagaggacactagcagtctagtgccgaacgccagggccgtgcccagcagtgtcccggcttgcgtgaggcggcgtcctgcgtagcgcaccgacaagtagaccagcagcttggagggcagttccacagccccgaacaacagctgtgtctggttacacgttcagccccagccccgacacatccagactcaggccgtaataggagaagttcactccgaaccacaccaccacgcagcacagtgagatgtgtcggagccgtggtgtgcggaacaggtctaggtatgaaggtcttcggaccacccgttccccggcggccactttgctccacacctcctggctgaagctgtcctcacacactggccgcccattgagcctggcacagtggagcaagtacctgtgggcctctttcacatggccttgggtcagaagccagcgtgcagactcaggcacccacctaggaataggcagaaggtccatcagccagaaagtcatgaccctaagccacatgttcctggacatactacaggctctcaacttccaggctcttgctcatgtagtccccttagcctggaacatcatctcctccccaaagccctccacacttgatgagctcttattcatcttttaatgcccagtttaaaagccacctctgggctgggtgcaatggcccatgcctgtaatccaaacacttttggaggtcaaggcgggagggtgggtttgagcccaggagttcaagatcagcctgggcatcatggcaag

SEQ ID NO: 310557 - DNA, 1064 bp, Homo Sapiens
ggcccttccctcgggcctcaggacctcactcaccaccccatctgccctgcaggatgccacagctgagcctgtcctcgctgggcctttggccaatggcagcatccccgtggctgctcctgctgctggttggggcctcctggctcctggcccgcatcctggcctggacctataccttctatgacaactgctgccgcctccggtgtttcccgcaacccccgaaacggaattggttcttgggtcacctgggcctggtcacccccacggagcagggcatgagggtcctgactcagctggtggccacctacccccagggctttaaggtctggatgggccccatcttccccgtcatccgtttttgccaccccaacatcatccggtctgtcatcaacgcctcagctgccattgtaccaaaggacaaggtcttctacagcttcctgaagccctggctgggggatgggctcctgctgagtgctggtgaaaagtggagccgccaccgtcggatgctgacgcctgccttccatttcaacatcctgaagccctatatgaagattttcaatgagagtgtgaacatcatgcacgccaagtggcagctcctggcctcagagggtagtgcctgtttggatatgtttgagcacatcagcctcatgaccttggacagtctgcagaaatgtgtcttcagctttgacagccattgtcaggagaaacccagtgaatatattgccgccatcttggagctcagtgcccttgtatcaaaaagacaccatgagatcctcctgcatattgacttcctgtattatctcacccctgatgggcagcgtttccgcagggcctgccgcctggtgcacgacttcacagatgccgtcatccaggagcggcgccgcactctccctagccagggtgttgatgacttcctccaagccaaggccaaatccaagactttggacttcattgatgtactcctgctgagcaaggatgaagacgggaagaagttatctgatgaggacataagagcagaagctgacacctttatgtttgagggccatgacaccacggccagtggtctc

SEQ ID NO: 310558 - DNA, 1212 bp, Homo Sapiens
gagtagatatctaggatggaatacaggactgtggaacagggtcttagggtcattctaggcttcacttttgatgaatcaggggtcattttagtggggtcagagtgggtctctgcagaactcagctcaggggctccacccgcagccaaagtccgccctctgcgcgcaggaccagctccggcttcctgcggggctcggtgtggtcaggcaggacgcggaagcgcagcagcgtgagccccaggaccaccttcatctccgccatcgcgaacgcctgcccgatgcagttcctgggccctgctgagaagggaataaaagccagaggtgacctctccttgatgttctctgggtcaaagcgaaaggggtcgtagacctcagggtccggccacacagctgggttgtgatgggttccgaaaacactgatgaggcagataatgcctttggggatgacccggccgtctgggagcacaatgtcttgggtgacagtggcgggagatggccgggactgggggatgcagcctcaggctctccttcatgcacatggtcaggaagggcaactgggccaggtcgtcccattcaatctctttaggatcacggtccttcagaagctcttgcacctcctgtcggcagcgctcctggtattctgggtgcctcgcaaggttgtacaggacccaggagagaccactggccgtggtgtcatggcccccaaacatgaaggtgtcagcctctgctcttatgtcctcatctgacaacttcttcccatcttcatccttgctcagcagaagcacatcaatgaaatccaaagtcttggacttggctttgtctttgaaaaaatcatcaataccctgagtggggagggtgcgacgccgctcccggatgacagcgtctgtgaagtcatgcaccaggcggcaggccctgtggaagcgccgcccgtcatgggagaggtaatacagaaagtccatgtgctggaggatatgctggcttcttttctctacaagggcactgagctccaagatggtggcaatatattcactgggcctctcctgacaatggctgtcaaagctgaagatgcatttctgtagactgtccaaggtcatgaggctgatgtgctcaaacatgtccagacaactgctgccctctgaggccaggtgctgccacttgtcaagcatgatgtttgcactcttgttgaagatcgttatataggacttcaggatgttg

SEQ ID NO: 310559 - DNA, 1007 bp, Homo Sapiens
  misc_feature (741)..(779): n is a, c, g, or t
tttttttggtgacagcaccgttttattcatgacaatctgcaaaaaaacaggtggatgggtcagaaagtcactgcaagcctacattcaggggctccacccgcagccaaagcccgccctcggcgcgcatgatcagttccagcttcctgcggggctcagtgtggtctggcaggaaccggaagtgcagcagcatcaacgccaggaccactttcatctccgccatgggaaacgcctgcccgatgcagttcctgggccctgcggagaagggaataaaagccagaggtgacctccccttgctgttctctgggtcaaagcggaaggggtcgtagcctgcaggatccggccacacagttgggttgtgatggacccctataatatcgatgaggcaggtaatgcttttggggatgatgttggattttcctgatcaatgccctgggtgcagcatcgggagatgaagggagctgggggatgtaacctcaggctctccttcacgcacatggtcaggaagggcagctgggcccaggtcgtcccattcaatctctttaggatcgcggtccttcagaagctcttgcacctcctgtcggcagcgctcctggtattctgggtgcctcgcaaggttgtacaggacccaggagaggccactggccgtggtgtcatggcctccaaacatgaaggtgtcagcctctgctcttatatcctcatctgacaatgccttcccatcttcatcctgaagagaaagcaagnnnnnnnnnnnnnnnnnnnnnnnnnnnnnnnnnnnnnnnaattatactatctctgagactccggagtctaacctgagataatctctgaagctctgatcttccagaaactcaaatgcactctgcacgtctagatctctcttgttcaccatcaccaaagccccaactccaagggcttcccccagatcctttgcctcctctttggaccctggtgacaggaatcaatggttctcgaatattttcatttttctgcataatacagactttcag

SEQ ID NO: 310560 - DNA, 393 bp, Homo Sapiens
  misc_feature (17)..(17): n is a, c, g, or t
  misc_feature (54)..(54): n is a, c, g, or t
  misc_feature (63)..(63): n is a, c, g, or t
  misc_feature (75)..(75): n is a, c, g, or t
caaacatccgacgttgncggttccaacttgtcacaaccactccagcaggagccnatccccaanccaggcttcagnaagccatagaaaatcatatccttgggtgcgacagcagctgaggcactggtgataggccggatgatgtcagggtggcataaaatgaggagggggaaggtaggacccagccacaacttaaagccctggggatatgtggtcaccagctgggtcaatgtcttcatgccctcttccgtgggagtgaccaggccctggtgtccccaaaaccagttctgtttcgggggttgaggaaaacactggaggcggcggcagttgtcatagaaggtgtaggtccaggccaggacgcggccaggagccaggagcccccaaccagcagcagaa

SEQ ID NO: 310561 - DNA, 418 bp, Homo Sapiens
  misc_feature (209)..(209): n is a, c, g, or t
  misc_feature (245)..(245): n is a, c, g, or t
  misc_feature (317)..(317): n is a, c, g, or t
  misc_feature (354)..(354): n is a, c, g, or t
  misc_feature (382)..(382): n is a, c, g, or t
  misc_feature (403)..(403): n is a, c, g, or t
attgtttctgggactctacagaggtgggtgggtgggtagggcagtcactgtgagttcgcacccaggggctccacccgcagccaaagtccaccctctgcgcgcaatatcagctcgggtttcctgcggggttcagtgtgggtcggcaggatgcggaagtgcagcagcgtgagcccagggaccaccttcatctcagccatggcgaaacgctngcccgatgcagtttctgggccctgccgagaagggantaaaagccagaggtgacctctccttgatgttctcttgggttgaaacggaaggggtcgtagcctccaggggtnttggccacacagttggggttgtaatgggatccccganaatattgatgaggcagacaatgcctttnggggaatgacgcggccgtctngggagcacaaagtcc

SEQ ID NO: 310562 - DNA, 889 bp, Homo Sapiens
ggcggccggccaaaggattttttgttctattagctgtaatcggggggaaggaaaaaattatttgattcaaatttatgtttttccaaaaagagaggggttctgggcttagtcgtctttgaaaagttttcatacccttttcagaacccacatttgccgggaatgaacatttccagatggggcttggtgtcatctgggcctgagaggccagcaaatgatgaagcaaaattgtagaaattgtccaacatcttttgtgtgaactgagtgaatgagtcaactgaggatacagcagcattacctacaggagtctgctgagccatactgtctaataattccactgaaattccaatctgagcaacagatggagttcggacaatattcatggctccaaaaggatgttggcttccttctccagatttaagacctgaaattttgaagatggcacttggcttcccattcgtgacaaatcctaggagttgccatactggcattccatttgaatcaggataagaaaagtagacagatcctcccattccctcaggaaatgggattgttcccagcataaaaaccacaacatggttgatactttcataatcaggtaagtcaaaaacaaatttatcctctgccacttgctgtgcagctgtttgcaccagcctccccgccaccaagcagccaaacatggcgacggcagctccgttcagccggcagtgacctgaagccggcgactaggagtcctggggctactgccctagtcgagactaagaaccttccagaatttgcgggagggtgtctgcccctccactacatagtgactgggccagcggcaagaatgcctctgcccccgcgaactctgaccttctcttcctaagcagcccactgctcaggcaacccc

SEQ ID NO: 310563 - DNA, 566 bp, Homo Sapiens
ttttagagttataatccaatctttatttaaaaatctaatctgccagtttagcgttttccaccaactcggggagctgaaactttcacaggcttcacaatcttttgcttaggtgctgcctttgtaggtgccttagcagcagccattgcagtctttttagatgcttgcttagccttttttgcttccttagcagccctgatagcttgttctcgttgagcctttctaacttcaggtttctgattcctcttggccattatatcagcaagagatgcaccagtaatggccctctggaatttgactgctcggcgggttcttttcttttgaatttcttccgactgtccctttttgtgcttccttctgtagaggacagtccagtttatctgccgaggattcctcttggaaaggaaagccgactcgcatttcgcattaagaaactggaaaaccttcccgtcggtcctggcgtagcgcctcccgtgtccggggtagatcttgtacccgctaaaactgcacagctcgaccttcatggcgacagctccacggaaagacaaaagatggcgaaaagaaagccc

SEQ ID NO: 310564 - DNA, 483 bp, Homo Sapiens
gagctgtcgccatgaaggtcgagctgtgcagttttagcgggtacaagatctaccccggacacggagtgcgctacgcaggaccgacgggaaggttttccagtttcttaatgcgaaatgcgagtcggctttcctttccaagaggaatcctcggcagataaactggactgtcctctacagaaggaagcacaaaaagggacagtcggaagaaattcaaaagaaaagaacccgccgagcagtcaaattccagagggccattactggtgcatctcttgctgatataatggccaagaggaatcagaaacctgaagttagaaaggctcaacgagaacaagctattcagggcttgctaagggaaggcaaaaaaggcttaaggcaaggcatcttaaaaaagactggcaatgggcttgctggttaagggcaccttaccaaagggcagcaccttaaggcaaaaggttgttgaggctgtggaaagtttcaggttcc

SEQ ID NO: 310565 - DNA, 543 bp, Homo Sapiens
  misc_feature (484)..(484): n is a, c, g, or t
gtatagagttataatccaatctttatttaaaaatctaatctgccagtttagcgttttccaccaactcggggagctgaaactttcacaggcttcacaatcttttgcttaggtgctgcctttgtaggtgccttagcagcagccattgcagtctttttagatgcttgcttagccttttttgcttccttagcagccctgatagcttgttctcgttgagcctttctaacttcaggtttctgattcctcttgggccattatatcaggcaagagatgcaccagtaatgggccctctgggaatttgactgctcggcggggttcttttcttttgaatttcttccgactgtccctttttgtggcttccttctgtaggagggacagtccagtttatctgccgaggggattcctcttggggaagggaaaggccgactcggcatttcggcattaaggaaactggggaaaaccttcccttgggtcggggggctagggncctcccgtgtccgggggtaggatctttgtaacccggtaaaaactggcacaggttcggac

SEQ ID NO: 310566 - DNA, 1139 bp, Homo Sapiens
  misc_feature (599)..(632): n is a, c, g, or t
ttgtggtccgtcttcgttgtttgcttgttgttgtgagcgtcgtttcggcttggtggagcgtgctttgccggggcagcgatgatggccggttgaggtcgtcgtcgtgttgtggtgctgctgacggttggggtcccgtgctctgtcgtcggcgccattgtagcgtatgcatgagttctgcctgttgctgtcgtggcgctgtgcgtccgccgttttctcgacgtgctcggggagaatggtcctgacatcaatgccgtggccaaattgttccggcgccagcttattgcgcctggttgagccccctatagcccccggggacaatgtgtatgtttccctgggtcgctttatttgtctcgtgaggtagggttggcgccgcgtagtgggcgccggccccgggctgtatggggttcctctgccccgaggttgccccaggtcagcgccggttgtcccccggtcgccgagcgttggtgacgcggggcccgctgtcccttggctcttttttttcgcgctctccttgttgggggccccctgtgcaaccaggaaacacgtgggtgaccccgctaaattgggccccccgggggaaatttttggcgccccccccnnnnnnnnnnnnnnnnnnnnnnnnnnnnnnnnnnggttactgccctttgcagggcatcttcatttggggaaagacatgaaatgctaatggccaaaccccccctcacccccaccaccttcaggccgaacaccgcagtggggggaagatgcatagaggtgggggaagaagtgtgcaaagaaagggcctggatgggtgggggtcccaaaaggacctaagcagcaggagacccccaggagtgggctttaggcccagcagctcccccttctcaaggtgagtccagaggccattctggagtgggcctgggtaccaggccctgggtactccttttggtaccaggctggcctcctgattcctgaggcgttggctcggcaccccatgggggactgccctcctccaggcctggcacaaagccagggggctaagagcagtctggctcctatgccagatccccctcatgccatatgaggccaggcctgtggctcgaagcccctgagctgggcatgtcctgagagtctgggaccatccaggggctgcatcttca

SEQ ID NO: 310567 - DNA, 1051 bp, Homo Sapiens
taaagatttaaggaagtataatttcaaacatgagaatattctgctagcaccagcaagagaaagacctgcaaggcagaaacgaagcatgatctgactttgttttagtaaagatttaagattagcagtgagaaagccatgcaaccacaggctttgcaagttgttagagttagttccccggaatgtgtatgaagcagaaaagaacctgtttggcactgataccttcagtcacctccgttcgcacaatcactgtcagaaacatcatctcatctgaccacctgtctctgtctccaccaccattcttgtcttttgcttgggctacttcagttgccgcctaactacgtgattcatctcatcaatcactcttaactaagagcctttgcaccactattgatttccctggagctctcttccttctccttcacctagttaccttgtttttatcgctcagagctcacttaaacctcactcatatcttttcctgcttcaccacctctccaccccaaattagatcacatttttgttacacatttccaaaggactctgtacttttttttcaaatcacttaattacatagtcatttcattgtttgttaaatacctgtctctctgcaaacactccctgagaactttcacgagagtgttgggcccgccattatttccttagtgcttcccagagacagaacacaaaccagattttcaggaaatagtgttgaattaggtaaatatcagatgtggacgaaagccctggcaaagtacacatacatgttgatgcccactccctctccagctctctgtggcacctatggtctagtatattaggcacattctggggtatcagccccgctttcaacaattctgtcttctccaggattttgcccactccacttcccaaacatatgtgggaactcctaaaagccatgtttgtaaatgtgaagttcgatctagagatagaccaatatacttaagcatgaaacattcctcattagctgttttaaaaatgaaaaagtaccacaaaattgagaagtatcgtttatgtttcttaagttgctttt

SEQ ID NO: 310568 - DNA, 794 bp, Homo Sapiens
  misc_feature (51)..(51): n is a, c, g, or t
  misc_feature (132)..(132): n is a, c, g, or t
ggaattctttccaccaccaaatccccccagctcccaactcctgcaggttgnctccagcaagcttattacagaccacttgggggaagtaagtaaagaatggggtccccagcccctgtaaaaagatggtggtgnattgtgtttggaatgttgaagtgaatgattcgcctccaaactctgcagccagggcctggaagttggttgcattgaccttttgaagcttctggaaatagtttaagtttgagttgttcacatggacacaaaactgcctgattccattagaatccatgaaaactcttgaaggaaacggggaattactcctgaagataacagagttgtctacacaaacccagcttgaagaccttacgctgcctggaaggcagaaggagaaaactgtcctcggatggagaagatagcagtccctgtcgcagcagcaatttatatcgcaggctccaggagtcaagtcacagacacagatcggtaagactgggaagaggtccacagtcctattcccaggggccgagggagtcacgagagtagggaccactgtagggagtccaggcacggccgggcgagttgcagtcgcctctgaaggggactggagggttccgccatccgtccctcgctgcagctccaaagacgtgggcactgcccctgatggggaggaagagggctgaggccggacgccatcggggaacaccagaaagaacacttgcaggagcgcgagctgtggggtgcgcatggggcattcagggcctccgggtccgacgtaggcctccgcggtctccaatcgcatt

SEQ ID NO: 310569 - DNA, 362 bp, Homo Sapiens
gtcaaaaccatgagacaaaggttaaatccaacgtccaacaaaagttctcgaaagttatttgatcaagccaacaagcttaaaagctggtttggcagcttaaaggacactattcagcatcagcaaggagaagcggtttgggtctctgaaggaaagatggaagggatggatgatgaccccgaagaccgcatgtcctacttaaccgccatgggcgcggactatctgagttgcgacagccgcctcatcagtgactttgaagacacggacggtgaaggaggcgcctacactgacaatgagctggatgagccagccgaggagccgctggtgtcgtccatcacccgctcctcggagccggtgcagcacga

SEQ ID NO: 310570 - DNA, 607 bp, Homo Sapiens
cttaagttttgactctgtaatctttacaattaaatttgatggaatgagtaaggcaaacagtcaatctgtggggaaaaaatcctcctgttactctgaaatttgggtaaaggaaattctttcttcaagtcccagtccttgagaagtccccgccctagacctgtacccactaggcagcccttacctcgtgtgctggggcgtgccagggtctggcttgtgcgttttgattggaactgcatagatatcaggatgcttctgggcaatttcgatccttgcattctgtgcttcctggagctcctgcattctctgtaacctggccttgtgatccatcttctcaaatattttgactttgcccaggactgatttgggagcattatcttgctcctcactgctctctcccacctcctcaccctcttgaggagggatgggagtggagggcttcagtatagaccgcccaaaggtaggttttgctgcaacaggaggaggataacctttggtagatgccccaggagtttcattaccagcaacggcagaggggtttgacttatattcataggatttggagaagtcataggattcttctttgttctgggttttggcctgcggagag

SEQ ID NO: 310571 - DNA, 2009 bp, Homo Sapiens
ttttacggattgcaatgtattcctttttattaaattataaaactgttgtcaatacatgtgcttttggaaatagtgttttcctcaagtatctgcttttgtgcagcacttgggtttaaacaaacaacaaatttcgataccaacttcttgggcttcaagctattgagcacttatagccaaactatcaagtatagttatgatatagacagtccaaaattatggaaaatattacaaagacaaatgccttgaaaagatgacacagtgcagggaaaactacagctattaagctggtataaaaacttagtcaaaatgttttagtccattatggctctgcctaaagcttcaaaggaagaaaatttaagacacttctcatccaaggcacttaaaagagttgcaataaagtacttctttgaatttagtttgagcccaacagtattttttattcatttttcacattctgactcacactgaaacagtccttgaaggcagctattaatgaggaaaaatagttattgcttcttaatatacatattacaagtacgcaaacagaatacagatttcggtccactgaagcaagtaacaggatctgactgcaagtgttctgcttaattctgaacaaaaagccacagacttcctctaacccagtcccacaaatagagccttcagttctgaatttgcaccagctgtcccctgggttctccatgaggacacacgaggctggagtcccaccacgtctccatggtgcattctaactggagaagaaccatcccggcggcctggcaggagtggctagtctgatgccatgcaggcaggcctgggagagtccgtgctcagacatctataattctgtgtcccggtatcgggcagactggccatagtaaccgcgcttggagtgttctgacagctgctggcggtactcctcctcctcggcatcactgccataacttcctctggtatcctgataaggtctggaaggagctttctgtggctcagggggtctggaactcgtgtgctggggcgtgccagggtctggcttgtgcgttttgattggaactgcatagatatcaggatgcttctgggcaatttcgatccttgcattctgtgcttcctggagctcctgcattctctgtaacctggccttgtgatccatcttctcaaatattttgactttgcccaggactgatttgggagcattatcttgctcctcactgctctctcccacctcctcaccctcttgaggagggatgggagtggagggcttcagtatagaccgcccaaaggtaggttttgctgcaacaggaggaggataacctttggtagatgccccaggagtttcattaccagcaacggcagaggggtttgacttatattcataggatttggagaagtcataggattcttctttgttctgggttttggccttgggcggctctggcttgaatgctgggggcgggctattgtccctaagttgatcgctgctagcagccctcctcatctgagctcgtggctctgggctgggtttccttatgctctcctcgtgctgcaccggctccgaggagcgggtgatggacgacaccagcggctcctcggctggctcatccagctcattgtcagtgtaggcgcctccttcaccgtccgtgtcttcaaagtcactgatgaggcggctgtcgcaactcagatagtccgcgcccatggcggttaagtaggacatgcggtcttcggggtcatcatccatcccttccatctttccttcagagacccaaaccgcttctccttgctgatgctgaatagtgtcctttaagctgccaaaccagctatcattggctgaatttaggttgattgtagctgtaaaaaaggtgtgcacacgtttttttaagcttgttggcttgatcaaataactttcgagaacttttgttggacgttggatttaacctttgtctcatggttttgacaccttgtctggagtctgggttgaaaaaaatcacaattgggaaccactgggtgtaattccc

SEQ ID NO: 310572 - DNA, 729 bp, Homo Sapiens
accaagaagagtaaattaaataaccactaccagtcctaaaatcatatgctctcctaatattgcctttccttcctttttgcccttccctaatttgggagttcacccaacaggccaaaagataggctctaatagagaacacagtgagtcagaaccgtaattaaacaccatctcagtgtgcatgctcctccctggccgtccaggaggcttcagaggcatctgcttcctcttccttcccatcctgggcttcccagccacgtaccttgggcggctctggcttgaatgctgggggcgggctattgtccctaagttgatcgctgctagcagccctcctcatctgagctcgtggctctgggctgggtttccttatgctctacaagacataaaggttcattcacaacaagaacatccaagcagagagaacagagcactcgactgctttggaggagttctgcaaacttgagtaagtccagaagttgaggttctgagccggtgcttctttactgaacaggcagaaaccatcaccaaatgcttcagacacatttttaaaaactggctgcatccaatgtagagtctcttcctttaaagcacaattttttaagaaccctccaaaagtctaaaatctcttgtgtcactaatatccatgtctataggcatttggaagttaatttattctttacaagttgtctagcataaactaatttgttgctgtggtaatggtgtatttttctc

SEQ ID NO: 310573 - DNA, 475 bp, Homo Sapiens
  misc_feature (43)..(43): n is a, c, g, or t
aaccaaaacagtcgaagtgcccctgttcccctcctgccttggnatgttccttgttgtgaaatgaaaccctttatgtccttgttagaagccataaggaaaccccagccccagagcccacgagcctcagatgaggaggggctgctagcagcgatcaaccttagggacaatagccccgccccccagcatttcaagcccagagcccgccccaaggtacgtggctgggaagccccaggatgggaaggaagaggaagcagatgccctctgaagccttcctggacggcccagggaggagcatgcacactgagatggtgtttaattacggttctgactcactgtgttctctattagagcctatcttttggcctgttgggtgaactcccaaattagggaagggcaaaaaggaaggaaaggcaatattaggagagcatatgattttaggactgttagtgtttatttaatttactcttcttgtaaa

SEQ ID NO: 310574 - DNA, 2358 bp, Homo Sapiens
  misc_feature (339)..(363): n is a, c, g, or t
  misc_feature (596)..(604): n is a, c, g, or t
gctttgtaattagtatattaaggagacaatacatttcaagaattgcttaaattctgatacccagatttaagcatgtgaacatatgagacttttaaacatacaattaaagctattcatcataatttgctatactaccaacataactttggagcgaaagtcaaatggtttaaagtaatcctgtaacatacctaaagaacaccttcctatattacgcatgcaaattctccacgtaaaggtcttttcactttaatttctgttacccagctctgaagtcactacttgggcttatcatggtccacagacaaggaggggagcaaatgaccaggactggtcaagatnnnnnnnnnnnnnnnnnnnnnnnnngaatggcacagcagaaggaaacacaattctggaagtgcaagccttcaagaagcagcatattatgataaacccctcctacagaaaggtatcatttttatcactgataccacaggataaattatatattacgccatcttcaagtaacagctgaggcaacagaataaatgcagaggcattacaatgaatcccacttaatataaagaactatacagaccaacacttctctacaaaannnnnnnnncctcattgccagttaaatacagagttttactttcatagcttaacaatgaagggtcatacactgaagccaatacatatacctagcatttcagtctaagcttgtccacgtacatagctgaagtcaattacaaggtttggcctagaaatgctaggggaacttctttgtagtttttacaggtattaaacttcatcttgcacactgaagtcatcatacatacagggcaaaatcagagcttttatatttgcgtttattcttcatttaactttttaaaacactactatagtttattaaaacaaaaacaagagcaagtagtgagcatattatgattacagtccttcactcattcactactgcacattaaatgccagcagtgagtgttattcactggcccattaagaggtctgacactgaacaccacctctgggatgatgttcatcatcctcatatgcttctccattgtagtggcgccgtctttcctgatttggatcaaagtccaccagttctacttggtccatctcatcagtctcttccacttccttcctctcgggtaggagtttttccagcaaagacagtttatcaggagagagaaagccattctcaggaaagtttaccttaaattcgatgattaggcgacccttttcatatggtctacgataaattggcatgccttcatttagtacacacttgatatctccatgcttgacaatctgacctggatgagaggtgatgacgatggttcggttgtcaagagtagatattggcttctggaagccacacagtgcttcaacgagctgtatgtccatacacatgaaaaggtcttctcctcgtcgagtaaaaacagcatggtccttctgatctaacacaatgataatatcgcctggctccagtcctggttcttggtctccttcaccatggaatgttatcttctggccatctttcatgcctttgtcaatatgaacttctaaaattttcttctctcgaactatcttccttccgttgcagcttttacatctatctttaggactgatccgctccccatggccctggcactccatgcacacagactgaatttgctgaaccattccaggtcctatctgatgaattcttatttgcattccagtacctcggcaattgggacagcactctactgctcctttcttacctcctctaccttcacatttgtcacaaatcacattcttttgcagagccagttttcttgttgcaccattatataagtcttctagggttactgagagctgatgtacaacatttttacctctcctttctctctgcatccttcctcctcctccaaaaaacatatcaaagatgtccatgggggagccaaaaccgccacctgctccaccctctttaattgcctgttctcctcctttgtcatataattcccttttctttgcatcagagagaacttcgtaagcttgagaaatctgtttaaacttctctccttcatttgggttcttatcaggatggtacttcaaggccagtttcctataagcctttttcaattcttcctgagtagcattgggtttgacccccaaaacatcgtagtaagttgtttctttcaccatcttctactgccggtgcgggctgaggccggtgtgtgagggagcgggaaggagcgccgagctgtgcgcagccggggtagttaccgctcctccgcctctcaccgagcgttctggaaagttccgcccggcgcgccgcagccgtcgtcttttgtagccgaacccgggcgcccc

SEQ ID NO: 310575 - DNA, 1957 bp, Homo Sapiens
gctgggtggcgaattcggcacgagggttgttctgggtactacagcagaagggtatgcggaagcgagcaccccagtctgagatggctcctgccggtgtgagcctgagggccaccatcctctgcctcctggcctgggctggcctggctgcaggtgaccgggtgtacatacaccccttccacctcgtcatccacaatgagagtacctgtgagcagctggcaaaggccaatgccgggaagcccaaagaccccaccttcatacctgctccaattcaggccaagacatcccctgtggatgaaaaggccctacaggaccagctggtgctagtcgctgcaaaacttgacaccgaagacaagttgagggccgcaatggtcgggatgctggccaacttcttgggcttccgtatatatggcatgcacagtgagctatggggcgtggtccatggggccaccgtcctctccccaacggctgtctttggcaccctggcctctctctatctgggagccttggaccacacagctgacaggctacaggcaatcctgggtgttccttggaaggacaagaactgcacctcccggctggatgcgcacaaggtcctgtctgccctgcaggctgtacagggcctgctagtggcccagggcagggctgatagccaggcccagctgctgctgtccacggtggtgggcgtgttcacagccccaggcctgcacctgaagcagccgtttgtgcagggcctggctctctatacccctgtggtcctcccacgctctctggacttcacagaactggatgttgctgctgagaagattgacaggttcatgcaggctgtgacaggatggaagactggctgctccctgacgggagccagtgtggacagcaccctggctttcaacacctacgtccacttccaagggaagatgaagggcttctccctgctggccgagccccaggagttctgggtggacaacagcacctcagtgtctgttcccatgctctctggcatgggcaccttccagcactggagtgacatccaggacaacttctcggtgactcaagtgcccttcactgagagcgcctgcctgctgctgatccagcctcactatgcctctgacctggacaaggtggagggtctcactttccagcaaaactccctcaactggatgaagaaactgtctccccggaccatccacctgaccatgccccaactggtgctgcaaggatcttatgacctgcaggacctgctcgcccaggctgagctgcccgccattctgcacaccgagctgaacctgcaaaaattgagcaatgaccgcatcagggtgggggaggtgctgaacagcattttttttgagcttgaagcggatgagagagagcccacagagtctacccaacagcttaacaagcctgaggtcttggaggtgaccctgaaccgcccattcctgtttgctgtgtatgatcaaagcgccactgccctgcacttcctggggccgcgtggcaaacccgctgagcacagcattgaggccagggccccagaacacagtgcctgggaaggcctcttgcccctggcctttgaggcaaaggccagcagcagataacaaccccggacaaatcagcgatgtgtcacccccagtctcccaccttttcttctaatgagtcgactttgagctggaaagcagccgtttctccttggtctaagtgtgctgcatggagtgagcagtagaagcctgcagcggcacaaatgcacctcccagtttgctgggtttattttagagaatgggggtggggaggcaagaaccagtgtttagcgcgggactactgttccaaaaagaattccaaccgaccagcttgtttgtgaaacaaagtgttcccttttcaagttgagaacattgggtttttgtaagaacatgacctccgtgtagtgtctgttaccttagttttttccacagatgcttgtgatttttgc

SEQ ID NO: 310576 - DNA, 1395 bp, Homo Sapiens
gttgttctgggtactacagcagaagggtatgcggaagcgagcaccccagtctgagatggctcctgccggtgtgagcctgagggccaccatcctctgcctcctggcctgggctggcctggctgcaggtgaccgggtgtacatacaccccttccacctcgtcatccacaatgagagtacctgtgagcagctggcaaaggccaatgccgggaagcccgaccccaccttcatacctgctccaattcaggccaagacatcccctgtggatgggccctacaggaccagctggtgctagtcgctgccttcttgggcttccgtatatatggcatgcacagtgagctatggggcgtggtccatggggccaccgtcctctccccaacggctgtctttggcaccctggcctctctctatctgggagccttggaccacacagctgacaggctacaggcaatcctgggtgttccttggaaggacaagaactgcacctcccggctggatgcgcacggtcctgtctgccctgcaggctgtacagggcctgctagtggcccagggcagggctgatagccaggcccagctgctgctgtccacggtggtgggcgtgttcacagccccaggcctgcacctgaagcagccgtttgtgcagggcctggctctctatacccctgtggtcctcccacgctctctggacttcacagaactggatgttgctgctgagaagattgacaggttcatgcaggctgtgacaggatggaagactggctgctccctgacgggagccagtgtggacagcaccctggctttcaacacctacgtccacttccaagggaagatgaagggcttctccctgctggccgagccccaggagttctgggtggacaacagcacctcagtgtctgttcccatgctctctggcatgggcaccttccagcactggagtgacatccaggacaacttctcggtgactcaagtgcccttcactgagagcgcctgcctgctgctgatccagcctcactatgcctctgacctggacaaggtggagggtctcactttccagcctccctcaactggatgaagaaactgtctccccggaccatccacctgaccatgccccaactggtgctgcaaggatcttatgacctgcaggacctgctcgcccaggctgagctgcccgccattctgcacaccgagctgaacctgcatgagcttgaagcggatgagagagagcccacagagtctacccaacagcttaacaagcctgaggtcttggaggtgaccctgacccgccattcctgtttgtgtgtatgatgcgcactgcctgcacttctgggccgctggccacccgctgagacagatgaggcagggcccagacacagtgcctgcagggctctgccctgcttg

SEQ ID NO: 310577 - DNA, 1686 bp, Homo Sapiens
  misc_feature (1680)..(1680): n is a, c, g, or t
gaaaattgcaaatatttatttgtgaagatttatttctctaccttccactcccggggcacaataccagcagcagtctggccctgtgtcaccaggacggaagaagtcccatctgcctggttcctttcccaggtgccacatggggtatggggccttccctgtcaccctcttcccgccccctgtccatcacacagatggccaccactgcttaccaatggaagtgtccagagaaaagcatcacctaaaatttcaaaggactgctaagtactggctcagacctcccatggaaattccatccaaagtccggggaaagcactttcgtttgcacagtctatctgctggaattgtaatacatctgtttggctgctaaatgaaagataaaatttttggaggcttattgtggcaagacgtttattactaacacaagggagaaataaccagctatggttccgcattcaaacagaaattcaggtgcttgcatctttcacgtattgttcaaaaatcacaagcatctgtggaaaaaactaaggtattacagacactacacggaggtcatgttcttacattcaagacactaaatacaaaccgaaggcaatgcaaaaatgtatactttaattttaaaacccaatttttgttctcaacttgaaaagggaacacttttttgtttcacaaacaagctggtcggttggaattctttttggaacagtagtcccgcgctaaacactggttcttgcctccccacccccattctctaaaataaacccagcaaactgggaggtgcatttgtgccgctgcaggcttctactgctcactccatgcagcacacttagaccaaggagaaacggctgctttccagctcaaagtcgactcattagaagaaaaggtgggagactgggggtgacacatcgctgatttgtccggggttgttatctgctgctggcctttgcctcaaaggccaggggcagaggccttgccaggcactgtgttctggggccctggcctcatgctgtgctcagcgggttggccacgcggcccaggaagtgcagggcagtggcgctttgatcatacacagcaaacaggaatgggcggttcagggtcacctccaagacctcaggcttgttaagctgttgggtagactctgtgggctctctctcatccgcttcaagctcaaaaaaaatgctgttcagcacctcccccaccctgatgcggtcattgctcaatttttgcaggttcagctcggtgtgcagaatggcgggcagctcagcctgggcgagcaggtcctgcaggtcataagatccttgcagcaccagttggggcatggtcaggtggatggtccggggagacagtttcttcatccagttgagggagttttgctggaaagtgagaccctccaccttgtccaggtcagaggcatagtgaggctggatcagcagcaggcaggcgctctcagtgaagggcacttgagtcaccgagaagttgtcctggatgtcactccagtgctggaaggtgcccatgccagagagcatgggaacagacactgaggtgctgttgtcacccagaactcctggggctcggcagcagggagaagccttcatcttccttggagtggagtagtgttgaagcaaggtgctgtcaaatggctccgtcaggaggccagttttcatctgtaaagctgatgaactntgattt

SEQ ID NO: 310578 - DNA, 988 bp, Homo Sapiens
  misc_feature (458)..(458): n is a, c, g, or t
  misc_feature (894)..(894): n is a, c, g, or t
aaataaaaccccagcaaaacttgggaagtgcatttgtgccggtgcaaggctttttaatgttcacttccatggaagcacatttagacccaaggagaaaacggtgctttcccagctcaaagtcgactcattagaagaaaaggtgggagactgggggtgacccatcgctgatttgtccggggttgttatctgctgctggcctttgcctcaaaggccaggggcagaggccttgccaggcactgtgttctggggccctggcctcatgctgtgctcagcgggttggccacgcggcccaggaagttgcaggggcagtggcgctttgatcatacccagcaaccaggaatgggcggttcagggtcccctccaagacctcaggcttgttaagctgttgggtagactctgtgggctctctctcatccgcttcaagctcaaaaaaaatgctgttcagcacctccccccanccctgatgcggtcattgctcaatttttgcaggttcagctcggtgtgcagaatggcgggcagctcagcctgggcgagcaggtcctgcaggtcataagatccttgcagcaccagttggggcatggtcaggtggatggtccggggagacagtttcttcatccagttgagggagttttgctggaaagtgagaccctccaccttgtccaggtcagaggcatagtgaggctggatcagcagcaggcaggcgctctcagtgaagggcacttgagtcaccgagaagttgtcctggatgtcactccagtgctggaaggtgcccatgccagagagcatgggaacagacactgaggtgctgttgtccacccagaactcctggggctcggccagcagggagaagcccttcatcttcccttggaagtggacgtaggtgttgaaagccangggtgctgtccacactggctcccgtcagggagcagccagtcttccatcctgtcacagcctgcctcgtgccgaattcgccacccaggcctcgctc

SEQ ID NO: 310579 - DNA, 1176 bp, Homo Sapiens
  misc_feature (713)..(713): n is a, c, g, or t
gcttgttacatgtccgctttaatgtcccatccattgccatgcaaaagcccagccctgcagggagggtcgctaaggtgcccagctcttctggggggcttccttgtctctgatgtgcccatggatccagtcgaggtagcggctgactttggtgtaaacgccgtagttgtgaaggagcccacagccctcaccccagctcaccaggcccaccaggaaccaggtgccgtggaaggaggcgaccatgggccccccactgtcgccctcgcaggcatcctgccggtccccgaggatgcccgcacacagcatgttctcagacaccatgttgctcatgacctcgctgcactcattgtgcgggaccacgggaatcttgatgaagttgaggacgaaggtgcggtttctcttggcctccttctctcggctgctgtggtagccccagcccgtcacgagggtctcctggccggcctgattgagctcgcgctctgcaaggccgctgtccgggaggcagatgggcactatggtctgcgagagggtggcgggctgggccaggtgcagcagtgcgatgtcattgtcggtggtgctcttgctgtagttggggtggacgaagacctccttgatgtccaggtccagctcccacttctcccctcgtgccgaattcgcgacccagggcctcgactaccgttaggaccgttaatagtttcctggccgtcgttttaccngcccctgctttttgtacaaacttgttggatccttcgaggtttctataagtgtccaccttaaaatccggaggtgttaattgatacccgttaaagggggtgactctgctcttcaaactttttgttagcccccgcgggtactacgacggggggaggaacaccccacgacaacacgtcacacgcaagaccatcgacacgacccaccacaaacaagcgcgccaccgccgagcaccccgagcacgaccgacagccagccacccgcccccagagttaccagcaaccaccagagcgtgagcccacgacgcgacagggccggacccacgccgcgccacccgccaccgacgcagagcgatgcaataacgagagaccagcccaaggccgctcacagccgaaccaaacaggagcggggcggtaaccagaggacgggcgcccgaaacaaccacccccggctgcgcgaaagaacaac

SEQ ID NO: 310580 - DNA, 956 bp, Homo Sapiens
agagcagcaagtattatgccattatataacacagcttgttcttgagtccaggcatacatatccattgttaatggagtaatgatggtttcaaaaagggcaaagataaatagagtcacaaaaaacagaacattgatggccacaacagcaacctggtcaatatttccttggggaacctgagcttccatctgtacttggttctttcaaaattaataccttttaccactgtctttcctgagtcatccagcacgatgttctcttagtatggcaaggatcagaataatatttaaaattccccgggaaggcgctaagtaaaactggtgttgtatacatgtttatctgcagtttaatcacattcccatgtcacacctttttctccaaggaatgtaaaacaagtctgaaaaactggacctagaataaaacctaatgcttgacacatgcttatgtttgccatggaacttgttctttcctgaagggaagtagcaccagcagtatagtgatctaacaactgctacatttcctgctccaattcccaacaatccacgagcaaccagcatgtagtatttattatgagaagctgggatgtggagatatgcatagaggcagttggctgccacggaaatcaagatggagacaataagaggctcttttcttggtctataattagaccataaaccaaatataggtgaagctaccatttggccaagactatatgaagcaataacccagcccaaaaaacttgtatcagctgtcggatcaatcttttggagatatggccatatggacatcatcactacagaaaaccctacactgctgagaaacgtagtaagatataaaatcctaatagatctccatcggctcttataatgctcttcagtctctaaaatgtcccattctctgcttccaggtgtgtcgcctaagagcggctcctgttcactttcgttccgcaggccggcccc

SEQ ID NO: 310581 - DNA, 704 bp, Homo Sapiens
  misc_feature (142)..(142): n is a, c, g, or t
  misc_feature (150)..(152): n is a, c, g, or t
  misc_feature (154)..(156): n is a, c, g, or t
  misc_feature (159)..(164): n is a, c, g, or t
  misc_feature (166)..(174): n is a, c, g, or t
gggggggaattccaagccccttagtccatggcccgggttttcccttgggaaacagcttatggccaagtttccctttccctacgggggccccgggcccccaaaggaaatgttttagaaaagtttttggggggccgaggccggncgacaagnnntnnnttnnnnnntnnnnnnnnngtttcaaggtctgcagagcatttattccgtcccagtggggaggggcagggatccaggtggccggagggcacagggcctacgtgtaccacatgaagccgtggctggcatggagagcctcctctgtggtgcgcagcccgtacagctccccgatcaaggggggcacccagcgggttgtgtggaacacagactcccccaccttccagtcgggcacgtccttcatgatgatggcctcctcctccaggttctcccgaagcatctgcaaggtcctccggtcggtttctgcctgtaacagtggcaacagcgcgatgcgagcctcgaagtcctcgatttgtaggcgcctgcgctcacggttccacttcattatgctccagtgcccgtagatcagggttccaatccctatggccagcatgctgtagcccgacagtcctcgacgcggcaagttccgtttgtagtcgatgggcccatagccccccggcggaggcatgtcctgcttcacctttgacgccgccatactcgcagtatcccacccc

SEQ ID NO: 310582 - DNA, 692 bp, Homo Sapiens
gggtctgcgtctgccgtggacagcgaagctgctgcggttcctgagccggaggagtgcctgtgaagaaaacggggtattgccctgaggcttatattctgcctcagttgtcttttcttgaaatattataaatcagaatgtctgcacagtcagtggaagaagattcaatacttatcatcccaactccagatgaagaggaaaaaattctgagagtgaagttggaggaggatcctgatggcgaagagggatcaagtatcccctggaaccatctcccagacccagagattttccgacagcgattcaggcagtttggataccaggattcacctgggccccgtgaggctgtgagccagctccgagaactttgccgtctgtggctcaggccagagacgcacacaaaagaacaaatcttggagctggtagtgctggagcagtttgttgccatcctacccaaagagctacagactttgggttcgagatcatcatccagagaatggagaggaggcagtgacagtgctggaggatttggagagtgaacttgatgaccctggacaaccggtttctctccgtcgacgaaaacgggaagtactagtagaagacatggtatctcaagaagaagctcagggattaccaagttctgagcttgatgctgtggagaaccagctcaagtgggcatcctgggagctccattccct

SEQ ID NO: 310583 - DNA, 512 bp, Homo Sapiens
ttaaaacagctgtaaaacatatccatggaaaatacttcactccaaagatatccataatattggccatcgtatccccctgccaaatgtccaaaggtagctggcatatttgtgcctggagtagctgcaactcctaatatttctgagcagtatttggcatattcacttgcagcatccagcgatgtgttggtatgaagagactgatcaactttgctcaaaacaatctggcgcagggtcagaagacctgtgttgaccagcctagaagcaacaagtttttcaagcagatcgtctgcaatagggcttccatctttataatgttttgacaatcttcggagggaatcgacgtcccacacccaattttcaagcatttgcgatggcacctctacaaagtcagtttccacatttgttccgctaaatcgtgcaaaatcagtctgtgcacaaatctgatgcatcacgtgaccaaactcatgaaagtaagtcctcacctcgtcgtgtctcaggagagagggacgacc

SEQ ID NO: 310584 - DNA, 365 bp, Homo Sapiens
cgcattataacctgggcagatgatggatttgtgctcaataatcactatctgaacatcaaacgtgcgtccagaatggcagaggttactaggatcacagaggttttcacctggggctacaaaatcagtttcagtatcatcagaaagtattccaagaacttctacattgtgcttgtttggcatcatcacgagctgctggcctttaaaaatggacccggattccagctttcccaggaccacagtgcccatatctttgtacttatccacaattggcagtcttattggtccatcaattgatctgttgaagtttggcaagttatccaaatacggaatatatggtaatccagtgtaccaagggcagatatctg

SEQ ID NO: 310585 - DNA, 2014 bp, Homo Sapiens
  misc_feature (195)..(214): n is a, c, g, or t
aagttaaaaaagctaaatgcaaccaatgttacatcccagataaaaaaacattattcaaaagcaattcaaataccgaaaaggatttcaaatgaaatattttattaacatggtagttgcctttgtaacatgtgcacacacactcgcacactcagaatgatctgcctgggggaaaaatactaaatatgcctaaggggnnnnnnnnnnnnnnnnnnnntcctgtaggttttcattattgtaggcaattatgtccacatcacttacaaagctattgccaaatctgtccaaggaagcagagtttgaagtgagggctagggacaggaatcttgggaaaaattcaacagtggcatagcagagctctcaatatgagaaagctgacataatgtggacttttgctgtgaatttcctctttgcaaaatatggggagaggtttatcaatgggcagaaaataagagaaggcggtgtgaagtaggcttctgcagtcaattttcctcacagtattgtgcagggtcatcaagaaaatgcttagtctttctctggaaccagtttcagaacttttccaattgcaatggtcttaccctcatctcttaaggtgaaacgacccatctgagggaagtctttaaaggtctcaaggcagatggttcctgctgtccttaagcgagcaatgcatacttgatcttgtttcacaaaacggggtcgggtcttacttttttctcctgattttttgtctaccaagcagattaaggctgttatttccacctcctcaatacaggtatgaatatgcagcaccgcattatagcctgggcagatgatggatttgtgctctataatcactatctgggcatcaaatgtgcgtccagaatgacaaagattattaggatcacaaagtataaaccctggaagaatctcctcttcttcaattcctttcagtctgattttgaggttttcacctggggctacggtatcagtctctacatcatcggaaagtattccaagaacttccacgttgtgcttgtttggcatcatcacaagctgctggcctttacaaatagatcctgattccagctttcccaggaccacagtgcccatatccttgtacttatccacaattggcagcctgattggtccatcaactgatctattgaagttcggcaaattatccagatatggaataaacggtaatccaatgtaccaaggacagaaatccgactgctctttgagatttgctccagtaagtcctgagcagggcataaagtgaatgtcctttttgggattgaagccaacttttttcaaaaatggcactagtttctccttacattcttcatatctctcattgctccaatttactgttggatcatccatcttattaattagcacaattaggtgttttacacctgctgtctttgccaacattgcatgttctcttgtctgtcctcctttttcaaatccagtttcaaactctcctttcctggctgagattaccagcacagccaaatcagcttgagaggcaccaccaatcatatttgggacaaaactcttgtggccaggggcatctagaattgtgaaatgcttcttttcggtttcaaaataggcacgacccacttctactgttttacccttgtctcgttcttcctgatttgtgtctaaggcccaagacaagtaccaggtttctctgtttttctctttagcttctctttcatacttttcaagcgtccttttgtcaaccattccagtcaaatacattatttgtcctccaatggttgacttgccagcatctacgtgcccaatgaatactacatttacatgctctttcttaggagcacctggcggtgcaaccacagacttaggttttgggatttcctcttcctcctccatcatttcatgggcaacgctgactgagggaaggcggcggggcagaagggccgggagctagcgacaaagatccccggcgtcgccgcggcagcagctccagtcccgactccacactcgcgacgacgacagaggcggcggcggcccc

SEQ ID NO: 310586 - DNA, 539 bp, Homo Sapiens
  misc_feature (526)..(526): n is a, c, g, or t
gtgacaggggggttttatggggtgatagagagggaagagggtatgtcgttgcatggaaaggggttgcagttgtgcagatgcagtgagtcgttatttcagcacacaggtcacatgttatggtaatgaagctatagcatctcccagggtgaagatactagcatggtaatgaggaaagtacactgggatccatctgtaaattgctgaggtctgtcatgaactggtttaaaccagctagctggctgcattccacacagggtttggggaaaaaagcaggtgattactcaagttgattgtactcctatagtccctggagacccctcctatctgcttccagccccacccaaccctctgcatctcttctttggctgacatgtgtagacatttgatattctggtccctggtttaatccctcaatgtaatggttgacttaatttatgagcagatgttaagggacttaggagtccactatgtattttttcctaactcaggtttgagaaatttctctaagtcattctgcctgataggntagatatatcact

SEQ ID NO: 310587 - DNA, 655 bp, Homo Sapiens
  misc_feature (328)..(337): n is a, c, g, or t
  misc_feature (384)..(384): n is a, c, g, or t
gtaatgaagaaaataaatctgtatcattttatttaacattcattctttaagttacagttaacacaatctgcttctaatccaagaaatcctagtataatctgaaatacatgcatatacatttagtaagacctacatttctaaataaattacatgcatgatatacaataaagaatactaatatgagaattcaggacatttatttttctgcatggaaatttaactactgtataacacacgcacatacaaaacaaacccacaaagcaacagtgtgtaataggtagtgagagacacacaaaataagcatatttaaaacgcctacaaacagccnnnnnnnnnnaggcaacaaaatacgtccagtccttgacatcttctcatactcacctnggcaccacagatgcaaggacctaacagtaaacatgtacaatctcatggcttaacacctaaagcatgcactgaattgaatttgtatgttgtgatctattctactaagtatgcaatacatactttttcttactaatattttatacattaaattaccctgcaacattttgaaattttaacattgatgtaaaacaacttttgaaagatttatgaaacaagtttcgaggttcaccttcaggctggtttggttaagtggaaaaatggcagcagcctc

SEQ ID NO: 310588 - DNA, 397 bp, Homo Sapiens
tgtgtggggagtctgatatccatgtggatgccaacggcattgataacgtggagaatgcttagtttttattgcacagaggtcattttgggggcgtgcaccgctgttctgggtattcatttttcatcactgagcatttttgatctatgccttttgggcttctcagttcaatgaagcaataatgaagtatttaactctttcactacagttcttgcaagtatgctatttaaattacttggccaggtataattgccagtcagtctcttttatagtgagaaaatttattggttagtaatataaatattttaaactaaatatataaatctataatgttaaacatatgttcattaaaagcatagcactttgaaattaactatataaatagctcatatttacactt

SEQ ID NO: 310589 - DNA, 1275 bp, Homo Sapiens
  misc_feature (45)..(289): n is a, c, g, or t
  misc_feature (1008)..(1125): n is a, c, g, or t
  misc_feature (1132)..(1133): n is a, c, g, or t
  misc_feature (1146)..(1159): n is a, c, g, or t
  misc_feature (1183)..(1209): n is a, c, g, or t
tcaaaatgctttttattattattattttttagacagtctcacttnnnnnnnnnnnnnnnnnnnnnnnnnnnnnnnnnnnnnnnnnnnnnnnnnnnnnnnnnnnnnnnnnnnnnnnnnnnnnnnnnnnnnnnnnnnnnnnnnnnnnnnnnnnnnnnnnnnnnnnnnnnnnnnnnnnnnnnnnnnnnnnnnnnnnnnnnnnnnnnnnnnnnnnnnnnnnnnnnnnnnnnnnnnnnnnnnnnnnnnnnnnnnnnnnnnnnnnnnnnnnnnnnnnnnnnnnnnnnnnnnnnnnttgagcccccgcgcccagccatcaaaatgctttttatttctgcatatgttgaatactttttacaatttaaaaaaatgatctgttttgaaggcaaaattgcaaatcttgaaattaagaaggcaaaaatgtaaaggagtcaaaactataaatcaagtatttgggaagtgaagactggaagctaatttgcattaaattcacaaacttttatactctttctgtatatacattttttttctttaaaaaacaactatggatcagaatagccacatttagaacactttttgttatcagtcaatatttttagatagttagaacctggtcctaagcctaaaagtgggcttgattctgcagtaaatcttttacaactgcctcgacacacataaacctttttaaaaatagacactccccgaagtcttttgttcgcatggtcacacactgatgcttagatgttccagtaatctaatatggccacagtagtcttgatgaccaaagtcctttttttccatctttagaaaactacatgggaacaaacagatcgaacagttttgaagctactgtgtgtgtgaatgaacactcttgctttattccagaatgctgtacatctattttggattgtatattgtgtttgtgtatttacgctttgattcatagtaacttcttatggaattgatttgcattgaacacaaactgtaaataaaaagaaatggctgaaagagcannnnnnnnnnnnnnnnnnnnnnnnnnnnnnnnnnnnnnnnnnnnnnnnnnnnnnnnnnnnnnnnnnnnnnnnnnnnnnnnnnnnnnnnnnnnnnnnnnnnnnnnnnnnnnnnnnnnnncataaannattcctgggggcnnnnnnnnnnnnnnaaaaactttttaaaacattttttnnnnnnnnnnnnnnnnnnnnnnnnnnnacctgggtcttactgtgttccaaggaaaacccgggccctcgactaagggttgggatctcccacaac

SEQ ID NO: 310590 - DNA, 2712 bp, Homo Sapiens
  misc_feature (231)..(311): n is a, c, g, or t
tgcgagtttcaggatccaaccatgtgggcggcaagacccgtgaggaggctgctgctccaggactctggggctggaagcagggcaggggagagaccactgcaggagacacatcagtgagatgggagcctaaccggatgtgacaggaggcaggagagggtagaggggaagatagggaggagggggcagaggggaagatgagctggatctgcctgagcctcatggcagctgctnnnnnnnnnnnnnnnnnnnnnnnnnnnnnnnnnnnnnnnnnnnnnnnnnnnnnnnnnnnnnnnnnnnnnnnnnnnnnnnnncaggtgcacatttgtgcctgaagcaaaactctgctagggaaagctgggagaaaggcaggtggctacctgtggccagtgactgctctaggggacagagcacaagacaccactgccatccccataggattgtctccctggccagcacggcctagatcatacagcaccttggagcccagaacagggctcaaaagcagagggaaagggttcatccccataccgtgcattctccgtgaacagtcactccacctctccaagaacaaagacagccagcagcatagtcatcttagctttattgagtaaggcatcccaatctctgctaagattcttctaaatgaacggctgatttttctgccaaactatgcattggtcaaagagaaatcaccacctggccaccccattctgtccccctacaggacactaagggttcttacagataaagggacgatgcattcatgcctggagaactaatcacacctgatttctctgggatctaaaataatgtcaaatttgattcactttatgtaaagaaaatcttttttttctgcaaaccccttcagaacaatgctgccatccatgcgagatgtgtgtaaggccacctctgtatactaagaatggtgccccagcaggtggaaggacggcacacctgctgagcgtgggcacacgctgcgttctacatctttgagaccaccggtgggttccgggcatcagaatccagccacttaatgaggatctgattcacctcggtgggcttgtccatctgtgtccagtgcccacagtcctcaatgtgtccccttttcaggtggggaatccagtcctccatgtgctgggacatctgaggaacgagcacgaagtccttctccgccgtgaccatcagggccggaatcaggatcttccgtcccaagcttttgcaagcccacttccagttcctttccatgtttcggtaccagtttagaggacctctgaaaccagacttcttgaactgctgcacatagaactggatttcctcctcagtgaccatcctgctgaggctgggctcttctgggctatttacaaaaagtcctcctgcttcacagactttatgcatggataaaacactctcatcgcttgctctgaagaggcttttgaaagtccgactcaggttctgttccagttcagcctcagccactcctggttcttggaagtagagctggtaatcaaatactgggttggctttgatactctccaaaggggacatgttgggatttgctggtatgaagggagtattcaaactggccaccgccctcactctctcggggtagaagagagccatgtaccacaccagcatgccaccccagtcatggccaatgaacactgcttgagagaggcccagtttatccaggaaggttaccatctccttacataacacttccatgcaatattcttctatttcgggaggagcagatgactctccatagcctttcatgtccatagctaggacccggtaacctgcctgggccagagcagggatctggtacctccaagaataccaactctcgggaaatccatggcagaggcacacagcagggccggagcccagctccacaaaatgcagacggaccctgggctttactgtcacgtacccatggctcatgtcacttggattgcaagaggtcggcagaggggccggggtattgagaagctggattcccgtcactttctccagttctttcagggccgtgtcagtgtcctggaccaggatggtgaccattcccaagtcacgggctggcttcagattagccccgatgtcatccaaaaaaacgacctcactggggctggccttcagggtgtccagcagaaacttgtagatctgaggttcaggtttgaccattcccacctgacacgactctatcaggaagtcaaagtgcatcttcagctcacacatcagctgggccaggccatctctctcagcacggtcgtccagccaggtgttggtgaggatggcagtagtgaatcctttcttcctgagcatgagagctgcctggagcatggggcggttgatctttctggctgaaatcgccttgtcaaagatttcttttatggagaaattcttggggaggcagactttagcggtctcggagcacttcctgcagttttcttccatgagtggtatccactgggaaagtgtgatctctcctttcataagccgggtagtggcaccctctggtccccctttctggaaagcatcattcagaagtcctctgggcagcgccagggcctcctccgtgcggccgaggacgccgaacatcgctggcagcgccagcaccccgtcaaggtcgaagacggccgcgcgcagcgtcatggcggcgggtctgcagcctagcacccggacacgcagctaacctgggagatgcgcgaaggccag

SEQ ID NO: 310591 - DNA, 846 bp, Homo Sapiens
ggggaggggccaaaaaagtttaatttgggggtttctccgcacgcattaagcccagggggataaaactgggagagaggggccttggtttggaaggtggagggaccttcgtggggctccacttttggtaggaggaaaagcattaggggcaggcccttagggctgttgctctgggcaggggttggggttccggggccttacagttggggccccttagttggcacaggttcggaagggccccaggcagacatgaattctcctgagacttgaggtaggttgcttcagccagcccgggcggagaagaagggcagagagcgaacataggagtccagtcgggagcgaaagagctcactttgcacagtttggcccagcgggcacaggggattcttcaccaccagctccacatacagcgcactgtagatgtggtgcagcacatctcggatgggtcccacgcccaagtcagtattcatgacaactttgatcccagtgggcgtctcgtagtaatggagtttgtaacggctagtttggaaggccaggaagccatccttcatgtctagcggggacatcttgctgacaaacgagcggatagagaagagcatcccgtacatcagcttatactcctcctccttgggaatccctgcttgcttcttgcggtgccattcgctgtagtgcagacacactccattccggtcaaacaggtacaggttgtggacagtcatctgcagggcagggagtgtgagcctcgctccggggccgcccccactccttgggctcgggttcccggacccacagccttccaaccaggtggggaccctcgtgccgaattcgccacccaggcctcgcgtcctt

SEQ ID NO: 310592 - DNA, 759 bp, Homo Sapiens
  misc_feature (154)..(190): n is a, c, g, or t
ttttgagagtgacaaaaagtttattctgtgcttctcgcagcattaggcaggggataaaactggagagagggcctggtgtggaggtggagggactctgtgggcttcactctggtaggaggagagcatcagggcaggcctttaggtggttgctctnnnnnnnnnnnnnnnnnnnnnnnnnnnnnnnnnnnnncccttagttggcacaggttcggaagggccccaggcagacatgaattctcctgagacttgaggtaggttgcttcagccagcccgggcggagaagaagggcagagagcgaacataggagtccagtcgggagcgaaagagctcactttgcacagtttggcccagcgggcacaggggattcttcaccaccagctccacatacagcgcactgtagatgtggtgcagcacatctcggatgggtcccacgcccaagtcagtattcatgacaactttgatcccagtgggcgtctcgtagtaatggagtttgtaacggctagtttggaaggccaggaagccatccttcatgtctagcggggacatcttgctgacaaacgagcggatagagaagagcatcccgtacatcagcttatactcctcctccttgggaatccctgcttgcttcttgcggtgccattcgctgtagtgcagacacactccattccggtcaaacaggtacaggttgtggacagtcaatctgcagggcagggagtgtgagcctcgctccggggccgcccccactccttgggctcgggt

SEQ ID NO: 310593 - DNA, 421 bp, Homo Sapiens
  misc_feature (139)..(139): n is a, c, g, or t
  misc_feature (145)..(145): n is a, c, g, or t
  misc_feature (151)..(188): n is a, c, g, or t
  misc_feature (283)..(283): n is a, c, g, or t
  misc_feature (303)..(303): n is a, c, g, or t
  misc_feature (313)..(313): n is a, c, g, or t
  misc_feature (320)..(320): n is a, c, g, or t
  misc_feature (405)..(405): n is a, c, g, or t
gagagtgacaaaaagtttattctgtgcttctcgcagcattaggcaggggataaaactggagagagggcctggtgtggaggtggagggactctgtgggcttcactctggtaggaggagagcatcagggcaggcctttagntcgttngctctnnnnnnnnnnnnnnnnnnnnnnnnnnnnnnnnnnnnnncccttagttggcacaggttcggaagggccccaggcagacatgaattctcctgagacttgaggtaaggttgcttcagccagcccgggcggagaaanaagggcagagagcgaacatnaggagtccantcgggangcgaaagagctcactttggcacagtttggcccagcggacaagggggattcttcaccaccagctccacattacaagcgcactgtanatgtggtgaagaaatc

SEQ ID NO: 310594 - DNA, 1295 bp, Homo Sapiens
gtcctgaaattggtcatgtagcttttctgcgaaatagtattgaatctgaatactttcacaaaataatactgaaaggtaaaccctaaatcttgccagactgcattagtattttggcattgaaacttgtgcaatatctgtgtaatgtagaatgtggggtgtgcatgcagatgtctggtactggagtaagctgaaggtatgtgcagtatttaagaaaatgtacattctaattaattcacttataaaaccatttacatattgtgtatatgtttttattttcaaatgataaactctagacatatattttgcaaaatgagcttgggtttaaaaagtgctttgtgccaaaaatatcatacctaatttttatagtgctttactatcagaatttatattgtttattatatcttttaaaagcagtaagcagttttcatctgacagcgtagataaaagaggagtataggaatttgaatgctagagcatctcccaggtgagccttattgcagatctttttgatatagtcacccataagcatggtgagctcctgctctcataaggtcagccaaagccccttaagaaggtacacagcacatctgcagtcattcaggaggtcctgtgaagtgtggtgatgcatctaacaccttttgctgctcactgagaacccagctttgaacttacaagattacactaaccatttttaaagtgcacaaaaatattattattagtcttaactaaaattacatattttataatgccctgcaactctaaaccatccttttgtttacacatttttgtatggtattttaagattatcaatcacttcaacatttctataaccttgtttgtatagcactttctcaagagctgtcagtcccacatacagaatcatttcttttacaaaatgatttaatatgtaatcattgtgtcaggacataaattttgtcacttgggacagtagctttccagctaagataattgcgtgaactctgttaaaactgattatcactcatcaatggctttatttttaacctataaataacccctttcaatatacctggtttttacagcattgcaaaatctgtaaaaataacttttattggaaaatgtcatgaagtcatttttcattatttgtactaaacaatgttttatgtactccttttgtgttttatcttttgtttttccatctgtactcccctcatcctcctaatgttgagaaaatcaaatttcctgggtgtgtccttgttaagtgatcaaaagtaaatgttctctttgccattttagatggaaaaataaagaaaatt

SEQ ID NO: 310595 - DNA, 482 bp, Homo Sapiens
  misc_feature (413)..(413): n is a, c, g, or t
  misc_feature (428)..(428): n is a, c, g, or t
  misc_feature (456)..(456): n is a, c, g, or t
ttacatattgtgtatatgtttttattttcaaatgataaactctagacatatattttgcaaaatgagcttgggtttaaaaagtgctttgtgccaaaaatatcatacctaatttttatagtgctttactatcagaatttatattgtttattatatcttttaaaagcagtaagcagttttcatctgacagcgtaggataaaagaggagtatagggaatttgaatgctagagcatctcccagggtgagccttattgcagatctttttgatataggtcaccccataaggcatgggtgagcctccctgctcctccataagggtcagcccaaagcccccttaagggaggggtaccacaggcaccatctgccaggtccattcagggggggtcctgtggaggtgtggggtgatggcatcctnaccacctttttgctngctcactgagggaccccagcttttggancttaccagggttacacttaccctttt

SEQ ID NO: 310596 - DNA, 756 bp, Homo Sapiens
  misc_feature (24)..(24): n is a, c, g, or t
  misc_feature (33)..(33): n is a, c, g, or t
  misc_feature (432)..(446): n is a, c, g, or t
tgaagagggtacttttaaaactgngtaaatagnaattttcctgaaagaaatatcccaaataaacccacccaactgttaggtttttatccaaaatgtttcatccaaatgtgtatgctgatggtagcatatgtttagatatccttcagaatcgatggagtccaacatatgatgtatcttctatcttaacatcaattcagtctctgctggatgaaccgaatcctaacagtccagccaatagccaggcagcacagctttatcaggaaaacaaacgagaatatgagaaaagagtttcggccattgttgaacaaagctggaatgattcataatagacaactggtctgttaatctttttcatcattgttgtgtataatttacctctcattagaaaggctaacaaattttaagtgccacaggttttaaggattctgcagnnnnnnnnnnnnnnngtccttcagtttagaacctacaaaagcttgtgtatcttgattaatgtactttttattgcatggtgtgaactaagttattgctgcataaatttgtaatatatcctgtttgtatttttttccaagtgtataatgttggtgtggagttttcatgacagaatatacacattttgtaaatctgtacttttttcaaatattgaatgccttatttttgaattctttagatttttaaattggagaaaagcacttaaagttttttatatatgaatattacatgtaaagctgttaaaatacataacttcagtgcaagaaa

SEQ ID NO: 310597 - DNA, 603 bp, Homo Sapiens
atagactgaccgcggggcagctgcggacatggtcgaccccggcccggagaggctcatgcgggatttcaagcggttacaagaggacccacctgtggtgttcagtggcgcaccatctgaaaacaacatcatgcagtggaatgcagttatatttggaccagaagggacaccttttgaagatggtacttttaaactagtaatagaattttctgaagaatatccaaataaaccaccaactgttaggtttttatccaaaatgtttcatccaaatgtgtatgctgatggtagcatatgtttagatatccttcagaatcgatggagtccaacatatgatgtatcttctatcttaacatcaattcagtctctgctggatgaaccgaatcctaacagtccagccaatagccaggcagcacagctttatcaggaaaacaaacgagaatatgagaaaagagtttcggccattgttgaacaaagctggaatgattcataatagacaactgggctggtaatctttttccatcattgttggggataaatttaccctccccattagaaagggctaacaaattttaaagcggccaccgggcttttaaggaattcctgcag

SEQ ID NO: 310598 - DNA, 475 bp, Homo Sapiens
  misc_feature (18)..(18): n is a, c, g, or t
  misc_feature (88)..(88): n is a, c, g, or t
aggcccgaaactcctttnctccaaatctcgtttgttttccctgaataaaactgtgcctcccccgcctatggcctggaactgttaggantcggttccatcccgcagagactgaattgatgttaagatagaagatacatccatatgttggaactcccatcgattcctgaaggatatcctaaacatatgcctacccatcagcatacacatttggatgaaacattttggataaaaacctaacagttggtggtttatttggatattcttcagaaaattctattactagtttaaaagtaccatcttcaaaaggtgtcccttctggtccaaatataactgcattccactgcatgatgttgttttcagatggtgcgccactgaacacccacaggtgggtcctcttgtaaccgcttgaaatcccgcatgagcctctccgggccggggtcgaacatgtccgcagctgccccgcggtcagtactga

SEQ ID NO: 310599 - DNA, 1824 bp, Homo Sapiens
  misc_feature (91)..(113): n is a, c, g, or t
  misc_feature (154)..(164): n is a, c, g, or t
  misc_feature (188)..(228): n is a, c, g, or t
  misc_feature (251)..(343): n is a, c, g, or t
  misc_feature (384)..(397): n is a, c, g, or t
  misc_feature (406)..(550): n is a, c, g, or t
cccccggtttttttccccgggggaaatatttttttccaagggggcaaaagggtgggttgccccgggggaatcagggtccccaaaccggttnnnnnnnnnnnnnnnnnnnnnnnaaatgttatagaaatttcccccctcttcgaagaggggcccnnnnnnnnnnnaaattaaaaaaaaaccccctgggnnnnnnnnnnnnnnnnnnnnnnnnnnnnnnnnnnnnnnnnncgggtttttctaaaaacctgggnnnnnnnnnnnnnnnnnnnnnnnnnnnnnnnnnnnnnnnnnnnnnnnnnnnnnnnnnnnnnnnnnnnnnnnnnnnnnnnnnnnnnnnnnnnnnggggcccccgcccccaaaaaaggttttaaaaaattttttcnnnnnnnnnnnnnncgccaaggnnnnnnnnnnnnnnnnnnnnnnnnnnnnnnnnnnnnnnnnnnnnnnnnnnnnnnnnnnnnnnnnnnnnnnnnnnnnnnnnnnnnnnnnnnnnnnnnnnnnnnnnnnnnnnnnnnnnnnnnnnnnnnnnnnnnnnnnnnnnnnnnncaagattttgttttattttattatggctagaaagacactgttatagccaaaatcggcaatgacactaaagaaatcctctgtgcttttcaatatgcaaatatatttcttccaagagttgccctggtgtgacttcaagagttcatgttaacttcttttctggaaacttccttttcttagttgttgtattcttgaagagcctgggccatgaagagcttgcctaagttttgggcagtgaactccttgatgttctggcagtaagtgtttatctggcctgcaatgagcagcgagtccatcctggcaggcggctgtggtggtttgaagagtttggacaggtcctcctcagggagcgggggttctcctcggctctggcgctgcatattctcctgctggcgacgctgctgatactgatgtttctgctgctgttgtttactagtattcctcatgtatgtgttgtatttaactatatcttggctcatttcatccactctgtccatcagcaactgtagattcttccccaaatgattgctgctggcaaggctgagcaattcatgtttatctgcaacagctgacttcttttcaagttcccacattaggacattgatcagatgtgaatttttaattacaatcggcacttcttcaaacatgtactcaaaggtgatatttgcttttttcaatgcttcaggggaaaaatccttttctttacaaacttccatcagtttaggagtcagtctgtatgcctttagtgagagagatccttgggcagtttttatgggatcataaatgagaacgacagattcttcaatggcatgctggtaactaaactgagagtccaggagtgcccgggtaacgaatgagccatagtatgtggactgataccagcccacgtgaagatgatcaatgtttacatggcgaaggctccgcatcatttccatctgatattggacttcatcaaagtcagcatcatcctctgtgtgctgagggaaaggaaagcagttggtaatttcaagccgatcttctacaaccagacccaaaagcactccttgaacaacttcagttccttgtccttcttcttgataatgtttgattatctttaataccacaaggccatctatctgcacttgcttcacggctgaatctcccgagccgcctttgcctttgcctttccctgctgcgccggcggtggagctggaagaggtggcagtagagccggtaccttccttgcgggacgccatctttcccctcgtgccgaattcgccacccaggcctcgctacct

SEQ ID NO: 310600 - DNA, 1652 bp, Homo Sapiens
  misc_feature (53)..(65): n is a, c, g, or t
  misc_feature (69)..(69): n is a, c, g, or t
  misc_feature (71)..(71): n is a, c, g, or t
  misc_feature (102)..(102): n is a, c, g, or t
  misc_feature (110)..(253): n is a, c, g, or t
gggccgggtttccctggggaccccgggttggccctcgttgcccgttgttgttnnnnnnnnnnnnncctngngggtggtttttaaaggtttttttgggggtgngggggggnnnnnnnnnnnnnnnnnnnnnnnnnnnnnnnnnnnnnnnnnnnnnnnnnnnnnnnnnnnnnnnnnnnnnnnnnnnnnnnnnnnnnnnnnnnnnnnnnnnnnnnnnnnnnnnnnnnnnnnnnnnnnnnnnnnnnnnnnnnnnnnnatgttccaaatgtgatgggtttattttattttactatgatgcaaaaccaaagattccactatagcacagagaccagtatattacaaggtcatgaaaaaatggtgtgggacatgcaggacgtgatgtacaaactggtgggtcagatcgtctcctctaacatgacgctacactgtcgctgaggaacacatttaataacacttcagaactgaactgaaacgtggcacaaacatgacaacttccaggcatgccttcaagcgtctccctcaggagggattcgcaacccctagacttcagtgtggggaggattacaattctttggaagaataaaaagttcacacttttgaaatttcacagaagaattttaaggccaaaacatagtgggttcatttctcttcacttccagggacaaatctgatgctttcctcaaaccacattaagcttccagttcaaatcccaagccaaccttgtgacctcctgcactgaagttcttcccatcgattaaagctgataaagtcaatttgactcctggtcgaagggtctgagtataacccagtccaatcaggctggcattatttactttagcagagagagaagttctacaatccagcatgtacttagcagcaatgccaaaacgggtgttgttactcccagctgtccaagcaaggtttatggatgtttcaatcttctcattcaccttctggtagatagaacctccaaattcagtgccatcgttcacatgtgtgtgcagctggaagtccgcagccttgtaacccagggcgaaattattctgtgacagtttggatttggctgtgtcaaaactcatctgatagccagcaagccacccttcgaaggccaacacagcccagccatagatggttggtccagaaaaatctatatcaacattactgccaacactaaaacaatcccgtttataggaggccttcaatttcccactcttctttcctgtgttcggtacaaatatggtatcaagagtcagtttcaacccttcagccaacttattctcccaagagatttctgtccctagagtattgtctgtgttccatttctgggtgaaggtaagtccatagttacagaccttatatttggtttctaggttgcctgatgctttccctgtatcagtgtaagcatgaccagaagtagaaaattccactccactacaagacttggttttcaggtctatcttgaccatgccaaagccatatcctttgttgaagacatccttagcagcctttcctaggtcacagtacgttggtgtgttacacatatcttagaaaaatctctctcaggctcttatgaaaccaaagacctccaccccgagggcctgtctctgctccgccagggcaacgctgaaggtcttcaaaccaacgccgtccgcccc

SEQ ID NO: 310601 - DNA, 438 bp, Homo Sapiens
  misc_feature (40)..(40): n is a, c, g, or t
  misc_feature (121)..(121): n is a, c, g, or t
  misc_feature (135)..(135): n is a, c, g, or t
  misc_feature (154)..(154): n is a, c, g, or t
attcctttcactacacaatgagctggcttattagaattanttacggaacaagcaaacttacactcatatcacaacattctctgaaaacttaagacacaaacataagagcagatccgaatcntggcagcacattcnttacagagagagaagttcntacaatccagcatgtacttagcagcaatgccaaaacgggtgttgttactcccagctgtccaagcaaggtttatggatgtttcaatcttctcattcaccttctggtagatagaacctccaaattcagtgccatcgttcctgttttcatagataagaaaacgtcataaatatctagtttgtaccattgttattatggtatgaaaacaaattctaagactatctaaacaaggatcccattttgtaactatagatttcagcaaatttctagcataaatgactactaaa

SEQ ID NO: 310602 - DNA, 349 bp, Homo Sapiens
tttcttacaaacccttgtgtcaaaggctgactctccatagatcacagtgagagagctgccccgctgtggatgaaaccctcacacagaagcaggtcatctacaaatgctttagcgccaggttttgcacaaacatgcattgcatgacgtagacattagattttattttaaataaatagtttgaagcccaggatattgttgtattcctccaaagaatacttgtacttttatcctcaggtgtctggggctactagctatctgaaatcaactgaatttaatttcagggtatgagatttttctgggttactcggatgaatggaatgcaggctacaatgcatgtgaggagctagtt

SEQ ID NO: 310603 - DNA, 830 bp, Homo Sapiens
aatataaaagagaatgggttcttgtcttcccttccctatttgtttgcctggatctgtggtaacctagcaggtcagttatcagacttcttcctgaccaggaatattctcagcgtaattgctgtccggaaactcttcacagcagcaggatttctccttcctgcaatctttggtgtctgcctgccttacctgagttccaccttctacagcattgtcattttcctaatacttgctggtgcaacaggcagcttttgcttgggtggagtgtttataaatggcttggatattgctcccagatattttggatttattaaagcatgttcaactttaactggaatgataggaggactaattgcttccactttgactggattgatccttaagcaggatccggaatccgcctggtttaaaaccttcatcctgatggcagcccattaatgtgactggcctaattttctaccttaatagttgctacagcagaaattcaggactgggcttaaagaaaaacaacacacacgtctctgaagtgtgaaacagagcacttgcagagcctgggacaacctccttattgaagggaagagggaccagcacatgaggctgaggctgaggggcagtcaccagcaccaggaagaaggtggtaggaggagtcctaggggccggttttaccctcccacatatcctgtgtgcatcgttttttaacatgtgttgtttgtaacatgtaatatatctgaattttaaatgggggtggtgatttatctcagtcttcctctctgcatcagttgctttataaatgattgtcaaaccaataaatacacacaagataaaattttaaa

SEQ ID NO: 310604 - DNA, 915 bp, Homo Sapiens
caaaacttatttatgtgttagccacaattattctacaaagagacatttctcctccaattcatttaccactggtagagtttacataagcaaagcacagtgttataccttggacacaccttaaaggactctttgtgtccatcattcatttgaaattcttagacacttatataatgtaatggcttgatattatagcacttgccaaaggtgcttggttccaacctttttcactttgagtgttcattttacacactgttcttcctacttcgttgaaggcgcctttccagtcttttttggaaacttttctttttcatcctcatcttttgatgttaaagaggcccagcctcccaaatttatatctccagccttagcatccccacagagtcccacagccatttcaggatgtctaatattctcaggcttaacatggtctcctcttttccaaacctgcacccgttattccttctcatctgaggagtcatccttatctcctctgtctcctgcattcccagtttcaaaaattgtccttaatctgatcacttctcaccttcagagacgtgtgtgttgtttttctttagcccagtcctgaatttctgctgtagcaactataaggtagaaaattaggccagtcacattaatggctgccatcaggatgaaggttttaaaccaggcggattccggatcctgcttaaggatcaatccagtcaaagtggaagcaattagtcctcctatcattccagttaaagttgaacatgctttaataaatccaaaatatctgggagcaatatccaagccatttataaacactccacccaagcaaaagctgcctgttgcaccagcaagtattaggaaaatgacaatgctgtagaaggtggaactcaggtaaggcaggcagacaccaaagattgcaggaaggag

SEQ ID NO: 310605 - DNA, 448 bp, Homo Sapiens
  misc_feature (421)..(421): n is a, c, g, or t
ttgtgtgtatttattggtttgacaatcatttataaagcaactgatgcagagaggaagactgagataaatcaccacccccatttaaaattcagatatattacatgttacaaacaacacatgttaaaaaacgatgcacacaggatatgtgggagggtaaaaccggcccctaggactcctcctaccaccttcttcctgggtgctggtgactgcccctcagcctcagcctcatgtgctgggtccctcttcccttcaataaggagggttgtccccggggtctgcaaggtgctctgtttcacacttcaggggacgtgtggtgttgtttttctttaggcccagttcctggaatttctggctgttggcaacctataagggtgggaaaattaggggcagttcacctttaatgggccgcccttcggggtgnagggttttaacccggggggtttccggt

SEQ ID NO: 310606 - DNA, 1250 bp, Homo Sapiens
tgttttttgcttggtaaattcattttaataatgaggggaaaaaactttagttattaaaaacaaaagaatgaatacacatacacacactaaatgtggcagatgtttccaggagagattagcaacagagaggccacatgatcaaataaaatttacacttttgatgggattgtcccctcgtggccacccaagtgtttgtggaagaaagtctggagttgtttccaagcatccacctgagccatggcatgagccctgggctcccctccccagataataggactgcccaccaaggcatgcagggaagcccgacacagggggaagtaaggaggctcaatatagtgccctgtctctgggtaacagatgatctggggctttctcctcccatgggcctgcaagcgtttacaggcctcattagcatagaactcactcttccagttgtggtcatcctgacctaccaggaacaggaaggtgctctctgccctttccacaggaatgaagctcttctggtcaggtccttccaaagggctgttcaggacatccacaatgtctgcatagccatctttggtcaccttgatgcgatttctgttgacgcccacagggggcagggtctcgcccttgtagcgtaaggttcccccaacattggccacagagccgttgatgacgacagcagccgtgatgcccttcaggaaagaggccatggaaaggcagagctcaccccctttggaaattccaagcagcccaactcctggaccttttacctcgggatgactgagcaagtagttcatggcttcttcaaagtactccagatggagcgtctccatggtcttggggaggtcttcatagttataataagccagagccatcacagcaaaacccttcccagccagcagactagcccgatactccagcaggccacctccagttccgaacatgtccacaatcccaggaaagggcccaggttctggcggcaggaagagcgtgcctcgcacccggcccacgcgcaccggctcgcgccgcaccccgggcgggaggaagtagcgctcgtgccgcgtctggcacagcagccgcccggggtcggggtcgtggccatccagcacctccagctccacggccaagggcgttcgcacgtcgcgcttcaccagccgcaccaaaggtttctcgggctccaaggcccagagcagccccatgggctcaagccccgcgaagctgccgcccagcgcgggcgcgcgctccaggtccagctcgccaagagt

SEQ ID NO: 310607 - DNA, 469 bp, Homo Sapiens
  misc_feature (126)..(168): n is a, c, g, or t
  misc_feature (334)..(385): n is a, c, g, or t
gatatttggaagaagagggttttcttgagaagagggcacagcccgtgccaaggcgccaaggcaggactgcacctgggtgttggaggaacagggaggatggcccgtgtggctccagaagagtgaacnnnnnnnnnnnnnnnnnnnnnnnnnnnnnnnnnnnnnnnnnnncaaggtgtgcagggccttgtggactgcagggaggacttgggctttgacgcataggaaggtgggagccatggagggctgtaggcagagcagggatgggccctgactcaggtgctcacaggcgtcctctggctgccgtcggtagaatagatgacatacaattatccgnnnnnnnnnnnnnnnnnnnnnnnnnnnnnnnnnnnnnnnnnnnnnnnnnnnntcaggggtttaactgaaagcagaatccacggacacctgcactgctccctggggtctccctggatctccaccttgtctctcagcc

SEQ ID NO: 310608 - DNA, 1592 bp, Homo Sapiens
  misc_feature (681)..(693): n is a, c, g, or t
  misc_feature (858)..(858): n is a, c, g, or t
  misc_feature (1146)..(1146): n is a, c, g, or t
  misc_feature (1219)..(1219): n is a, c, g, or t
tttaaattaaaaaacaatttattgaaaaagagtaatgctttatacaaattcccattataaaaccccaaaatgtctattggtctgtttccaggtgtggtagaagaatataaaaagatcaaaattggataaattctattgtaacaatttcgttggtcattttgggccataaaatttttttgtaatgtttggtaactgatatccacatggaattacactcacacatcatgaagatctatgtatgtggcaaaagccatttaaattttaacttccaaaagcatatattctcaggtttggaaggcacactaaaatttattaggtccaattcctcataagacacggtggctgactttccttgtgtagtttattatgaagtaccatttccaaactaactatcctagcagcgtcagctgccagctaacagcaagagctctgagggcatcactgaacagatagcaccttatgagttattatgattcaaaaatctcccttgctgttggatttaccaacacgtaggcttttatttcttcccattacatctgtttagccacagaaagcattgggccatactcactgcagaagataagacttcctcagaatcttattcgtttagtgcactcaattttacttcactgtctcatcacttgagagactggttaaggcaagaaacccatttcttaacannnnnnnnnnnnncaaacatttgaaaagcaacaccaaaacgtatgcagttaattcctcaattctttcccttagtatagcactttttaaattacaaaaccacacttacatgtattctatctcactggatccccacaacatcactgtgaggtgggaagatcaggaattacaaaccaccgncttacagatgaagcaataagcttacagcagccaaatgccttgctcaaacacagacggtgattgatagcaccaagactcaaatccaggtctccagacaccaatgccaacaccctttccattacatcatcttgctcaagtgaaatagcattctgtacagactggaaaagtaagagcagttgttaaaatggaacagagcacaaacatgtcagacacagctgaaagaatggaaatagactggtagagagaggaaggcactgagccacatgaaggtatgtgcgtaggttttgnttcagtggaaatagactggtagagagaggaaaggcactgacccacatgaaggtaatgtgtgtaggttttgttncagtggaaatagactggtagagagaggaaggcagtgaatcacatgaaggtacgtgtgtaggttttgttcagtgacttcttcagtgtcctcagccagctgagcaaataaagacactacataggcatagttcatgttcaaagaatgagagtaatataaactaattaatattcacactacctcttctaactggttaagtatcattatctcaatttggcagatagaaaaaagaggtagaaagattaagtgacttgcttacagctacagagagaatatttgtcaccagattatcactccagaaagtctagcactttgttcagacaaacagaccacaccttattaggaagatataaaacgcatgataattacacttggg

SEQ ID NO: 310609 - DNA, 649 bp, Homo Sapiens
  misc_feature (610)..(610): n is a, c, g, or t
  misc_feature (613)..(613): n is a, c, g, or t
cacgagaagaactgtgacctgatgtggaagcagagcatatggacatcgaccatctccagccatctggctaccaagcatctcaaggaaggaggcctcctgaccttggctggcgcaaaggctgccctggatgggactcctggtatgatcgggtacggcatggccaagggtgctgttcaccagctctgccagagcctggctgggaagaacagcggcatgccgcccggggcagccgccatcgctgtgctcccggttaccctggataccccgatgaacaggaaatcaatgcctgaggctgacttcagctcctggacacccttagaattcctagttgaaactttccatgactggatcacagggaaaaaccgaccgagctcaggaagcctaatccaggtggtaaccacagaaggaaggacggaactcaccccagcatatttttaggcctcatctcagtgcctatgaggggcctgccagcccctgtttgtggtacgagataatgagtcctatttttctctcacataatatgcatttgctctcctaggacagtgtaataccattatgtgaagtaaagacatgcgagactggtggcctgcaaatagcatccgtcaatctngtngtaactgcatagggagggctctgcatagcacctgct

SEQ ID NO: 310610 - DNA, 1413 bp, Homo Sapiens
  misc_feature (121)..(126): n is a, c, g, or t
  misc_feature (128)..(232): n is a, c, g, or t
gcccgggttttcttttgggaaacaaatttggcccatttttcctttccctttggggccgcggggcgcccaaaagaaagggtttaaaaaaatttttttggggggggagggcgggcgcccaaannnnnntnnnnnnnnnnnnnnnnnnnnnnnnnnnnnnnnnnnnnnnnnnnnnnnnnnnnnnnnnnnnnnnnnnnnnnnnnnnnnnnnnnnnnnnnnnnnnnnnnnnnnnnnnttgtgttgaaatatttatttcaggatttaaatccacccccttccgagaacaccagattaaaagacctccagcaatccatgattctagtatactcatctctgactgctgtatataagatgtgatttgattaaagaagacagacaacaagtgcatttattaggaacaacattctgaatactcacgagtagttatcttgcacacttaaccctaggccagaggacacagggcaaccacacaggaaaaggataccaggacagagtccatggagttttgcttataccacaaaaggagttaaggcagtttaattcaaggatgcgaaaactacgtctatgacataaacatgacattcaaaaataactcagcctttaaaatgtccccaataccaacaaatcaacaaagtagtcaagatgacagccactgtcaaggacagatgaacagtcacaaaagcgatccaacatgacaccgctatagcaggtgctatgcagagccctccctatgcagttaacacagattgacggatgctatttgcaggccaccagtctcgcatgtctttacttcacataaatgtattacactgtcctaggagagcaaatgcatattatgtgagagaaaaataggactcattatctcgtaccacaaacaggggttacagaaaacacaaggctggacaaggccacactgagacaggttagtgacttttctggcaggcccctcataggcactgagatgaggcctaaaaatatgctggggtgagttccgtccttccttctgtggttaccacctggattaggcttcctgagctcggtcggtttttccctgtgatccagtcatggaaagtttcaactaggaattctaagggtgtccaggagctgaagtcagcctcaggcattgatttcctgttcatcggggtatccagggtaaccgggagcacagcgatggcggctgccccgggcggcatgccgctgttcttcccagccaggctctggcagagctggtgaacagcacccttggccatgccgtacccgatcataccaggagtcccatccagggcagcctttgcgccagccaaggtcaggaggcctccttccttgagatgcttggtagccagatggctggagatggtcgatgtccatatgctctgcttcctcgtgccgaattcgccacccaggcctcgctacctt

SEQ ID NO: 310611 - DNA, 1036 bp, Homo Sapiens
  misc_feature (30)..(30): n is a, c, g, or t
ccgccacccgccccttttttatccacaaanatataacggttctaatgtagcgaggcctgggtggcgaattcggcacgagggggagccgggctggcaggagcaggatggcggcggcggcggctgcaggcgaggcgcgccgggtgctggtgtacggcggcaggggcgctctgggttctcgatgcgtgcaggcttttcgggcccgcaactgggtgactgctgaggttggaaagctcttgggtgaagagaaggtggatgcaattctttgcgttgctggaggatgggccgggggcaatgccaaatccaagtctctctttaagaactgtgacctgatgtggaagcagagcatatggacatcgaccatctccagccatctggctaccaagcatctcaaggaaggaggcctcctgaccttggctggcgcaaaggctgccctggatgggactcctggtatgatcgggtacggcatggcccaagggtgctgttcaccagctctgccagagcctggctgggaagaacagcggcatgccgcccggggcagccgccatcgctgtgctcccggttaccctggataccccgatgaacaggaaatcaatgccctgaggctgacttcagctcctggacacccttagaattcctagttgaaaactttccattggactggattacagggaaaaaccgaccgagcttccggaagccttaatccaggtggtaaccacagaaaggaaggacggaacctcccccccgcatatttttagggcctcctcttcagtgcctatgaggggcctgccagaaaagtcactaacctgtctcagtgtggccttgtccagccttgtgttttctgtaacccctgtttgtggtaccagataatgaatcctatttttctctcacataatatgccatttgctcccctaggacaggggaataccattatggggaggtaaagacatgccaaaactggtggcctggaaatagcatccggtgaatctgtgttacctgcataaggagggcttctggataacaccggccaatagcgggg

SEQ ID NO: 310612 - DNA, 1110 bp, Homo Sapiens
aagaaagaacccatttcctcaaaaaaggggatgccaatcacatgaaccgcgggtaataagtcaggggcttatgccagagccctcccctattccatgttgaccccagattggccggatggttattttccaggcccaccagtcttggcaagtattttacttcccataaaagtatttccacggtcctaggagagcaaaatgcatattatgtgagagaaaaataggactcattattttgtacccacaaccagggggtacagaaaacacaaggttggacaaggccacattgagacaggttagtgacttttctggcaggcccctcataggcactgagatgaggcctaaaaatatgctggggtgagttccgtccttccttctgtggttgccacctggattaggcttcctgagctcggtcggtttttccctgtgatccagtcatggaaagtttcaactaggaattctaagggtgtccaggagctgaagtcagcctcaggcattgatttcctgttcatcggggtatccagggtaaccgggagcacagcgatggcggctgccccgggcggcatgccgctgttcttcccagccaggctctggcagagctggtgaacagcacccttggccatgccgtacccgatcataccaggagtcccatccagggcagcctttgcgccagccaaggtcaggaggcctccttccttgagatgcttggtagccagatggctggagatggttgatgtccatatgctctgcttccacatcaggtcacagttcttaaagagagacttggatttggcattgcccccggcccatcctccagcaacgcaaagaattgcatccaccttctcttcacccaagagctttccaacctcagcagtcacctggtcagcctgctcagtgaacgagtctgtcattttaacaatgatgctagcgctggcctcttcattctccaccacatcaacgctggcaacccaccagttgcgggcccgaaaagcctgcacgcatcgagaacccagagcgcccctgccgccgtacaccagcacccggcgcgcctcgcctgcagccgccgccgccgccatcctgctcctgcccctcgtgccgaattcgccacccagc

SEQ ID NO: 310613 - DNA, 984 bp, Homo Sapiens
  misc_feature (605)..(606): n is a, c, g, or t
  misc_feature (616)..(616): n is a, c, g, or t
  misc_feature (619)..(620): n is a, c, g, or t
  misc_feature (623)..(623): n is a, c, g, or t
  misc_feature (630)..(630): n is a, c, g, or t
  misc_feature (635)..(635): n is a, c, g, or t
  misc_feature (639)..(639): n is a, c, g, or t
  misc_feature (641)..(641): n is a, c, g, or t
  misc_feature (643)..(643): n is a, c, g, or t
  misc_feature (645)..(645): n is a, c, g, or t
  misc_feature (648)..(648): n is a, c, g, or t
  misc_feature (661)..(661): n is a, c, g, or t
  misc_feature (682)..(682): n is a, c, g, or t
  misc_feature (685)..(686): n is a, c, g, or t
  misc_feature (694)..(694): n is a, c, g, or t
  misc_feature (700)..(700): n is a, c, g, or t
  misc_feature (712)..(712): n is a, c, g, or t
  misc_feature (715)..(715): n is a, c, g, or t
  misc_feature (739)..(739): n is a, c, g, or t
  misc_feature (744)..(744): n is a, c, g, or t
  misc_feature (747)..(747): n is a, c, g, or t
  misc_feature (756)..(757): n is a, c, g, or t
  misc_feature (764)..(764): n is a, c, g, or t
  misc_feature (767)..(767): n is a, c, g, or t
  misc_feature (769)..(837): n is a, c, g, or t
  misc_feature (842)..(842): n is a, c, g, or t
  misc_feature (847)..(847): n is a, c, g, or t
  misc_feature (856)..(857): n is a, c, g, or t
  misc_feature (868)..(868): n is a, c, g, or t
  misc_feature (885)..(885): n is a, c, g, or t
  misc_feature (889)..(889): n is a, c, g, or t
  misc_feature (891)..(893): n is a, c, g, or t
  misc_feature (898)..(898): n is a, c, g, or t
  misc_feature (906)..(906): n is a, c, g, or t
  misc_feature (908)..(909): n is a, c, g, or t
  misc_feature (912)..(912): n is a, c, g, or t
  misc_feature (915)..(915): n is a, c, g, or t
  misc_feature (926)..(926): n is a, c, g, or t
  misc_feature (937)..(937): n is a, c, g, or t
  misc_feature (951)..(951): n is a, c, g, or t
  misc_feature (957)..(957): n is a, c, g, or t
  misc_feature (972)..(972): n is a, c, g, or t
  misc_feature (975)..(975): n is a, c, g, or t
tttgggtcagaggcagtttattttaaatgtgatttcatttacatttataagcagcttttcttgacaggaattttgattaaattgccttcagttctaaaacaaacctctgttgctttcagacttaatgtgctctgtccccaacaaaacatatgaaaatataatttaaagcacagttttcacagacacagtacaatacattcactatacacagtataacaaaatattcccatccttacctgtttagtaatactgtcacaatgaataagtaaatagaaattggaatttatctttgaaagcattgaaagaaatttaacatgcacaatgactattttatgactgtttagctgttgaactactgatccagcctgcagtttcttgcactagaaagagcgaactaaataataattgctggcctaaaaaattttttttggtcaattgtaggtagatatgaaatagccaagtggggccttcttatgcaccaactagttgcgtctcatgtctggatcacccttttaaacataggataacactgtatattcaggaccaagaccatacttcagatctgaggaaatttttagagggcagtgtttttattaatactttgnntccctcatantgnnggntttttgngcttntggntntngnggnttactcatctaanaaaaagaaatgtaataatttnaanntgtatganaattgngggggggaaaangantaaaagttttttgtgatgttgganttttnatnaattggggnnatggggngantnnnnnnnnnnnnnnnnnnnnnnnnnnnnnnnnnnnnnnnnnnnnnnnnnnnnnnnnnnnnnnnnnnnnnggaanatggntaatatatnntgtttttgggnttgaaattggggggagngagnannnaaggnatggtggntnngtnggngggggggagantttgggatggnaaagatgttgtttnaaattnttgggagtttttgtnatnaatttattt

SEQ ID NO: 310614 - DNA, 2899 bp, Homo Sapiens
tgccgctgccaccgcaccgccgccatggagcggccgtcgctgcgcgccctgctcctcggcgccgctgggctgctgctcctgctcctgcccctctcctcttcctcctcttcggacacctgcggcccctgcgagccggcctcctgcccgcccctgcccccgctgggctgcctgctgggcgagacccgcgacgcgtgcggctgctgccctatgtgcgcccgcggcgagggcgagccgtgcgggggtggcggcgccggcagggggtactgcgcgccgggcatggagtgcgtgaagagccgcaagaggcggaggggtaaagccggggcagcagccggcggtccgggtgtaagcggcgtgtgcgtgtgcaagagccgctacccggtgtgcggcagcgacggcaccacctacccgagcggctgccagctgcgcgccgccagccagagggccgagagccgcggggagaaggccatcacccaggtcagcaagggcacctgcgagcaaggtccttccatagtgacgccccccaaggacatctggaatgtcactggtgcccaggtgtacttgagctgtgaggtcatcggaatcccgacacctgtcctcatctggaacaaggtaaaaaggggtcactatggagttcaaaggacagaactcctgcctggtgaccgggacaacctggccattcagacccggggtggcccagaaaagcatgaagtaactggctgggtgctggtatctcctctaagtaaggaagatgctggagaatatgagtgccatgcatccaattcccaaggacaggcttcagcatcagcaaaaattacagtggttgatgccttacatgaaataccagtgaaaaaaggtgaaggtgccgagctataaacctccagaatattattagtctgcatggttaaaagtagtcatggataactacattacctgttcttgcctaataagtttcttttaatccaatccactaacactttagttatattcactggttttacacagagaaatacaaaataaagatcacacatcaagactatctacaaaaatttattatatatttacagaagaaaagcatgcatatcattaaacaaataaaatactttttatcacaacacagtacatatttgtcatttttaaaaagccacacaatagaaacaagacaccaagatatttaattatcttgttgactcctgtaaaatagctaaacactcatcattcgcggtgcaatactcatagacataagttcctgaaacaatagtttgcatgcgtaaggcattcgcaccaaagaaatctgggttttattgcggcagcccctgcattcatatgtatgggtcctggtgttggcaatcgccattattccacaaagattgcaaacatgaacctgatatggatctgatgcctcaaacaatctttcccttaaaaactgggctgctccatgggcaatctgacaatctcgttccatttctccaaaacgcaggccaccatcacgagatctaccctccatgggctgtctattgaggatctgaataggtcccctagcacgagagtgaatcttatcatccaccatatgcttcaaacgctggtaataagtggggccaataaatatttgtgatgtgatttttcgaccagtgaacccattgtacaggacctcatttcctctgagatgatagccataatcagataaaagattagaaatcttctgcacgttaacagcatcattaaatggagtggcatcaccaatttcacccttgttagccgataccttcccttgaaggcattcaattaagtgaccaatagtcatacgagaggggatggcatggggattgatgatgatatcaggggtgataccttcacaggtgaaaggcatatcctcttgtctatactgaataccacaagtacccttttgaccatgtcgactagcaaatttgtctccaatctgtggaatcctaacagagcgtacccttattttacaaaatttatatccttcctgattgagagttaccataacctgatccacaatgcccgtctcgctagttctgagaaaagtgctacagtctctcttggtatagcgtctattggtgctctccaattcatcttcattttcaggcaaggtgactgttttgcctataataacatcatctcctgatacacgaacccctggagctatcaaaccatcatcatccagcttgtcgtaaatggcatgcctcatgccctggcatgtttcacgtgtaggcttctcaaaaacttcttcttgatcaaatccttttttagactcctgttctttgtatgagcgatagaaaacagacctgaagaagccgcggtctacagctgaacgattcatgataacagagtcttcctgattatatccagtgtatgatgcaatggccacaattgagttgatgcctgctggcagctctctaaatcgtagatattccatagaccgtgtagtcacaagtggcttttgaggataatagagaacatgggccaatgtgtccatgcgaacatggaagttggtgatgtaaactcccatagcctgcttacccatagcagactggtatgtgtttctaggggactggttatgatcaggaaagggaataatagatgcacagacaccaaggatcattgagggatgaatctcacagtgtgtatatgtggaacaataagctacttctttctcctgtaaatcatctggagtcattgcaagcatcactgtttcttcttccagggtatcaatatactccactaccccactggccacaagatcctgccaactatagttgtgtccacaatcagaagtggtctacaaatacggcctgcatccgtatagatccgaatctccctctctcgaatatctctgatcatagaaacttcagacacaatgatgtccatctgacgtctc

SEQ ID NO: 310615 - DNA, 979 bp, Homo Sapiens
  misc_feature (965)..(965): n is a, c, g, or t
atttcttaacctgtaaaaataactgttgaccatgctaatgtatatatacttgtgcatcttaggacattaagtggtttgctgctttgatggaaattatggttcagtgggttggatacaagagagatgactgttcacagaataacctgtgaactttcacccctctgtatggaaacttgtttcagggccaaatccttgtagctgtcttcttgccccggtcagtgccagccgtactattcacaacactgctgctaccgaggcctaggatcagttcttaagagcagccccggtaactggaggaatgggagccgttttgatgagaaaaatgggctggagagaaggagaaggattaggaaaaaacaaagaaggcaataaggaacccatcctagttgattttaagacagaccgaaaaggtcttgttgcagtaggagaaagagcacaaaagaggtctgggaacttctctgctgcaatgaaagatctgtcaggcaaacatcctgtgtctgctttgatggagatctgtaataaaagaaggtggcaaccacctgaatttctattggtccatgatagtggccctgatcatcgcaaacattttctctttagggtattgagaaatggaagcccttaccagcccaattgtatgtttttcttgaataggtattgataaatggaagcgcttaccagcccagctttgccagccctaataagaagcatgctaaagccacagcagctactgtggttcttcaagcaatgggccttgtaccaaaggacctcatgggctaatgccacttgcttcaggagtgcctcacgtagatagattgaggttttataataatcatttcagaattttactctgcatcacaatgtatttcctctttaatgttgtaaatatttggcaatttaagacattgtgtaaaaagcaatctgtaaaaacatctccaggctttgatttttgtaccatggaaaatgtnattaaccatacagg

SEQ ID NO: 310616 - DNA, 511 bp, Homo Sapiens
gaggggggcacgagggctactgtttcaaaactgtggatttacttgtgttatttgactttcaaaatactattacgttaatgtgcaaataatcagaacatatcacactatagtatgtatataagtatatgaggaatttacatttaattggtatataccgatctagaagtgaagtgagattcctctttttagaaagtgaaccatggatctgtgaccaagttctaactgtgaaatggggacattttacactttctttctttggataggatcagttcttaagagcaggcccggtaactggaggaatgggagccgttttgatgagaaaaatgggctggagagaaggagaaggagtttggaaaaacacagaaagcgattaggaacccatactagatgatttaaaacagacccaaaaaggctttgtttcccttgggaaaaaggcccaaagaaggtttgggaacttttttgttgcaatgaaagatctgtgaggggttccgggcctgttttgtggtctgtt

SEQ ID NO: 310617 - DNA, 2007 bp, Homo Sapiens
ctaaaaagtcaggaggagctactatagaagaactaactgagaaatgtaaacagatcgcacagagtaaagaagatgatgatgtaatagtgaataaacctcatgtttcggatgaagaggaagaagaacctcctttttatcatcatccctttaaactcagtgaacccaaacctatttttttcaatctgaatattgctgcagcaaaaccaactccaccaaaaagccaggtaacattaacaaaagaattccctgtatcatctggatctcaacatcggaaaaaagaagcggatagtgtttatggagaatgggttcctgtggagaaaaatggtgaagaaaacaaagatgatgataatgttttcagcagcaatttgccctcagagcctgtggacatctctacagcaatgagtgaacgggcacttgctcagaaaagactcagtgagaatgcatttgatcttgaagccatgagcatgttaaatagagctcaggaaaggattgatgcctgggctcagctgaactctattcctggccagttcacaggaagtacaggagtacaggttttgacacaagaacagttggccaatactggtgcccaagcctggattaaaaaggatcagttcttaagagcagccccggtaactggaggaatgggagccgttttgatgagaaacaatgggctggagagaaggagaaggattaggaaaaaaccaagaaggcaccaaggaaacccatcctagttgattttaagaccagaccggaaaaggtcttgttgccgtaggagaaagagcacaaaagaggtctgggaacttctctgctgcaatgaaagatctgtcaggcaaacatcctgtgtctgctttgatggagatctgtaataaaagaaggtggcaaccacctgaatttctattggtccatgatagtggccctgatcatcgcaaacattttctctttagggtattgataaatggaagcgcttaccagcccagctttgccagccctaataagaagcatgctaaagccacagcagctactgtggttcttcaagcaatgggccttgtaccaaaggacctcatggctaatgccacttgcttcaggagtgcctcacgtagatagattgaggttttataataatcatttcagaattttactctgcatcacaatgtatttcctctttaatgttgtaaatatttggcaatttaagacattgtgtaaaaagcaatctgtaaaaacatctccaggctttgatttttgtaccatggaaattgtatttaaccatacagggttttggtatgtttatattgtttaccttagtgatgtatttgtttaagtggctaacatccaaacgactgtttgaaggcatcagagtaatcttcagtgtggaatgttaaataacgcttttatactgtattttgtactatgatgtaactccccttccttatggctaggctactgtaacacttgcctgtaatcagtgaagggctgtgcaccttgtactatttcacaatgggttctgctggacagataatgggccagcgttattgaggtgatcaagatctgttccacagggctaatgccaccatctcccctcaaaattttgtagaggttctaaaaagaaagtggtatgttgtgtgatgatcagcactaagtcctgcattcctgttaaagccacttgggtcataagaagggagtaaaaaatgaagtctgactagaattctattgcagaggccaagtacatttagtatggcattgagttgtgatatagttttactttgatgtgcattttggatttcagctacacctagatagacgtaaaatgataattaaaatgctgtaaccaacttatctaataaaattggcaaccagccactattttgttgactatgagaaagttaaaagtttatgttaatttttagggtctgatagaatatttcatgtgtattacagtggtattcatatgctatgtctctaaactttattttcaaaagcttaaggcccaaatacaaacttctctggaat

SEQ ID NO: 310618 - DNA, 1035 bp, Homo Sapiens
gtttgcgtttgttcctaaaatcaactagatgggttccttgttgctttctggtttttcgcaaaccttctccctctctgcagcccatttttctcatcaaaacggctcccattcctccaggtacgcggggctgctcttaagaactgatccttttaatccaggcttgggcaccagtattggccaactgttcttgtgtcaaaacctgtactcctgtacttcctgtgaactggccagaaatagagttcagctgagcccaggcatcaatcctttcctgagctctatttaacatgctcatggcttcaagatcaaatgcattctcactgagtcttttctgagcaagtgcccgttcactcattgctgtagagatgtccacaggctctgagggcaaattgctgctgaaaacattatcatcatctttgttttcttcaccatttttctccacaggaacccattctccataaacactatccgcttcttttttccgatgttgagatccagatgatacagggaattcttttgttaatgttacctggctttttggtggagttggttttgctgcagcaatattcagattgaaaaaaataggtttgggttcactgagtttaaagggatgatgataaaaaggaggttcttcttcctcttcatccgaaacatgaggtttattcactattacatcatcatcttctttactctgtgcgatctgtttacatttctcagttagttcttctatagtagctcctcctgactttttagcaactttctcttctatagtaggtggaggtgcaggctttaggtttggtggtaaagggacaccagccttagcacacatggcagctgcattagctttggctatttcaagtaattgagccttatccaaatctgtcagacgtttgggtgatctgcctcgttcagaagacctggatcttttacgacggatgggagatctgctaaaccttcttcttaagggtgttcttgatcgccttaatctgactggtgagatactgaagcttcgtcttcttaccacagaccttgatctcc

SEQ ID NO: 310619 - DNA, 453 bp, Homo Sapiens
  misc_feature (18)..(18): n is a, c, g, or t
gccccaaggtgggtaggnagtgataacactgttctctgcaattccgatgcttttcactttgtggccttggttcccacaaagtgaattgcatcgagttactgtcaaatgagaagctgcgggttgtttcatctgtcgtctaaaccggccctgccgtttaacccggccctaagaagagtgaaacagaatccaaatcagacataacataacaatgaaatggcagattcaggtataaaaaaggaaaaatacataatattcctcctacttacctctgagggcaaattgctgctgaaaacattatcatcatctttgttttcttcaccatttttctccacaggaacccattctccataaacactatccgcttcttttttccgatgttgagatccagatgatacagggaattcttttgttaatgttacctggctttttggtggagttggttttctgcagcaa

SEQ ID NO: 310620 - DNA, 743 bp, Homo Sapiens
gtttttgtgcgtttgttgttcattatgttaagaaaatttatttctacttctacagcagaaatacggaaatggtacaggtttgggcaaatcatactttatgaaatggatcctcataccacatcctttttaatacaggcacgttataacataattcctggattttcaaaatccagccaacacggatacctctgctactctgttttggccttcatagctgcttcctctttcagacgagctttcttttctaagttcaagcttgttaaagtctcgtgtctttgggcagccttcttgccctcaataaccatgaagatgcatcctaccaccgtcagggcaatcattagatagctgatcttcactcgcatcttgttctttgcagcatcaagcatctccaacgagacagtctctgggatttcatcttcctttttgaagcgacctgaccatatgaggatctttttctgccaatccgtaggtttgtgtaaaggcactctgttgtaagtgcgggatggagctccgggactttcctgtggttttgtgcaaaatccatttattctcttcaaatcagagcttctggtaagccttagagatgaggaaacatctctttcacataacctaaaacagcttcctgctgccaggcgcagaccgctgaggctccccatggccacttgctactccgccgaccagcgcagaacttcgccggggacggtggcgctggtgagctcaatgtcacccagcgttggagtccc

SEQ ID NO: 310621 - DNA, 544 bp, Homo Sapiens
ccaacccggttttgggccctccaaaagcggcctccctctttcaaaaggagctttctttttcctaagtttcaaagcttgttaaaagtcctccgtgtcctttgggcaagccttcttgcccctcaaataaccatgaagatgcatccctaccaccgtcagggcaaatccattaagaatagctgatcttcactcgccatcttgttctttgcagcatcaagcatctccaacgagacagtctctgggatttcatcttcctttttgaagcgacctgaccatatgaggatctttttctgccaatccgtaggtttgtgtaaaggcactctgttgtaagtgcgggatggagctccgggactttcctgtggttttgtgcaaaatccatttattctcttcaaatcagagcttctggtaagccttagagatgaggaaacatctctttcacataacctaaaacagcttcctgctgccaggcgcagaacgctgaggctccccatggccacttgctactccgccgaccagcgcagaacttcgccggggacggtggcgctgg

SEQ ID NO: 310622 - DNA, 350 bp, Homo Sapiens
tttgagaaatgaaaaatcttttattttttacaaaaattttcataaatgcattttatatttaatatgcatgctactataacaaagcaactgaaaatgtaattacagttaagatacttttatgcatatttaaaaagtaatattttaatcccctcgatttttaaaaattgaaagtggaataagcaattcttcaaaaaatatccattctcccccatgcaactgttgcaatgatttaacaaggaaaattagagtaatcggtcaaatgaatgtttaaaagccactgtcacctcatgagacccttttccatttggtaccaagtttagaaatgctcacatttcaaatatttatctact

SEQ ID NO: 310623 - DNA, 1087 bp, Homo Sapiens
  misc_feature (1009)..(1009): n is a, c, g, or t
  misc_feature (1013)..(1013): n is a, c, g, or t
  misc_feature (1024)..(1026): n is a, c, g, or t
  misc_feature (1029)..(1029): n is a, c, g, or t
  misc_feature (1036)..(1036): n is a, c, g, or t
  misc_feature (1047)..(1047): n is a, c, g, or t
  misc_feature (1061)..(1061): n is a, c, g, or t
  misc_feature (1068)..(1068): n is a, c, g, or t
  misc_feature (1072)..(1072): n is a, c, g, or t
  misc_feature (1080)..(1080): n is a, c, g, or t
  misc_feature (1083)..(1083): n is a, c, g, or t
tttttttaccagtgtaaataacaaacatttattggtgtcacttatggtagaaaaaacttcctacaccagatgcacatgacccagttgttaaatagaacattttgaaggtgaacacacaccctaacccaggttttttacccgctttttaagatggccaattcttcttctcccccccacccaaagacatgtgagcaactgctaatgaaaagcagtaaacagccgcttaggctatagcagtttcaactccactctgaggtgaagattccaattacattcgagacttaagttctttcaattttttcctaacaaaagttcctgagtccagtatttacaatattacagcactagcagatcagtgtctacaactcatctttttctgctgtatcctcttcaccagttgggggagggcctgcacttccatagagtttgctgataattggttgaacaatttcttccagttccttcttcttagctttgaagtcttcaatgtcagcatcttggtggctttccagccattcaatcttttcttctacagctttttccatggtctccttatcttcagaggaaagtttacctcccagcttttctttatctccaatctgattctttagagaataggcatagctttccaactcatttctagtatcaatgcgctccttgagctttttgtcttcctcagcaaacttctcagcatcattaaccatcctttcgatttcttcaggtgtcaggcgattctggtcattggtgattgtgatcttatttttgttccctgtacccttgtcttcagctgtcactcgaagaataccattcacatctatctcaaaggtgacttcaatctgtgggaccccacgaggagcaggaggaattccagtcagatcaaatgtacccagaagatgattgtcttttgtcaggggtctttcaccttcatagaccttgattgtaacagttggttgattatcagaagctgtagaaaagatctgagacttcttggtaggcacactgtgttccntggnatcagtttggnnnganacctccncagtttcatancaagtgtaaggggnataaatnaagngtaccagntcnctgt

SEQ ID NO: 310624 - DNA, 1255 bp, Homo Sapiens
cccttggccactttcccaattagaaggttttggctggataaaattgggttggaaaccaattttcttttccagtttcccttctttcttagctttggaaagtctttcaatgtcagcatcttggtggctttccagccattcaatcttttcttctacagctttttccatggtctccttatcttcagaggaaagtttacctcccagcttttctttatctccaatctgattctttagagaataggcatagctttccaactcatttctagtatcaatgcgctccttgagctttttgtcttcctcagcaaacttctcagcatcattaaccatcctttcgatttcttcaggtgtcaggcgattctggtcattggtgattgtgatcttatttttgttccctgtacccttgtcttcagctgtcactcgaagaataccattcacatctatctcaaaggtgacttcaatctgtgggaccccacgaggagcaggaggaattccagtcagatcaaatgtacccagaagatgattgtcttttgtcaggggtctttcaccttcatagaccttgattgtaacagttggttgattatcagaagctgtagaaaagatctgagacttcttggtaggcaccactgtgttccttggaatcagtttggtcatgacacctcccacagtttcaataccaagtgtaaggggacatacatcaagcagtaccaggtcacctgtatcttgatcaccagagagcacaccagcctggacagcagcaccatacgctacagcttcatctgggtttatgccacgggatggttccttgccattgaagaactctttaaccagttgctgaatctttggaattcgagtcgagccaccaacaagaacaatttcatcaatatcagacttcttcaaatcagaatcttccaacactttctggacgggcttcatagtagaccggaacagatccatgttgagctcttcaaatttggcccgagtcagggtctcagaaaagtcttctccttcatagaaggactcaatttcaattcttgcttgatgctgagaagacagggcccgtttggccttttctacctcgcgccggagtttctgcacagctctattgtctttcctgacatctttgcccgtcttctttttgtacagtttgatgaagtgttccatgacacgctggtcaaagtcttctccacccagatgagtatctcattagtggcacacttcgagacaccatgtcatggtagagagccatcgaagtcgcacc

SEQ ID NO: 310625 - DNA, 1062 bp, Homo Sapiens
ataaatacaaaacagagcgaaattagccctctaacaactgagctcgtcctgcgtcttgagcttggggttctttctggaaactgtcctcaaaaccttagtgggggaaagtgaccttatcccacagattgcttttcccagaggttccgcttgctggatacgtctcctggtctcaagtcaagaaggtttgggagcaggtgacttgtttccatctggggttttagttagccattcattgatgcggctagaaacccctaccttcaagccagcagtttccttatttggtgtgcctgctgcagtgggggatgaaaacacattccctttctcccacatactcttgatgttgcgtacaccttcagcaggaacaggaagatccgaggctgccggctttgtaggttttgcgctttttgttccctcaattgcactggtatactgctccagtctgctgtcaatcttggagactattgctgcttgatgggtcgatttgacaccactgcttttctgcacagacttattcaaaaattctgctcgctcttctatcttgagagatgaacctttaggagtgaaacacttgaatggtttcttgtcatctgacaagccatcttctggcatcttctggcgtttctcagcagcttctgctcttcgcctttcaatctcttcctttagcctcctcttctcttcctcctctctgagttttcgatcggcttcctcctgcttcctcctgtgctcttcctcctccaggaccttccttctctcctccctctttttcttgagttcctccagctccaaagccgcctcctgctgcttctgtttgagcttctcgaactcttcgctctcggtctccccgcgacgacgacgaagctcctccagccttttgccggcttccacctggggggcgccctcagcctccttggtgtccacgctggccctccctccagggcggctgaaagtattctcagtatgtttaagtttgtgggtcatgaattctccattctgcgacttaacttctgtaaatcccttctttcgatccatgaaggtcttaacttctttctttggggatctttg

SEQ ID NO: 310626 - DNA, 682 bp, Homo Sapiens
  misc_feature (56)..(56): n is a, c, g, or t
acttttttccgccaacctgcatgagattcagtttggccgaaccttccagcatcagntttggagattctggggctttaacagcaagggagaggtgcatgggatcaatgggacccaatggggccagactctgaggatgggatggtagtagtgaaggacataggatgggggtagagtgtggagactttttgaaatagtatagatgaatgccctgaggggactgtgaacaagctctgcccctcttaggaaatcaatggggaatcaactaaattaaataaaaaatggggtcaagattaagaggcagggtcacccagggaatggtttaggtcctggcaactctgaaggggttggaagggctggcaggaggcactgagggccctgggccctgggccaggtggtgaattacagcgactcacggacagcagaagagatctgtgagagcagctccaagatgatcaccttcatcgacctggcaggccaccataagtacctacacaccaccatctttggcctcacatcatactgccccgactgcgccctgctcctcgtcagtgccaacactgggattgctggcaccacaagggaacatctggggctggccctggccctgaaagtgcccttcttcatcgtggtcagcaagatcgacctatgtgccaagaccacagtggagaggacagtacgccag

SEQ ID NO: 310627 - DNA, 986 bp, Homo Sapiens
  misc_feature (58)..(135): n is a, c, g, or t
accctgacccacgctctgcagccccaccccccgggcaaacgccgttcgcgctcggatnnnnnnnnnnnnnnnnnnnnnnnnnnnnnnnnnnnnnnnnnnnnnnnnnnnnnnnnnnnnnnnnnnnnnnnnnnnnnnttccggcaaaatcccccctgggaaagtgttcctccaccaaccagtcccccccttctggtactgtgtagatttcatccccccgtgaactcccgtcagctggtgcatgagttcctcctgctctttgctgttggtgagtggcggcagaatattcagaaagactttgaggaggtccagactctctccagacacactggacaatgtgaagatgggggtgacattgggtgactgagcaaactgctgggcagcagtgacggcatcatcctcagaggtgaccagcatggggaccttgtggcagccaggctgcttgaggacccgctccagctggcgtactgtcctctccactgtggtcttggcacataggtcgatcttgctgaccacgatgaagaagggcactttcagggccagggccagccccagatgttcccttgtggtgccagcaatcccagtgttggcactgacgaggagcagggcgcagtcggggcagtatgatgtgaggccaaagatggtggtgtgtaggtacttatggtggcctgccaggtcgatgaaggtgatcatcttggagctgctctcacagatctcttctgctgtccgtgagtcgctgtaattcaccacctctcccttgctgttaaagcccaggatctcgaagctgatgctggaggttcggccagactgaatctcatgcaggtggcggaaaaggttgagccgagcccggccccgcccattgtccagctctccctgggtcaggactccaagcagagttgacttcccagagtccacattccccaggacggccacacggaggtctaggaactcctcgtgccgaattcgccacccaggcctcgctcccttgg

SEQ ID NO: 310628 - DNA, 560 bp, Homo Sapiens
gacttccccttcttccccaaagcaggaggttttatttaaaataaagctgtttatttggcatttctgggagacccttttctgaggaaccacagcaatgaatggctttgcatccttgcttcgaagaaaccaatttatcctcctggtactatttcttttgcaaattcagagtctgggtctggatattgatagccgtcctaccgctgaagtctgtgccacacacacaatttcaccaggacccaaaggagatgatggtgaaaaaggagatccaggagaagagggaaagcatggcaaagtgggacgcatggggccgaaaggaattaaaggagaactgggtgatatgggagatcagggcaatattggcaagactgggcccattgggaagaagggtgacaaaggggaaaaaggtttgcttggaatacctggagaaaaaggcaaagcaggtactgtctgtgattgtggaagataccggaaatttgttggacaactggatattagtattgctcggctcaagacatctatgaagtttgtcaagaatgtgatagcagggattagggaaactg

SEQ ID NO: 310629 - DNA, 570 bp, Homo Sapiens
  misc_feature (378)..(378): n is a, c, g, or t
gatttcctccgggtcttttccaaatcttcagattccctggtctccatggaaatagagccagatgtttctcagcagaacgactggaggtcaatgactttcccaagcttcactggtttgagtgctgccagagaggagacttctcaagctgaccaggatatccaagacaaagagcctcattgccacatcccaattaagagaaattccatcttcaatcgctccataagacgcaaaagcaaagccaaggccagagacaacccccgaacgggaaacgccagctgcctggcagattcacagggacaatggaaaatctgtaaatgagcccctgaccttgaatatcccctggagcagaatgcctccttgcagaacagcaatgcaganagacccaggagcccaggaaatgagtgagtcgtcctccaccccgggaaattgggccacgcccgaggagtggcgccctgccgacagccccaccacgctcaccgaggcctgcggatgatccaccccattcccgccgactcctggagaaacctcattgaacaaatagggctcctgtatcaggaataccgagataaa

SEQ ID NO: 310630 - DNA, 693 bp, Homo Sapiens
tgaaccatggtgttatctttttcaggattaattacaatagtgctgccaaatgcctggatatattcgatccactgctgcaaaagaacctgaactccacatcgaactctactgaagagctgatacagaagagacaaatcttgaattcggttttcatcaaggaggttatttaaacctttctgaagaattgctgttaagtgttcacctagaagttgtttttctacagtagcaattaatgacttctgggtggtctgatctaagtaagtaataagtctgtctgcttcttcttctagacgtttgttaacatgatgtagatattcaggaacctctctttcttgcattaatttttggccttcagctgcatagagccggttagtttcttccaaaaatcgttgttcaaaagaatcttgataaatttgcaaatcagacagcatgcttaaaaggcttcgaagtaaacttctatcaattgcttcaccattcctttccctctcaatcaagagaagaatgccatcaattgtcttattctgcactttctgatcacttataatatgagccctaaataactccagtcccatgtcccaaatggagggtagcattgaattctgaagaacgtaagttctatccagaaacaaaaaaatgctcctgatcatgatcatttgtctgcaatggttttgccagcatctatcaatcttcttt

SEQ ID NO: 310631 - DNA, 723 bp, Homo Sapiens
  misc_feature (40)..(40): n is a, c, g, or t
  misc_feature (532)..(555): n is a, c, g, or t
tagttcattaaagcctgtattaaaagtaaagggctgcttntcctaaagatcatccataggggtcataagccaggtggttccacagcagtgctggggcaagtctttggttttgaaggatccaagatggtactgttaggtagcgcaactagcaagattgccattcgatcatattatttcatgttttgcccactgataataaaccttttaatgatggatagggcatttaataagagaatgtcaattaaaataaaagttacttccatgactagggcttcaagagactattttaaatttacccctgaagcatactgttcaacacataacgcctttcaaagctagaattttatttataataaagcatgcattacttgatgaagttggcacttcaaacactgactatgtcccatgctaaattcggaaactgtaatgttattttagtttataggaagagtaagataaacatacgtacctttgcacagatttacacagttacttagttcaacagtgcaaaacactttgcaactacttcacnnnnnnnnnnnnnnnnnnnnnnnnctatgttacaactaaattacaggatacccaaagtaactttaaatctaaaagtaagccaatcagcagccaaattatatattggttttgtcttccagttttggctacaagtgtactgtaacacaaaatcaaaaatgatatccttgaggtatctctagatctgttgttgtt

SEQ ID NO: 310632 - DNA, 1272 bp, Homo Sapiens
cttcagagaggttttcagaataagagagtcttatgtaataccaaagtattacacagattatgaaaataatagtttttgttctcgagttactcagtaaatatgtgagcttagatgatttctgaggatgttaatactctacctcataaataggagaaaatgcttggtttggtggcaaaagttttagaaaatttgggatattacacaaattaaggcattaccactcttagtttaccttttattgatggttgtatgtgttcctctttaagttttcacttttaaaagtgatgataaaatgtgttttattactccaattttattatttttgcatatgtaaattaatctgttttagtgaaatgatatgagtatttacaaactgaatctaagtttcatttcacatcacatgaatggctcaaactatttttaaggtatgtgatagtggaatgtgaagatcaagatactcagcagagagatccaaagacccatgagatgtacttgaatgtaatgagaagattcagccaagcattgttgaagggtgataagtctgtcagagttatgcgttctttgctggctgcacaacagacatttgtagatcggttggtgcatctaatgaaggcagtacaacgcgaaagtggaaatcgtaagaaaaagaatgagagactacaggcattgcttggagataatgaaaagatgaatttgtcagatgtggaacttatcccgttgcctttagaaccccaagtgaaaattagaggaataattccggaaacagctacactgtttaaaagtgcccttatgcctgcacagttgttttttaagacggaagatggaggcaaatatccagttatatttaagcatggagatgatttacgtcaagatcaacttattcttcaaatcatttcactcatggacaagctgttacggaaagaaaatctggacttgaaattgacaccttataaggtgttagccaccagtacaaaacatggcttcatgcagtttatccagtcagttcctgtggctgaagttcttgataacagagggaagcattcagaacttttttagaaaatatgcaccaagtgagaatgggccaaatgggattagtgctgaggtcatggacacttacgttaaaagctgtgctggatattgcgtgatcacctatatacttggagttggagacaggcacctggataaccttttgctaacaaaagcaggtaacaattaatgactaccagtagacatacattgtatatgcccatggtttttacccctgaatctatg

SEQ ID NO: 310633 - DNA, 952 bp, Homo Sapiens
  misc_feature (7)..(7): n is a, c, g, or t
  misc_feature (27)..(27): n is a, c, g, or t
  misc_feature (29)..(29): n is a, c, g, or t
  misc_feature (45)..(45): n is a, c, g, or t
  misc_feature (75)..(75): n is a, c, g, or t
  misc_feature (77)..(77): n is a, c, g, or t
  misc_feature (95)..(95): n is a, c, g, or t
  misc_feature (118)..(118): n is a, c, g, or t
  misc_feature (183)..(183): n is a, c, g, or t
  misc_feature (219)..(219): n is a, c, g, or t
ggtctcngggctgagtcatccagaacntnattaggcttcccggtntgctggatttcctgccactcatggagccgntnttgtcaatgacaaagacnacatcttgggcattgtggttagnccctcgggggcaaagtagtgtacaaagtagccgttctcgatctgaatggagcccccgggagatgncccggtccacatcatagcggataatgaggttgccgnccaggactgtttcttgctgctctggggacttttgctgctgggaaagtgttggcttgaaccggatgtgagccttggtcttattctgccaggtggtgagggcgtctaccggctggttggtcatgaaggtgctctctgtctccagaaagctgatgccctggggctcgaagatgtgaatgtccatctgcaggtgcttgaccagctgctggggccgcactttcagcagcagctcgtacacccccaaacgccgcttgagcagctcctcatagaccagctcaaaggtgatcttggcattgggagccacactgaccgacacctggaactgctccatgtttctcccggtggccttgacgaggccagcgctctttcccttggccactgctgcgctgtactgtgcctgggcttcagccttctccttgatgatccctgggtaggtcatgccatcgatgatcatggagaagttggtgatgaaggctttcttgggcagctccatctggaaggtggcctcctgcacagtattggccctattgaccactcggctggtgacgaccgtgtgggcaaatcgggatgagaccctggagtccacggtgaggctgtagatgtcgatgccattcttttcggcagtagtggtctggtggatggccagcagtgaaagcaggacgagaactttgctgcaggtacggacaggccttgggggcttcatcgtggctccagtgtctgccaggaggcttctgac

SEQ ID NO: 310634 - DNA, 839 bp, Homo Sapiens
  misc_feature (724)..(724): n is a, c, g, or t
gtggagggtagtgccttgcccagctcctctggctggtgacagccctcgggcctcagttcagttgtatctgatcaggacttgaccacacagaggcttccttttctccaagaagaggatggaatagacaagctggagctgctggctcccggatgaatttcagacctggggttctcagctccaggcaacttggactcccaggacctcctgatgttcctgaccatgctgcttaccaccccttccgccgtctggccatcttgcctgctttagcaccaccagccacctcaaatcctgatccagctgtgtctcgtgtcatgaatatgtctgccatcctgccactgcctgggcagagtgtggagcggctctgtgtggaccccagacaccgccaggggccagtgaacctgctctcagaccctgagcaaggggttgaggtgactggccagtatgagagggagaaggctgggttctcatggatcgaagtgaccttcaagaaccccctggtatgggttcacgcatcccctgaacacgtggtggtgactcggaaccgaagaagctctgcgtacaagtggaaggagacgctattctcagtgatgcccggcctgaagatgaccatggacaagacgggtctcctgctgcttagtgacccagacgtgaccatcggcctgttgttctgggatggccgtggggaggggctccggctccttctgcgtgacactgaccgcttctncagccacgttggaaggaccttggccagtttaccaagagggctctggggatctccgcagatcagatgccggagacgccgctgaaggtcatggcatgaccactttgcacagggcggc

SEQ ID NO: 310635 - DNA, 2070 bp, Homo Sapiens
  misc_feature (1929)..(1929): n is a, c, g, or t
  misc_feature (2017)..(2017): n is a, c, g, or t
gtccggaattcccgggatcagacactggagccacgatgaagcccccaaggcctgtccgtacctgcagcaaagttctcgtcctgctttcactgctggccatccaccagactactactgccgaaaagaatggcatcgacatctacagcctcaccgtggactccagggtctcatcccgatttgcccacacggtcgtcaccagccgagtggtcaatagggccaatactgtgcaggaggccaccttccagatggagctgcccaagaaagccttcatcaccaacttctccatgatcatcgatggcatgacctacccagggatcatcaaggagaaggctgaagcccaggcacagtacagcgcagagtggccaagggaaagagcgctggcctcgtcaaggccaccgggagaaacatggagcagttccaggtgtcggtcagtgtggctcccaatgccaagatcacctttgagctggtctatgaggagctgctcaagcggcgtttgggggtgtacgagctgctgctgaaagtgcggccccagcagctggtcaagcacctgcagatggacattcacatcttcgagccccagggcatcagctttctggagacagagagcaccttcatgaccaaccagctggtagacgccctcaccacctggcagaataagaccaaggctcacatccggttcaagccaacactttcccagcagcaaaagtccccagagcagcaagaaacagtcctggacggcaacctcattatccgctatgatgtggaccgggccatctccgggggctccattcagatcgagaacggctactttgtacactactttgcccccgagggcctaaccacaatgcccaagaatgtggtctttgtcattgacaagagcggctccatgagtggcaggaaaatccagcagacccgggaagccctaatcaagatcctggatgacctcagccccagagaccagttcaacctcatcgtcttcagtacagaagcaactcagtggaggccatcactggtgccagcctcagccgagaacgtgaacaaggccaggagctttgctgcgggcatccaggccctgggagggaccaacatcaatgatgcaatgctgatggctgtgcagttgctggacagcagcaaccaggaggagcggctgcccgaagggagtgtctcactcatcatcctgctcaccgatggcgaccccactgtgggggagactaaccccaggagcatccagaataacgtgcgggaagctgtaagtggccggtacagcctcttctgcctgggcttcggtttcgacgtcagctatgccttcctggagaagctggcactggacaatggcggcctggcccggcgcatccatgaggactcagactctgccctgcagctccaggacttctaccaggaagtggccaacccactgctgacagcagtgaccttcgagtacccaagcaatgccgtggaggaggtcactcagaacaacttccggctcctcttcaagggctcagagatggtggtggctggggctccaggaccgggggcctgatgtgctcacagccacagtcagtgggaagctgcctacacagaacatcactttccaaacggagtccagtgtggcagagcaggaggcggagttccagagccccaagtatatcttccacaacttcatggagaggctctgggcatacctgactatccagcagctgctggagcaaactgtctccgcatccgatgctgatcagcaggccctccggaaccaagcgctgaatttatcacttgcctacagctttgtcacgcctctcacatctatggtagtcaccaaacccgatgaccaagagcagtctcaagttgctgagaagccccatggaaggcgaaagtagaaacaggtgtgccactcaggttccactttcttcaaatattatctccagggagcanaaatacctgctggctcccggatgaattcagaccctgggtctcagctcaggcacctgactccaggacccctgatgtcctgacatgctgntacacccttccgcgttggcatttgctgcttacacagcacctccgtcgtgggtt

SEQ ID NO: 310636 - DNA, 1111 bp, Homo Sapiens
  misc_feature (1078)..(1078): n is a, c, g, or t
  misc_feature (1089)..(1089): n is a, c, g, or t
actagtcgcgagtattgtttttttgttttattgccaggctcacaccacctttctttatttgtaatgagtgggactcttcctccccatggtggtccaggccccagaagcggccctgcagttgcagggggaagccaagtgtacagggtgggcacagctccttccatcagaactacagctccacagaccagcaggaaatctccactcccgggggcccctcctggtaatccagcctgcgctctctggtggcagagtggtcattgccctgaaccctcagcgtgcgtctgccgtcatctgatgctgctggagatccccagagcacctcctggtaaaactggccaagggtccctccaacgtggctggagaagcggtcagtgtcacgcagaaggagccggagcccctccccacggccatcccagaacaacaggccgatggtcactttgtctgggtcactgagcagcaggagacccgtcttgtccatggtcatcttcaggccgggcatcactgagaatagcgtctccttccacttgtacgcagagcttcttcggttccgagtcaccaccacgtgttcaggggatgcgtgaacccataccagggggttcttgaaggtcacttcgatccatgagaacccagccttctccctctcatactggccagtcatgacacgatacacagctggatcaggatcagaggtggctggtggtgctgaagcaggcaagatggccagacggcggaaggggtggtgagcagcatggtcaggaacatcaggaggtcctgggagtccaagttgcctggagctgagaaccccaggtctgaaattcatccgggagccagcagctccagctgagtggacattcctgtttctactttcgccttccatgggcttctcagcaacttgagactgctcttggtcatcgggtttggtgactaccatagatgtgagaggcgtgacaaagctgtaggcaagtgataaattcagcgcttggttccggagggcctgctgatcagcatcggatgcggagacagtttggctcagcagctgctggatagtcaggtatgcccagagcctctccatgaagtntgtggaagacntacttggggctctggaactccg

SEQ ID NO: 310637 - DNA, 930 bp, Homo Sapiens
acagggtgggcaaaagctccttcccatcaagaactaacagctcccacaagaccagcaaggaaatctcccaattcccgggggccccctccctggtaaatccagcctgcgctctctggtggcagagtggtcattgccctgacccctcagcgtgcgtctgccgtcatctgatgctgctggagatccccagagcacctcctggtaaaactggccaagggtccctccaacgtggctggagaagcggtcagtgtcacgcagaaggagccggagcccctccccacggccatcccagaacaacaggccgatggtcactttgtctgggtcactgagcagcaggagacccgtcttgtccatggtcatcttcaggccgggcatcactgagaatagcgtctccttccacttgtacgcagagcttcttcggttccgagtcaccaccacgtgttcaggggatgcgtgaacccataccagggggttcttgaaggtcacttcgatccatgagaacccagccttctccctctcatactggccagtcacctcaaccccttgctcagggtctgagagcaggttcactggcccctggcggtgtctggggtccacacagagccgctccacactctgcccaggcagtggcaggatggcagacatattcatgacacgagacacagctggatcaggatttgaggtggctggtggtgctgaagcaggcaagatggccagacggcggaaggggtggtaagcagcatggtcaggaacatcaggaggtcctgggagtccaagttgcctggagctgagaaccccaggtgtgaaattcatccgggagccagcagctccagctgagtggacattcctgtttctactttcgccttccatgggcttctcagcaacttgagactgctcttggtcatcgggtttggtgactaccatagatgtgag

SEQ ID NO: 310638 - DNA, 1037 bp, Homo Sapiens
  misc_feature (9)..(9): n is a, c, g, or t
  misc_feature (23)..(24): n is a, c, g, or t
  misc_feature (26)..(26): n is a, c, g, or t
  misc_feature (34)..(35): n is a, c, g, or t
tcttcctcnccatggtggtccanncnccagatgnngccctgcagttgcagggggaagccaagtgtacagggtgggcacagctccttccatcagaactacagctccacagaccagcaggaaatctccactcccgggggcccctcctggtaatccagcctgcgctctctggtggcagagtggtcattgccttgaaccctcagcgtgcgtctgccgtcatctgatgctgctggagatccccagagcacctcctggtaaaactggccaagggtccctccaacgtggctggagaagcggtcagtgtcacgcagaaggagccggagcccctccccacggccatcccagaacaacaggccgatggtcactttgtctgggtcactgagcagcaggagacccgtcttgtccatggtcatcttcaggccgggcatcactgagaatagcgtctccttccacttgtacgcagagcttcttcggttccgagtcaccaccacgtgttcaggggatgcgtgaacccataccagggggttcttgaaggtcacttcgatccatgagaacccagccttctccctctcatactggccagtcacctcaaccccttgctcagggtctgagagcaggttcactggcccctggcggtgtctggggtccacacagagccgctccacactctgcccaggcagtggcaggatggcagagggagcctgtatgggggctggggtttgggttgtcatggttgtttcttcgattttcatattcatgacacgagacacagctggatcaggatttgaggtggctggtggtgctgaagcaggcaagatggccagacggcggaaggggtggtaagcagcatggtcaggaacatcaggaggtcctgggagtccaagttgcctggagctgagaaccccaggtctgaaattcatccgggagccagcagctccagctgagtggacattcctgtttctactttcgccttccatgggcttctcagcaacttgagactgctcttggtcatcgggtttggtgactaccatagatgtgag

SEQ ID NO: 310639 - DNA, 368 bp, Homo Sapiens
cacagctggtttctgaggaaggcctgggccccggtaatgggctcagtaccaagggtccctccaacgtggctggagaagcggtcagtgtcacgcagaaggagccggagcccctccccacggccatcccagaacaacaggccgatggtcactttgtctgggtcactgagcagcaggagacccgtcttgtccatggtcatcttcaggctgtggaaagacccagtgtcttgagcaggaaggtagagacgtgtgcacagaacctcagtagtcagggtggggagtgggctgggcttcccctcttgtccaggaagtcacggagtggccttgggtgggaaggcccttaaatcttctgatttcagtttcctcatttt

SEQ ID NO: 310640 - DNA, 868 bp, Homo Sapiens
agggctcaaaagatggtggtgttttggaagcttccgggacgggggcttgatgtgctcacaacccacagtcagtggaaagctgcctacacagaacatcactttccaaacggagtccagtgtggcagagcaggagtcggagttccagagccccaagtatatcttccacaacttcatggagaggctctgggcatacctgactatccagcagctgctggagcaaactgtctccgcatccgatgctgatcagcaggccctccggaaccaagcgctgaatttatcacttgcctacagctttgtcacgcctctcacatctatggtagtcaccaaacccgatgaccaagagcagtctcaagttgctgagaagcccatggaaggcgaaagtagaaacaggaatgtccactcaggttccactttcttcaaatattatctccagggagcaaaaataccaaaaccaggtgacaaagtaggaggtggggggaggggagattgacagattgggctcagtcctggctgtggagggtagtgccttgcccagctcctctggctggtgacagccctcgggcctcagttcagttgtatctgatcaggacttgaccacacagaggcttccttttctccaagaagaggatggaatagacaagctggagctgctggctcccggatgaatttcagacctggggttctcagctccaggcaacttggactcccaggacctcctgatgttcctgaccatgctgcttaccaccccttccgccgtctggccatcttgcctgcttcagcaccaccagccacctcaaatcctgatccagctgtgtctcagtgtcatgaatataaaatcgaagaaacaaccatacaacccaaaccccag

SEQ ID NO: 310641 - DNA, 520 bp, Homo Sapiens
gtatgggggctgggacagccggggcacggctcctggagcaggaagggcaggctgggggcaaggatgtggaaaggggccaagggggctgggaacttacctggggtttgggttgtcatggttgtttctaaaagaagaaaaagtctgggtttaggcagccccttcctgaggagtgggaggttgagggagggagcagtgactaggtgtggctgggttccctcactacttcaacatcgagacatgtgacaggtcactcccctcccaggatccccctgttaggacagggcctctggccttgggggcaccttcgattttcatattcatgacacgagacacagctggatcaggatttgaggtggctggtgttgctgaagcaggctctagggcaggaacatccggaaacagaaagggagcaggaaggcagtcaggaggcgggcaaccagcagcgctgccaccaagctccagccccccatcctgccacacatacactccacctagaatggcctttgtcacaggagatttt

SEQ ID NO: 310642 - DNA, 1047 bp, Homo Sapiens
taaccctacctcagtctgaagaaggtcagttgaagtccttactgtacaagtccaaaatttaaaaaaatgagttccacagtgaacttcctcatgcttcggctatgcgtggaccagtcagcttccgggtgtgactggagcagggcttgtcttcttcagggtcactctgcaagggttgtccaggcttggtcttgccttctaggtttcaggtgctgcaggttttacatggctgtggtggatccaggctgggattccctctaccttcacagcggtgggagtggtcaggacgacaatctggggtcctttccactgtgggcacaaagaggctacgttccagtccttgatccacactcaatcacctggggagaaagggtgaactggggagaataagctaacagggcatctctcatttacccaggctgagattgtttgtgtaatttttcctaaagcctgtagttgtcgctgtaactcaatttcacctaactctcggggagtgcctggaagtccctgcaatatgggagggggcctatgatataatatttcataaggggaatatcctgttcttttagaaggggtacatctaattttaaataataccatagggagagcctgtatccattttaatcctgtttcttgacatactttccctaagctatttttgatagtccgattcatcggctctacctttctggaactctgaggctggtaggcagcatgcagtttccatgtgttccccaatacctttgccgtcttctgtaccaagtcagccacaaatgctggcccattatctgagccaatccgtaagggcagtccaaatctaggaataagatctcgaagaagcacacgagttacttcatgagctttctcagttcgtgttggataagcctccacctgcccagagtaggtacacacaagaactagtaaatacttgttacctccacactttggcatctctgtgaagtccacctggagatcttcaaagggggctgctccataagcttgtatgccagggggaacagctggaccttgtctcgcattatgctgtcggcc

SEQ ID NO: 310643 - DNA, 559 bp, Homo Sapiens
  misc_feature (155)..(266): n is a, c, g, or t
gtggacgattcataggactaattccttttcgaattccagtcgttttcctagctgcaaggccagtgataactccattaggacgtctctttccaggcattactcttcctctatgattcagactagtcttaccaaaacctctttatactctttctctnnnnnnnnnnnnnnnnnnnnnnnnnnnnnnnnnnnnnnnnnnnnnnnnnnnnnnnnnnnnnnnnnnnnnnnnnnnnnnnnnnnnnnnnnnnnnnnnnnnnnnnnnnnnnnnntcttcatatgcttaacaattgaggactccaaagtttttgtgtcagaattctgttggattccccatcgcactctcatcctgaattgctgggcaccactttgctggaggagtcttctatttagtcttggaaaattctgcttcttcccttcctttcgattcaacttgatgatatcatctctgaatcttatgccttcagtgatataatcctccgtgtccttcgagtccctcctgctgcagacaggtcccctatacttcggtacacacgagcctttcgcgcccaccgcaacgcagccc

SEQ ID NO: 310644 - DNA, 197 bp, Homo Sapiens
tgagccaccgtgcccggctgcaggaggctttgatgctggcctggcagccagctccaggagttgggcgacggagggggcagggagagcttcgtgggtggccatggccagcagcacccgggtgcccctcagagaggaaggtacctccagcctctggtcatgtgaggggccagtccccacgcgtcccctcgccagcccct

SEQ ID NO: 310645 - DNA, 787 bp, Homo Sapiens
gttctcattagggtagattatgccccctttgtttttttagggttgtggcctatcgtacggtgggttgcccagcccaactaccttgttttattggattttgagtaaaaacatgaaccatgtcaaagtttccaggcagactcctaaaaagcattagcagatctggacccaggcaggccagggacagggaggtccctctatcaggttttgaggcgggttgagcgccgaggtagtgggggctgggagggtcgagccgtcaccttgctgggtgttttgtcctgggtgttgggctgggagggtgggcggccgctggaggtgaacagggctgtcaaagcgttccgggcgttgattgcgcaccggcggctcacaggtcgggtggtggggctggggttcttggccgccttgtatttctgcaggttctcaaagtggcccagggacttgcagtgggagagctgtgcccctgagttgctgtgatagaacttgtggcagatgcggcagatatagcccatcacgggcaccaggaagtccacaccatatgcagtattggggctgtaggtctccgagcccttccactcctctctggatatatctctggacctcacctgcttgcagagttcctcctcaacctcgatctcttcttcatcctcatcatcctcttcctcttcttcatcaccctcgaagcaacccacagcgtccactgtaatgaagtggtcctcatcttggccagcaatttctttctcaagcgacttcagctccttggctttgtccttatgcccctgggacttcaccc

SEQ ID NO: 310646 - DNA, 825 bp, Homo Sapiens
gggggtcctccctcttttccgggctgacccttatttgttgtttcccaaatttcacccctggggggatgctttccatggctggaggaagcccccttgctttctttttgcccggggggctagtccttttcgggagtcttacccccatagttaattggttggaagggcatctgggctggaccctgctcttctgttatctcactgagctttcgcaagtggtggcttaatgatgtttaaaaatggcttatatccaggacagtctgtagaggcccatcggtccactgcatggagccctgtctttatgttctggtaacatctctccatctacctctgaagactgtgtaataaccaaaatctgattgattattgaggattctctaagaatcaggcctataacgatgcaccagtctaggcaccctgcctccatgaaaatgtgtagcaaataccgaagctggacctgggatttatgaggccctttactggccaactccatggaaatgtgctccagctctgactgagttaaactgagtgtagagaaattttcatccaccattgtccagtcgccatccaccatggagctactttcagtcaagtctgtggctgaaccaatactgcattcatcacctttattagataaaggtgacaagaaggcatcttgcatttgtggtccatgggatgaagctgtgtctatctcatgatgggtggggccaatgttgctgagccagctctgacttcgctggatgttggagatgccagcatccatctcaaggttcaaaaatgggtcagctgattgagactttaacagctgctctcccacagttcggtacc

SEQ ID NO: 310647 - DNA, 520 bp, Homo Sapiens
caagttaatggaaacaagtctttattaagtaacttttaatatcagaaaaataaaactcttataattctctttacagcaaatatataatatcagtgctttggccatcttaagttaaaggccctttatcataaaatatatggttttaaattttactcaaattgaatttataatccctatgacttccctacatatacataacaaaagagtgtagtaaaattagcaaatactaaactatattgataatttatcattcttagtttgtggtttttagaaacagtacacgcacctaatatatgtcgattccttggcttattagttgcagtgtacaatgcaacaaaatacaaaatacatgcttggtgaacattcgttcatatctacaagacggcagctagagattaggtttcaatactgaccatttactatcctacaagcaattagcattacatcataatatgccatcaaggcaactttttttatactgaaaaaatcaaaataaaaaccgttatttgtaaacttttat

SEQ ID NO: 310648 - DNA, 587 bp, Homo Sapiens
ggaatcaaagaaattttttttagcagaaagagatcttagaaagcatgtagcttttctgtagcagttgatgcctcttcccacttctccatctcaaaacttcccttttaagatttctgatacaccattcactcctggtattctttggcctctgcttccatttagttatcttcacttgctctccttccatcgtcccttaaaaggtattcttttcaagcgttctgtccagccctcttttcacttgacctgtttcctaaaccaactatgacctccttcaaccacaattctatccccataggctcctcttcattttttgacactcagctaaatgcatctttctttgtagagctctagtcgtgcttctgtcacgttgctttcctgctagacaattcatctccacagggcagatatttcattcttcttgcaaagtttatatccctaatattccctggctcacagcacttatgaaataaatgttagcagaatgaacaggcaaatgaatgaatgactgagtaggagcaaattaagtgactcaatctttggtatattaaaaagacatttatacctaagcaagttcatgcttctgggaa

SEQ ID NO: 310649 - DNA, 3193 bp, Homo Sapiens
  misc_feature (112)..(134): n is a, c, g, or t
  misc_feature (1309)..(1309): n is a, c, g, or t
  misc_feature (1341)..(1341): n is a, c, g, or t
  misc_feature (3055)..(3055): n is a, c, g, or t
cctgattagggaacgtgtttggttttcccgtcatgcttaaggaagtcctatcaagagcttcatatacattgatcaaaaattgttgaaacaaaattgggttctccttgtgtgnnnnnnnnnnnnnnnnnnnnnnnaacaaacactagtttcctcttagagaataactattctgactgtaccaaatgagatttgagagaggtataagtaaactaagaacgttgttgaaagcgtcacatgatgattcaaaatgacgctgtgggtagcatactgcatatacccaaatttgatcaaactgcagttttttgtagctttttacaaaaatcttaaatacaggtaaatatgtaaacgctgtgctctcagagagcaagtacttagtcatgccacattgtgtccctttcggggagacaaattcaagtaaaatatcacaggtcagtttcaaaaccatccgctggaagtactatccggctgaggggcaaacaccactttgcacatctctgagttctcttgatggagcgggaattcacatcctgctaatacgctttcttttcttttctgagagacataacctctgccctgtggacagcctttcgtactttttctcaaattgcctgaatggagcttcatccttgtccatctgcatgcaaactaagaatgggtactgagaaaactgcactgtggagataaactccaagcctgcttctgtttctgtactggtttccaggccagctttcacaaaagaggagtccactgtgatgtcagtggttattaccacagtcaccctatttttcactcgggttttagactcacgataccacaagctaaactccattgcacctgaaatatcaatagctagaccaccctggacctctatattggcttttagtccagattgtaactgaagttcctgagaatgatctattagcagaataagtcctttcaccacactgatagggtcgccagatgctgacagcattttggacatcaaatcactgtatccgttgaaaaaggtgacaggtctgagctgaacatcaaagaggatggctgacataccagcataggagtcaaggttctcctccccctcgtcaggggtggctgcgattaaggcttccagtccttgggcttcaataaccacctggctaccgtgaagaccagccttcccaatgtactgaaagatgttcaggttacttctccttagaatgccagaacccgagtagagaatgtctaggctgtaagtagatgccgaacggggactacgttctatgtagccagtgtaggcagaagaagatccactcctggagcaacggtcatnaattgtgagcgaccatttccttcagaactcgnacggacaattttgcttgcaggcatttcaaaacgtaggatgtcttgaaacaatggcgagcatgtatttattcatttcttggggaagctccccaatagacagcaggatgttcttgacgtccatgtaggatggattgttatttaaaatgatagcagctgcagcagtgcgcacagtcttttcatgaactttacggttttggtggtatattctgtttaaggtcttcttcacctcatcagttatgaaagggagatcatatctctggagagcagtggtagccaggtggctgatgggcccttctcctgcttctgcatacttcagaagacttgggatgccttctggaagcagggcattcttcaaagccagcagatacatcctggtgtcctcttttttctctgctttttcaagtcctcccaggattaacttcttagcttccactactgctttgagtttgcagccttcattctgacacaactttctgacaagtgtcccagtgatgatcataacagtttctctgatgtcactgctaccaatagaacctttgaacttactaatgagggctctcaggagttcttcattgggatgagaagcaaatccacaggcatagagaaacctctcctggaggataatgctgctgtcacttttgaaatccaaaaagtccaaaatggcttctaatgagtctgaggtctgagcagaggtgacagcatccaccagctgaggtaatacttccttattttccatctttagtatttgaaggatctcttctttcttcgcagtcctgaggtgctgaatgaaggccaggaagtttctgacagcctcagccttggaaaggttgtcaggctgcaggtatttcctggtggaccgccagagctccgagagagaaggacatcttttacacttgctctggaagacctgccccacaatgggaatggccgtgtactttgaatcaactgctttgattatggctgcagcctgctttccagacatcaatcttgggcctgcttcggttgtcttcagctctaatttctgcttcgatactattttccccttaatggtttgtaggaaattcagtccaaaattgtgtgtttcttcagcaagcacagctataacaaagctgtcttctatcttataggtggtgacagatgtagcttttgaactgacacccaagacctgatttggggtcgtaaatccagacctcgctattttgcatgaatccaaggccttaattttgatcactttgtcttgatgagcctggtaggtcactttacaatttccagagatatctacctcattggtggttccagagcttaactgtgtctgaaataggctagccaggcctctcttgatattttctatggccactgcctcattttgatatgagtagaactctttgacctttccatgggttagatgaaggagcgtaggtctttgcagagcttccaagttttcctttcccattattttagatgggctttttcctttgaagatgctcttctctcctctctgctgattcacattttcagcatttacatccttcatcgttatttggatcaactggtcatcatcaccatcaggattcctccatagtaaggccacatccacgttggaggaaatgcggtagcccacgctgtcttgcagttttcctttgccccgatcaagaagaacttcagtggagtacgtgagcttgtacagccggtcattatttaatgagagaccagnttgtgtgacctttaacagaagctgaatatgaggaaatgaagcagagaaaaagcacagcaagaagaatcatattgaccagcaatcctcaactgcatccagtgcccagctaggagtcactgagaagtggactctttcaat

SEQ ID NO: 310650 - DNA, 824 bp, Homo Sapiens
gtggaactggtccgaagttcccaaattaccactcttctttagcttgatgatattctgcccaatctttaaaaaaatgcataggaaagccctttgattttcttaatcagatccggaaaccagtgatttgtagagacggaagtagggtggatttaatgagttgtaatagatcctgcatagtaaatacctttcttttggcaaaccacttttggaaagaaaccagaaagtgaatattcatagccacatctttgtaagtgatctgccactaaagagttagagggcgcctactaagaggggagctcccttctactgaaatggaccgaggctgcagttctccactcaatacagggtgcatcaactcatgaattagctggtttcgaagttgtgtcttgagtgtatccagtataccccgatccttaaacgtctggtatagctttttgcgcagttcatcttgactcaacacatcagccacggtaaacatgttggactgcgccatcatcaggcgtcagctccctccggagcccgcctcgctcgccccgccgcggcccgagtttagtgcccagcccgggcggtggggccaagacgagggggaatccctgccctcagaaccctgcctctgtcccgagggttcgggaggaacaaaggtgctgaacgttctctgcctcgcactcccaactaggttttctagcaaacacgcgagcttcctttcttcgcggttctgaggcaagggcgaggacccaggcacgactcaaaggcggctggagggcggggacccagacactagggactgaaggcagcgaggcaggaccgcctcacagccagtcccc

SEQ ID NO: 310651 - DNA, 834 bp, Homo Sapiens
gatctcaatggtgaggaagctgacaaactagatgagaggctttggggtgatgatgatgaggaggaagatgaggaggaagaagacaataaaactgaagaaacaggaccaggaatggatgaggaagattctgaacttgttgctaaagatgacaacttggatagtggcaattcaaacaaagataaaagccagcaagataagaaggaagaaaaggaagaagcagaagctgatgatggtggacaaggtgaagacaaaattaatgaacaaatagatgagagggactatgatgaaaatgaggtggacccttaccatggcaatcaggaaaaggtgccagaacccgaggctttggaccttccagatgacttgaaccttgacagtgaagacaagaatggtggtgaggacaccgacaatgaagaaggagaagaagagaatcctttggagataaaagaaaaaccagaagaagcaggtcatgaagctgaggaaagaggagagaccgagaccgaccagaacgaaagtcagagtccacaggagcctgaggaaggccccagtgaagatgacaaggcagaaggggaagaggaaatggacacaggagctgatgaccaagatggagatgctgctcagcatcctgaagaacactctgaggagcagcagcagtctgtggaggaaaaagacaaggaagccgatgaagaaggtggagagaatggccctactgaccaaggtttccagccccaggaggaagaagaacgggaggactctgatacagaggagcaggtgccagaggctttggagaggaaggagcatgcctcctgtgggcagactggtgtggagaacatgcag

SEQ ID NO: 310652 - DNA, 1953 bp, Homo Sapiens
ggtagcatttgctgttctagaaagtacagagacacgtagtgaaaatgggaggatctagaaggaggctgtctcctgtgtagtgtatatttatctgtaagtgagccgttggggaaggattgaatacagagacgctgtctgcttgctgccttaagacagctagctgaattgctgattaacttttaaaatacccagcttggtttatttttcttagaatctgttgctaagactggggacgctgttttcttttacaaagggaaatctaagttaatttcaaggcattcgaaatggggaaagactattattgcattttgggaattgagaaaggagcttcagatgaagatattaaaaaggcttaccgaaaacaagccctcaaatttcatccggacaagaacaaatctcctcaggcagaggaaaaatttaaagaggtcgcagaagcttatgaagtattgagtgatcctaaaaagagagaaatatatgatcagtttggggaggaagggttgaaaggaggagcaggaggtactgatggacaaggaggtaccttccggtacacctttcatggcgatcctcatgctacatttgctgcatttttcggagggtccaacccctttgaaattttctttggaagacgaatgggtggtggtagagattctgaagaaatggaaatagatggtgatccttttagtgcctttggtttcagcctgaatggatatccaagagacaggaattctgtggggcccatcccgcctcaaacaagatcctccagttattcatgaacttagagtatcacttgaagagatatatagtggtgtaccaaacggatgaagatttctcgaaaaaggctaaacgctgatggaaggagttacagatctgaggacaaaattcttaccattgagattaaaaaagggtggaaagaaggcaccaaaattacttttccaagagaaggagatgaaacaccaaatagtattccagcagacattgtttttatcattaaagacaaagatcatccaaaatttaaaagggatggatcaaatataatttatactgctaaaattagtttacgagaggcattgtgtggctgctcaattaatgtaccaacactggatggaagaaacatacctatgtcagtaaatgatattgtgaaacccggaatgaggagaagaattattggatatgggctgccatttccaaaaaatcctgaccaacgtggtgaccttctaatagaatttgaggtgtccttcccagatactatatcttcttcatccaaagaagtacttaggaaacatcttcctgcctcatagaatgaagaactttgttacacatattttgataaggcactgaaaatataaaaggactggtagtttactgatgtagatgtgaattctgtataaagatgtgtaaattcttttgagggttcattaaattgcatgaatagagacgggtcaaataaataggcaaaagggatttttacagttagagataaaagagaaaaccattcactgtattttatttcatttctcctgattcagatatttttagtaatttgcttatatgtaaaagttgtttttgtggagtcagtggatatatttctaatgaagtgctagactatccaattacttaatttcttatacctttagataatcagtatgaaaagttcccatttataatggaaatgttcttaactctatacatgtaatatgtatttctagaagagaataaaaacccaagtcagttattagatttaaatcaccttctgaaatgctgctatagggctggtatctgtaaaagaatatcctgatgcatctgtttcaccattttgatttttaaagtatgctgtagcatttcttaataacatcgttgtgatgttcttaaggcagatctttcttcataggaaagtaatggcaatttctctcctgtggtcccaattgcttgaattactgatattttagtagcttt

SEQ ID NO: 310653 - DNA, 1262 bp, Homo Sapiens
  misc_feature (81)..(104): n is a, c, g, or t
  misc_feature (206)..(218): n is a, c, g, or t
gaaatggcaatcccttttgaataacatgttatacagtatagtatgcataaatattacactacaatgcattaaaataatttnnnnnnnnnnnnnnnnnnnnnnnnctccagtatgtgtgagtttatctgtattgagagagtttgtgttgtgctgtctattgttactgtaaagttaaattggccatttctgagacagctttggtttcnnnnnnnnnnnnngaatggtgccctttgactgattagcactagcagatatgcaacaaaatgtggctctgaaaacaataacactgaagaaataatactctaatttgatgtacagtctatggcacttcatgagaatccttaacaacatggtacttaaagccatgatgtgctttaaaatatacacagttgtggttttgcttggcacattcatctctgtcagatccctccctcaccacgtcttacaatctattacattaaaaatattactcttaaacaaaaatgactgtgcatgcacgctctcatctataatggcaattttaaatacaaggtgcacctttgttatttgtaaaccttgaaagaaataaacttatttttaaaaaattatatcttggtctacagacgtaccaatacataatagaatcatggttacaccatagtctgtcttttcaagatggcatgaatatataggaaactaactaggtatgcatctttgaatgcataactctgtgctagaaaagaaagacaatgttgttcttttagacaggaatatcacctcagcacaaatatcaattaaatgtacaaagtgtataggcaacagtgtgcagtggatttccggaaaatgttgtcttttcttctggttaacatgcaatatgtggatgtcttgtggctgaggaacttttgtgtgtgttgcttgacgatatatacaatatggctaatgacctcgtcctttactctaaccaagcacactgtccttttctctttagcatgattgtttagtgatgaaaattctacatctgggtaacatacttgtggctagtcagatgttcggcagatattatgggtatctggttggctgtggctgttgcagcgaagggaacacttgtggcagatgttgttgctgcggacacagtggctggcgtagcaccgtgcaccatgggaactggtgggagaaatgctgtatgctgttgtaactgcatgttggctagagcctgttggtattggaaaataccagtgttaaagactgcggtggcaccgttggttttttcaagagcaggcccc

SEQ ID NO: 310654 - DNA, 1888 bp, Homo Sapiens
  misc_feature (235)..(287): n is a, c, g, or t
  misc_feature (563)..(611): n is a, c, g, or t
cagcacatgagaaaatgcccagtgcctgcagtcgcagacaccgggaagaccagaacgctgtcaactgttcccacaacccaagtctgtttttccaagttgcacaagtgcttggaataactctgaaacaattctcttcagagtttaaaggcttcagagtataggtgatgcttcctaaaacaagaagcctgtattaacatcacaaattggaactcattccaaagcctctttttagagnnnnnnnnnnnnnnnnnnnnnnnnnnnnnnnnnnnnnnnnnnnnnnnnnnnnntcacatgcagctaattatcgtaaaaaatatcaaacacacacgcaaaaatctcaaaaagcaatttcatatatttctaagcctgagacgttccttatcagaaagattctacaccatagaaaagacagcattacaacatactagtatgaaaatctgctgatgtattttacttcttattctatttcatacctatcatttatacagtttgcctcctataaattaaaagacgctattaggaggcttagacaaaaaagtggctccaaagctggtttaaaatannnnnnnnnnnnnnnnnnnnnnnnnnnnnnnnnnnnnnnnnnnnnnnnnctgctgtgttttctttttaataactatcaactcaaacttagggaaacttgcctttgtcttgggggaaaaaaaacaactagacaataaagcttcttttacatcatttgctaacctgatctcgttttaagagagagatggtagttatgttgcaagagtaaaatttataccatgaatgatacaggtctagtctggtggcactaattagagataatagcattgctgacaaaattataatctgctggtggcatttgcggaaaagaagcccttgcaaatttctaaacaacagtaaactctgttaggaaattctaaaatgtcttcaggccaaaaagggtataaggttagtaaaatgcctcaacagagtttgaataaaatattgaatttgagagttactggaattggatatgtaaaaacagggtggtaggttgggtcatgcttacaatggtctcaagttcaaataagctactgtgacaatacaccacttcacaggtcacacgcatttccaggggcttttcctttccctcagtaggtgctggcagagggtgtgctcagtcgctttccaatatagatgcctagccccaaagccaaaacatgagaaaggaagagagatggaatgaacaccttcagaaattctgcggagaaaataccccctttcttcatggctccacttttcctcatgcttaaagacacagaacgtttagggtgtctgaagtggaactccttgggtggaatgttttcgggtctactggaccagtctgatacccagtccgcacttttcttcaaagcctcgacttccttctctccttctacaacttcttcttctgactgagagctatggtccctgctggtgtgcatttccacatcaaacatgatctgcccatcttcttgtggcgaagggctgtcacagtgagaactgcctctggaactactctgtcctgattcatgttgtgcatccaaaagaatcttctccatgtctccattgtggatggaggatgaggatggtacgtgttccagccccccatttttcccattgccattatcattgccattgctgctgttcatgggtagctccacccaggaactgttgaggccggccggcgggggcagagactgctcattttcctcgcagttgttgttgttgttgtgcaggggcggcggcggctcgactaggtgggacgacatcgtcggacagctggcaggactgcggcagcagcaggaccgtctccggcactcaggcagcaacacaacaagccgagtccgccgcccccttttctgcgccc

SEQ ID NO: 310655 - DNA, 531 bp, Homo Sapiens
gctgatgtgcagttgtttctgctcccaaatcaacagggtttaatgaaaaccctagaaagtagaaacccgtgggacgagaaaagaaaaaagacaagttcacaaggttcctgggtggagctacccatgaacagcagcaatggcaatgataatggcaatgggaaaaatggggggctggaacacgtaccatcctcatcctccatccacaatggagacatggagaagattcttttggatgcacaacatgaatcaggacagagtagttccagaggcagttctcactgtgacagcccttcgccacaagaagatgggcagatcatgtttgatgtggaaatgcacaccagcagggaccatagctctcagtcagaagaagaagttgtagaaggagagaaggaagtcgaggctttgaagaaaagtgcggactggggtatcagactggtccagtagaccccgaaaacattccacccaaggagttccacttcagacaccctaaaacgtctgtgtctttaagcatgaggaaaagtggagccatga

SEQ ID NO: 310656 - DNA, 573 bp, Homo Sapiens
  misc_feature (486)..(486): n is a, c, g, or t
  misc_feature (529)..(529): n is a, c, g, or t
  misc_feature (539)..(539): n is a, c, g, or t
  misc_feature (551)..(551): n is a, c, g, or t
tgctgccgcagatcctgccagctgtccgacgatgtcgtcccacctagtcgagccgccgccgcccctgcacaacaacaacaacaactgcgaggaaaatgagcagtctctgcccccgccggccggcctcaacagttcctgggtggagctacccatgaacagcagcaatggcaatgataatggcaatgggaaaaatggggggctggaacacgtaccatcctcatcctccatccacaatggagacatggagaagattcttttggatgcacaacatgaatcaggacagagtagttccagaggcagttcttcactgtgacagccctttcgccacaagaaggatggggcagattcatgttttgatgtgggaaattgcacaccagcaggggaccttaggttttcagttcagaaggaagaagtttttaggaagggagagaagggaagttcggagggttttgaaggaaaagttgcgggattgggtatttcagattngttccattagaccccgaaaaactttttccacccaagggatttncatttcaggncacctttaaacntttttgtgttttttaaggcttt

SEQ ID NO: 310657 - DNA, 793 bp, Homo Sapiens
atacttctcctttattagtaagactgagcacatttttgtagctaaatgggctggtgcagttctgttcacttgtgcaagggttcctgagcttagctggtgttgtgctaatgtaaggcatcacagtcttttccacaaatgagccaaatccaattctgaagtccgaagtaatcctcctcatttcattcatcagatctgttccaagactttttacattctccaaatcgtctttcattgagtaagacaggtccataaggtagtagaggtcaatgggatagtcttcagctctcttgaattttaatgtaaatgtctgtggctcccctgatcttaatcgcaaaaccaactgctgtggttggatctgagtaatatcctctggcttgagcttctctgctgttcctttgctacggttggttacatttttatttttctttatatctttggagcctctgggattttctatgtcatctggagggcaacccttcttttttaaggcttctaaatcatcacatcgtgcagaagtaggcattccttcctgtaaaaatgttgaatttgtgcaccacccacaatttggccctgcttgtatacattctccacatgatttggcatttgcttttaaacatctattttcatctgtttgagcaaacacacagcaaactgaactgatcagtccaatccagaaaattggttgtaaattcatcttttccgcgcggcgtccggggcccggcgcggtgggctcgggcctgctgttccgcgcgacgcgtgggtcgacgatatcccaaaattccggaccgtacca

SEQ ID NO: 310658 - DNA, 1027 bp, Homo Sapiens
ttgcaggctctgccgtcggaaagccgctcattctcgcttccccttccctttcccggctcaagtccttcctctctctttcctttctttccgcctatcttttttctgctgccgctccgggtccgggccattttccgggccgggcgcactaaggtgcgcggccccggggcccagtatatgacccgccgtcctgctatccttcgcttcccccgccccatgtggctgcggggccgcggcggcgctgcccactatggcccggaaagtagttagcaggaagcggaaagcgcccgcctcgccgggagctgggagcgacgctcagggcccgcagtttggctgggatcactcgcttcacaaaaggaaaagacttcctcctgtgaagagatccttagtatactacttgaagaaccgggaagtcaggctacagaatgaaaccagctactctcgagtgttgcatggttatgcagcacagcaacttcccagtctcctgaaggagagagagtttcaccttgggacccttaataaagtgtttgcatctcagtggttgaatcataggcaagtggtgtgtggcacaaaatgcaacacgctatttgtcgtagatgtccagacaagccagatcaccaagatccccattctgaaagaccgggagcctggaggtgtgaacccagcagggctgtggtatccatgccatcgagctgaatccttctagaacactgctagccactggaggagacaaccccaacagtcttgccatctatcgactacctacgctggatcctgtgtgtgtaggagatgtaagttttcccagtagttgtagttggagggagccttgtttttaaacgggtctcagtgattaacatggaccctcctctcatcagcccagagtggggactggactccccatagggcacagtgtatatttgataaaggggcaagcagcacacctcaggggccaacagtattgggttgctgtttgaatccatagtgtccacatacttcccactgcccatagtcagagagtagccagttctgt

SEQ ID NO: 310659 - DNA, 549 bp, Homo Sapiens
gagatattacattgtttataaaagtgggtgagaatttttctttcttggaccagatatgaaaagccttatttaaatatcggctcagttcctggctttcggtggtgaggagagtaagaagcgcccaggcgaggacctggctgtcgtccccagagtgaaaatgactgtgatgccggatgttctgcagcagcagctggtccaggaactccagggccttctcctgcacagtgctctcgcagtccatcaccaccgggaccaccccccgcaaccaggctttctggatctgcacgcatctaggctgagccataaggagttcagtaagagactggagggcctgcttccggacagacactgcagggtcccgacactggtcctgcagaatccacaggtcttccttcatgcctgagacatcacagtgtttcagaatactcactaatacgtgcagtgcagacttcctaacgttggtcttctcatccctgatcctccttctcagcattgccatgacacatctttctcgagatccaactgtttcaccactgctgtctatgttgc

SEQ ID NO: 310660 - DNA, 1169 bp, Homo Sapiens
  misc_feature (414)..(414): n is a, c, g, or t
  misc_feature (925)..(925): n is a, c, g, or t
aacagcaaattgcaaatcagtttttaatggcactaaaacgaccatttggtctacagtgtgataaatgatagagatctaactacaaaatggaaaaatggcatcaaaacccatctgcagaatctttgccgaaagggagattctttctaggatttggaagagataaatttatttcatcaaggtgcttaaacgttaacatcaaactaattgaagtgtttcagaatgctaaaacttattgaaatttttatggaatctctgctgccaatttctttgtcagaagggaccagaaaccctcactgaccccagataagatagatgtttattgctgcacattctcttcaaatgctttgtctcctcaaaaaggctgtgactgctgcagggcatggagtcctccttccatcacagctgcggctgccntcagatctagccagagaggcagagtagcacggcaggcatgcagtaagtccttgggtttccattttaaggccacggtgttcccagtgactatcaaactcttgattgaaaatggagcccctgactatttctgcagaactttagccaaaagggtgaagtgtgcatggattaggaagctctctgcaaaggctgcttcactgagctttaatgagagaatttgaaggagctggctcatagcaaggggcccagtgaggccagaggtcctcatctgccaagggtccaacacctaaaaggcagagaagtctcagggacacactcagggaccctccctgctggcctgtagagtgcctcttgagtgaataagagtaagacaccctttcctcaggacactttattgtcatatgttgggcagctgttgtaatcaatatatagatccatgacagctgtgtacaagtggcacctccttagctatggttctggcaacgtcctggaccgctggccaggccaccatgtnccactgggctgggtcaggcaaagatgcccaattgcccacgttcacatttggttttgtttacccaacagggatataaaatatgaatttttttctctttgaacttttttatttgtaaagttaattatttaagtaaatgctttggctttaatcacagttattagcataagaaactatttttctagcctagcatcccagtgggaaaagtaggattggtgaattcaaacctttcttcatttatctagtg

SEQ ID NO: 310661 - DNA, 832 bp, Homo Sapiens
  misc_feature (52)..(67): n is a, c, g, or t
  misc_feature (333)..(355): n is a, c, g, or t
  misc_feature (428)..(463): n is a, c, g, or t
ctaagagaagttattttctacagtggttttatactgaaggaaaaacacaagnnnnnnnnnnnnnnnngcatctatctcatctatctcaatcctaatttctcctcccttccttttccctgcttccaggaaactccacatctgccttaaaaccaaagagggcttcctctagaagccaagggaaaggggtgcttttatagaggctagcttctgcttttctgccctggctgctgcccccaccccggggaccctgtgacatggtgcctgagaggcaggcatagaggcttctccgccagcctcctctggacggcaggctcactgccaggccagcctccnnnnnnnnnnnnnnnnnnnnnnngacagcttgagccgggcccctgggcttggcctgctgtgattccactacacctggctgaggttcctctgcctgnnnnnnnnnnnnnnnnnnnnnnnnnnnnnnnnnnnngggtgagtccattctcccaggtaaccactgcgcttgcttttctgtattttatttagacaagagatgggaatgaggtgggaggtggaagaagggagaagaaaggtgagtttgagctgccttccctagctttagaccctgggtgggctctgtgcagtcactggaggttgaagccaagtggggtgctgggaggagggagagggaggtcactggaaaggggagagcctgctggcacccaccgtggaggaggaaggcaagagggggtggaggggtgtggcagtggttttggcaaacgctaaagagcccttgcctccccatttcccatctgcaccccttctctcctccccaaatcaatacactagttgtttctaa

SEQ ID NO: 310662 - DNA, 550 bp, Homo Sapiens
ttacaaacttaatcaaatatttaatatcttagagttaacatattaagataacaggttatttgcccaaagtcataaggtgaagtagaggcaggaattgggcttcctagcctggagtccttttctccacctcaaggggctacgcagacctccaactaaatgctgagtttctcggtactgaaacagccctaggagaatgaataggacacagcgccatccctggccagtactatcaggtactacagtttggataccataacctacagtgtagccaggacctccctgaccagcccatctcttcccagcagccaccgtggtcctgagagctgggttaagccatcacctttaaaatcctggggaccacacttgtgcaatgcatgaatgggagaccctcagctgttagccacgaagcacagatgagttcagtagacagccaagagaatcacaagtcatggcgtgggggcagccaaagacattcattcattcagtgactcttgattgagctctcacaagttaatacaccgtagtccctggcacagatgttatgaacctc

SEQ ID NO: 310663 - DNA, 802 bp, Homo Sapiens
  misc_feature (492)..(557): n is a, c, g, or t
aagttatatttaacaccgaatggcattaactaaaaaaactgtggatttttttccccaaaatcccaccttgtaagaaaacccacgattaagagcgtagccaaaaaaataaatgagtataaaaatactagccacacaagaaattccttagcatgagacactgttcaattcctcagagttaaatttggatcattttctgtacactcatctctcttggtaaatacttaattctctcaagtgaattatgacaaagtctttcaatttttcttaaaatccagcttttataatttgagagcatcactcagaagttcttacatgttcttactcaagttcttcagccagcgtatggcgtgtgttcactcattctattcaatgcatctagttacccactcaaccaggaacaaagttcatcccaaatacttcaagctccagacattttgctggaatggaagacataaatgatatcttgcacagaagttaaaagttaggatttannnnnnnnnnnnnnnnnnnnnnnnnnnnnnnnnnnnnnnnnnnnnnnnnnnnnnnnnnnnnnnnnngtactatacaatgcctgtattctcccatttgtgaatgtttaagtatcattcagagaatcatgagcttttagattctcgaagtggaagcaataatgccttaacgttcaggtatggattattcagtggacgtttgttttccctttaggtttcttgtcttttgccatgtgccattcctaaaatttccacttaacaaagaaagcgagcctcagtttcccaattgcagttttgatacagaggccttggtg

SEQ ID NO: 310664 - DNA, 546 bp, Homo Sapiens
  misc_feature (228)..(237): n is a, c, g, or t
  misc_feature (373)..(412): n is a, c, g, or t
ggttttacagagaagagatttttattacaaagaaaaaaattccagtgaattgtgcagaaatgctggtttttacaccatcctaaagaaaaactttacaagggtgttttggagtagaaaaaaggttataaagttggaatcttaaattgtaaaattaaccattgagtgtcaaagttctaaaagcagaactcattttgtgcaatgaacataaggaaagactactgtataggnnnnnnnnnnctccttttaaatgaagaaaagctttgcttaagggttgcatacttttattggagtaaatctgaatgatcctactcctttggagtaaaactagtgcttaccagtttccaattgtatttagcttctggttggaatttgnnnnnnnnnnnnnnnnnnnnnnnnnnnnnnnnnnnnnnnnaggtgaaagttccctgactattcaggtgaatacacaaagtttgaagtgttaactttttctttccatttcactgatgttactggtcaccttagagaattatttcatagtctgtggctaaatagtaaattcagaag

SEQ ID NO: 310665 - DNA, 486 bp, Homo Sapiens
  misc_feature (392)..(400): n is a, c, g, or t
  misc_feature (405)..(405): n is a, c, g, or t
  misc_feature (426)..(426): n is a, c, g, or t
  misc_feature (451)..(451): n is a, c, g, or t
aacaattcagtccctcaaacgcattagtgacactgcaagtgctcaacagccacatgtggtactggcttcccacactggacagcacagataaaaaacattccaatcatttcagaaagttctactggatagttttgaattagattatggtaggaagaatgatattaagacaagtatctgtcatattctgcaagttaaccattaaaattcctcccattgtcaaggaagcataatatgtaaaagcaggttaagtacagatcattgcagctgcaaactgagtaagggtaatgagtaaaaactttgaataccaacagcatcctcaatttatggatttggtcagtcctatgggcactggacctaagttaaaaaacctacacggaaggcaaggctttccnnnnnnnnnaggcngggtctcgctcttgttgggcngggtgggagtgcattgggccggccntcggctcactgcaacctcccattcccgggttcaac

SEQ ID NO: 310666 - DNA, 1363 bp, Homo Sapiens
aatagccatcatgatgtccatgtttacatgaactaggtcctttgcttacctgctgtctcaacttctaaaagaatagtaattcagctgaaggactcccaaattaggaatgtcaaacacacaaaaagcaaatttctcagacccaagttctatttcttaattgactttaattttactagaagcgaatgttgataaaattacaacctatgacagttttgtgactatttcctaagtccagattcttacctgatatctacctttcgtatctgacagctgacgtcctaaaaatttcaaagtcagaaagatttctgcacggatgtgcaatgcaaacttatttcataaagcctctcaacttcataaaagggaaaaaaggttaagttacagggaggaagaaaagtgtttatgaagctgatgtaaatggcgtgtggggggtgcagcccactctttaaaacaccatcctgtgtgtgccaagtaccaagcaagcctgaagagattgcctgtaacttctaacctccatcctgtgtgtgccaagtactccagccctcactggagttgtacatgtatgtttccattttgttgtgtggggctttttaaaagcatacactaacattgtgagtattttatcctaatctattagcactcaattgggaaaaaagacttctctgctacttggtcagctgaacccctggaaccgttagaacctactaatcctgccaaccatccactaaacagatggaattaccaacagagacttgaagaaaggggcacaaactgtgtgcctgcggtaaatgtctgcccccacacatagacactaagatggattaagtgctcatgaagcaatttaaagtacttatcagtaaacattctatgttaatagacatcaggaataaagaatctgctgtttacaatgatccatgcaaaaatattcctaaacttcttataaaataagatgtgaaaaagaaaattataagaagtacttactataaaaaataaggttaccaaaggctcagtggtcaggtgtccccccaccaaccaactggggcagaatgctagtgggcatcctcactgggcgccagtgccctgacccagctaccagcaaatgaagaggagcagagccccctccccaccagagcccacagcactcaaaccaccactgcactgggaagaagacgcacgctcctgccctagaggccgctgaaagggacccaggccttacatcccccacccccactctgaccctcactgagaaccgacatgcactctcatggatacaggacgggcatattttgggggcggggtggagggaagccttttcatttcttatgtacaagattcagatcctaaactcaaattcctctcccacaat

SEQ ID NO: 310667 - DNA, 1332 bp, Homo Sapiens
agagacaaacttttgggaaccaggcagtttccgacccaaattaggccacatacccccaatttctgggttacttggtcagttgagcccctggagcctcagggacctactgataaagcatgtcctctgcagtatactcaagagtctgctgcccttcagaaagccagagggaccactcccaaatgcagaggtactagaggggagaaatacgtgctctgccttcccccaggccaaccacactctgctttagagaccctctcagaaagcaccagagaggaggaccagacgctgccacccacctcaagccacacccctgccacctgctgctgcgcccaatggaggtcctgtcctgtccgggcaacagccaaactggcgacaatggacacatccaacagtcagctgtcggataaggtgaaggtggcccaactgctcagagtaacactgttctcaaatgtttaaaaaggacaggtgaagtctgggtctccttttttaaagcagacaccaatacttacataactagtacatgttggcctttcaccagcactcactggcactcacaggtgccttacataccttacgggggccaacactgacaggtattagtacgtcgcaagttgctgtaataatgtatttcctctcgttactgttgtgtcccccaagacacatgcaaattatttcctagacctcattcatcacagccagatgatgccaccagaaagagcaaggtactgtatgcccagctggggaagggcaagacactcactgaccaggtgcccaccccaaggctcaggaccacccccattgcctgtgaacacatttgcatagcactcaagaaggtttcccagaatagcgacaggtaggcctacaaaccacaccaagaagaacgttcttaacagatggctcacgagagacataaaaggttctggaagtgccttcaggcccattaccatgactggccctgactctggccctcacagagcggcaagttcatgggtcactggctcacactaaatgctcagccgccagcacagatccaaacaagacctccatgagcagagaaactgcagcggctgaacacactccccaagcctcaggggagaaggtgtagaacaaatattttttaaatagccatcatgatgtccatgtttacatgaactaggtcctttgcttacctgctgtctcaacttctaaaagaatagtaattcagctgaaggactcccaaattaggaatgtcaaacacacaaaaagcaaatttctcagaatgctccaccatatgcttcgggacaaattatgaagctttgtaacagaattttgacccaagttctatttcttaat

SEQ ID NO: 310668 - DNA, 608 bp, Homo Sapiens
taggatcctctcgtatatttatttgagctttctcacgagatgggcatagaagatccaaaatttcttcattgtaaatctctaagtaagacactttcagagtaaattcaaagtcactctttttatcaatttctttgaagagcagttgtattaccctaggaataaccccaactgttggttcattctcttgctctgcagtatatgcacctcccattgaataggtttttccagagccagtctgcccataggccaggaccgttgcattatatcctttaaatacaccttttatgagtggcgctactgctgtattgaagacttcttcctgttcagtagagggatcaaatacaaaatcgtaggtgaaggatttatctgtaccaaccaccacctgaggctctccgggcacgaaggaaaggcacatctggcagccctcgctaatctctttggggaccagagggcgacaacgcagcgccactcttacaggaattcccttcacctcttccttcatgatcctatctcagcaccgtctcaaactaaatgtcccttccccgttctccctgggcctcccgccgccctgtcccagccggagctttaaccgccaagtttcaaatccc

SEQ ID NO: 310669 - DNA, 1205 bp, Homo Sapiens
  misc_feature (1176)..(1176): n is a, c, g, or t
cttccagttctcggccttaaaccagctcttaggtgtcggacttcataggggccatataacaaaagtaaaaacaggtgcacacttgagggcaatccgcatattgagctatggaagtatctgaattctgtaatgaacatccatgctgcaataacattaaaaaagcacgggagcctattccaaaccagcgagaacaggtgcaaagagtgggtcgtgtgtttgaactcccaccacgtaagggcaaactcgatatgcatgctaatgacctacaattatgaaatgaaaaaagaaaaatgctaaaggatgccagagtgaacatcagtgagaggcacagagacccactctcttttaactttttacaaataaacttaaactataaattagaaacacaaataatcatgagtagctctaacattcaaatgaagtaaatgaattgtgtaggagattaaccccataactttgtttcgtttttaaaaatttcttgagcagctctttgatgatggtggtgtttatctccttcttctcggcagccaagcccagcaaaagcatggcacacagcagttgctgcccaagcctgggtgctcctggtggtcctgcatctcaccaaggagctgcaggactggctgtgcagtagggttgtcctgggaagaaccctccctgtcttctccttgtgcaggctccacgctgttggtgaggctcgcctcacaaagatcaccatgcttgtcggcagccccgagctcctggggggctggggctcctggactgggttcagcagcagggttctgggcagcggccaggaatttgccgtgcccctcgttgtagctgccacaagccgcaacaccatctcctgcagctccagcagcttcaccttcctctcctccttgtcctgggccagcctgatgatggcctcctcccggtgacgcatctttggcactgtcccctggctctgttagaaggcgatgtactttctgatggcatctctctctccggtactggatgaatccaagttccagtttctccacatgctccctcaggtccgccttctcctccaggaggtccataaggccgctagactcgcccccagtccctgaggctgggactgctgcctctggctccttctcggccgaggtgagcgtctccgtcacctggcccagcttctcctgcagctcctttacttgntgctccaactgcagtgcgctcttgttctc

SEQ ID NO: 310670 - DNA, 624 bp, Homo Sapiens
  misc_feature (183)..(183): n is a, c, g, or t
agaacttcaaccctgaaggaacccccaacatacttgtcttggttctctgggcattcttccgctcttcacaaaggctgtggtcatcctggccaaattcaagcaattctttcacccttctccagggatcgtaaatcataaatgtgttctctggcacttgtaacaacacgctctgatccattcctnatgaggtaagctaggagcagcaacgacttataaactcttctccaattctgttgtcttttaacattcgtgaccaaagcatgttcataagttctggaaattgttcatacataaatgtagccttggcaatctctcccatgagttgcccagaaggtccccaaggatcatcgttcgttgcctctcgaaccttagactcgatctctgaataattcataacaacattggtggctttgtccaccagctcgcgcaccttccacatgttcaacatcgtgccccgcgcgggacggtccgccgcctccctctcctgctccccacggaccccggaacacttccgtaccggggcagttccaggccggggtcaccgccgcccgccgcctcgaactcccccagtcagctccttcctttgccacagcagcggcgccgccggtgacacgtcgagacccc

SEQ ID NO: 310671 - DNA, 367 bp, Homo Sapiens
  misc_feature (212)..(231): n is a, c, g, or t
  misc_feature (242)..(242): n is a, c, g, or t
  misc_feature (267)..(267): n is a, c, g, or t
  misc_feature (310)..(318): n is a, c, g, or t
  misc_feature (322)..(322): n is a, c, g, or t
  misc_feature (342)..(342): n is a, c, g, or t
ccgagtcacactgttcactggtttattgagattcggggagatccttccccaagagacaccacagtgtgaaagggacaccacctcccaccccataggtccatctgtctatcccaacagtcaagggtgccttcctttggtcaggattctcatcaactatccactggaagcagctctccaaacctgcccccacttatttttccttaattcccctnnnnnnnnnnnnnnnnnnnnggggagcagtnttgggggagaaggatgattgtgagntgtaggactgaggggtaggtacatggaatgcaatggggagatnnnnnnnnnaatntgaggcaggaaatggggagnattctgttggacaggggagaggggt

SEQ ID NO: 310672 - DNA, 639 bp, Homo Sapiens
agggttgacacttatatggcggtccatattcctgatactcatatgccttgtgtccagtgtcacctctgatgctcatattaaaagatgagttacctatgccaacttctgcacacacaaagctgtcacatgaacttcaggagaagctttcttctcctggaagttcagtctgtcatctggaacctgggtaaaagtttctccacaatgactgtcttctttaatttcattgactttctcttctatgagactcctgaagcttcttctggggttttggtactcatattcaatgttctggtcactccatttttttcctatagaggtcaggttcctgaaagtttccagcatcacttccctgaagagattcttctgggaaatatccagcaatgtccactcttcctgggtgaagttcacagccacatcctcaaaggccactgggtccatttcccggctttcagatgtaccggggtcctctctacagctcctgtgactacagcagggcatagcgcaggcgacagagcgacagaagcctgggtacaggcaccaggtccctctcgggctggtctgaccggttaccaaccgccgcccgcgcagcgaggaaggtgaggaaagcgaccccctccatttccggatgaactgtgggcc

SEQ ID NO: 310673 - DNA, 3239 bp, Homo Sapiens
agcccagggatctttagagacccagacagcaagagtagagggaggcggtggggctgcctccgcagttgggatgccaccctgggtcccccaccagtctccttgccagcacgtgggcagccccagtggctggagcatccgggaaggcctaagaagggaatccctcctgctggcctccccaggaggtgtttggaatgtcctttgtaatatacgtcctggatacagtatgtgcttcccagatgtttacagaacataatgtgagagttgaggctaaaagcttcacttccattcattgccatagaaaaacaatgtttgatgtgtatgttgccccctaagaacatgacaatcaggttctttcctggatttaagcaggcatttgtttgtagcgggaagtggaggaaatgcctctttctctactccagcccctatctcctcatctggactgcttgcacgtcctgtcctgtgccattcttggaggaattaggacttccataccctgatagggtgttagagtgagtgtgtgagagtcagtgacccttccaaggagggaacagggatttcctgcggattctctgcccttcagaggaaatgaaagggagtcgtctcactgatcctcaaggagatggatttccacagggggtcccttataggccagtgtgctgattctgttcatgtacctttggactctatctgcaagatcctcttgccatgggggtggagggggtgttgcagagaagtccattaggacgtgggaaggcaggggccccacaatagaagagggtagtagtttgggtcaggagagctgcattctagactgcacttctagatgaactgtaccatgcattcagggatattagttccccattttaaggatggagaagctgaggtttcgaggctccctactaatgcggttaggaactgaactctaatcctggcttctttagggttgttctcaacctcagcaaatgcatttgttgctctgctcccctgctgctttaaaagcagaaacgtggggcacccttgccaggccctgaaacttactattgtcaggaacagagctggcatgctgttgggacataactcttcctggaaaccattacaaggtcctttacagtgagagtcagtgaaaatcaggttagggaatgtggccatcctcatggcccagcctggttttgagggaaggaagtgatctcctgggggcccgaaaggggcagatgctttgggagggctcatggggtctgcaatgtttcctttccagaggcagggagccctgaaagcccagagagcacggagataactgaggaggagctcctggataatttccatctgatggccccttctgaagaggatcattccatcctttggggcgccatcagtacctatgatggctcgaaggctctccatgtcaccgacatcaaaaaatggaaggtgaggcccagcaggtgggtggtgggcactctcctgtcagaggatgtagcttgagtcggctgtgacaagcagacctggcccactccttcctggtcctgatgccctggaaagaaatgcttttcccccaaaacctagtggccatttctcagttaaactttgtcaaactgtgaacacatggactttcaggagaggagcccactggatgcaaagaaaatgtagttccggacgataggttacttcatgtctctgagctcctctctaaagggtgtgagaacattgagttacattgttccaaaacttagtacaagggcctaactgctttcacccccattgtatgatttgcctccctttaaaaaagttgtcataaaatagacataaaatgtactgttttaactattttgaagcataggtttctgtggcattaagtaacaataagtaatgcatgttattctgcaaccactaccaatatctaccttcagaattttcatcttcccaaactgaagctcggaactcattaaacatcaactctccattatcttaattatgtctgttttgaattctaccacttgagggcgacagagaatcaaagtcggagtgatttgatttgagaaaataaattacttccacaaacatgcctacccagaaaaagggaggattaaaccattttctcaacattttggaatttcatctgagaataacgataaatggaggaaagttaattcttaaattatccaaatgaatgccttaatcctcacttgatttagtttatgtaaaagaaccttgtagattgcagaggaaagttattcaaaatctagaaatgtcttctgctaaattcttaattaagagttatgcccactcttctaaccagatggcgggtgccaaaagtattcagtaggtggcaggaagagttgggaagagttttgtggtgttggtgaggctcttgccaggggatgtctctgtgcaggtgttgagagagtgattggtgagggagagaatggtgttcttgttctttatctgaacaacttaagacagactaactgcaggtgggaaaaagaggcccagagggagcacatcacatgacacctagtcccaggtccccgtggccagatcgtagggccactcctgcttctacaaaacctcttccatcagtcattgtctaggctgataattcactgtgtcttgttagatatgctaatgtcaagttattctcttaggagccctgccgaatagaactctacagagtcgtagagagtttagccaaggcacaggagacatcaggagaagaaatttccaaattttacctgccaaactgcaacaagaatggattttatcacagcagacaggtaggtggccttgccagtgtgcgtcgtcagggtgaaagggactactgccctacattcctgccaagccacggtcattcatgtcaaagaaggtccactccaaagtagacaccagaagtggttgtattgagccagatccacccctctgggaacctggaacagctaggtgaagaaagcctattgaacaggtcaatatgtcaccaccagaggtggaaaacctgcgctggaccaggggccctggggctaagcctgagctccatcactcagcaagccaatagctatggaagactttcctaggccccctaacgcttggatcttgggttcctcacctatacaagagaggaagggaacaaacttaacttagaaaagcaagtatctatttggacagctcttaacacttttttctccttgaactgtctaataaaacacaacaacatttttgtggcttgccagataataaatgagatccaacag

SEQ ID NO: 310674 - DNA, 1074 bp, Homo Sapiens
  misc_feature (217)..(283): n is a, c, g, or t
tccatgctctttaaaaacagacgcaggagctttggaagagcagaaatgcaattacttacatacaatatgatgagaagtgtttcatgatatacaaattgacataggacaagttattaacatagtacaagtttttactgtgtagaaaaaataaacttacagtgaataaataaacagctttctatatcaagttatgtatggagtataaaaagtagttacnnnnnnnnnnnnnnnnnnnnnnnnnnnnnnnnnnnnnnnnnnnnnnnnnnnnnnnnnnnnnnnnnnntaaatatttcacgtgacagaacattatttcatctggtttcagttttgtacattaaaatatatctggcagttggggtctcccctgatctctggagacccagggatcctcttcccattccaagggtagacgcaccagcagagtcccgcctctccatccatggatgtctcacactgtctgctgtgataaaatccattcttgttgcagtttggcaggtaaaatttggaaatttcttctcctgatgtctcctgtgccttgttgatgttggtgacatggagagccttcgagccatcataggtactgatggcgtcccaaaggatggaatgatcctcttcagaaggggccatcagatggaaattatccaggagctcctcctcagttatctccgtgctctctgggccagggctccctgcctctgcagcatggggagcggaggcgtcagactcctgcacgcaggcgccttggccgcgggtgagggcgtgcagaggttgctgctcccccggcagcgcgcggcaactgagtccccgggcgcagcgtgcagtcgccacgccgcacgcggcgcccagaggcagggcgcacatcgggcaacagccgcagccggcggaccgggtgacctccgagcacgaggcggacaccggcgggcagagcgcgagcttctcggcggagcagggcgcgcactgccacggagcgccggctgtcacgccgacctggacagtcagcaggagcagtaccagccagacgcgagcaacggggaccctcgtgccgaattcctcagcccgggggatccactagtt

SEQ ID NO: 310675 - DNA, 1134 bp, Homo Sapiens
gccgccgccaccctcccagagagcactggccaccgctccaccatcacttgcccagagtttgggccaccgcccgccgccaccagcccagagagcatcggcccctgtctgctgctcgcgcctggagatgtcagaggtccccgttgctcgcgtctggctggtactgctcctgctgactgtccaggtcggcgtgacagccggcgctccgtggcagtgcgcgccctgctccgccgagaagctcgcgctctgcccgccggtgtccgcctcgtgctcggaggtcacccggtccgccggctgcggctgttgcccgatgtgcgccctgcctctgggcgccgcgtgcggcgtggcgactgcacgctgcgcccggggactcagttgccgcgcgctgtcgggggagcagcaacctctgcacgccctcacccgcggccaaggcgcctgcgtgcaggagtctgacgcctccgctccccatgctgcagaggcagggagccctgaaagcccagagagcacggagataactgaggaggagctcctggataatttccatctgatggccccttctgaagaggatcattccatcctttgggacgccatcagtacctatgatggctcgaaggctctccatgtcaccaacatcaaaaaatggaaggtgaggcccagcaggtgggtggtgggaactctcctgtcagaggatgtagcttgagtcggctgtgacaagcagacctggcccactccttcctggtcctgatgccctggaaagaaatgcttttccccaaaacctagtggccatttctcagttaaactttgtcaaactgtgaacacatggactttcaggagaggagcccactggatgcaaagaaaatgtagttccggacgataggttacttcatgtctctgagctcctctctaaagggtgtgagaacattgagttacattgttccaaaacttagtacaagggcctaactgctttcacccccattgtatgatttgcctccctttaaaaaagttgtcataaaatagacataataagtaatgcatgttattctgcaaccactaccaatatctaccttcagaattttcatcttcccaaactgaagctcggaactcattaaacatcaactctccattatcttaattatg

SEQ ID NO: 310676 - DNA, 1006 bp, Homo Sapiens
  misc_feature (32)..(34): n is a, c, g, or t
  misc_feature (44)..(44): n is a, c, g, or t
  misc_feature (68)..(71): n is a, c, g, or t
  misc_feature (83)..(83): n is a, c, g, or t
  misc_feature (85)..(85): n is a, c, g, or t
  misc_feature (87)..(89): n is a, c, g, or t
  misc_feature (94)..(95): n is a, c, g, or t
  misc_feature (97)..(97): n is a, c, g, or t
  misc_feature (102)..(102): n is a, c, g, or t
  misc_feature (119)..(119): n is a, c, g, or t
  misc_feature (124)..(124): n is a, c, g, or t
  misc_feature (126)..(126): n is a, c, g, or t
  misc_feature (565)..(565): n is a, c, g, or t
  misc_feature (569)..(598): n is a, c, g, or t
tattggaaaactaagactagcccttttcacannnattaacattnggcacacacaaaacattttccctnnnntttggctccccngncnnnggggnntnaagcngacagctgtgcacacantgtantnttaacacacatgggaagtcattattgcacatgccactcggttcactgtctctattttatgatgagaaccaggagggtgtgagatttgcctgcatcatgggcagctggtttcacagccgggactcttggcttggctctgcagtgctcggctgcactgaaaaaagggccagctatggctctactttccctgtcagcttgtcatctgctgctcttgaccttggtcttgtctttgcagtgtgagacatccatggatggagaggcggggactctgctggtgcgtctacccttggaatgggaagaggatccctgggtctccagagatcaggggagaccccaactgccagatgtattttaatgtacaaaactgaaaccagatgaaataatgttctgtcacctgaaatatttaagtatatagtatatttatactctagaacatgcanattnnnnnnnnnnnnnnnnnnnnnnnnnnnnnngtaactactttttatactccatacataacttgatatagaaagctgtttatttattcactgtaagtttattttttctacacagtaaaaacttgtactatgttaataacttgtcctatgtcaatttgtatatcatgaaacacttctcatcatattgtatgtaagtaattgcatttctgctcttccaaagctcctgcgtctgtttttaaagagcatggaaaaatactgcctagaaaatgcaaaatgaaataagagagagtagtttttcagctagtttgaaggaggacggttaacttgtatattccaccattcacatttgatgtacatgtgtagggaaagttaaaagtgttgattacataatcaaagctacctgtggtgatgttgccgcctgttaaaatgtacactggatat

SEQ ID NO: 310677 - DNA, 1523 bp, Homo Sapiens
  misc_feature (476)..(503): n is a, c, g, or t
ttaacagtatttccatgcagaatatttattgtaaatgtttccattatagacacgtgtttaacaacatatccagtgtacattttaacaggtggcaacatcaccacaggtagctttgattatgtaatcaacacttttaactttccctacacatgtacatcaaatgtgaatggtggaatatacaagttaaccgtcctccttcaaactagctgaaaaactactctctcttatttcattttgcattttctaggcagtatttttccatgctctttaaaaacagacgcaggagctttggaagagcagaaatgcaattacttacatacaatatgatgagaagtgtttcatgatatacaaattgacataggacaagttattaacatagtacaagtttttactgtgtagaaaaaataaacttacagtgaataaataaacagctttctatatcaagttatgtatggagtataaaaagtagttactgnnnnnnnnnnnnnnnnnnnnnnnnnnnnaatgtgcatgttctagagtataaatatactatatacttaaatatttcacgtgacagaacattatttcatctggtttcagttttgtacattaaaatacatctggcagttggggtctcccctgatctctggagacccagggatcctcttcccattccaagggtagacgcaccagcagagtcccgcctctccatccatggatgtctcacactgtctgctgtgataaaatccattcttgttgcagtttggcaggtaaaatttggaaatttcttctcctgatgtctcctgtgccttggctaaactctctacgactctgtagagttctattcggcagggctccttccattttttgatgttggtgacatggagagccttcgagccatcataggtactgatggcgtcccaaaggatggaatgatcctcttcagaaggggccatcagatggaaattatccaggagctcctcctcagttatctccgtgctctctgggctttcagggctccctgcctctgcagcatggggagcggaggcgtcagactcctgcacgcaggcgccttggccgcgggtgagggcgtgcagaggttgctgctcccccggcagcgcgcggcaactgagtccccgggcgcagcgtgcagtcgccacgccgcacgcggcgcccagaggcagggcgcacatcgggcaacagccgcagccggcggaccgggtgacctccgagcacgaggcggacaccggcgggcagagcgcgagcttctcggcggagcagggcgcgcactgccacggagcgccggctgtcacgccgacctggacagtcagcaggagcagtaccagccagacgcgagcaacggggacctctgacatctccaggcgcgagcagcagacaggggccgatgctctctgggctggtggcggcgggcggtggcccaaactctgggcaagtgatggtggagcggtggccagtgctctctgggagggtggcggcggcgcggcggcagatgctcgctggatgggatggcggtggccgat

SEQ ID NO: 310678 - DNA, 768 bp, Homo Sapiens
  misc_feature (246)..(319): n is a, c, g, or t
tctctatttcatttgcattttctagcattatttttccatgctctttaaaaacagaccaggactttggaagacagaaatgcattactttacataccatatgatgagaatgtttcatgatatacaattgacataggacaagttattaacatagtacaagtttttactgtgtagaaaaaataaacttacagtgaataaataaacagctttctatatcaagttatgtatggagtataaaaagtagttacnnnnnnnnnnnnnnnnnnnnnnnnnnnnnnnnnnnnnnnnnnnnnnnnnnnnnnnnnnnnnnnnnnnnnnnnnnttcacgtgacagaacattatttcatctggtttcagttttgtacattaaaatacatctggcagttggggtctcccctgatctctggagacccagggatcctcttcccattccaagggtagacgcaccagcagagtcccgcctctccatccatggatgtctcacactgtctgctgtgataaaatccattcttgttgcagtttggcaggtaaaatttggaaatttcttctcctgatgtctcctgtgccttggctaaactctctacgactctgtagagttctattcggcagggctccttccattttttgatgttggtgacatggagagccttcgagccatcataggtactgatggcgtcccaaaggatggaatgatcctcttcagcggacgcgtgggtcgacgatatcccgacaattccgaccgtaccagcctgctttttatacgaggtgtca

SEQ ID NO: 310679 - DNA, 444 bp, Homo Sapiens
  misc_feature (230)..(296): n is a, c, g, or t
aaatttccaaattttacctgccaaactgcaacaagaatggattttatcacagcagacagtgtgagacatccatggatggagaggcgggactctgctggtgcgtctacccttggaatgggaagaggatccctgggtctccagagatcaggggagaccccaactgccagatatattttaatgtacaaaactgaaaccagatgaaataatgttctgtcacgtgaaatatttannnnnnnnnnnnnnnnnnnnnnnnnnnnnnnnnnnnnnnnnnnnnnnnnnnnnnnnnnnnnnnnnnncgtaactactttttatactccatacataacttgatatagaaagctgtttatttattcactgtaagtttattttttctacacagtaaaaacttgtactatgttaataacttggtcctatgtcaatttggtatatcatgaaacacttctc

SEQ ID NO: 310680 - DNA, 578 bp, Homo Sapiens
  misc_feature (31)..(31): n is a, c, g, or t
  misc_feature (274)..(300): n is a, c, g, or t
ctcaaactggctgaaaactactctctctatnccattggcattttctgggcagtatttcccatgctctttaaaaacagccgcaggagcttggaagagcagaaatgcaattacttacatacaatatgatgagaaggtttcatgatatacaaattgacataggacaagttattaacatagtacaagtttttactgtgtagaaaaaataaacttacagtgaataaataaacagctttctatatcaagttatgtatggagtataaaaagtagttactgnnnnnnnnnnnnnnnnnnnnnnnnnnnaatgtgcatgttctagagtataaatatactatatacttaaatatttcacgtgacagaacattatttcatctggtttcagttttgtacattaaaatacatctggcagttggggtctcccctgatctctggagacccagggatcctcttcccattccaagggtagacgcaccagcagagtcccgcctctccatccatggatgtctcacactgtctgctgtgataaaatccattcttgttgcagtttggcaggtaaatttggcaatttcttctcctgatgt

SEQ ID NO: 310681 - DNA, 395 bp, Homo Sapiens
acgggctgcggcccccggggctctggggagggtctcactcagagggtaaagctccacagaagagtcaccccagagcacctgtcggagaccctgcgaaaaacacgctctcttcacctccagtgctgaaagctgctcagggcctctggatgcttagtttttgaaccttgtctgttcacagatatgattgaatttcatggcgtggtgagctttcacctgagtgcggcagttacggccccagtagcagtcaggacgggatgttacggccactggcaactcggaagcaggaatgttctgccgatactgataggtcagctcacggaagctgcgcaggccacagcagtaacacagaacggtgtctcccgtgactctgtaatcagacagcagaaacctgcagc

SEQ ID NO: 310682 - DNA, 707 bp, Homo Sapiens
aaggaaggagggtctttgatttatgaaaaattaggagaaaaggcatttggatggccgggaaaaattggagcttttgtttccattacaatgcagaacattggagcaatgtcaagctaccatctttatcattaaatatgaactacctgaagtaatcagagcattcatgggacttgaagaaaatactggagaatggtacctcaatggcaactacctcatcatatttgtgtctgttggaattattcttccactttcgctccttaaaaatttaggttatcttggctataccagtggattttctcttacctgcatggtgttttttgttagtgtggtgatttacaagaaattccaaataccctgccctctacctgttttggatcacagtgttggaaatctgtcattcaacaacacgcttccaatgcatgtggtaatgttacccaacaactctgagagttctgatgtgaacttcatgatggattacacccaccgcaatcctgcagggctggatgagaaccaggccaagggctctcttcatgacagtggagtagaatatgaagctcatagtgatgacaagtgtgaacccaaatactttgtattcaactcccgggtaagtgagcggtccgggcttctaatgagtacagttatgtgttttctaagtttttattcaataaactgagatggcctgagatcaccatctatgttggaatgct

SEQ ID NO: 310683 - DNA, 803 bp, Homo Sapiens; identical to SEQ ID NO: 97813
  misc_feature (369)..(446): n is a, c, g, or t

SEQ ID NO: 310684 - DNA, 1372 bp, Homo Sapiens
  misc_feature (23)..(23): n is a, c, g, or t
  misc_feature (35)..(35): n is a, c, g, or t
  misc_feature (108)..(108): n is a, c, g, or t
cgcgcacacgcggatcgtgcgantcgaggatatgncaccatcgtggcggcggacatttcgcgaagttatcgcggttccaacgcagcgaatttatggacgagagggganactcgccccattggtccggggccggaaagtggcttctagatgagagttttaccaacgcacattggtctcgccgataggagatgggccaggggggggcggagaaataaaggggggaatattgcggggatgggaatatgggcgctccgggggtgggatagatccgcagataaagggcggttggggagcggccaatatgggagttgggtgaaaaaacagcgtgcataaacgccccggagacggtttttttgttgggtggagaatcccaaagcccgtagttcatcggccaggggatcttcttagggaaagcaagttatggaccaaggttcgacttaccctagggggggcccggcgcgcgcaaacggaatgggtctagggaaaattctctgagtgtacggaggcaagccaggcacgggcgggggggtggttgtgggtaggttttggggaagttccaaagaatttattatcaaaactaaaacaaaacttcagttgtacataaagtaataaactttacaacagctgttaagagaaagtcgtgatgtaagtttatacatattaccgaaggcaaagaggacaagcaaaggagagctccagttggaatgttgattacattcatgcagcttcctcttgatttaaacactcatgacacattgaatgaaatcatcatatgggaaattcacaacaccttgctgagcagtatcccgtcttcgaaagctgtctgtaagagccctcagtttgacgcagcaggcgatgtagtcgtcgaaggtgatctttccattggtgctgtatcgttttgcaattgaattcacagcctggggactcaacctaaatcccattgttgtcagggccttctgcaattcttgtgggtctactgttccactcctgtcagtgtcaaaactgataaagtgttgtctccagccattcagtacagcccagagttctttaaattcattgaaacccattgtgccagacatatctctatccagcattgaaaccataagccggcaagtctccaggttaaaaggtttgtatcctccagcaatgccagactgtgtcagacatctctgcaattcatcagcatctatctgcccatcctgtccagctacagcagcaaagtaaccatacagcggatcctgagtttgtccgggaaacgcaggccctccgggagcccctccatacccgcctgggtagtacccgccgccggcgccaggatgccccgggtacgccatgctgcagactgcgccgcagccgccctcgccctgtgccc

SEQ ID NO: 310685 - DNA, 408 bp, Homo Sapiens
  misc_feature (23)..(23): n is a, c, g, or t
  misc_feature (76)..(76): n is a, c, g, or t
atggttgtccagggcccttctgnaaaattccttgtgggtcctactgttcccactccctgtcagtgtccaaaactgnataaagtgttgtctccagccattcagtacagcccagagttctttaaattcattgaaacccattgtgccagacatatctctatccagcattgaaaccataagccggcaagtctcccaggttaaaaggtttgtatcctcccagcaatgccagactgtgtcagacatctctgcaattcatcagcatctatctgcccatcctgtccagctacagcagcaaagtaaccatacagcggatcctgagtttgtccgggaaacgtcagtctccgggagcccctccatactgcatcttgagttgaagtcttataggtagaagctggtgatccttagaggatt

SEQ ID NO: 310686 - DNA, 694 bp, Homo Sapiens
tcatcatattcctcttccaactcatcttccccccaaagctggagaggtacagtggtggcaaaagttgctagaagaaccatttcctccctcagagtaagccccttctggaattccaggtgttccctggcagttgcaagcagatggaatggaaagaaaagagttctcatccttctggttcccagtctcgttttcttttgagagttcctggtccactcctgattcttcttctgaagacgtctcactctgatcagggtcctctgcatctctaggtggtcctggaccccctggggggccatggcttgggtccaaccaatgggctgggtttgggtgctgtgtgtgcttaggaccagagtgctctgtgaggcagcgggtaccattaggagcagtccctgctgagtccctgagtcctgagaatgaaggtatttcagggtccacggagggtcctaaagtcctgagggaggcaccaccactgtggtgggctccatacaaccctctttctccggggtgcttctgggccatgaccccggggcttcctgagggtcttaggtcacagccatcatggtgtgttctgatgccgaagaacggcggtaactcctccccctcgagccgcccggcctggggccagggtgagctacgagagccgctctcccggctccgcctcccgctcacgctctgcttccgccttccgtccccc

SEQ ID NO: 310687 - DNA, 895 bp, Homo Sapiens
tttttgtagagatggggttttgttatgttgcccaggctcctcccacttttcttatgactggaaaagacaaaatatatttctagccctggacaggaaaaggataccagatgcatagagtcacagagcattaggactcacccatctctgtggatcagagcccaaagcctttattttttagataaagatggtgaagtgaccttcccctgctcactggaggcaaagtaagtctcataccaaggtctcctgtttctcagtcctaagagcatcattctaagtcatgctgcctttccaatactttgtggggaccccaatacctctcctccagtgtgaggaagtgaaatagaccaggacaaacttcctgactggtggttggtgacatttaggttatagagaatggtttgcaacttacttaatactttttcaaagtggtactttcacttccatcttactgttggatcctcacaaaagccctgtgaaatatttaaggaaagtatcttccctatttggcagatggtgggacggagaggtggagaccagagagcaaaaagtgaccagggaactcttggaaaagcatgtaactaagaattgaagactttctggtcctcttacccacctcccatctgggatacagagatgtgtgagtcagggagacatggcttaggcaagacaaagatgcaagagtcacaggacagcacaggtggggcagggttccggttcaggcctcaccgtcaggagctcccttgctggcctctcattcttctcctccagttcttcaataagagcactaaaccggcagatctccccagcaaccagcaaatcaaattcatcccgttgcctcaagatgtccccatcctggctctccaattgtgctaagaggatgctctgctgttcctct

SEQ ID NO: 310688 - DNA, 1764 bp, Homo Sapiens
  misc_feature (330)..(330): n is a, c, g, or t
  misc_feature (372)..(372): n is a, c, g, or t
tcaagtcaccagtggccaccacactgcttggttcatagttaacacaaactaaatggttctagagaatgtgattacatgaactctaacattattggaagaaaacaagatgaaaagaggtgagatgccttgtttaaagtcatacaactggttgacaggctggttcaagaacccaggtcttctgacttcaaatccagtgccctttctatgcagctacttctgtgccaagcacggatggtggtgagcagaactggcagcagcctgagtccccagggtaccctgggccatccacacccacgtgtgtctcccccctgtgatgcccagtgtgggccnagaaacacaggtgggcccggttcaaaacgattgggggttgtnctggtgaagttctgcccatttgttaggagaactgagctcgttggtggtcctcggacaagaggagcttggggtgggaagtctgagggtctagagaaatgtgagctggctcatagtccaactcaaagcatagtttttccagaaacatcttcatctccctctgcagcgggagggcctgctggggaaagtcccgaatcctctggcccagctctggcgacacagccaccggtttccggcactttctggtttcacatcttattagagtgcttctgatgtccgtcaggagctcccttgctggcctctcattcttctcctccagttcttcaataagagcactaaaccggcagatctccccagcaaccagcaaatcaaattcatcccgttgcctcaagatgtccccatcctggctctccaattgtgctaagaggatgctctgctgttcctctagaaacttcctcaggtgtgcgaactcagaaatcacctgttgtctcttggtggacacctgagtcaggaggacttgcatccttttattttctcttgactggatttcttgaatctcctctctctcttttcttagacatttaagacacttatggatttgttccctatagggagccgctgcatcctccaggaagcgcatggtgtgggtagcgtgctccccagcctcccggcacaccacgcacaactgcatctcatcatcctcacagaagaagtagatcttctctccgtgctcttggcagacatcctcctctcccaaacccagtgtggacaccagctggaggcgctcaatgttctccaccacgttagccagctgccagttgggccggaagctcccaggacggaagggttctttgcagagtgggcaagtaggggactcctccaggtctgggcctggtatctcacagtagcgggtaaggcaggcccggcagaagttgtggccgcagtcgatagtgaccggctccctcagggtaccctgacagatggggcagttgacttcatctgccaggctggtcacagaggcagcagaggccatgctggtcctgctgctatggcttcctcaaggccactctctctgcttggccacgggggaagggctgggtcacacactcacacaccccacacatgcacatggctggacacaggcacatactaaatatgcaccagcacccatatcgtcacacacttgcatctctggcagcccagggttctattctcctgccaacagcagagatgggaaatagcagaggagaggaaggaagaggggctcacagcatttcagaggtgaccttagatgaccataaccaggggctggccattcctttctgcccatccagagacactcacagtagaaggaaagtggtgatatgtcagctgtccactgtcagaagaaatatt

SEQ ID NO: 310689 - DNA, 543 bp, Homo Sapiens
ttctctatattttcaagtcaccagtggccaccacactgcttggttcatagttaacacaaactaaatggttctagagaatgtgattacatgaactctaacattattggaagaaaacaagatgaaaagaggtgagatgccttgtttaaagtcatacaactggttgacaggctggttcaagaacccaggtcttctgacttcaaatccagtgccctttctatgcagctacttctgtgccaagcacggatggtggtgagcagaactggcagcagcctgagtccccaggtaccctggccatccactgggcattggggaaaggacttgatcagtagattgagagtcctctcttctatcccttaccacccggccccatcccatcttctaaagcagtcatttctattccaagtcatccaggtgattcagccagggatcaagtccacatggtacttgggttgatatgagtcctgtacttagaggagagtaggtaactgctccttctcaaggagctcagggagaaacttggaccctcgggccccaagaagccca

SEQ ID NO: 310690 - DNA, 718 bp, Homo Sapiens
aaatgtcccaagcgtacaatgtaattgccatgattattcattggaagccctggaagaattggcaccaggaattctgtatttctctgttaaaattccaaatctgtcttctgttacaggagtgttaagtggagcccccttctctttccagtctgggaagagttctttaaaagcacctggatcaaggcaagcccctgagagagtatgagctcctatctgggcagctttctccactagacacacacggatgtccttttcatgtgccacagccaactgttttagacgaacagctgcagagagccctgcagggcctgcaccaactattacaacatctgcttcttctgcaaacctttccatgttcactccttcccatctcttgtccttatcccggggataaatagtataatgggtagtaattcgaggcacagtagaagttgaagaccatcttatagcacatagaggtagataatttttcttaatttttaaggcatgaaagcactgatatgccaggcaggacagcttggctagcggcaccagcatgttcaaagtcaccaggactctcggtcggacacaacaggaggactgtccgctgctcgcggcgggcgctggacctctaggccgcggggggcgccatcacctgccggaaagcaagaactctgctgcagttcgcctccccgctctgccgaccgctcttgcttcacggcgttcccacctccttctc

SEQ ID NO: 310691 - DNA, 568 bp, Homo Sapiens
cggggattccgggccctcaagcaacctctgtcagcacatgccttatctgaccttctctcaagattggtggaggtgataggagaacatggagatgagattcagggttatgtaatggaagcgctcctaaccttggaggcggctgtggataacttgtctgactgcttgaagaacagtgacctcctaactgtattgtcccgctcttcctcaccagatttaagctccagcagtaaactaacagcaagcagaaagagcacaggacaactaaacatgaacccgggaaccaccagcggcaacaccgcaactgccgaacggagccggcatcaacgaagcttctctgtgcccaagaagtttggtgtcatcgaccgatcctctgacccacctcgaagtgccacactggacagaattcaggcttgtacccaacaaggcctctcctcaaaaaccagaagctcatcctccttgaaggacagtctcacggacccatcccacataaaccatcccaccaacctgctggccaccatattctgggtcacagtggccttgatggagtctgattttgagtttgaatact

SEQ ID NO: 310692 - DNA, 569 bp, Homo Sapiens
  misc_feature (57)..(57): n is a, c, g, or t
  misc_feature (76)..(76): n is a, c, g, or t
  misc_feature (221)..(221): n is a, c, g, or t
aaacttcaagaatgtggtttgctggttgtgactgccttcagcactgcttctcctccntctccttcccctcaaagangttctgagtctccactgacctagaaggcttgtcccttacctgtgagaagggacaatacctccaatcactgcaaatctggtttccacattagaattttcctatccaagaagaaagctcccagagttgagtcccctcatatcctgcnactacatggcttcttgattacaagggagtcattaacctctttgcatttctgttctacccttgcaagaagttggattttagtgtgcaagtctggccatcacctgggggacattacgatttcagattcccaggcaccaaccagaactactgaattggcctttgggatggacatgtaccacagggtagaattgattggccagatgctgaggaatcacctgagaagacatgaaataattgaaatgagtgggaaatgccgttggcaaaaagtaggatagttagatgggggaagaggggaaagtcgatcagagatgcttactcctatgaactttaacttattctgcaagaccct

SEQ ID NO: 310693 - DNA, 564 bp, Homo Sapiens
aaatttcctcttttgacatgacctctgaaatattgtatgattcatcttctcttcctctttttttcctcataactggcttcttttcacttgcatcaattgaatttttaccctttttaacttttaaagactccttttttctctccaatttttctttcttcttctgttcctctaattgttgctgttccattttcgtcaataaaaatttggagtatatattgcttttttcaagcaaatgttgaagtctacggtaccgaatttctgtcgactctctatcccaagacatgcgagccttttccagcatcttccgctctctctctagtccagcagcttcaagctgttcttcctcttctagcatggccggggtaatcacagcagtgtccagttgttcaaccattgctggagcctccgagccgccgctgcccgcgggccgttccgctggcatgcctggacactcacccgggaaccgggtcccctcctctcagagcctgcaatgccgcgagctaactcctcacaaccgctgccggcccagccttctagccaaatcccccgccagggaaaaaagcc

SEQ ID NO: 310694 - DNA, 587 bp, Homo Sapiens
  misc_feature (566)..(566): n is a, c, g, or t
tggtggattgttgttgccaccaccatagttgaactttctttccctctgccagtctcctcgatctgcattactgaagtgtctcttgttggggtgattgtagttatctcttgggtgtccatgcatctgtgggccatgggaggcaggcaaattaggcttctgagggtgaaggttgtgtgaggtatgggactgagatatcagagagtcccggctggagcctgaggcctctggacgaaatggtttcttacccccagtcacgtcgtctttcttcttttgctcctcttcttcttgagaccttttcttatgagccatcttgtataacttatgcagttttcgagcatcaaattctgtaaacttggaaacaaaaatccataggttcctcctccagagtttgatgtgctcctgatctgagtaggctttaaggcactcggctatccggtctccgattttcagcaggcagttccgggtgtgttccagctgttcttgcacgttgagccccttgtcaggtttgtcgagctgttttcagtgccctttttcacggggcctcatcctctccttacataagctgnaatgacgcctgggtccagaat

SEQ ID NO: 310695 - DNA, 874 bp, Homo Sapiens
aatccatgttagccatcttcattgctgccctgtttagaaagaagactcctcggatcatctcatagggattggcccgagtccgagctcgccgcatctcttccccatccaagacatcaaacacgctcttacactgcaacacactgtgaagcagctcttccccacaaaactctgtttcatcttcaataatcatctttctctttcccaccaccatccaatcgctcatttcctgagtgtcaggaatttcagtggtacattctggaaaccatgacacctgctcacaagcactgggctctggctcatctcgccagtccacgttcagctcctggtcaaagccccggagtgtcagacccaagcctcttcgacctttctgactggaagcctcaacgatgtccttccgaccctggctgtatttacccaatccttcaccttccctgaagcccatcttggccataagcttctgggagacgctattatacatggaatagcgagaagaagttccttccacaagagagtctgctttgaatgcatcgtcaaaagagtcagagctgtgttgtttcccctcggtctcactatcagacccactaaggcttgtagtagatgcttttgctccatgactgacagaggagggaggttcatcatcggacgtggagctgaggctcagggcaagctctgcaactctttttttctgtttcttgatgggggcagtgcattctgggtcagttctcctcttcatcgttaagctgaggggagagagcgagctgccggggagcggagggggggtcaggccgacactgtcgccgccgctgccagagccgccgcctcctccctcagtttcgtttccccacaagccagcccgggtccgccagccgcaccc

SEQ ID NO: 310696 - DNA, 602 bp, Homo Sapiens
tgaaagcttgatccaagctcatttttaataggtttgtttccagcatgcctttgatcatgtcgctctgtactactcatcaactttttggtttttgtcatgagtgcttcatggccatttgtttcattttcttgccactgaaacacaaagtcatgaatatctttctcaatttcctggaagcaagtatctccaatgtgatgacttgcatgtatttgcaatgtccctgtgtggaccacttctgtattgccttgtcctgttgatgagaacatcttcatcatgcatttggaagaggtatccagggagaccaggttcctataattctccagcatcacgtctctgtatagagtcctctgagcagggtccaggcatttccactcctcctgagagaattctatggccacatccctgaatgtcagtagaccctgaggaagagccatccctgactcctttgctttcctcttcctcttccgtgttttttcctcacgtaccaagtctttagaagtcaatcctgaatgttagaaatatgttgtctactgctcagaatcaacacacctcctgccggctcggtgcgacctttactccacgggatccgctttctggtctcc

SEQ ID NO: 310697 - DNA, 542 bp, Homo Sapiens
aaagttttcaacttgattacatccatttattaccttttcatctggaaatagctccagttcagacagatgtaagtgaaaggatactccaagttgttttttaattggtttgtcttctgcattgcttcccaatgcatagctgctccctgtgttcacacctttgatgcactccctcccatctgaattttttgctattttcacttcactctgcacagtccagggctctctcctttgctccaacatggagataatactcaggtcaggaagacagattcccagggagaccaggttcctataattctccagcatcacgtccctgtataaagtcctctgagcagggtccaggcatttccactcctcctgagagaattctatggccacgtccctgaatgtcaatagaccctgaggaagagccatccctgactcctttgctttcctcttcctcttctgggtttctttctcacgtaccaacagtctttagaagtcaatccgcccgccgcggcgtgaccgtcattccacgggatccgcttcctggtctgcccccg

SEQ ID NO: 310698 - DNA, 751 bp, Homo Sapiens
  misc_feature (60)..(60): n is a, c, g, or t
  misc_feature (493)..(493): n is a, c, g, or t
  misc_feature (500)..(500): n is a, c, g, or t
tgttctgcttatatgccattctcacctacaatacccgacggacaaaggttcttgtaagancatcacagtctccatgggatagagcttctgagactagtttaatgaatcttgttacacatttatgttgacgtcatacattaaaatggatgatggaatgaaagaatcatctatctccaatgtcagtgtctaagctttccattctgttcccagtctttacgagtttggagtcggaaacccaatgactcacttgttcggcttcaaatgcagttaccaatgaggcaggaaagctttccccttagtgttcttttctatgccagtgagcaggtacgtgtgcacctgacttcatgggcagcttctgttatcatggtttacacagcgctgacagtgcatccagatgcggcccctgagcaatccctgctgcccaacagcactgacaccacaggaccctcaccccgtctccatccatgtctgggtgtgagcccttccccagganccatgcnccagtgcagcctcttccccaagttcatgtcactggatcacgggagatggaatctaaacgagatgagagggactgagggaaggcgcgggtgagtgctagcaaacatgtcaggcaggacgcttcagactcagagaagattcgcaatgccaatgccaggcatttcaggaagaaataaaagaacaatccaccaggagtatcactttacctgagtaagggccatccctgactccttttctttcctcttcctcttct

SEQ ID NO: 310699 - DNA, 1010 bp, Homo Sapiens
  misc_feature (447)..(447): n is a, c, g, or t
gtgacatctgaattttgagggaagggcacaggcttgaattgaaaaagccacccaagttttgggccccccccatttttgtaggaaggccttctttttattggaaacaaatcatttttctcaggggttggcaacaggtcataggtcgagcatattcttcattcagtgtattttcccctttaattatattgcgtaggaggtgaaatcctccttgcttataggggcagatgtatttgatggactgtgtaggctgttctccttgtacacaaaccaagcatttcctcccccagagtatcatatttagaaagccaaatatcacagatacatttagggatcccatactggtcacagagccaaagtaacacagtactgctttcttcttacaaggcggaagttcatcaataatattgtgaccagtagctattttaatatctgtcagagctttagccncaggctgaagtgctcaccaaccacaaaaaagtggcaacaagtgtaacaacaaagtctatcataggaagtttacgactatccagatacagactcgtgtagccaacataaagcagaagggcagcaatgcagtacaggaacacaaagactgcaaaggtaacatagaattgtgcagaagaagagtaatcgcctatgaggacgtaatctttccaatttacatcacatatgtttacacctggaggtggctgaaatgatgcctcattcaacctgaatggataaccaaaagtagctgtaacagttttattctcagtaactgcaggaggacaattcacttgaatttctgtttggcccttaaaacctccacaggtggcaaaagcaaagatagaagcaatccactcgaggaccttgatgaagccgagtggctccttgagcgggttgaggttgatctggaagccggacatcctctgaggaaaggagggagagagagtcaggacgacggggcggaggaggggaccgacgagaccagagcagcccggtggcgaggaagggcaggcggggctggcgcc

SEQ ID NO: 310700 - DNA, 632 bp, Homo Sapiens
cagcatttcctcccaagagtatcatatttagaaagccaaatatcccagatacatttagggatcccatattggtcacagagccaaagtaacccagtactgcaatatctgtcagagctttagcccaggctgaagtgctcaccaaccacaaaaaagtggcaacaagtgtaccaccaaagtctatcataggaagtttacgactatccagatacagactcgtgtagccaacataaagcagaagggcagcaatgcagtacaggaacacaaagactgcaaaggtaacatagaattgtgcagaagaagagtaatcgcctatgaggacgtaatctttccaatttacatcacatatgtttacacctggaggtggctgaaatgatgcctcattcaacctgaatggataaccaaaagtagctgtaacagttttattctcagtaactgcaggaggacaattcacttgaatttctgtttggcccttaaaacctccacaggtggcaaaagcaaagatagaagcaatccactcgaggaccttgatgaagccgagtggctccttgagcgggttgaggttgatctggaagccggacatcctctgaggaaaggagggagagagagtcagatcctcctctaaagttacttcc

SEQ ID NO: 310701 - DNA, 435 bp, Homo Sapiens
  misc_feature (349)..(349): n is a, c, g, or t
  misc_feature (405)..(405): n is a, c, g, or t
ggaagtaactttagaggaggatctgactctctctccctcctttcctcagaggatgtccggcttccagatcaacctcaacccgctcaaggagccactcggcttcatcaaggtcctcgagtggattgcttctatctttgcttttgccacctgtggaggttttaagggccaaacagaaattcaagtgaattgtcctcctgcagttactgagaatcagccacctccaggtgtaaacatatgtgatgtaaattggaaagattacgtcctcataggcgattactcttcttctgcacaattctatgttacctttgcagtctttgtgttcctgtactgcattgctgcccttctgctntatgttggctacacgagtctgtatctggatagtcgtaaacttcctatgatagactntgttgttacacttgttgccacttttttgtg

SEQ ID NO: 310702 - DNA, 769 bp, Homo Sapiens
  misc_feature (120)..(120): n is a, c, g, or t
tgtgtagggctgggtttcccttggttccccaaaaccaaagctttttcctccccccggagttatccatattttagaaaagccaagatattcccaggattccatttaggggattcccatacntggtcacagagcccaaagtaacacagtactgctttcttcttacaagggcggaagttcatcaataatattgtgcccagtagctattttaatatctgtcagagctttagcccaggctgaagtgctcaccaaccacaaaaaagtggcaacaagtgtaacaacaaagtctatcataggaagtttacgactatccagatacagactcgtgtagccaacataaagcagaagggcagcaatgcagtacaggaacacaaagactgcaaaggtaacatagaattgtgcagaagaagagtaatcgcctatgaggacgtaatctttccaatttacatcacatatgtttacacctggaggtggctgaaatgatgcctcattcaacctgaatggataaccaaaagtagctgtaacagttttattctcagtaactgcaggaggacaattcacttgaatttctgtttggcccttaaaacctccacaggtggcaaaagcaaagatagaagcaatccactcgaggaccttgatgaagccgagtggctccttgagcgggttgaggttgatctggaagccggacatcctctgaggaaaggagggagagagagtcaggacgacggggcggaggaggggaccgacgagaccagagcagcccggtggcccc

SEQ ID NO: 310703 - DNA, 1405 bp, Homo Sapiens
  misc_feature (514)..(514): n is a, c, g, or t
tttttttccatattaatcatacatatttattatgtattattaatgtacatatatttaggtacagataatgtacatataattatgtattattaatacacacatattacaaccatacatatttatatgaatgtaataatgtaataatatggaattattacacttttagattcattatcttttttaatagtgataacagaaaggcagaatagaatggtgatgctactcaattttctaaatggggatatcaaggtttagagatattaaatgacttttacaaggtcttcaacctaggaaagcttgatataaggtgagaacatgttttatgacaacttgtccagtgctccttttatttgggttaggaaaagtacagggacaaccttgacttttgcctgacagttttaattctatcatacacaaagacctcccatcctcttgttccatccacctcttccactgtttgcctgggtttccatctcaagttagttatgcaactaatcaatcaatctaaaaaaantttttaaagcttcttttcaatctactttttgctcagtaagaatgtcttcccaacatctttcaatgcaataaaaggtttttgtattatcccaaactgagtttcccaatatctgtttccgaatttcatggctaatatacaggtaacagagaactgatcatgcctcataatttttttaaaccttctgtagaggcagctgtttctccagcaatttctgtctgtggactgccgaggcttccagcaactgttcccagcgcttcagcagagcggcataacgctcttcaatggctttagactggttgtgttgagcagaaatcagtttgtccttcaggtcagtgatctcaggaagtctctcttgctggaaactctgcagactggcatccagagtgtcctgttttgccagaagagtgaggaagtcaccaaggtctgcaccattgccattggtctttaggcttgtttccttatcagctatccaagcctctaccacatcagccttccagttgaattcctgaaaggcataatcgtcttccaattgcaacttccaagcagctattgccttagccagagaaggggtcttttcattcagagcctctatcttggaagaaatctctttgttctgactttcctcctgcaacaccttatttaggatgtcttctccttgtgcacacacattttgtactcgggtctcatggacagcaaagtcattttccaaagcttcatgcttcattagcaagctctgagtagcagctaatgtatctccacaatctcctcggacagccaaagcattcttttcattgatccaagcttcctcttcctcagcattctgcatgaattgcaagtattctagggattcttccaacttaagtcctcgggccttggccaactctttgagcc

SEQ ID NO: 310704 - DNA, 1119 bp, Homo Sapiens
cttcttagctgtctccccaattctctttgtataatttctatgaagagataagctgaggtctgtcctgctgtattcccaggacccagcactgaacctaggaacagagcagagattctcaaaaagtatctcctgaataaaaagtgtttgtggtggtggcacctctagcagtcaggaactccctctttgcctctgagttttgatcctcaggcagtatttatgctggttaatgagtaattcttctctgggtttatggttcagagtagaataggagacctcaggcaagcctggcaacctctggcctcgtgggaaatgccttccagtggaattgcagcaaatttcaactctaacccagggatatcgatctaggcctcattcccacacccagctctgctgccagaagcgttccaaggcttctcaggccccaagatcccactgctctcttcttcccctaatgctccaagaccctctcccagccaggccccaaaggctgtgcccccgactccaggttgctttcaagctgaagccacaccagaggaaagagctgagggtggcaaaggtgggcctcacggctgacccaggggaggggcggggaagcttgggagagctcataggatgcagctgcgagttacaagagttagcatgctggcaaaaccacccagggctgctgggccccgctagcatgtgagcaggaagagggcatgagggcacagttctaaaagcagcatttactttggttttcacttgtctgaggccccgggaacgttttaaagttctagttcttgggcctggcactgtctccatcattcctccttcagccactgcagcagctgcggtgtgtagtaggtgatgatgatgtcagcacctgctctgcggaaggcagtcatggcctccagtacggcagccttgagatcaaatgccccggcctgggctccatgccacagcatggcaaactctccagagacgtggtacacggcgagagggaggtcagggtgcttgtcctttacctcccgcacgatgtccaggtagggcattcccggcttcaccattagcatgtcaagttccttcccttacatcccggtccacagctcggagagccaggcctcgtgctccagggggcag

SEQ ID NO: 310705 - DNA, 582 bp, Homo Sapiens
aaagagacagtcttacctcattctgtcacccagaatggaatgactttctaaaattgcagaaagcagaacatattccttgctgtttataatattatagtcgtatcaaagggaaagagtatttctccttaaataaaattacaaataagaaatgtatgttttactcttactcataaaaggtattgtagaatacaaaaggtttttcaaactggttttgtctttgattggcttttataatccacacttcaaagaagaaatgcatttaacttttaataacttagtcaaaaagtataatgttgccttgccttgcataacctttaactattgcaaatgatgttttgtccttcccctttgtccagtattttccaaatggtcaacagtttaaacatttaagcttgcactgagaaaccttgccacatttcagcagttttgttttgcttttggtggagagcacctgatctcgactttacagccaatgtatttactctaaattacacttttatagatacaaggtaaagtgtagctgggtgaaggcactcaggagccataaaatgtggtcaaccacaataaattaaaatgtaagct

SEQ ID NO: 310706 - DNA, 959 bp, Homo Sapiens
tgttccttaggtaattttaaattattttattgaaggagataagttactcagatattaactggttgtaggcaaagggaataaacatggtgaagtcaggtttgctggtaaaggggagccagtactaaacgccctgcccaacaaatactcagaatccagggttttcatatttctccatggttcaatctctcacaggtcactttccattcaaaggattatggagaccaaataagacaggattctttcaggtatcaacccagagtctttaggtcttctctcagccaaggcatcgagtgaaaatacaatttatttttcggattcctctggaggattaaaaagtttctttcgcattgcaatgccatgctccctgctcttggtcctgttttctatgtactcattcttcaggcattttctcaactcccgatcaacatcattacaataaccaaaaaatttcagaatgttgtgatttttgtgacattccttaagcaagttaatcaagacgttgcattcttcagtgtgcaagtgtggagataagtcaggatgcatctttaggagatgaggatggatcacagcagtgcaacccgactcgtggccacaccgggagaactgaagcggcagtagccggcggagacgcccgacccgaaggccggctgctagggagcagacagctgaaccgcttgccagacgccgaaacccagtgacgccctccaccgctccaccgtgctcccggctccccgcccccgccgcccgcgggccccaaggcgcatgcgccgcctgtcctggaggggcccatttccgtccgtcgtggggggaggcacagtgagtccactggggcacggcagcgtctaagccacaagccgagcacataagccaggtcctaacggagcctatgtgtaagtccactactggtgcaaggttgcacacttctaagaagagcggcgtggggggctcggcgaccttcg

SEQ ID NO: 310707 - DNA, 1106 bp, Homo Sapiens
  misc_feature (218)..(232): n is a, c, g, or t
  misc_feature (248)..(423): n is a, c, g, or t
  misc_feature (504)..(505): n is a, c, g, or t
cggcaaagtgggagtatccctcggtattgggggggaagggagcggtgcgggccacgaacgcgtaattggtaaaatggtcatgcgggggggtgggtgatgtgatggatagacgatcatcgagtgctacaagttactcacatatttcggggcgaaatcgggagagcgtgggtagatgcggcataggaggaattggaaataggcgggaaggagaatcaaannnnnnnnnnnnnnntattaccggcgttctnnnnnnnnnnnnnnnnnnnnnnnnnnnnnnnnnnnnnnnnnnnnnnnnnnnnnnnnnnnnnnnnnnnnnnnnnnnnnnnnnnnnnnnnnnnnnnnnnnnnnnnnnnnnnnnnnnnnnnnnnnnnnnnnnnnnnnnnnnnnnnnnnnnnnnnnnnnnnnnnnnnnnnnnnnnnnnnngggtgagttaagggtggtgaatatggtggtatggttacgggggggttgtgtggtgtaggatagggggggttgtttgttttnngtatttaaattattttattgaaggagataagttactcagatattaactggttgtaggcaaagggaataaacatggtgaagtcaggtttgctggtaaaggggagacagtactaaacgccctgcccaacaaatactcagaatccagggttttcatatttctccatggttcaatctctcacaggtcactttccattcaaaggattatggagaccaaataagacaggattctttcaggtatcaacccagagtctttaggtcttctctcagccaaggcatcgagtgaaaatacaatttatttttcggattcctctggaggattaaaaagtttctttcgcattgcaatgccatgctccctgctcttggtcctgttttctatgtactcattcttcaggcattttctcaactcccgatcaacatcattacaataaccaaaaaatttcagaatgttgtgccgactcgtggccacaccgggagaactgaagcggcagtagccggcggagacgcccgacccgaaggccggctgctagggagcagacagctgaaccgcttgccagacgccgaaacccagtgacgccctccaccgctccaccgtgctcccggct

SEQ ID NO: 310708 - DNA, 779 bp, Homo Sapiens
  misc_feature (429)..(489): n is a, c, g, or t
atttatttaaattattttattgaaggagataagttactcagatattaactggttgtaggcaaagggaataaacatggtgaagtcaggtttgctggtaaaggggagacagtactaaacgccctgcccaacaaatactcagaatccagggttttcatatttctccatggttcaatctctcacaggtcactttccattcaaaggattatggagaccaaataagacaggattctttcaggtatcaacccagagtctttaggtcttctctcagccaaggcatcgagtgaaaatacaatttatttttcggattcctctggagggattaaaaagtttctttcgcattgcaatgccatgctccctgctcttgggtcctgttttctacggtactgtcgtcctaggctactcagggggttgaggtgggaggatcacttnnnnnnnnnnnnnnnnnnnnnnnnnnnnnnnnnnnnnnnnnnnnnnnnnnnnnnnnnnnnnagaacctcattcttcaggcattttctcaactcccgatcaacatcattacaataaccaaaaaatttcagaatgttgtgatttttgtgacattccttaagcaagttaatcaagacgttgcattcttcagtgtgcaagtgtggagataagtcaggatgcatctttaggagatgaggatggatcacagcagtgcaacccgactcgtggccacaccgggagaactgaagcggcagtagccggcggagacgcccgacccgaaggccggctgctagggagcagacagctgaaccccc

SEQ ID NO: 310709 - DNA, 501 bp, Homo Sapiens
  misc_feature (34)..(34): n is a, c, g, or t
  misc_feature (40)..(40): n is a, c, g, or t
attccctctggagggattaaaaaagtttcctttngcattngcaattgccatgcctccatgctcttgggtcctgttttcctacgtactgtcgtccttagcttactccaggaggcttgaggtgggaggatcacttgaagtttgaaggcttccgtggagttaccgatcaccctactgcactccagcttaggtgacagagcaagaacctcattcttcaggcattttctcaactcccgatcaacatcattacaataaccaaaaaatttcagaatgttgtgatttttgtgacattccttaagcaagttaatcaagacgttgcattcttcagtgtgcaagtgtggagataagtcaggatgcatctttaggagatgaggatggatcacagcagtgcaacccgactcgtggccacaccgggagaactgaatggcagtagccgcggagacgcccgacccgaaggccggctgctagggagcagacagctgaaccgcttgccagacgccgaaa

SEQ ID NO: 310710 - DNA, 1718 bp, Homo Sapiens
ctcttaaaaaagcttttatccaacaagagcctatagcttcgctcagcatcagagccacggcctcctgttgggtcctccatgtggggagcagggatgcagctcagcctccagcccagggctctcctggtagtctcggggtatcctcaattgtggctcccaccccataccttgtccctcttgtcctcatctggagtcctgccaggcccacctggggtccccacagccaacccatgcacgggacagccccgggcgatctgagaggggatacgaaggtcttctgggccctctcatcccaggccagcgtccaccacaactcaaagacagcggggggactgcacccaccactcctcccaagaagcagtggttgcacatttccaacatagcgaggaggaccacatgagacccctgcagccacggatggagccgccagacctgcccttccagggtgcacgggctgggagccccccggtgtcacccggcctttttctgggggcagcagtgggttcagggcagacagtgggaggaagtcagtggaggatgttcccagccaaggggatgagctggatcccgggcgcctggtcagcctggctcgcggcacccttcacagacaccactgatcggaagacctggtgtgggaatacaggcgtgtgccaggcccaccgtcagggtttacagcgcttgctctggccctcggaggtggctggggcggcccgcttgttgcggtggtggggaatggtcggcatgagctccggctcacagggtaggggcttctccttgaaataggagctctccaggcagtccccggccgtcgcccttttcttagggtcgtacatgaacaggaagtgcagcagcgcagcccggcctccgacagccatgggaacttgtgcttcaggttgttgtagggctgcttccggaggctgtactggccgaccagtggcagcttggaaaagcccggccagatgttctccactgggcgtgcccagcagctgcacgatcaagtcgatctggtggatctcggaagtgccggggagaagaggcctgtgcgccagcagctcggccagtatgcagcccacagcccacatgtcgatgctggtggtctgcgtggtggttcccaacagcagttcaggggctcggtaccagagagtgaccaccttgggggtcattggctttactgggacaccataggcccgggccaggccgaaatccgctgtcttcacacaacccttgtcggtcatgagcaagttggaaaccttcaggtccctgtggataatgaagttcctgtgcagatactggaggccccggagcacctgcagcacgatgcacttgacctgagcctccgagaagggtgttggcatattctccaggaggctggccaggtcctgctcacagtaacccatcaccaggaagatgctctccaggtggttccccacaaccacctccttcagctccacgatgttcggatgacgcaggcggagcagcagcgtgatctcccgcaagctgctgatggggatgccatccttctccttgtccatccgcaccttcttcagtgcgacaatctcatctgtctgggtgtcccgggcccgatacacaatgccgtaggtaccctctccaatgcggttcagcttctcaaactccttcacactccggcatcgtcccaggaatacacttcagacggatctgctcgcactccagatctggctccgccatgccgagcgctg

SEQ ID NO: 310711 - DNA, 676 bp, Homo Sapiens
  misc_feature (488)..(552): n is a, c, g, or t
cttaagaaagctcatttgaagattgtaaatgttagtaagtttccccatattttcctctaggacttccatggtttaatttgttttgtttaaactaggaattggcattcacatcctcttttgtcccaggtctcagaggtcccttgtatcttatagagcagtattgttttatgttattttcccatgtataatttaaaaacaaaatacgttgttcaaaacaaaatacagtggcagcagataatggcagtatctctgtaactgctggtaaactgtatttcatagtgaagtgttcataaactaaagagtcattgatttggtttcctggctaattaaaatctgaattccatttgaagttccattgaaatcatggttttactctatagcagtggatgttttttcccaacctttctgatatttttttccttcctgagacagggtcttgctctgtcacctgggatggagtgtagttgcaccatcaaggcttactgcannnnnnnnnnnnnnnnnnnnnnnnnnnnnnnnnnnnnnnnnnnnnnnnnnnnnnnnnnnnnnnnnacctaccactatgcctggctaatttttatattttttgtagagatggattctcactatgttgcccgggctcatcttgaactcgagctcaagcaatctgtccatcttggcctcccaaagtgctggg

SEQ ID NO: 310712 - DNA, 1420 bp, Homo Sapiens
  misc_feature (376)..(376): n is a, c, g, or t
cttcgactctgtaattctcaatcctcctaacctctgagaattgtctttcagcttgcgtggactctgaaagtttacaataggcccttccgatttggcacagtacccaaccggtattgcagtggtgagaagctagatggctcaagatgctgatagcttctttgccgtggtaagaacacaaagctaaataacctttccccctttcacgaagaaggctcatcaagccttccgctgctgctttttgtagattaaaagcctgaatctgaggcgcgattgcggctattttcccttctgaaatgacggaagagtccaattttgtcacttccaggctatcacttatgttcggtggagttattgctcctttattagttttactttnggttcttctgtttgggattttaggtggaaacttcatttttaattttttgctattctccttggttgtggagctgtcactagtaaagagtcgtgaacttcttcgaggcagtgcgtttgggggagatgtaatagtggggctcaatacctgaggtgttgtacttgtttgtggaccagaactttgtgtttgtgcaagaattggagttacctctcggctatttccactctgtgagaagacagactttgttccagtttggccgattctggcaacagacttttttgaaggggctccggtggatggcacatcaattacaggaggtgtattagtgtagttttgtaaataggatccatctccaggacttggggtttctaatggcaaaatcccaaaacttggggttaatggactaagagctgctggtcctcctaataaacttcgaccagtttttggtttattttgaacctgtttagataatatggaagttccatgttcccagtgggacagtatcaggtgaaattacagctgaatcaatataagacactgaggaatctgtattcaaggagtactttgaattggaagattctaaattcaatctgtttaattcaattgtgtcctggggtgtttccgtaagaactgtctcaggctgtctgtgagataaactatgattaggtacttgtgttgtgcaagagttgggcagacagttgctaaagttctgtaaagatgtgaatttaaatgtttggtcaggatctggcttttcacctatttcacataatgattcaaagggagaccagaggaaaggatttaaactaaggctcttttggtaacattctgatcctttggcaagccgatctgtcttgcttctgcataaaggcgttctgcgaggaaaaccgcatctcggtaagcatagtggtttagtgcttgccatatagcagcctggacgggttcctgcagcaccgtcatcctcgaggctcaggcccactttctgcagtgcctcaggccccccctgtagcggctccggcccggccagcccctgctcatttaaactcaccc

SEQ ID NO: 310713 - DNA, 662 bp, Homo Sapiens
tgtgagataaactatgattaggtacttgtgttgtgcaagagttgggcagacagttgctaaagttctgtaaagatgtgaatttaaatgtttggtcaggatctggcttttcacctatttcacataatgattcaaagggagaccagaggaaaggatttaaactaaggctcttttggtaacattctgatcctttggcaagccgatctgtcttgcaatatacatgtcccaacaatgaaagagtaaagcaagctgaatcaccaaactcagtaacaatatcatcatggcttttctgcttattaaacactccaccagataagatttgttccccttctgcaagcttgctgagatcaacacaacattttgcaagcaggtatttgcattgcggtgtagtacaactgtgtcctttcaagagtctatatgctttatatgcctttcctgagcggtaataacaggttgcccagtaaaaacaaggcttcttctgagtgtacttctgcataaaggcgttctgcgaggaaaaccgcatctcggtaagcatagtggtttagtgcttgccatatagcagcctggacgggttcctgcagcaccgtcatcctcgagctcaggcccactttctgcagtgcctcaggccccccctgtagcggctccggcccggccagcccctgcta

SEQ ID NO: 310714 - DNA, 794 bp, Homo Sapiens
  misc_feature (727)..(727): n is a, c, g, or t
  misc_feature (738)..(738): n is a, c, g, or t
  misc_feature (746)..(746): n is a, c, g, or t
  misc_feature (763)..(763): n is a, c, g, or t
ccaattcaaagtactcctcgaatacagattcctcagtgtcttatattgattcagctgtaatctcacctgatactgtcccactgggaacagaaacttccatattatctaaacaggttcaaaataaaccaaaaactggtcgaagtttattaggaggaccagcagctcttagtccattaaccccaagttttgggattttgccattagaaaccccaagtcctggagatggatcctatttacaaaactacactaatacacctcctgtaattgatgtgccatccaccggagccccttccaaaaagacttttcgtgttttacagtctgttgccagaatcggccaaactggaacaaagtctgtcttctcacagagtggaaatagccgagaggtaactccaattcttgcacaaacacaaagttctggtccacaaacaagtacaacacctcaggtattgagccccactattacatctcccccaaacgcactgcctcgaagaagttcacgactctttactagtgacagctccacaaccaaggtaatttaaagatttctgtatgtcacatttacttaatgcttcgcctgctaacatttctcttcattgatgactccattcctaataagttaacaaagagactatttcgaattttaaaatgttttaatttagagggccatctatgatttttgtgaagttaattagtcctttggtaaatattatataatatttcttttttnaattaagcggncgcaagcnttatttccctttagtgnaggggttaatttttaggcttgggcactgggc

SEQ ID NO: 310715 - DNA, 1297 bp, Homo Sapiens
  misc_feature (1062)..(1062): n is a, c, g, or t
acgcttgtccatgctgacctcagtgagtataacatgctgtggcatgctggaaaggtctggttgatcgatgtcagtcagtcagtagaacctacccaccctcacggcctggagttcttgttccgggactgcaggaatgtctcgcagtttttccagaaaggaggagtcaaggaagcccttagtgaacgagaactcttcaatgctgtttcaggcttaaacatcacagcagataatgaagctgattttttagctgagatagaagctttggagaaaatgaatgaagatcacgttcagaagaatggaaggaaagctgcttcatttttgaaagatgatggagacccaccactactatatgatgaatagcactaatacccactgcttcagtgttaacacagcagtgattgtcagctgccaatagcaaatgaagttatgggtgacttgaaataccaaaacctgaggagtgggcaatggtgcttctgtgcttttcccccttgtaacccatgtgccagatgtgtggaatttttagctcagcattgagagaataaaatgtcactacctctcatcttatgaacaggataatataattctttaacagctataggttatctggcttaagtagacctaattttatgtgacttgtggtgtaaaatgtcttgatgataatttttaaaacttgggtaacacttccaaatatgggaggaaaggacagatgtgtttacaagggaggattttacaacatacttgctttattcacctccctgttttgtgttgcgtctttccttgaatattttattggcccagagttagcctttctcaattatgtttccagactgtggccgtgattctaaaggaaaatgtgtgctctttagtgggtagaacaaatggaaatttggtttcagaatggctgacagaaatcgacataagtcatgtaatttttgttgatatatcatgaaaatgaacagaattctttttccatacttatgtctaagaaaaggcatcataggtttctgaaagagataactatataacagctttttaactatccagtccaactttcagcttttnctacatttagggtaaaatgggttaggatataactcatggtgtggctaatctacatttatcaataaaatgtaaattatctgaaaggacagaatataagatttaaccatgtttgacgtattttaatttagttaatgaagcaaaattcagtttatatttcactagaactgtgtacttgattgattttcagagaaatatcacaaattagaaatattaaatctaaggatgaaaggtatat

SEQ ID NO: 310716 - DNA, 883 bp, Homo Sapiens
tttggttaggaaccagatccagttttagggtaggccctttccacgggggccttagtttcccctgaatcaaaaaccacctcccagggggttcggaaggaatagagggattggtttttctattggaaaagattcccttgtccgggaggtccagtttctcaagaggaatttgcggtaaatccttccaaaataaatttcgggagcgtccatcactattggggtccattccagaggaacaatatttcctggttctgagcaggttctactgtttgttgtgatgtaagttttcttttcaatgcatatagctgacatgtgagatagtaacattcttttctcagctgtaggatgatatcttgggcttctttcactttggatttttcattttccaaagctaaaactaacattttgttgttgtcttggtaatttttcagcagtgtagaagtgttggtgattatttggcatggtgcagctataaaagacctgcgtttgccaatctctgccaagtttttattccttttctctttcattcgcttctttatgtcttcaagactatcttgaaaggactttttcaggcatctttccttggccatcttttgccttaaaacctacttcttcctctttcagggactccaggaaggccggggggaggtggggctggcggaagtggacgcggcgaccctcctgccgcaggcgcgtccagaacgataccttggccactacttctgcaacagctatcttcctcctcctcacatttcaaggctcttcgaagctctccagccacggctagccccgcgcactgggccctccaggaccgtaccaccgtccgccgtcgcctggaactaccgccgccacattcgaaattttccgcctcgctcctccattgttc

SEQ ID NO: 310717 - DNA, 2115 bp, Homo Sapiens
ttttaaaaaatatgtatcaatttaatgcttttgtagtagtcctcccttatccatggttttgctttctgcagtctcagttaaccatggtcaaccatggtccaaaaacattaaatgaaaaattccagaaataaacaatctaaaagtcttaagcagcatgccattctgagtagtgggatggaatcttgcattgtcctgctctgtcccacccaggatgtgaattctccccttgcccaatgtctccacactgtctatgctcctcgcccatgagtcacttagtagccttctctataatcagtttgactgttatggtattgcagtgcttgcgttcaagtaactcattttacttaatgttgttattattgttaatctcttactgtgcctaatttataaattaaactttatcataggtatgtatgtgtaggaaaaaatatatataaggttcagcactgtccaccgtttcaggcatctgctgggggtctttgaatgtatccccctcagataagtggggactactgtatttatttgagaacaccctaaactagttaagaacaaaaggaacactctcccctgccatccattgctggtatcctgtgtgtgtttgatacctcagattcagcatctactacagcacgaagtgcttatgcgtgtcctgaattataggagagtcggattcaccaccctgcccagaaacagaagcattccagaggtttcttcatagatcatgaaatgaaatggccggtccactttgatgacaggaggcatggaataagcagtaatttctgacaagattcctgccactgcctcagtgcccctttcatcaacttcaatcactgttctttgtaaaaccctggatacttggagatttcttccagtagctgagagttcactaaggtcagcaaagggtgagaagattcttctgattcccatctgcctaagcagctcatgcatctcatacttctgatctagcttgaacttcggaaagaaaacttccatgtttctggttttcatgtttctgagccatgtctccaccaagtctgtggtcaggtagtcttcaagggcgaggtggtcacccattttctccatgaggaccaccagcatggtggcatttccttggtagggcagtttgaggacatgacaacgaaaattcttgtcaaaggtggaggcaaacttgcctgcaccgtacatcatgggcaccttaatggtcttgtacttgtccaggtggaaagtgtcgacttcggtgaagacagggtcaaatggggtcaaccatttccctttgaacaagatgtaatccacaagaattaatttggtttcaggattaatctcatcaaacagtttgggaattttcccccgagtctctttgttaatgtaatgattcatgagccttttggcctgtgaggcattgcgaaaattcataggcacgcactctgtatcaaaatacctcttggataaattgaagaaagtctctttgacatcaaaatccttgtggatgaaggcaaaactcccctgtgtgaggcccagttccaggttgcgggagagggtctctctgagtcccttaaagagggaaggcaggagcccgggcttggtgggcttcagggcctgcaagtggagccctctcttgatctgggtttcagtcggccctgtggcccccagcatcaagcctgtcatggccaaggacatgccaaatggagagaagaccatgttgccatcgtgcctcatggagatctttcgcagcaggctgaatccgaagtttgaagtctccttggcaagctgctgcctgctggccatcagccaggctttctcttcctcactggccttctcctcgctggcctcctgctcatcttcctcttcctccttgggagcctgcactaccctgctggtctggttctgaggggctggggtctctggcgactgaggactgggggccaagccgggtaccagccacacctgtgccaggaggacggagagcaggagacttggcaccaccttcatgtgatcggctgcggaggccaaggagtgcctcccttcagctgcaagacttccagtgtgtggccttgggtcctggaaaagtccttcatttagagcagaaaccaaagcttcagctttgcagcccccccg

SEQ ID NO: 310718 - DNA, 643 bp, Homo Sapiens
gagggctgtgtggctgagcagtgcaaagacctccatcctacactccacagggactgtacatacagattgggagctggagtggggtaagaggcgaattatagacacaaggggctcctctgcaggaaggaggccaagggaaagaggcttgaaaggcttgatatttcacccaccaccactcactgccggagtaagcaggtctccccttcccagggctgaggggaggcagggatgtgtgctgtcccagggctgagaagtggcaggtgagctggtgattccttactgcccaggttctgtctaggaaggtgcgtcctcaccatgctggatggtgtcctagtccaggagcaccccctgagctcctggcctagactccaaagggttgggtagatgagcaaagactttacaaagaccttaggcgatatatgtccaggagcacccaggaattactgggctaccactgcagactgcaggacaagctccaagaacaggaaggaagtcttgcagctgaagggaggcactccttggcctccgcagccgatcacatgaaggtggtgccaagtctcctgctctccgtcctcctggcacaggtgtggctggtacccggcttggcccccagtcctcagtcgccagagaacccagcccctca

SEQ ID NO: 310719 - DNA, 1821 bp, Homo Sapiens
gatgacattattagttctgccactggtaggcattagaagcaagaaaagggagacggaccgaggaagccactttggtgaaacaaaaagaaaagcatttgtttatttagaacgggcaaaatgatacgtttcagtgggtgttttctttgtactttgatctttttgtactgatatttaagcttctgttttatgatctctttctaatgatagaaccagagcttgtagaaaccactttaatcatatccaggagtttgcaagaaacaggtgcttaacactaattcacctcctgaacaagaaaaatgggctgtgaccggaactgtgggctcatcgctggggctgtcattggtgctgtcctggctgtgtttggaggtattctaatgccagttggagacctgcttatccagaagacaattaaaaagcaagttgtcctcgaagaaggtacaattgcttttaaaaattgggttaaaacaggcacagaagtttacagacagttttggatctttgatgtgcaaaatccacaggaagtgatgatgaacagcagcaacattcaagttaagcaaagaggtccttatacgtacagagttcgttttctagccaaggaaaatgtaacccaggacgctgaggacaacacagtctctttcctgcagcccaatggtgccatcttcgaaccttcactatcagttggaacagaggctgacaacttcacagttctcaatctggctgtggcagctgcatcccatatctatcaaaatcaatttgttcaaatgatcctcaattcacttattaacaagtcaaaatcttctatgttccaagtcagaactttgagagaactgttatggggctatagggatccatttttgagtttggttccgtaccctgttactaccacagttggtctgttttatccttacaacaatactgcagatggagtttataaagttttcaatggaaaagataacataagtaaagttgccataatcgacacatataaaggtaaaaggaatctgtcctattgggaaagtcactgcgacatgattaatggtacagatgcagcctcatttccaccttttgttgagaaaagccaggtattgcagttcttttcttctgatatttgcaggtcaatctatgctgtatttgaatccgacgttaatctgaaaggaatccctgtgtatagatttgttcttccatccaaggcctttgcctctccagttgaaaacccagacaactattgtttctgcacagaaaaaattatctcaaaaaattgtacatcatatggtgtgctagacatcagcaaatgcaaagaagggagacctgtgtacatttcacttcctcattttctgtatgcaagtcctgatgtttcagaacctattgatggattaaacccaaatgaagaagaacataggacatacttggatattgaacctataactggattcactttacaatttgcaaaacggctgcaggtcaacctattggtcaagccatcagaaaaaattcaagtattaaagaatctgaagaggaactatattgtgcctattctttggcttaatgagactgggaccattggtgatgagaaggcaaacatgttcagaagtcaagtaactggaaaaataaacctccttggcctgatagaaatgatcttactcagtgttggtgtggtgatgtttgttgcttttatgatttcatattgtgcatgcagatcgaaaacaataaaataaacctggctcaagcacaaaccaatttgtgttgttctgattcaataattggtttctgggtggccaattcagaagaagagtgtacatgctcaacaaaatcctaggggcc

SEQ ID NO: 310720 - DNA, 1337 bp, Homo Sapiens
  misc_feature (985)..(1000): n is a, c, g, or t
caggtctcccttctttgcatttgctgatgtctagcacaccatatgatgtacaattttttgagataattttttctgtgcagaaacaatagttgtctgggttttcaactggagaggcaaaggccttggatggaagaacaaatctatacacagggattcctttcagattaacgtcggattcaaatacagcatagattgacctaaatacagagaaaaaagagctgcattccaggaacctgaacttacattctggagattcattttttcttattcttgttttaacttagaaacatcatatactcttttaaattcttgtttcattcttagaaagaaagtgattgggaaattttaacacatactaaaactcaatagccaagcatgaactattcttgtttgtgaagtaccatgtttatttatactcaagttacttctcacaggcaatttatccaatagagtaaatatttataggacttccttcaaatactttatttgtgatcagtttaaatgaaatagtttctttcacggcttaattaatcctggaaagaaagaccactcactggagtgtatgcatatacatgctggatatatacctgggtacatttccatcgtttaccaagtgtctatcatagggttcaatacacatttttttcttatccccagatacacgtatatgaagaaatactgctgtcttaaattgtacagataagaaaaaaattcagagatgttaaatgcctacccacaagcatacagtctttagggacagagcttgggctcaagggtagtgggtaaaggctccagtgcttgtgtgttatctactggggccccacaaatctgaggcagagcacattaacacagttctgttacatttgcatcatcttctctgtatgtctttagaaagattgggcacgcccttctggacttgatcgttaatagactactagtttagtttttaaaaggcaaaatggttcttgcttagatagaaatggcnnnnnnnnnnnnnnnntttgtactatcaaaaattggaagatgcagaagaacattttgcaaagagttagttaataaacatgatgaatttcctatgctgtgtttaagtttcttggtctgcattttgtcacctggggtctgactcagacatacttatacttcagtatctgtcttacctgcaaatatcagaagaaaagaactgcaatacctggcttttctcaacaaaaggtggaaatgaggctgcatctgtttaaaaatcgagtggcaaatgattagatgtaatgtgtgttctagaaaaaaacctagaaatctctcctccagtgtagtccatagtaatgtaatgcaaactgcctaag

SEQ ID NO: 310721 - DNA, 411 bp, Homo Sapiens
gtgcaaggtagagcattttcataacatctcaataatccttttgaaatgtgcagttgcttagtgcaaaaaaagaaatagtgccaccatttcttcaactaaaagataaggtgtgctttgtaaaagtaaagcatatccaattttcatcctgttggtcggtattaccaagggtcatgatgctagctggcgcacaaatgtgaagaatcatttactacttattttattgttttcgatctgcatgcacaatatgaaatcataaaagcaacaaacatcaccacaccaacactgagtaagatcatttctatcaggccaaggaggtttatttttccagttacttgacttctgaacatgtttgccttctcatcaccaatggtcccagtctcattaagccaaagaataggcacaatatagttc

SEQ ID NO: 310722 - DNA, 1108 bp, Homo Sapiens
  misc_feature (970)..(970): n is a, c, g, or t
  misc_feature (1055)..(1055): n is a, c, g, or t
  misc_feature (1057)..(1057): n is a, c, g, or t
  misc_feature (1078)..(1078): n is a, c, g, or t
atgtgagataaagaatctttctttagcatggtactggcacacagtaaacaactaaataagttattataacacacatactgcttttatttacattgccttgaggtgggctgaagaaaaatagggagaaagtaaaaaattctcccccacaggcaacaccaatgctacctgtgataactaaaaaaaggttttcctttaggaaaggtcaggcattcattcatctttaagagtgcatggacactaatatctaaagcatagaggcctaaactcttgtacaccactctgagtacttggttctactatgttgaacactattttcccctatttcctgatactattatattcaaatttttgttcaggacttttctggatttggaaaatgcacggccagcatgtctacatgcagcaatcctggtcttatgaaaccatttcctagtcaattatttttaagtatcagataatatataactagctatataattgagccatgcaccagtcaattttggacaactttggcacaagtgctttatttgtgctattgttacaatggtcacaagtacatcttttatctcatttctcccagaattaaagatatactttagtgatctgcgtgataatatttataggtttatttacctatatttaaaaatgatcagtggctagacatgtctagaaatatatatggcctaatatgtaacttctctttgataaagtgaaaacaagtaatatataagctaatattattgaagcaatattttttggtacatacttacttattttattgttttcgatctgcatgcacaatatgaaatcataaaagcaacaaacatcaccacaccaacactgagtaagatcatttctatcaggccaaggaggtttatttttccagttacttgacttctgaacatgtttgccttctcatcaccaatggtcccagtctcattaaggcaaagaataggcccatatagttccncttcagattccttaatactggaatttttccggatgggctgaccaataggttgacctgcagccggtttgccaattgtaaagtgaancnagtatagggtcaatatccagnatgtcccaggtcccctcattggggttaacc

SEQ ID NO: 310723 - DNA, 1096 bp, Homo Sapiens
  misc_feature (92)..(117): n is a, c, g, or t
taaatattaccttcaatacctgtcagtagcctactgacaaattatgactaaacaaaggtatttgtgtgactctgtaatagatcctccgctgnnnnnnnnnnnnnnnnnnnnnnnnnncttgtcctaatgggaaagcatgcttaataaaaggaaatgcagaagttataaacatgttttgtaagtaagtattcagaattaaaattatgtgatacatttttatgattgcttaatgatccttggatgtcagattccttgggtctatttatagctaaattataatgaaaaattcaaggcttgctggagcaactttgtcaacaaatatattagttttgcttatatatttgatttttatgtggaaaaattactacccttttttacaagcagagaataaactgttgattacttgatttactagatttagaagaatcacaaaagatatgtagattttcttaagcaaaattcagctcttaatatcataaaaattatatctttgggcagatttgtaaacaataggaacaagtaagaagacaggtatgtaagaagtagcaaagtgtaagacggtggagctttaatgtgtggttttactcagggggtcacaagaaaataacccaatggtccttttgaaagtagtacatacacctttaaatggaacttggtctgaagggtgtggaaatgctggtccagggcagatgcacttcagctaccgttccttgcctggtgtgtgcttgtcttgagggttgagaagcacccttcttatgtgcctttctggaatgggaatgtgttttgccctattggtgaagtccgttagagaacttctctctgcagctagagaaactgaactgattaataaaaagtatgatatctaagatatactgccactctacaggtagtaaatgattcttcacatttgtgcgccagctacatcatgacccttggtaataccgaccaacaggatgaaaattggatatgctttacttttacaaagcacaccttatcttttagttgaagaaatggtggcactatttctttttttgcactaagcaactgcacatttcaaaaggattattgagatgttatgaaactctctaccttgcac

SEQ ID NO: 310724 - DNA, 978 bp, Homo Sapiens
  misc_feature (819)..(842): n is a, c, g, or t
ctagacttttaatttcaagtataaatttctaattttcatagaaaagccttttttaaacattcctatattaggccaaaaataaaatcctagaataaaattatcaccatattatcttataaaatcactcatcccaatcataagacccagccagtatttttactacatttcctctcctcatctgtttgtattggtttggtttggtttatgagtggagacagctaatagatttagtatttactcataggcctgacagtctaggggaaaaaaaattatcacttgggtatcttatgaagaaacagctatttttccaagaaccaatattgtgtactcacctcagacataaaaagttatttacctaagtctcttctatctaacagcatagagttacccaaacaaggccaataaagaccctttcaatatccttttcttaaatttggctctaaaatgactgttaataatggtaataaatgtctttttattaaacagacaattttatcttatgcaatttagggaaataaacataaaatctacctttaaatgaagaaaataataatttcccactctaactatggctgattcattccctgagcatgaatcccattttaccctcattgtttttaactataaactgagctgaaatctgctcacaggtgaaactagtattttagatggagaatgatattaccaagtaatcatatttattactttttgtagtaattatttctactcactgtggcatttaatgtttcatctgtaactctctatcacaatgccctctatagaagcagcaatagtgaaaacataactacactttggggnnnnnnnnnnnnnnnnnnnnnnnncagataacttttaagtggatctttatccaaatacaataaaaaagcaaaaaagagaagtgtccgtaaacattttcattttatgtcaatgccatttccaaatttaccttccactactaccatgaacagcagaagtggt

SEQ ID NO: 310725 - DNA, 1070 bp, Homo Sapiens
  misc_feature (366)..(366): n is a, c, g, or t
cacggatcggtcaaatatgcgggggggagtaataaacgtggcaccctgttagcagcacgcgcgctttctcacatgtgggggaccacaagagatcgccgctataagttggagttttggcgcgacccagtagactcactgggagttaaagagtggacacaggcggtcgcgggggcaacgtatacatactgcgatatggggcgaagaagtcctcgggtgttttggagaagagcgcgccgaacatttaggcgcggaagcaggtcaccgcgggaaagatattaaggctcgtgtccaaggataagcttgttcccgcattcactgggaagagttttgtgtgttttgctgaggagtcgcgtggattaataaggntttttgagccatcattgccggcggggagcggcatcttctgcgtagaaaaaagaccaggggggcagaaggagagattcgccccaaggcgctccctgtattagggttcgagctgaaactcccaaaaacggattctctgcccgtaaaggggagacacaagcgctttaaggggagccgacgggggtgcaaccattaaaccatgaaagggggggacgcaacgggcgcccgagaacgggaaggggttcttagagacggacttggctccaagggcccgaaggcgggccccgaccaagcaaaaaatgcgcgtcggaccgggatagtggtttcactttcaggcgtttcctgaatctttttggtgcgggatgtctttatcatatttcattttcattacttttagggctcggtgaaaaaactgcttctttaaaagcctgttgcagtagtcaaccacagactccctggttgtaaataaagcttcctctcctttcttggcctttgcccactttgaatccaaaagacagtccactgcttttgaagcaataaaataatcaacccggtgacccatcatattggtggactttgttggacagttgaatcgaagatacttggccacagccttctcttctttagatggttcaccaacttcctggatccgcttcttgtgtctcctgcgttccgccatgttggccgctccgcccggttcccccccc

SEQ ID NO: 310726 - DNA, 610 bp, Homo Sapiens
ggcacgagaaattattattcagcgcatgaatttttcaagtatatgattatactaaattaatattcatacgttgcaggaagttggtgaaccatctaaagaagagaaggctgtggccaagtatcttcgattcaactgtccaacaaagtccaccaatatgatgggtcaccgggttgattattttattggtaggattatatcagtaaaatcgtattagtgtacatatgttatgaagttaacctacatttggggatatgtaggaagttttaaaagtgctttccaaatgtgattgttctgggtgatgggacatatgggcagttgattattctgttcttttcttttatgattgaaaatgtctataataaaaagataacatgttttctaataacaattgttggaaatttttttaaataggatttattttcagtgttttaaaatactaccttttgttcagatagtatgcgtacttggaactaagagcactggctttttttccccccaaacaatgtcattataagctgatgtcatttataacacccagagcttataagtaggggttgagtttgcctttctcatcaattaaaagtgaattgcagctgggtgtcgtggctca

SEQ ID NO: 310727 - DNA, 360 bp, Homo Sapiens
  misc_feature (27)..(27): n is a, c, g, or t
  misc_feature (48)..(48): n is a, c, g, or t
aagcaggagcgaagggaaagagggganagaagcaccgctaagggaccngttggcccgccaggcggccgacctccccattcccagggggccagccggcggattacataacgggcctcggggccgttctcgcgaggtttccaccgccccctcctcgctccacgtcagagggaaccgggcggagcggccaacatggcggaacgcaggagacacaagaagcggatccagaggctgtggagtaatgtgacagtggcagagagctaaaacttgagccaaactgcctgtttgtaccccacctcccccaattattggctgagtaactttgagcaagttaatttttacctccctgtctgcattcggtaa

SEQ ID NO: 310728 - DNA, 2172 bp, Homo Sapiens
  misc_feature (56)..(56): n is a, c, g, or t
  misc_feature (66)..(67): n is a, c, g, or t
aaaattacaaagacagcaaaattttcccggcacaagtaacacttgtttaaaaaaanggggtggggnnggggacgcgcaagtgcgcgattttttctattttattaaaaataagagaaagacaactgtacaggttttttctcccagctcccgggtgtgaaactaagtactagccctagatatgtatatatacacaaacacacacatgcacacagatctagctctgtaaaactacttagcaaatcccaaatcgactgcagtaagtcttactatccactgcccgcccactccccctccccctcccgcagctacaactacttataataaaggactcaaaaagagatcgggaggttttaagtggccgcagccccaccaaaccaagcaaagacacctcttgtacaggaggaacaaaaatccagaggaaaagaaaagtcttcctaggacacaatccatcgattgcgtggaaaaacctaagtttcaacagggcacactgaggcacttggctgactccccacccttcccctgaagttttcactccggtttaacaagagaatttgctgaagccacaaagatcccccaatggctacatcctagctgactgggagaaactatggcttctcccatccagctgtcacttggaccccactccccttccctaagaaaatagggaggccgaaagggcaaactaacaaaaatgagaaggaaactgggtttgggcccccactgctcaccactgggaggtggaagtcagcccggtggcggtttttttccacctccttcctttgccggctggctgctccctaccacctctctcctgctggccaaaggttctgaaactctcacaacgggtgcccaactcaaggaaaactcactcaccctaaagatattcctgctaacctcacaattcctgggttccctctcatctagccagaacaaactgccttgtgtcttctccccacccacatctaccttcatggcaaacaagccaacaaaacacacaagccccccccgcaagtccctaaccccgtaagtaggttaatagcaaaacaaaatataagtacattctcatcattagattggttgttgctgtccttgcacaactggttaaggaaaaatgaattattctgtaatttctgaagaatccaaatcctgtctcttataaagtcagaacagaagggggcaaaaggtggtggtgagcatcaagagagaaaaaaggagaaaattatttacagaaaataggagacaggagggagtgtccgcaagaaaagacttcattgtcacttcttcttgccggccctcttggcactggactttgctttgggtttcactggtttggcctttttgggcttggatgccttgaccggcttggctttgacagtcttgggttttttggctttcttgggcgtggcagccagcttcttcttggccttcttgaccggggtggctttgggtttcttggttggggctttggaggcagccttcttgggcttggatgccttctttggcgtggctaccttcttgatttccttcttggtcttcttgaaggccactgacttcttgggttcgtcgctcttggctagccggaaggaccccgaggcccccacccctttggtctgcttgaggacaccggtggtgaccaggcgcttgatggacaacttgatctgcgagtcagcgttctcacccaccttgtagtggctcttgatatacttctgaatggactggcgcgaggagccagcgcggttcttctcggcctggatggcagccacgatcatgtctgaatacttggggtggtctgtggacttcttggaggccttggcccgcttgggcttggccgcaggggcggacgtggaattctcggtcatggtggcctgtctggtccggctgttgaaggcgccttccaaagggccagccctcgtcggaggctgagcaaagcctgcctcgggatctgctcctgagcccctgactaccgggccagtctggagtgcggctcccggggatgcgagcgaggagtcgctgcttttcctccccggctcgggtgtcgggagagctcgccgagccggctttgcgaggcccagccccgccggtctgtcgcttggtctcggcaccgggctctgcctctgcctctgcctccgcctcctctgcctcccttttcccagctccgcgtctccccggccg

SEQ ID NO: 310729 - DNA, 1115 bp, Homo Sapiens
  misc_feature (707)..(707): n is a, c, g, or t
  misc_feature (781)..(781): n is a, c, g, or t
  misc_feature (935)..(935): n is a, c, g, or t
  misc_feature (959)..(959): n is a, c, g, or t
  misc_feature (969)..(969): n is a, c, g, or t
  misc_feature (981)..(981): n is a, c, g, or t
  misc_feature (989)..(989): n is a, c, g, or t
  misc_feature (998)..(998): n is a, c, g, or t
  misc_feature (1010)..(1010): n is a, c, g, or t
  misc_feature (1015)..(1015): n is a, c, g, or t
  misc_feature (1022)..(1022): n is a, c, g, or t
  misc_feature (1042)..(1042): n is a, c, g, or t
  misc_feature (1045)..(1045): n is a, c, g, or t
  misc_feature (1051)..(1051): n is a, c, g, or t
  misc_feature (1064)..(1064): n is a, c, g, or t
  misc_feature (1068)..(1068): n is a, c, g, or t
  misc_feature (1073)..(1073): n is a, c, g, or t
  misc_feature (1080)..(1080): n is a, c, g, or t
  misc_feature (1092)..(1092): n is a, c, g, or t
  misc_feature (1104)..(1105): n is a, c, g, or t
  misc_feature (1107)..(1107): n is a, c, g, or t
aattttcccttttccaatttattttaaagttttaaaattacaaagacagcaaaattttcccggcacaagtaacacttgtttaaaaaagggggtcccggggggacgcgcaagtgcgcaatttttctattttattaaaaataagagaaagacaactgtacaggttttttctcccagctcccgggtgtgaaactaagtactagccctagatatgtatatatacacaaacacacacatgcacacagatctagctctgtaaaactacttagcaaatcccaaatcgactgcagtaagtcttactatccactgcccgcccactccccctccccctcccggcagctacaacttactttataataaaggactcaaaaagagatcgggaggttttaagtggccgcagccccaccaaaccaagcaaagacacctcttgtacaggaggaacaaaaatccagaggaaaagaaaagtcttcctaggacacaatccatcgattgcgtggaaaaaacctaagtatcaacagggcacactgaggcacttggctgactccccacccttcccctgaagttttcactccggtttaacaagagaatttgctgaagccacaaagatcccccaatggctacatcctagctgactgggagaaactatggcttctcccatccagctgtcacttggaccccactccccttccctaagaaaatagggaggccgnaagggcaaactaacaaaaatgagaaggaactgggtttgggccccactgctcaccactgggaggtggaagtcagnccggtggcgggtttttttccacctccttcctttgccggctggctgctccctaccacctctctcctgctggccaaaggttctgaaactctcacaacgggtgcccactcaaggaaactcactcaccctaaagatattcctgctacctcacaattcntgggttcctctcatctagcagaanaactgctttntgtcttctcccnaccacatntacttcatnggaaaaagcganaaaanagatagncccccagcaatcctaacccngtnagtggntgatagcaaaganatanaatcnatctctngatagattggtngtggtgtcttgnnantggttaag

SEQ ID NO: 310730 - DNA, 397 bp, Homo Sapiens
  misc_feature (271)..(271): n is a, c, g, or t
tcattaacaactttcttttattaaaaatgtacataagtaaaaggaacatggtttaattgtgcgaagagtaagaaatacagatgagcaaataacacgtattaaagccacctacgatataccacccagaagtaaccaggctgttgaatttttagagactggggtgcaaacacattttttcactcccttgtgcatatatctgggagctctgccatatacagacacagacgcggtgtccacaggcgatgcctctgctgggaatgctgcaagacantgagtctatcctttcctggtactggctcgggggcctcctcagcgcccaggtcactctagcatccaggagtccaaaggcccggctgtgcaggctgcagaggtgatctagagtagattaggaggtgca

SEQ ID NO: 310731 - DNA, 365 bp, Homo Sapiens
  misc_feature (98)..(98): n is a, c, g, or t
ggggggacaaattttaaacccggagagacaaaaatccaccaaagtggaattggaggcagaaacacctaaagtgccttcctgcatcctatttagggagncctatttcctacccaataaacttgacaacgcatttgggaaaactagtgaacaccttacagctttcattttgctttaatgtttcaattcaagccggtgtaaaaataatttccaaggcatttctgtttattctttagtaatctcactactggctatgtcagcaatatctttttcaatctggttccttttgtatatgatgtcactgtgacctctttgaaatatagtgatggcttttacctactttgaaaagaattttcacatagagtcag

SEQ ID NO: 310732 - DNA, 353 bp, Homo Sapiens
ggaagcacggaatgtgtctcctgctgggggccacgggcgtcgggaagacgctgctggtgaaacggctgcaggaggtgagctcccgggatgggaaaggcgacctgggggagccgcccccgacacggcccacggtaggtttccgcccccgcgggtggagttgcgggggggtcagttctgcgcttggcgaagagctccgggctcctctaagtgcacgccgaggcgcagcgggtcaagtcgtgacttaaggccagccttcgggagcgggggacggcccgagctgaagataattggcgcgggatgaaggggcctgccgccctccacgggcacttcctctcccctcccaacggcttcct

SEQ ID NO: 310733 - DNA, 621 bp, Homo Sapiens
  misc_feature (260)..(310): n is a, c, g, or t
gccaggccagcacccgtgataagacagtgctttcgcgggcgttgatatccgccgtggtgatgttctgcttggcacaagcaatgatgtctggaagcctgattaatgacttcatctcctccgtgcacatgtaacagggtaggtcgattatattgaagagtatcagccccgatgcttctgcaagttgttctgcagaaaggagacataagatctgcacacagtatacagagatctgggtggggtcagaggcgtccatcacaaannnnnnnnnnnnnnnnnnnnnnnnnnnnnnnnnnnnnnnnnnnnnnnnnnncaaatgaagccgacgtggtgtcactcgtctctgtcctcatgtggccctcagttctccattctggtatccgcggcacaggccagagagagagcgccagtttcacatagtacctggcccagatggggcccatgcaccccccaagctcccggatggtgctctttctctgtgccacgatgtcagtaagattggtgcccaccgtggcccgtgtcgggggcggctcccacaggtcgcctttcccatcccgggagctcacctcctgcagccgtttcaacaacagtgtcttcccgacgcccgtggcccacagctcgtgc

SEQ ID NO: 310734 - DNA, 737 bp, Homo Sapiens
cctggggacacttttttcagaggccaagatgtcaacttccatctccacatgccttcagtttacacattcattgcatctcagcacagagccccatcatgtagggttactttgggttattctgcccctgtgagaagaaactattggcagcaaagccatactgccctctgccacctctccccagctcaggccagctgcgcctctgccgtgcagtcaatcgttggctctgtgggtggcctggagccaggccagcacccctgctaagccagtgccttcacgggcgctgatttctgccgtggtgatgttctgcttggcacaagcaatgatgtctggaagcctgattaatgacttcatctcctccgtggacatgtaacagggtaggtcgattttattgaagagtatcagcaccgatgcttctgcaagttgttctgcagaaaggagacctaagagctgcacacaggatgcagagagctgggtggggtcagaggcgtccatcacaaacaggagagaacggcagtttccatagtaactggaccagatggggcccatgcaccccccaagctcccggatggtgatctttctctgtgccacgatgtcagtaagattggtgcccaccgtgggccgtgtcgggggcggctcccccaggtcgcctttcccatcccgggagctcacctcctgcagccgtttcaccagcagcgtcttcccgacgcccgtggcccccagcaggagacacattccgt

SEQ ID NO: 310735 - DNA, 338 bp, Homo Sapiens
  misc_feature (328)..(328): n is a, c, g, or t
  misc_feature (332)..(332): n is a, c, g, or t
  misc_feature (334)..(334): n is a, c, g, or t
  misc_feature (338)..(338): n is a, c, g, or t
ggggagggaagtgttggtgggctgactggcagtttgagtgctagtggaagccacatggatcgaataggagccatccgagacaacctgagtgaaacggccagcaccatggcactagctggagccagtataacggggagtctgtcaggaagtgccatggtaaactgttttaacaggtgtgtgttttggtttggtttggttctgctttctggtaactacaaattattaattaggtgagaattttgaacataaagcatgatgattatatataaccctactatgtcaaggttcaaaatagtaatgttaaaaattaaatttggggcccaggtgncagntntcan

SEQ ID NO: 310736 - DNA, 767 bp, Homo Sapiens
ggccgcaagattcacaatcgctatgaaggcaaggatgtttcaaagcacaaacggaatttggccatagcaggtggtgtaacgttgtctgtaatcgtgtctccagtagtagctgcagtgactgtaggtatcggtgttcctattatgttagcttatgtctatggcgtagttccaatttctctttgtcgaagcggaggttgtggagtctcagcaggcaatggaaaaggagttaggattgaatttgatgatgaaaatgatataaatgttggtggaactaacacagctgtagacacaacatcagtagcagaagcaagacacaacccaagcataggggagggaagtgttggtgggctgactggcagtttgagtgcaagtggaagccacatggatcgaataggagccatccgagacaacctgagtgaaacggccagcaccatggcactagctggagccagtataacggggagtctgtcaggaagtgccatggtaaactgttttaacaggttggaagtacaagcagatgtacagaaagaacggtacagtctaagtggagaatctggcacagtcagcttgggaacagttagtgataatgccagcaccaaagcaatggcaggatccattctgaattcctacatcccattggacaaagaaggcaacagtatggaggtgcaagtagatattgagtcaaagccatccaaattcaggcacaacagtggaagcagtagtgtggatgatggcgtgccacccgaagtcatgctggcggtcatcca

SEQ ID NO: 310737 - DNA, 1970 bp, Homo Sapiens
  misc_feature (225)..(233): n is a, c, g, or t
  misc_feature (303)..(333): n is a, c, g, or t
tggagcgattcggcgcgcctctgtcgtgcgcgacccggccccgagcgacagtgaaagaattcgcccccgggggaaggtggtaagtaagacgagaagagttatgtgaagatgggcggcaaagttgaaaggctcataaatgcgtcgttatagtacaacacggggtggagcgcggagaattactggcgccggttgtgtgcgcttaggccccgctcgagggccccagannnnnnnnnaggtggggagacacatcatacaaagggttgtatataagctccgcccccagtgtctgctgggcctcttgannnnnnnnnnnnnnnnnnnnnnnnnnnnnnnggccatattcgcacaggagggtgtgtatagaaaaggaacgtttgacagctctagttaagtattccccccccgggagaaggagtttgccgtctatatggggagaggagaagaggggcccactctctgtggtaggtcagccggccagtggttgtagggggccaccaggtgggtaggctacctggcggggctgggaagtttcaaggccaggattggaaatagggctttgtggagggagccgggtggggcaatgaaccaggtgagggacatggctggggaagggctcaaggaggttggcacaagacattgccaagggtccgctccagggcctggagcaggcttggctggatggcaagctctcggtctaacaaggttcttccactttagagttgggccctgtgagagccaccccctccgccaccgaccttcaagccctgagcggagggagaggctgcaggaccagcctcattccccactcacgggtgtaactcctttccccactcagtccccaggtctggagggcacccaccctcttcctaacacttcagcagaccaaggccagggtgcctttgtgggctgggggaataaggcaacgggacatccacttggaaggcctgtgctgtggagggtgctgagggggacccagtacccctggcagaaaagtgacagccctggtctcagagaggaggactgccatgggaaaatgtctctgggacaccccatcagggtggagacatccctaaccctcaggcatcgcccacagagatagggaggccaccgaggggtctccacagagatggactggcacttagggaccatcacagacctatcaccgcagtgatttccatagagacagaacctggtcatcagggagaacccacctcttgctcccccaggaggatggtgaggggcaccacggtggggggacccagaggcggcagtccgtcctctcaggtgcagatgcacggcggcctttagctgacgcggtacgtggacgtgttcttgggctccgtgctgggcacacaccagtcgccggcctcctggatggtctggtagtggcgccaggctgacttgttgtagacaggcaggcgctccaccgagtccgtggacagggccttgagatagatgacagcatcggtcccaaagccttccatggagaagagctgcaggtctccctggaagtacttggcgtagaggcgggaaatggggagcccataaccaaagccagccagcggcgttcccccggtgccaggctggggggtgggtgctgtggagtacatgtagctgaagagtcgctcaatcttcctcaagggaacacccccacctcggtcactcatcttgatggacagatcttcctcacccaaggccaccatgaccttgatgggtgggagaatgaggctggactcatggctttccacagtcgccctcatggcattcttgaagagctcaaagagcatgtggtagaggtgggaggggacgtagaccatgtgaatcggctgtttggagttggctgcattgatctcctggatctccaggtcaggtgaggccatgtaatacttgtcacacaggagcttagccatgtcgtaggcatctttgaccacctcagagacgttgcagttggggtcgatgctgccgatgtg

SEQ ID NO: 310738 - DNA, 1703 bp, Homo Sapiens
  misc_feature (28)..(28): n is a, c, g, or t
  misc_feature (102)..(102): n is a, c, g, or t
  misc_feature (119)..(119): n is a, c, g, or t
  misc_feature (211)..(211): n is a, c, g, or t
  misc_feature (351)..(351): n is a, c, g, or t
  misc_feature (376)..(376): n is a, c, g, or t
  misc_feature (383)..(384): n is a, c, g, or t
  misc_feature (388)..(389): n is a, c, g, or t
  misc_feature (397)..(397): n is a, c, g, or t
  misc_feature (399)..(401): n is a, c, g, or t
  misc_feature (406)..(406): n is a, c, g, or t
  misc_feature (409)..(409): n is a, c, g, or t
  misc_feature (425)..(425): n is a, c, g, or t
  misc_feature (430)..(430): n is a, c, g, or t
  misc_feature (474)..(474): n is a, c, g, or t
  misc_feature (482)..(482): n is a, c, g, or t
  misc_feature (484)..(485): n is a, c, g, or t
  misc_feature (488)..(488): n is a, c, g, or t
  misc_feature (493)..(497): n is a, c, g, or t
  misc_feature (502)..(504): n is a, c, g, or t
  misc_feature (506)..(506): n is a, c, g, or t
  misc_feature (508)..(510): n is a, c, g, or t
  misc_feature (515)..(515): n is a, c, g, or t
  misc_feature (517)..(517): n is a, c, g, or t
  misc_feature (526)..(526): n is a, c, g, or t
  misc_feature (537)..(537): n is a, c, g, or t
  misc_feature (542)..(542): n is a, c, g, or t
  misc_feature (544)..(544): n is a, c, g, or t
  misc_feature (620)..(620): n is a, c, g, or t
  misc_feature (622)..(622): n is a, c, g, or t
gttgtttaatcaaaacaacacccccgcncacacagtcccagggtttgtctcaaacgacatcaacagtcctttggcaatgttaagagtgtgttcatgactgcnatgcataattagcatantttataagacttctaatagtgttgaaacagggaaataactataaacttgttagagaagttcgtttgaaagacactgtcaaatgtcacactangtctttttaaaaactcatatgttagtaagtagaaaatataaatgaacaaatttaatttttccagataataaaggaagttattcggcatttttcccagttacgctaagacaattatcacgtgaaaaatttatagtttgtcngctgtcagagagttttttgccaggntatcctnnggtnntttcagtntnnnttatnggnccacatttattaatantatgngttatgagaacaatcatttgcggtctcactgtgaaggcaaaacncgacacgngnnccnccccnnnnngggtnnncngnnntggcncngtccaccgnataccctgccnggggngnataactgtataacccaactacgtcctctttcccctctctttaacttttatgcaccacctgccattctagatactancnatcacactaaataataataaaaaccaaccaccttcaatctgatcattctgggcaggaaactgaatacagttttgaccagatcttcgagaaagattcatatacacgaaattaactagttctgttaaaaggctgctataaaaataccatcattacgagctatacagaactttagaatccagctaagagtgcagaaatactgaatttcttaatttatgtggagggggctgtaaacccaaaggtagaagggcatttcagcattctggcgtgttcagagtttctagggtatagtatctctctaacacacagagagcatttcaaagggtggctatggccaggaaacctcagagcgggttctgccgtcacacttgatcccgaaggcgggccagtctctgagacagttcatcctgtccgccgaagccacgctcgtgcccacggagccggtctggccctgcggcagctccatgttgaggtcgaggcccgcctcatctgccatttcctggagcagcatatccacttggttctggggagtggtgagcgtcgtcgtgctgctcatcgtgtcttccatttgctgcgtctggacgtccagagtctcaaactggtgctcgaatttgtccatcaaagcagaaatcttctccagattcatggtcttcaatgtcgcatccatcgacttaaccacaccagccatcgacttggtcaccttgcccatcgtcaccgccgtctggaccctggcagccactgcatcgactcgcgcactcattctcaagaaattcaccgcctggttcttctggcggatggcattttcggcgtgtatcctcgcaacttccatgttgcccttctgaatggcctttttaattttggccttttcggccttttcctccttatcgcattttttggcactcctactcagttctttggccgcgaacttcaggttgaacaggtgtttctccatgttagacatagtcggacggctcctttgggtcggcggcccggctgagaagcgcgccgaaggcagagaaggtaaggtaagtccgctcccggccgccgctcctttgttttggtcccacttcctgtttctactgtc

SEQ ID NO: 310739 - DNA, 1448 bp, Homo Sapiens
  misc_feature (170)..(170): n is a, c, g, or t
  misc_feature (182)..(182): n is a, c, g, or t
  misc_feature (191)..(191): n is a, c, g, or t
  misc_feature (194)..(194): n is a, c, g, or t
  misc_feature (198)..(198): n is a, c, g, or t
  misc_feature (202)..(202): n is a, c, g, or t
  misc_feature (204)..(204): n is a, c, g, or t
  misc_feature (206)..(206): n is a, c, g, or t
  misc_feature (208)..(208): n is a, c, g, or t
  misc_feature (241)..(241): n is a, c, g, or t
  misc_feature (288)..(556): n is a, c, g, or t
  misc_feature (574)..(574): n is a, c, g, or t
  misc_feature (591)..(591): n is a, c, g, or t
  misc_feature (593)..(593): n is a, c, g, or t
  misc_feature (598)..(598): n is a, c, g, or t
  misc_feature (601)..(601): n is a, c, g, or t
  misc_feature (621)..(621): n is a, c, g, or t
  misc_feature (631)..(631): n is a, c, g, or t
  misc_feature (635)..(635): n is a, c, g, or t
  misc_feature (645)..(645): n is a, c, g, or t
  misc_feature (669)..(669): n is a, c, g, or t
  misc_feature (675)..(675): n is a, c, g, or t
  misc_feature (678)..(678): n is a, c, g, or t
  misc_feature (703)..(703): n is a, c, g, or t
  misc_feature (713)..(714): n is a, c, g, or t
  misc_feature (719)..(719): n is a, c, g, or t
  misc_feature (738)..(738): n is a, c, g, or t
  misc_feature (755)..(755): n is a, c, g, or t
  misc_feature (768)..(769): n is a, c, g, or t
  misc_feature (772)..(772): n is a, c, g, or t
  misc_feature (788)..(788): n is a, c, g, or t
  misc_feature (806)..(806): n is a, c, g, or t
  misc_feature (828)..(828): n is a, c, g, or t
  misc_feature (836)..(836): n is a, c, g, or t
  misc_feature (842)..(842): n is a, c, g, or t
  misc_feature (844)..(845): n is a, c, g, or t
  misc_feature (850)..(850): n is a, c, g, or t
  misc_feature (852)..(852): n is a, c, g, or t
  misc_feature (858)..(858): n is a, c, g, or t
  misc_feature (877)..(877): n is a, c, g, or t
  misc_feature (985)..(985): n is a, c, g, or t
  misc_feature (1143)..(1203): n is a, c, g, or t
aaatcaaaacaaaacctacacacacacagtcccagggttttctcaaacgaaatcaacagttctttggcaatgttaagagtgtgtaacatgactgccactgctaacttagcataatttataagacttctaatagtgttgaaacaggaaaataactataaacttgttagagnagttcgtttganagacactgncanatgncacncnangnctttttaaaaactcaatttagtaagtagaaaangtaaatgaacaaatttaatttttccagataataaaggaagttattcnnnnnnnnnnnnnnnnnnnnnnnnnnnnnnnnnnnnnnnnnnnnnnnnnnnnnnnnnnnnnnnnnnnnnnnnnnnnnnnnnnnnnnnnnnnnnnnnnnnnnnnnnnnnnnnnnnnnnnnnnnnnnnnnnnnnnnnnnnnnnnnnnnnnnnnnnnnnnnnnnnnnnnnnnnnnnnnnnnnnnnnnnnnnnnnnnnnnnnnnnnnnnnnnnnnnnnnnnnnnnnnnnnnnnnnnnnnnnnnnnnnnnnnnnnnnnnnnnnnnnnnnnnnnnttataaccaaactaagtnaatctttcccctctctntnaactnttnatgcaccacctggccattcnaggatactancaancacactaaanaagtaatagaaaaccaaccacctncaatcngantcattctggggcaggaaacggtaanacatgggtgnncatancggcgagaaagagtcaganacacgaaattaactagntctgttaaaaggnngcnataaaaataccatcantacgagctatacagaacnttagaatccagctaagagtgcngaaatacngaattncnnaatgnanggcggngggggcggtgaacccaaanggagtaagggcatttcagcattctggcgtgttcagagtttctagggtatagtatctctctaacacacagagagcatttcaaagggtggctatggccaggaaacctcanagcgggttctgccgtcacacttgatcccgaaggcgggccagtctctgagacagttcatcctgctccgccgacccaaaggagccgtccgactatgtctaacatggagaaacacctgttcaacctgaagttcgcggccaaagaactgagtaggagtgccnnnnnnnnnnnnnnnnnnnnnnnnnnnnnnnnnnnnnnnnnnnnnnnnnnnnnnnnnnnnngcaacatggaagttgcgaggatacacgccgaaaatgccatccgccaaaaaaaccaggcggtgaatttcttgaaaatgagtgcgcgagtcgatgcagtggctgccagggtccagacggcggtgacgatgggcaaggtgaccaagtcgatggctggtgtggttaagtcgatggatgcgacattgaagaccatgaatctggagaagatttctgctttgatggacaaattcgagcaccagtttgagact

SEQ ID NO: 310740 - DNA, 1169 bp, Homo Sapiens
tttgaacttttctgtcccattgtaaacatatttagaaacataattctccctctggtgaggttgtgggcatgtggcggcttgactgagctgggggcaaaggggcagctgtgggcgtcatgggagtgtgtctggctggggaaatggggtgacttccacgacgcagcgcttgtgggtgtggcctccccactagcaggtgcatgtggaggggtcctggcccgtctaggcgggccgcaccttcatctctgacaccatgcacctatatttgtaccccttcgccgcactccagttgataccattggcatagctctcatggggtcccatgaggtagagaccattgaggtttgaagcatgacagtcggcgtaccaccaggctccctggaacttctcagcacaattcgaagaactcacatcattgtcttggtctttggtggagaagaagttgttgttgtggcccgttagagaattacccgcactgcccccgacaaaggctcccagtaccagcttgtacttctctgcctcgtcagccaccttgaatgatttgtacttagcaaactggtggttgtcctcaaagtccaccaggtctacacggagctcgctggttccctgggcggtcagggcgtggatgttgtcattccccagccagaactcccccagccgactgccgaagccctgcttgtacgtggcccagtcccggtagaagtccacagagccatccaccctccgctggaaaacggtccatccccctccgtccgtgtccatgtcacagagcacagtcaggggccggcagtcgggcaggtagatggtgtgccagccgctcaggaagtgccctcggtctagcaggtccttgcaggtacgcgggcctgtcaggcacggctggggctccccaggtgctccgttgggcccaggtggtcctgccttcccaggaggtccaggggggccgcgttctcctctctttccattggtgcctgcctctcccttgggcccaggggccccaggcagccccggacagcctcggagaatggtgagcttgtcagagccctccaggcccaccatcttcacctctggacaggtgtctgccgcctggagagcccaggccatgcccaggaaagagagcagcagggtggcagcgcccaggacccccacagctctgtccagctccatctcttctc

SEQ ID NO: 310741 - DNA, 843 bp, Homo Sapiens
gtgctgtgtggtgtggtggaccatggttgcgacgcggccgttatgtagttgtgtctgttctcggttagtcttgcggaccgcggttccggcagtgctagcgtttcaggcagctgagcgtcgccgtgtcagagtcggccttcttatcttcctggtcaaacccgtctgatgatggagttgttcagtaggtcaaaatactttctcgataatctgccagctgtggtgatctcacagttaaacaggtcagactgttcgaatttttaagattttgcagagcttctactgtactgagatcttttattttgtttccactcagattgaggtaggtaagatttggacatttctctgccaggacttccaagcctccagaaattatattatcactaagctccaattttcgaagtttatttaagctgggaagccgggccagcgaacttagttccacattagccatactcagaaattctagttctttgaaagtatcattcaggccttcaatttccccattgacacacaggcaattatcaaggactaactctgtcacctcctccggggatctgttccttaactccaggttaatcttcttcttcatctccatgtcctcctcttgctcttcagctactactctccttttccctttcctgccttccccaatacccccaacccaaaatttttaagagatttagaaatgaatgaaaaggaacgcaaatataaacgcccactaccaccaccagataggtgtgggggagaaagaagagaatagcaaatggagtccaagagttgggactctaactcagctgcccccacctccttgtccacacactagcgcgcgcacacacacgcacc

SEQ ID NO: 310742 - DNA, 883 bp, Homo Sapiens
gacgaaggcgggttgggtcacagtctgagtctgctgtatgaagcatcagccatcgtatggcaacattgcagtctctcagacagttcagaaattgctgcacttgagcatgcactctttcactgacagtagcatatctgcttgcctgttctctgacatttgaaaggtccagggtattatttaaagcagtgcagctttgtaaggttcccaagcatctactagattacctgtgatccccatgtaaatactaattacccaattatctggaaagtatttatccactatctctctcatttttgcttgatgggtgtgaaggatggaaggctcaaagtagagaatcacgtacagcatggcagcttggtttgccagggctgtgctgcgatgctccggcaaaggatacgctgagacctggttgtaaatatcatcagatctcagtcgaccaatgaccatactgatgaaggattcgttgataggcactctctggaaatagctctcgggatagttggatggtcttttggcacctggttggctagaataacctgtacttcgaagcagcttacaaatatcgtccatatttgaatcagcagaagatcgagcagcactgtatcggtagtaagaaaccagcatcctctctctgacttctccttcaatcttttggtcaatgaccagtagcataactccatataagtacagtgcttcacatagaagttgttttccatcttcattgagaagcacagtttctaaggtttgctgaatataaaccccttcattgagatcatctagatatctgtttaagtctacaatatatttatgtacactttgaaatgctaaataaaatctggtcacaatttctatgtggtttcacgaaattcttcatctaaatcct

SEQ ID NO: 310743 - DNA, 2009 bp, Homo Sapiens
ggagggcatgagtttgtcttaactgaagaattggacaaagcattagcttgttttcgaaatgctatcagagtcaatcctagacattataatgcatggtatggtttaggaatgatttattacaagcaagaaaaattcagccttgcagaaatgcatttccaaaaagcgcttgatatcaaccctcaaagttcagttttactttgccacattggagtagttcaacatgcactgaaaaaatcagagaaggctttggataccctaaacaaagccattgtcattgatcccaagaaccctctatgcaaatttcacagagcctcagttttatttgcaaatgaaaaatataagtctgctttacaagaacttgaagaattgaaacaaattgttcccaaagaatccctcgtttacttcttaataggaaagatcctaaaggagccaataaccagattaaagaggcaattgataagcgttatcttccagatgatgaggagccaataacccaagaagaacagatcatgggaacagatgaatcccaggagagcagcatgacagatgcggatgacacacaacttcatgcagctgaaagtgatgaattttaacttctggaaatcagacttttacaactggatgtgtgactagtgctgacgtgttttcttgtcccctctgtatactgagtctttactcttgagctggcggtgtcatcgtccgtcacttataccatgagtgtgccactttcattggaccctgactgtatacagaatgaaaggcagtgcaatatttagctgctaacaagactggctcttttaccagtatgaatgacaatttatggggggtagggtggggaactttcttttctgtttttctttaatctccctttgttggaaagtatcatgaaaggaagagttatgctttatcttgaaggaaccattagatatggaaaatagtgatgaaccagagtttcttggttgctttttcaaaaatttgtttttatttggttctgttcctgataaacagagtaactgaccttcatttctaggttcttcaagaatggtgtttgcaagtgccagatggaacaataaaagacgttgcctataacagtgacttgattgccaaggaatgtaaattaccttaaacttgcagtatctcccataaacaaatgtaatgggcatattgggactcgtatgtaggaatcaaatatccctccatacagtgtactcttattcttggcaagaatgctttaatgtctaaccaagaattttaatttattcatcttgcttcatagtgttgatcattgttgtcttggtattgcaaactttcaaattgtttcttaccatattgcctcttctctttgagctctgtgggatcacctttaacattcagagatgatagagtggttccccactgagaagccaaaacaaggcccttaataaccccttaagttcaccatatgactcagacaggcgacacactacagtggagagactctctcacgagatcctgatcactgacaagccttacacttataactccagacatgtaccataaacctcggaatctatattcgttcaaaaaacatccctttgactttctaagtgtctgcttacgcacggcagctgtcagaatgtgtggttaccttcggttgagatctcccacttcttctggactctctgctcagattccccgtagtgtgagtaaccaaaaccatttacctaagacgtacttggtctacggaatcttggacaaacccccagcctggggtcaaccaccatctccccaagcggaacacggtcactccgagtcggtctaaaacatgcggcgtccgacaacggccccgcacgacacaacttcaatacacgccactctgcatccctcctcctcatcacgcgccagcccctctcccaaaccccacacctgtgccctgtcccctctcgcgcaaacaccatcaccagccaaccatacacactatctaaccccacttcttccttcgtctcacgaccatcaccacacctacctat

SEQ ID NO: 310744 - DNA, 230 bp, Homo Sapiens
aataatcttttttctttgtttctgaataggaaaagttggagtagttcctccctcctgggacgtgcatcctttctcttctctatcggcgatgcaaacagccgagagccgctcttcctggaggtctcttgaccgctcaccctcctcctgccgccttggcgccctgcccgcgactgcgggaaaccgggacatagacctggccccgagtggaggcgagcacgtccaccgatctc

SEQ ID NO: 310745 - DNA, 823 bp, Homo Sapiens
aattcgagataatactggcattttggagtgtgttaaagaaggaattggaagagtgataggcatgggagtgcctcatagcaaacgacttcttccgcttctttccttgatcttccctacggtgcttcatggagttcttcattacatcatcagctcagttattcagaagtttgtcctactaattctaaagagaaagacttacaatagccacctagctgagagcactagccctgtgcagagtatgttggatgcttattttccagaacttattgctaactttgctgccagtctttgttctgacgttatactttacccattggaaacagttttgcaccgccttcacattcaaggaacacgcacaataattgacaatacagaccttggctatgaagtgcttccaattaatacacaatatgagggaatgagagactgtatcaataccataaggcaggaggaaggagtgtttggtttttataaagggtttggtgctgttataatacagtacacactgcatgcagctgttttacagattaccaaaattatttactctacacttcttcaaaataacatttgagatttaggttccttcactgagtagtctggaagatataatctggataatttgctatgaagttatgagggatacaagtgaaatactgggggagaaaatggattggaaagtaaaattggtactaaagcccatactgattatcttgactttgttttttaaggcataggtatatattttggatcaaaatccttccaaatttgaaaactcaataaaaataacacttattaaattctagttagtgtagcactcatgctg

SEQ ID NO: 310746 - DNA, 841 bp, Homo Sapiens
tttcgaaagaggttccccccacttatgggggaggattagggcgcccgagtttccttccccccacatattttgggtcgcgccaaaaaatttggttccaaaaggcccgggagaagaccttgggccaacctctttgccttctggggaggtccctggtttgttttcaaggaatctcctttatgggagtcgggcttcttcccaagcgtttcattgccctggccaacggattattagcaaatccatagttctgccaccttcaagctaatttggtccttcatgataccaggtttgctgatactcttctttggacttcttagacttctcatcatcctttttggtctttttcaaggcatcagtaccgacaactgagaggatatttcttaacctttctcttctttcagcaggaccctctccaaaaagtgtgatgggttcccccaaggctctaaggcaagctttgacctctgagtcatctgtggaaacattgatctgccgggctcgcttccttctctcaaactcagccaatacttctgcctgtcgctcgctgatatgctcttcaatttcaaacacttctccagaggttatattaatatttccagcttcgatccctgctttaagtccgtctttccccaaaatcccagactctcctttggccagacgctccctctccttctcttccaaacttccataatagatgtgtggtttcttcacgaccggagcaactaagtcgtcgggtgctttagttttggttgccgtggaagaggctcgcgaggaagccatgctgggctctggagccgcgaggccccagcgaaacccgaacactccctttcagaccgtccaccgcgcc

SEQ ID NO: 310747 - DNA, 1107 bp, Homo Sapiens
  misc_feature (24)..(24): n is a, c, g, or t
aatggcagtgaagttgccacatcnctgggatgctatggttggcccattgaggaatacaatcgacataaataattttgatggaaaatccctcctggataagggagatagccctgctcaagaattggtgaattctctgcaggtttttgaaacagcagcagcttcaatggattctgagcttcatcccttgttggtccagcatttgcccacatctttatatgtgccttcaataccccagtactgcagtgaggcacatggctgctcgttgtgtaggtgtccatgagcaaaatagctaccatggaaacaatgaatatttttttggagaaggttcttccgtggctgggagcaattgatgacagtgtcaaacaagagggtgtaattgaagcacttgcctgtgtaatggaacaactagatgttggtattgttccatatattgtccttttagttgttcctgtattaggaagaatgagtgatcagacagacagtgtgagattcatggccacgcagtgctttgcaacgctaattagactcatgccacttgaggcaggcattccagaccctccaaacatgtcagcagaattaatccaattgaaagccaaggagcgacactttttggagcaattgttagatgggaaaaaattggaaaattataaaattccagtaccaatcaatgctgaactcagaaaatatcagcaggatggtgtgaactggttagcatttcttaataagtataaacttcatggaattctgtgtgatgacatgggtttaggaaaaactttacagtccatctgcattctagcaggagatcattgtcatagggcccaggaatatgcaagatcaaaattagcagaatgtatgccacttccttccttagtggtttgtccgccaacattaacaggccattgggtggatgaagtaggtaaattttgctctagagaatatctcaacccgttgcattacactggacctcccactgaaagaataaggttacagcaccaagtaaaaaggcacaatctaatagtggcttcatatgatgttgtgaggaatgacatagatttctttagaaatattaaatttaactactgcattcttgatgaaggccatgtcatc

SEQ ID NO: 310748 - DNA, 883 bp, Homo Sapiens
  misc_feature (132)..(132): n is a, c, g, or t
  misc_feature (203)..(203): n is a, c, g, or t
  misc_feature (777)..(820): n is a, c, g, or t
attttagcagaagaacgcgttgtatgtacatgattgtacatgtgtttttttcttacacagttcctgagtctatatgttgccagaggccccaaactcatgtgcaaacttaccagatctcaacacagctagaanagatgaccccatacaagacaagcatttagggagcaaacatgtctgagagtcttcctctctgatgtactcancgaggcaagagccagagaattacaagacacatttttccatcattgaaaatgtttattaatttatatgtaattcttctaatcctaaaagtctgaaaccattgctctttatagtttgcgggaatttttaatgccttaaacagaaactccaacagcctcatggcttgctttaaagcagagcttgaatacagggggaacacaggtttgcctgagggttaagaagcatccaagagtaagggaagactgggtaagcaaagcaaaataaaggggcacacaaaccaaaccacacagcacaagacaccctagcaaaggcttcccacagtgcccccacacgggtaggcacccaggccttttgttcttataaaatatgtttttattggtctttgcagtctcacgtcacaaaatcacaatatgcacacaaggcatatagagctggttggggagcacagacatgtggtggccttgaaagcagcttttccccttaagtctctagaacctgccatgagtaattaagacagtctttgaggatggggctgtcaggtgggggcactgtgggaagcctttgctagggtgtctnnnnnnnnnnnnnnnnnnnnnnnnnnnnnnnnnnnnnnnnnnnnttacccagtcttcccttactcttggatgcttcttaaccctcaggcaaacctgtgttccccccc

SEQ ID NO: 310749 - DNA, 977 bp, Homo Sapiens
ttaattgggcctttgccagtttcccggtccccaaatttaccaaaatgaaccccagggcagatagagctggtgggggagcacagacatgtggtggcttgaaaagcagcttttccccttaagtctctagaccctgccatgagtaattaagacagtcttgaggatgggggctgtcaggtgggggcgtttcagcaggtgccgacgagcgccttacaaacgactggctgaacacctttcctcccaggcctctctgccccagcatcactcaatctgctcagtcctcgactgctgcaggggaatgcgtgctcagagagagatgacacttctgaggtggcccccagctctgggtgcagaggagccggggtggggtattcaggccacacttccctgtggccacaggggaaaggaccaggggaaaaaatggggcagggatggccagctaacaaggggcctttggctttgtcttgatttacaaaagactcccccactccccaacaaagaccccaccatgctggtggctgctgatgtcccctttgtactggggagtgaatttgcgcatctcagcagggagggtctcgtagaactgatgttcccttgggaccaggggcttgcacagggttgtctcattgaagcggagcacgcatgagtgccccccgacctggtggacaaaggggtccagaaggacgcctttggggcggggctccacatccatggccctgaaggctggggtcatcctccgggcgcagatggcggggagatgggggaggcagcggagtccagcggccagtacgtcttctgtctgttgtttgtccgtgtgtccctctcgtcttggctccttggcttgttctggccaggatgctctgctgccgcctcagccgggttcctcggcgtttccgtcctattgtttctctcgcaccaaaaaggctgcggccaggccgagccccgccccctgcacctcgctcccggtgcccctcactatt

SEQ ID NO: 310750 - DNA, 583 bp, Homo Sapiens
  misc_feature (103)..(151): n is a, c, g, or t
  misc_feature (435)..(435): n is a, c, g, or t
  misc_feature (554)..(554): n is a, c, g, or t
tgcaggagtgggaggcctgtgctgattagcccaagccctttgctgttacagaatgtccccaaaattgctatatgaaagcaacccttcgattcacatatgatannnnnnnnnnnnnnnnnnnnnnnnnnnnnnnnnnnnnnnnnnnnnnnnnccagcatggtggggtctttgttggggagtgggggagtcttttgtaaatcaagtaagaatccattaaagaaattaattttaaatgtgcattacctggttacataaaggactctagaacaacttaggttcttttgggactgttgaaacattgtctttaaggacagaatgtactgggtgcctttctctgtactctgaatatgcatgtgtattgcggtggggatgggggagttgggggccctcacttggtccttctctgttgtttttttccaggacaaagccaaaggncccttgttagctggccatccctgccccattttttcccctgggcctttcccctgtggccacagggaagtgtggcctgaataccccaccccggctcctctgcacccagagctgggggccanctcagaagtgtcatctctctgtgagcacg

SEQ ID NO: 310751 - DNA, 719 bp, Homo Sapiens
ggggcagccattttggtgcgagagaaacaataggacggaaacgccgaggaacccggctgaggcggcacagagcatcctggccagaacaagccaaggagccaagacgagagggacacacggacaaacaacagacagaagacgtactggccgctggactccgctgcctcccccatctccccgccatctgcgcccggaggatgagcccagccttcagggccatggatgtggagccccgcgccaaaggcgtccttctggagccctttgtccaccaggtcggggggcactcatgcgtgctccgcttcaatgagacaaccctgtgcaagcccctggtcccaagggaacatcagttctacgagaccctccctgctgagatgcgcaaattcactccccagtacaaaggacaaagccaaaggccccttgttagctggccatccctgccccattttttcccctggtcctttcccctgtggccacagggaagtgtggcctgaataccccaccccggctcctctgcacccagagctgggggccacctcagaagtgtcatctctctctgagcacgcattcccctgcagcagtcgaggactgagcagattgagtgatgctggggcagagaggcctgggaggaaaggtgttcagccagtcgtttgtaaggcgctcgtcggcacctgctgaaacgcccccacctgacagccccatccctcaaagactgtcttaat

SEQ ID NO: 310752 - DNA, 1110 bp, Homo Sapiens
actcgatcatgataaatgaagtcattatccttctttgctgcagcaagggcacgattgattttgtcagaaaaatccttcacattaacatattcatcatagcgagatgccactgttttaatcagttctgctgcatgctgtaaccttgcaatttcttctccaaatttcttctgctgttttgccaggatagactgatggtactcagcattggcctgcatgatacagtgctttgcagccaagacagggaacacctccttggggagagtatctttgtattgacactgtttgaaagcatcaccaaaataatctgcagcctgattagccaatttagctatgatggcatctttcattttatctcttgtggcttttaaaaaaaatacttcttgagcctgtgccagcataatgagactgagggtcccaacagtatctggagatagtgtccacggtcggctgctcgacttaaggcagataaaaccgtctctttaatatgtaaaaaggcaccactagcaaactggtaatgtttagcagcgattttcaatccttcaccattatccaggttctgttctgctgcaatttggctagctaaggctgcacaattgaacaacacacagctcttttcatatcctaagcttgcaagagccagttttacagagcctccaaaaagtgaacctttatcgaaagcatccttccaggtaaatgtcaagcagatctgattttcagaaaatgggaatttgggttcaatagaacaaatctgatcataatatctcaggagcgtctcgagcgcgccctcgtgcttgtccagcggacgaccgactgcggcgcggcgcagcttgctgagctcctccgccgcgcggcagtactgggcctgctcttccccgccgcttgggtaagtctgctggatgaacttcaccagcggcttggccaggtccacctctgaggtctttttcagctgcaccgagatgaatgtcgccatgatcagcgcctccgccgccgttcgggccaaacagaccgcggacagcttacgagggccgaggagagagaggtactgggctggcggactggcggactgactggctgacagacttgcgctccgcctgcgttccgggtccggcc

SEQ ID NO: 310753 - DNA, 597 bp, Homo Sapiens
tttttttccaagaacttccttattctctttattcacacctgcacaacccctgcaagggaaaaggccaagagccaaggacccacacacactccccaggcacctacatacatgcatgcagagaatacatgttccctgcctcacagacacatggtcacacatggacacagatgtacacattacacacgttccttgagcagaactccaactctggggtgaaatcagaggtacaagcacctttcagctgcaaatttgaaatacagggtctcacagaaatggggctccaaacaggaacttccagctgagatccaaccatagggatctactgtcctgcctggtttctatccacaccagcaagacagaattataggtggaatctgccgaagccctcctgggtcctctacaggtttggagctcctggacgcctgtccactggaatcactgaggccaagaacccaggctttggggatccatccttcccaccccgtctcagcctcagccagagccccagtgccagggccccagccaccagtcccaggaaagaaaggattcccaaagacgccagcacagctacctgctccacagagtccctgtgatcaa

SEQ ID NO: 310754 - DNA, 393 bp, Homo Sapiens
  misc_feature (284)..(284): n is a, c, g, or t
  misc_feature (350)..(350): n is a, c, g, or t
  misc_feature (373)..(373): n is a, c, g, or t
agataacccacattgttggagagacagctgcctttctatgccccaggctgaggctgagacggggtgggaaggatggatccccaaagcctgggttcttggcctcagtgattccagtggacaggcgtccaggtgagtaggacatccagaagatttggacttggagatgtttccccctattttgagtgtccagattaagagctggctgccctagtcattttaaaacatgctgggaatccaagttgggtctcctcattttaattgatgtctaggctgagggctgggcnttttcattctttgagtccctggggctcagaagtggggtctcttttccctcctcttcagggtacttnagggaagggaccccaggttggantttccctttcagggtattta

SEQ ID NO: 310755 - DNA, 503 bp, Homo Sapiens
tggtgaacaaataatttaatttgcaattctaaaaacatgacttaaaccccataaaacttggttcatagtttaactgtttatgttcaatacaaaccagagtgtttacattcacaatacaaatttcatcaatcttggatatttttgtatttctatgaatactatcaattttattgataacacatactactttcagcacacagaagcatattttctagttattgttaaatagtagataaggcaggttgttccctaaagtgctcagttatcattcagtgggttatttgccgttgatccttttctgccatttcttgttggcgaattgtattctgtgctgcttgatgcattttctctagtttttccagagtcagagattttaagggtaaaagtttgggtttacacagcaccattgtcattatatcttccacaaacagtggccctaagtttaacaagaaataagaattaattcaagaaagataacccagttgtttgtagttggatttgca

SEQ ID NO: 310756 - DNA, 554 bp, Homo Sapiens
ggactctcccgtggcgccatggcggaagcagaggagcaggaaactgggtcccttgaagaatctacagatgagtctgaggaagaagagagcgaagaggaacccaagctgaagtatgaaaggctttccaatggggtaactgaaatacttcagaaggatgcagctagctgcatgacagtccatgacaagtttttggcattgggcacacattatggcaaggtttatttacttgatgtccaggggaacatcactcagaagtttgatgtaagtcctgtgaagataaatcagattagcttggatgaaagtggagagcacatgggtgtgtgttcagaggatggcaaggtccaggtatttggactgtattctggagaagaatttcacgagacttttgactgtcccattaaaattattgctgtgcacccacatttcgtgagatccagttgcaagcagtttgtgaccggagggaagaagctgctactgtttgaacggtcttggatgaacagatggaagtctgctgttctgcatgaaggggaagggaacataaggagtgtgaagtg

SEQ ID NO: 310757 - DNA, 966 bp, Homo Sapiens
cctcgggctgctctctccgcggcctctacagccccctccatgtagccgctccagtgtgtgacagtctcggtgcctgcaaagtaaatcctgtccactggctggcgtagaacccttccatattgagtcaggatcccaggggcttcataatgcactggctccagagcttctagggaacccagaaccttggcatagagttcacaaagtttcttcaacctttcctctttggtaagacgtgccagttttctggctttgtgggccaggataaatcccattatggcagcatagttgccttcaggtttggtatcatccaacgtgtaggcaactggagcttcttctccatcaataatcatggttccacagtaatcctttttcctccagaaaggctctttataataaactatacacttgatgactgaacccaaaggcacacgagtgatcatctggtttctcatcattggcagagggggattgaagtgaatcttcatgcccagagtaggaggaatagcactaatcacatatttagcctcatacatctcatggtttagggtctccacaaggacactcttgtctggtcaatgtagatcacaggcctctccagcttcactcggtctccaaggaggtccattatccgctcactcacttgaccagatccgcccacaaatttcctctcctgtcctccatttgttgtcgagatgattcttgttgtgcctccacactgcttcacataccacaggaaccagagagcagagacctcatgggtctctgcagtgacacacaggttcacaaagagagtggcaagctgctttgcagattcagtccagcagagcttgtccagtagctccttcattgtcatgttgtcccactcttctgcaaggggagccttccatggggcatcactcggaatctctcgccccatgtcatccattgtcctccaaaagttgttatgatctaagtaggtaattggat

SEQ ID NO: 310758 - DNA, 975 bp, Homo Sapiens
  misc_feature (36)..(36): n is a, c, g, or t
  misc_feature (53)..(53): n is a, c, g, or t
aagaaccttaaaacaagcccaatttaaactattctnaaagcattttgaggganaataaacttggaaaactggtgaaaacagcaacgctaagcccaggtaagggaacactaaggcaggggcccacaacggagaaagagataccatgtattttacagtcagagttggatttatcttcatgctccccgcctcactccacactatttgtcttcatggaactttactgcaactctttccccaaactcatatcccaaatacagtaagaagagagtgtgattacagacaccctctctctttagactctcacaagtagcccccttttgtgggccaggaagccaagagccgttgctgaaaagatggtggtcaatccaatcagcctgagcaggcctggcacggagggcaaatgtctctccaaaaaggtggtggtgatgggctgtgcagggacatccacagactctggttctgactgccagatttcatcctctggaatcttccccatggcatgcaggatctctcgggctgctctctccccggcctctacagccccctccatgtagccgctccagtgtgtggcagtctcggtgcctgcaaagtaaatcctgtccactggctggcgtagaacccttccatattgagtcaggatcccaggggggaaataagttgtgtagcagcccccagagtactgctcctcacaccagttcttttcttcataatgcactggctccagagcttctagggaacccagaaccttggcatagagttcacaaagtttcttcaacctttcctctttggtaagacgtgccagttttctggctttgtgggccaggataaatcccattatggcagcatagttgccttcaggtttggtatcatccaacgtgtaggcaactggagcttcttctccatcaataatcaatggttccacagtaatcctttttcctccagaaaggctctttataataaactatacacttgatg

SEQ ID NO: 310759 - DNA, 1258 bp, Homo Sapiens
  misc_feature (1145)..(1145): n is a, c, g, or t
ttttttttgtttctgatgagcacatcacgtttaactttgtgaatttcagaaagtgatcacaaggctttattctatcaattaacatgagttgatctacactgacaaataagatggagcttgatcttactgaaattaattaggtgattctttgaattgtttttactttaacaatgattggaattaagccaaaggtagttaaatccagtacacttaaacatggcccaatgacacagcctttaaacttgtcaatattttcctcttggtggtattgaaaaccagtgagcagagagcataagaacagaacttcaagaccgtggcaggagcttgtatttgtacagcacaaaccccagggcagttactgatgtggaaaatccaatgatcttcagcaggccagaaacagagggcaggttcctttcccagaaggtgtgggtgatttctaccgctggaacgtcctttgattcaggttcttgtacccagatgtctttctcggtcaccttcccgagaccatttaagacctccctagctgctcgttctccagcctcaactgccccttccatgtagccgctccactttgtggcagtctctgtgcccgcaaagaaaatcctgcccacgggttgacgaatcacccttcccatattgagtcatgatcccaggagggaagtaggccgtgtagcagcccccagagtactgctcctcacaccagttcttctcttcataatgcactggatgtaaagcttcttgggatcccagcactttggcatagagctcacagattttcttcttccttatttccttatgtagcttagcaagtcgatcagctttccgggcaagaatgaagcccatgatggcaggcagtgacccatctggcttggtgtcatccaaggttattgaaattggagcatcttcatcttcaatgatcatgcagccacagtaatccttcttcttccagaaggcctccttgtaatacatcatgcacttaatgacagctcccattggaagacgctgaattaactggtttctctctgctggaagctctggtctgaagtgaatcttggcagtccaggtcggagggatcgcattaattacgtatttgcactcataatgttcatggttcagcgtctctatgatgatgttgtcacttgacnggtcaacgtgagtgacagaatggttcagcttcacttggtctccgaggaggtccattatccgttcgctcacttgaccagatccacctacaaacttccgttccggccaccattgg

SEQ ID NO: 310760 - DNA, 512 bp, Homo Sapiens
  misc_feature (380)..(380): n is a, c, g, or t
  misc_feature (463)..(463): n is a, c, g, or t
gaaatggtctcgggaaggtgaccgagaaagacatctgggtacaagaacctgaatcaaaggacgttccagcggtagaaatcacccacaccttctgggaaaggaacctgccctctgtttctggcctgctgaagatcattggattttccacatcagtaactgccctggggtttgtgctgtacaaatacaagctcctgccacggtcttgaagttctgttcttatgctctctgctcactggttttcaataccaccaagaggaaaatattgacaagtttaaaggctgtgtcattgggccatgtttaagtgtactggatttaactacctttggcttaattccaatcattgttaaaagtaaaaacaatttcaaagaatcacctaattnaattttcagttaaggttcaagctcccttcttattttgttcagtgttaggttcaactcatgtttattgattaggattaaaggcntggtgattcactttctggaaatttcacaaagttaaacgtgatgtggctt

SEQ ID NO: 310761 - DNA, 508 bp, Homo Sapiens
  misc_feature (25)..(25): n is a, c, g, or t
tgtttctgaaatcatcatgtatttngcattgaagggaataaaaacaggacacagaaattgtttctgatgagcacatcacgtttaactttgtgaatttcagaaagtgatcacaaggctttattctatcaattaacatgagttgatctacactgacaaataagatggagcttgatcttactgaaattaattaggtgattctttgaattgtttttactttaacaatgattggaattaagccaaaggtagttaaatccagtacacttaaacatgggcccaatgacacagcctttaaacttgtcaatattttcctcttgggtgggtattgaaaaccagtgaggcagagaggcataaggaacaggaacttcaaggaccgtgggcagggagcttggtatttggtacaggcacaaaccccgggggcaggttactggatgtggggaaaatcccaatgttctttcagcgggccaggaaacaggggggcagggttcccctttccccggagggtttgggg

SEQ ID NO: 310762 - DNA, 571 bp, Homo Sapiens
aattttaacattgtgaacatattagtttaaataaaatgtattgtgaaaattaatttcatgtttcccatttacttttgataaaagtactactagaggctgggtgtggtggctcactcctgtaatcccagctcgctaaggccttttgccaagacaaattagctcttagagaaccacaggattccttttgtaatgtattacaaactaaagtcttacctactcttgaagagtagaaaacatggaaaagttctatgttagcccttagaataattaaaaattcataagctctgaaataaagacaggtaataaaatcattgcgtatgacaaaacaaaagtttaaattggcgtttgtaaactctgcatgaaagccaggtttctcactactagaaaaaaagttataaataagccaaggagaattccagaatgaatcctgtggtgccaaatatatgttaactacaaggaataacagtgaccttacactggaaacaccttaaccatgggccaaggttaaagatataacagcattctcacaccccttgcatagctacccccaatgttaacataactgttaaca

SEQ ID NO: 310763 - DNA, 839 bp, Homo Sapiens
  misc_feature (520)..(528): n is a, c, g, or t
gagattagcacgccaaattttaaaacagttttaaggccctttcggggtaggcaaaaatttaccggtttgccgttagcaaccagttcccaaggcaaaaaattcaatttcaggagcttgaatgccaaatttgggccttggttttattaagaaaggcaggttttcttttccatacattttttaaatgattagattcataaataagcagttaatttcttttcttcccaatttatttctaattcatcttacggagattatagatagaattaaaaattacttagctttttttccagtactttatataaattgagatcttttttaaacagtgatttattgtgtttcttaaggtaaaacaacaaaaacaaattctaaaattgtaactttaaattaagtggttaaaatttcagatgacagagccgataactggtaacagcttcttgaagttcatattaagagtccaattagaaacactaacaactacctggcaatagtttgaaagaatcagaagggttcggtgaagggnnnnnnnnntccgaacatgcaaaataccccccaaaacacatgaccttctttttcattttataatctaaacttgtaaaatatttataaatacatgatcattctacacaatacagatcttctagagcatttctaaaggatattacagtttttggtcttaaggaataaagactaagatggaaaaggagatgaaaacagtgaaatctgaggaagcaatacactctctacacacaagcaaactagttcatccagtcaagttagcggttacagttcagtacatgattttcaaggcaactaagaaatcaagacacagatatttcccc

SEQ ID NO: 310764 - DNA, 212 bp, Homo Sapiens
aaaaaaaacccattaaaagaggcctccttcctccactctctcaacccctctgttgggtaacatgaaaagactgtattcctctaagatgttgggattgatatacgtgatttaatctgcaataggtggaataaccaggggaactggttatgaatatgtgaatgcaaccagcaaatttatccttgaaggtgtgatggtagaaataggaaaacaac

SEQ ID NO: 310765 - DNA, 2396 bp, Homo Sapiens
  misc_feature (392)..(392): n is a, c, g, or t
  misc_feature (1890)..(1890): n is a, c, g, or t
agggatccccttgtaaaggaggcctttcaaccttttttgaaaagagcaagccccgccccaaaattgttggctgccccgtggggaacccaggttggttggtgaaggagacttgggggtgttcctggcccatggcccacgtaccagagggagactctgtggagccctctcccctgccggaggggacacttaactttatagcagttacatagggtcaacgggaggcccaccaagtccttgaaatccagggacaggaaaggaagtggtggaggggaggctgacccacctctaaaaggttgtgccactatgagtagagcccccaggggagaggcctcaagtagagtccccaggtcccctcaggtaagcagtggctcatcctctgcctcagctaccancacatccccggctcagccagtggcaccagtagcacatcgtcctcatcttccagggccaggactgctgtgtggggtccaggggggctccgggttggtcctgggggccccagggctgggcaaccaggcgggccttgcaggggcctgcaccacttccagacaatagtgatgcctctaggggcagtgagggcagtggccctggggcttcagggacagtagtgggggctggagacgtgctagcagatgggaggggagccttgatgggcagtgggggtgcctgctcccccatcttgcccacccactgcccccgccctcacgggctggacctgtgccaccatctagggcctcaaggggagcagcagaaggtgtgacctgggatctggcctcagaggcccgagccggggtgttggttcgagggagcaagccccagcggcggagacggcgtaccaggcgtcgcatcaagcggccccgctgacgacggcgggcacctgggccacctcctggagtcatatcctggcgtaagatctgtagcagagaacgcaggttgcccagcactgagttatcattaggattctctgtaggaaagtcttctacaggtgggatggcaccctgggcaatgagctgcccgtaggaagggggtgcctgctgctgcacaatctcagcctccatccgggagaggggggcaaagatgctgtactcctgggtgcgaatggcatagagcttgcaggtgcagcccagggcgatgaccaggagcaggccgcacactaggctgccaatgactgcagctgtaatgaccttgcggggcagaacataggagcagtcccactcatcactgccgtccgcacagtctggctgcccatcgcacacccacgtctcatacacgcacttctcgtcccggcatcggaaattgccaggctggcaatgccgacagcgtctctcatctgctccatcagcacagaaagtctggtagttgcagcggtcagcaggcaggtagcaggctgtggcaccagaggtgccagcagcccccacagggggaaggtccaggtgggcagcctgggcagtcctcctcatctgtgccgtcagcacagtcccatgagccgtcacagcgctgtgcctcactgtagcagcgctcacctaggccttcgccagctcccaggccagagcctaagccacagggtctgtcccaaggcaagcaatagccccgcacatggtaggtggcattgaagccacgaccattgctccaagcaactgtgtggtaggaacacaccagcctggccaggacagtgtttccccagtgacagccttgccattgctgaagtgggtgagactacgcagtagtcgggagctctcagggggcccagggccgtcatacacatgcactgcatctccaaagcccaagtccagggctgtgaagcgcacggccagccgccggccatcatgggggtccagcagccaatggcaggactgggggtgggagactgaggctaggtgtgtatatccnaggagaggagaagaccccatagaagtcctccaaggtgacattgcaaggcagggaggggacgggtcttggggtcaggccagggaaggggtctgagctgcaacctgcttcatcagagccatcgccacaggcatcaaccccatcacagcgctggacagcagatacacagcggtggttcaggcactgaaactcttcctgcaggcacatcagccaatcttggctgtaggagagcaggaagccctggcccatgggtgctctggccccagcatagctgtaagtgatggtgacgttgcccccgggcagctgcagagggctgggaggtgcctcacacagggagatcagtggctggagaggggagcgtagggttaagcgctctgagccacaggccaggtgtagcttctggaacctgatggtgacagtctgttccttgctgcccaggatgagccaggtgcagttggcaggggaggtgcggctgtcccggaccaggggcctctgtaaggtgccctgca

SEQ ID NO: 310766 - DNA, 642 bp, Homo Sapiens
  misc_feature (116)..(138): n is a, c, g, or t
  misc_feature (149)..(149): n is a, c, g, or t
  misc_feature (166)..(166): n is a, c, g, or t
agaaaaaaacacagagctttattattctcaacaccaatggagcggtcttcataggacagaggagtgagttctgtcaacagacaggcggccattggtgttgagaataataaagatcnnnnnnnnnnnnnnnnnnnnnnnagaaaaaaacncagagctttattattcncaacaccaatggcagcggtcttcataggacagaggagtgagttctgtcaacagacaggcggcccctacttgccggcgatgagcgggttccgcaggaccacgatgactgagtccccgcgcaggaacatcttggagatgtagcggtctttgttgactggcttggacttcttcttgcccttgccactcttgggtacctcagtccacatctccttcacgttctccagcaccatgttgcagtgcctggtggggaacagggaggggaggcactatcgaaggccttcacgcggcccaggagtttcttattgttgcggcagttgatgagcacttgggtattgttaatgactgactgtgtgagcacagagagtggaccggtgttaaattcctcctcctctcgcttctgcagctcctctggggtcatctcactcttgggcttgttgaggaggctcatgatggtcactacgctctccgttcactccc

SEQ ID NO: 310767 - DNA, 857 bp, Homo Sapiens
  misc_feature (13)..(13): n is a, c, g, or t
  misc_feature (30)..(30): n is a, c, g, or t
atgaaattctgtncaaaacaaaacagcggncccccctaacttgcccggccgaatgaaacgggttcccgcaaggacccacgaagaactgaattccccgccgccaggaaacatcttggaaaatgtaacggtctttgttgaactggcttggacttcctttcttgcccttgcccactcttgggtacctcagtcccacatctccttcacgttctccagcaccatgttgcagtgcctatcgaaaggccttcacgcggcccaggagtttcttattgttgcggcagttgatgagcacttgggtattgttcttgactgactgtgtgagcacagagagtggaccggtgttaaattcctcctcctctcgcttctgcagctcctctggggtcatctcactcttgggcttgttgaggaggctcatgatggtcactacgctctccgttcactcccgtttcctccgcgttgctgctgcctgaggagagagaggcgggacttcctcttcctgcgacccacttccgttggcgcctgcgcaaagccaaccagtaagtggaggcgtggcctgttgccacagcattccccaccaacggtgcacaatgatggaataaaagcttcgggtaggggttcgcggccagtcagaaccacacgggggcagatgtttatgacaatgaagacaaaaggaaaggcggtctgattcaaaccgtttcttgaagaatggtacaggttgaaggagggaaatgacaagctatttccaaatgcccgccggccgtgacttcgggggcgcggcctccgtgaagccaatccgctcctcgcttcggagacaggcaccgcccctcttccctctgggacgcgttactgacgtatctact

SEQ ID NO: 310768 - DNA, 602 bp, Homo Sapiens
  misc_feature (44)..(44): n is a, c, g, or t
  misc_feature (52)..(52): n is a, c, g, or t
  misc_feature (76)..(76): n is a, c, g, or t
gcgctttttccggtttggtaggggggggtggctggtgggttttntctttttnttttttgcttcagtgggtcgccgnaagaaaaaaacacagagctttattattctcaacaccaatggcagcggtcttcataggacagaggagtgagttctgtcaacagacaggcggcccctacttgccggcgatgagcgggttccgcaggaccacgatgactgagtccccgcgcaggaacatcttggagatgtagcggtctttgttgactggcttggacttcttcttgcccttgccactcttgggtacctcagtccacatctccttcacgttctccagcaccatgttgcagtgcctatcgaaggccttcacgcggcccaggagtttcttattgttgcggcagttgatgagcacttgggtattgttcttgactgactgtgtgagcacagagagtggaccggtgttaaattcctcctcctctcgcttctgcagctcctctggggtcatctcactcttgggcttgttgaggaggctcatgatggtcactacgctctccgttcactcccgtttcctccgcgttgctgctgcctgaggagagagaggcgggactccc

SEQ ID NO: 310769 - DNA, 807 bp, Homo Sapiens
  misc_feature (106)..(134): n is a, c, g, or t
  misc_feature (160)..(188): n is a, c, g, or t
  misc_feature (258)..(282): n is a, c, g, or t
ggggggggaatcccccacccccttttttcttggccccgggttttccttgggaaaacccctttgtgccccgtttttcctttcccccagggggggcccccgggccccnnnnnnnnnnnnnnnnnnnnnnnnnnnnnagggccccaggccgccccccccaaannnnnnnnnnnnnnnnnnnnnnnnnnnnntgggccccgcgcggccaaaacgaatggttttagaaagctttctcgaggggccgaggccggccgaccatgnnnnnnnnnnnnnnnnnnnnnnnnnttttttacccccctagaaaaaaacacagagctttattattctcaacaccaatggcagcggtcttcataggacagaggagtgagttctgtcaacagacaggcggcccctacttgccggcgatgagcgggttccgcaggaccacgatgactgagtccccgcgcaggaacatcttggagatgtagcggtctttgttgactggcttggacttcttcttgcccttgccactcttgggtacctcagtccacatctccttcacgttctccagcaccatgttgcagtgcctatcgaaggccttcacgcggcccaggagtttcttattgttgcggcagttgatgagcacttgggtattgttcttgactgactgtgtgagcacagagagtggaccggtgttaaattcctcctcctctcgcttctgcagctcctctggggtcatctcactcttgggcttgttgaggaggctcatgatggtcactacgctctccgttcactcccgtttcctccgcgttgctgctgcctgaggagccc

SEQ ID NO: 310770 - DNA, 838 bp, Homo Sapiens
acaatggttttttaattgttccccggaaaggagaaagggaagtgttccgcaagggcacatttttattccccgaatagggctcaattcttaaatctccaagtaaaaatgaaagccatgttattacagtaccccggaaggaagtgttcttccggtaggccttccatgaatgaagttggccctatgtcattctatactcctttcctaaccggtttagctaaatatgtgaagattgggtcttctttaggtagcagaggtgcagaaagattaactctctcctgtacacctctcaagtgctgaaaagcatgtatactatatggaagttctagaattttagtacaatcaggttgctctgggtctggagggacaggagattctgtgtctatataatcttcaggactgatgtctttgctctccaaagttatgtatgtgccatcatatagatccaggtcccctaagggcaccttggctttgatgcagtctgggtcttctttattatgtctctgttccagtcctgtgtctctgtcctcattctcttctatgtgaattttttgagcaactaattgtttctctaattctttgaggtagttaactgttgcttcttgtctcattaatatgactaggtcatgaggatgcttcaagttcattggtgaatccacctgctgctggattttcccgtcctccgtgacgacccagtgcgtggtggcgaaggcccctcgtgccgccacactcagcaaggcggaaaggctgaggagccagcctgggccggagcaaggcggcagctcgtaccggccacgaacccctactgccgccgccatcttgcccccccggccgggccccc

SEQ ID NO: 310771 - DNA, 836 bp, Homo Sapiens
ttttatatgggggagaaaatccccaagcccctagttttcaggccccagaggtttttccttggggaaaccaagttatggccccttgttccccttttccttactgggggcccggcgcgcccaaacggaaaggttttagaaaaggcttttgaaggggccgaggggcgcccgacaatgacaatattctgttatcatgctttaccggcccgggaaaaaaaaccccagagctttattaattctcaacacccaattgccagcggtcttcataggacagaggagtgagttctgtcaacagacaggcgggcccctacttgccgggcgatgagcgggttccgcaggaccacgatgactgaggtccccgcggcaggaacattttggagatgtagcggtcttttgttgactggcttggacttcttcttgcccttgccactcttgggtacctcagtccacatctccttcacgttctccagcaccatgttgcagtgcctatcgaaggccttcacgcggcccaggagtttcttattgttgcggcagttgatgagcacttgggtattgttcttgactgactgtgtgagcacagagagtggaccggtgttaaattcctcctcctctcgcttctgcagctcctctggggtcatctcactcttgggcttgttgaggaggctccatggcctaagcctctgtcatctctgtcctggaatctttctggtctctctgcctccacccacgttccctgacagtctgttctccacagagtggtctgagggggttgtgctaaaacatgatggtcactacgctctccgttcactcccgtttcctccgcgttgctgctgcctccc

SEQ ID NO: 310772 - DNA, 620 bp, Homo Sapiens
  misc_feature (36)..(36): n is a, c, g, or t
gggagctccggtctcttcacaggtcccatggaaggnccaagcgcttggatggctcttcacctgctggaggatgctctggagcgtgctgtaaagctgggtcagggtctctgggctctttacttttctcttttccactcggtttccagcctgtctctctaattccaggaatgctttctataggaatctgtcgaactccatctttaaaacatgaaagtcccggggtaaactttttcggaatttgtgcctgttttctttcaatcagttttttaattatctccttctgctttttaatgatgacagaaaattctgtgtacgggatccgtggatttagcctcacatcccattaaagtggctccttcataatccttgatatagccaacatatttggttttaggtattttaatttctttggagaaaccctgtttcttaaagtatccaattgcatattcatctgcatatgtgaggaagttcaggatgtcatgctttatgtgatattctttcaaatgattcatcaggtgtgttccatagcccttgacttgctcatttgaggttacagcacagaagacaatctctgtgaatccttgagatgggaacatacggaaacagataccaccaataac

SEQ ID NO: 310773 - DNA, 733 bp, Homo Sapiens
  misc_feature (566)..(584): n is a, c, g, or t
tctcacgattcctctgaccttgagagtttggctctggtaatgtctctctggccaccaaatgcatcactgttgttttgccaaaaggaagttttaatgctcctaatgtgacatttccatgtagaaatcgtccttgataaataagtcgtagaatatttggactgctgacctgctcttcttcccagtccattggccaattgtcatatacatgctttgcaatgtcagaagcagaatcgttaggagaaaacaggaactcttttgtttttccgcttaccaaaatgaggcgcaaatttatcatatccgccgggacattactggacatcttgccgtttgatatacacccagatgtttacgacaaaacatacaaagaagaaaagagcagaagtcttcacgttacagaaataaaccacgattttgactggttcgtgatgtgctttctcccccaaaaataaagttattttggagccaaagtgccggtcaggccgaggttctggttcgaagaggaacaatccccaggagctgtgtggccggagcaggaggaaactcccgggacagcagaggcagccccnnnnnnnnnnnnnnnnnnnaacagcagcagcagccccaggaccggccgcgccaggtggaccgagccgagtgacacgcggacatggagaggggtgggaggagggttaaatgcgccttcctcctttcccagccccggcaatgattcacacttgctcccgagtccccggcc

SEQ ID NO: 310774 - DNA, 995 bp, Homo Sapiens
ggccgctggaatgacacttgtccagcttttaactcttctatatgaccgaaaactttctcaggggtaccgctcaatagatctgactgtgtaattgggatcaagagttataacagaccccactctatcaaaaacagattcttataaaagactacacccttgaaaagatcatggagacttacttgctagctgtgcagaagatgaggctctcactccaggtgatgaatgcatggatgggatactggatgaatctttgtttgaaacctgtgcaattcagtcaccattacaagtttttgcaggaatgggtggactggctcttattgctgaaagactacccctgctatattcagaaagtaattcaacaggtgagtgctccagttgtaacatctaccactcaggaaaagccgaaggatagcgatcagtttgaatgggtgaccattgaacagtcaggggagttagtttatgaagcaccagaaactgttgcggctgaacctccacctatcaagtcagcagtacagaccatgtctcccatacctgcccattctttggctgcttttggattatttcttcgtcttccgggctatgcggaagtgctactgaaagagagaaaacatgcccagtgccttcttcgattggtattgggagtgacagatgatggagaaggaagtcatattcttcaatctccatcagccaatgtgcttcccaccctttcctttccacgtcccttcgtagcttgtttagcactacaccctttgacaactgatgatggtgtacttctaaggcggatggcattgggaaattggagccttacaccctcattcttgtctgtctctctgctttgagccaccattccccacgagttccaaactctagcgtgaatcaaactgagccacaggtgtcaagctctcataaccctacatcaacagaagaacaacagttatattgggccaaagggactggctttggaacaggctctacagcttctgggtgggatgtgg

SEQ ID NO: 310775 - DNA, 971 bp, Homo Sapiens
  misc_feature (59)..(59): n is a, c, g, or t
ggtcacttgatgagttccctgggagtgtggtaggaaacaggcaccagcgcttgtggccntgaactaaggcattccaggcactggttcccagagggtcgatgtgaatcccagttccggagcgtggtggccccatcacaaaccacctgtaagggggcctgcgcttctccccagcatactggaaaaggtcatcagtgaaaaactttggcaccttgtagtcttccaaaagtttccttcttttagggtgttcaccatagctgctgtcaaagatgtaaaggggactatcatctcgagtgctctccatgtactcgatgtagtatttcatcttcatcttcactgagtagccatcgttatcctcaccacacttgaacttctggttccgatatttcctttttaggcgctccagagtccatttctcctgcgcagaccagccctcttgcgcattcaacaaaaccacgggcttgtaaggtctttcataccgctccacaaattcttccacagacagctgtaaagcatctgccctttccacgttatccgccacggccgccgggctcagcgagaagctctcgtagtagttgtgccgggtccaatccagcgagtccttgagctccggccgcgcactccgcttggcctcgcggatgcgcttcttgctcttgtggttcattctgcggggtcgccagctggttccgctacgacctcggcgcagcccgcttcctgacactaacgcacccctccccggcctgggcggcggcgacggcagtacccaaacgcccttcgctcagtcccggcgcctttaaagtcgccttccagaaaattcactccccagccacctcccgagcctcgggttgggcaagcggccgccgtcttccccgccccgacgcctctcgcggttttccattggctttggctccccctggggtactccttcacatacggcgggcctccgccatgttgggaaggtcacgtcggctgcc

SEQ ID NO: 310776 - DNA, 925 bp, Homo Sapiens
  misc_feature (385)..(385): n is a, c, g, or t
  misc_feature (782)..(782): n is a, c, g, or t
  misc_feature (800)..(800): n is a, c, g, or t
acaagaagaaaacagaagagacagttggagttatatcaacagtaaaagcaatgatgattaaggacttctttcaaattgagagaatggaaaacagactcaggttgtagtaaagaaatttaaaagacactgtttacaagaaaaaatgaattttgtttggacttcttttactcatgatcttgtgacatattatgtcttcatgcaaggggaaaatctcagcaatgattactctttgagatagaagaactgcaaaggtaataatacagccaaagataatctctcagcttttaaatgggtagagaaacactaaagcattcaatttattcaagaaaagtaagcccttgaagatatcttgaaatgaaagtataactgagttaaattatactgngagaagtcttagacttgaaatactacttaccatatgtgcttgcctcagtaaaatgaaccccactgggtgggcagaggttcatttcaaatacatctttgatacttgttcaaaatatgttctttaaaaatataattttttagagagctgttcccaaattttctaacgagtggaccattatcactttaaagccctttatttataatgcatttcctacgggctgtgttccaacaaccattttttttcagcagactatgaatattatagtattataggccaaactggcaaacttcagactgaacatgtacactggtttgagcttagtgaaatgacttctggataattatttttttataattatggatttcaccatctttctttctgtatatatacatgtgtntttatgtaggtatatatntaccattcttcctatctattcttcctataacacacctttatcaagcatacccaggagtaatcttcaaatcttttgttatattctgaaacaaaagattgtgagtgttgcactttacctgatacatg

SEQ ID NO: 310777 - DNA, 638 bp, Homo Sapiens
acaatgtgtttattggacacacaaaaaaactttgcaaccatcataatacatcaatatttaacctagataattctgaaataatttggattctttcatttttcaggatttgagctcatcaattatgttaaatttcctatattctgttacaaatgtaatacagatttcataagtctgccttgattcactgctccctaatccagagcagttaaatttcaaaatcacatagttatatagcctacctgccaaaaaagaataacccatccctgtcttcttaaagtggtagggttttaaaattcatgatacaagtaacaaagtaagttgataacaaatactattttgaactgggcaaaatctagcccaatatgtaattgtgttccccttgttatctgagaggcctgtgttggacaaccatagtcctctgctttcactgtgctcaaataacctgaaatatatagttgtttctgagtagttctgagtaggaaagaaccaaatgtaaatttccttagagacaatcctggagaagacagttctaaatcggggcttgatttttcatctatgatcctagatgttctcctgaaagaatgactagcctttttataacgatacaaagttttttaaaaatacataaatgtcataaa

SEQ ID NO: 310778 - DNA, 1002 bp, Homo Sapiens
aaaccacttgaatctccataacttggaggcccagggcctgtggagagaaacgctcctgacttcaagttgaggtttgcttaatttatgcattaaggccacccctgggacacgtgttcgtgcttccgtttccttgtcactaacacagggatgataagggttactctacttatttcgtgtaagactcaaataagatagtgagtgtgtaaaggcaaagcccctctgattccttactcacattctagcataatcttcctgaaagggcaaaggggatatgagtacctaaaggacagaaacacttcttggtggtcttacctaatagctcatcttcataactgcaccttcagagtcgattgcctgctagcatgctgtggcggtccagtgtgctctgagctccttcatgtagctttaggttatataaatgacatgtgtgggaattccccacaagcagtgtgattcttccttggagctgtgaagacagagcatgtattggctcgctcagatgtcaggttagtccacttagatttttgagaagccacattcatgtttaagcccatgtctgaaagttagccagaggctttgagatgcgttctctagatcatttgtagtacgtggatgccttatattccaaaacaagtttaggcaaactcaaagtaggtcaaactgccggatctgtagaaagccccatttcctgatgggtttttgaggcagaatcaagactcctcccttcccacccctgtggcagtaacacgccatgactgtgaccgcttccctcctcaatccctcctcctgacttgttttcattcctcttatcttttcctcaggttggctcactattgccggctccgggatgttcagacactggcgatgctctgtagcgtgtttgaagcccagtctcggcctcaggggctaccaaacccctttgggccttttcctaaccgttcttctaatcttgcggtgtcccatagtcgatatgtaagtttgtccttttctggttttgtctga

SEQ ID NO: 310779 - DNA, 1366 bp, Homo Sapiens
  misc_feature (185)..(185): n is a, c, g, or t
ttggccccgggaacacaagggctttttcttccatgaaaaccttccccctttgggtagctcagccggccatgggccacccacccaaaggcgcagcttctgcacttctgtccttatttttccacccagtgccatcccaccaccagggtggccaaacagaagagaagggcagaggcccaccaagagcntgatgctgcgcagtctttgggggatcatcctccggtctccactggggacgaacccaggtttctggagcctctcccctgacagacagcttgtcaccggcacttatgggtcctctgggatttcagacaatacccaacttctgtaggttcagaaagtgctttcaagcaggcagtggcacccacacccggtgggacacacctcctgggtccgaaaccactccatcatgtggctggtgtggccaccgtgcccacaggtcaggcagaaattggacgatccccgcacagccacgtgacagatggcacactggaacgtgaagcctttgcagatggcacactgcgtgccacggacctcactccggcagtggctgcagtacacgccgaactcgatccctttgtgagggtcaggaggacaggagacaaacttcaacacttcagctcgcttctctctcagaccccaacggtagaggatttccccatagcatttcttaaagtcatcaaattgctgggtattggcggggtccaggagccttttatttttatcatgctggtcgcgttctcgctcacggggatcactgtaggtcagactcccaaagcggagctcttctggtgaggattctccccaaggggaggacaagtgctctgcctctcttcccgctatgttccagccgccagtgttgagccctgggtctgacatactggagcaggaaccagaagaggtaaagctaggatatcgactatgggacaccacaagattagaagaacggttaggaaaaggcccaaaggggtttggtagcccctgaggccgagactgggcttcaaacacgctacagagcatcgccagtgtctgaacatcccggagccggcaatagtgagctaacagggactccagcagctgccgcccaaatggatgtcgagcccagggtgtttccaaatctgggtcagatttcggaccaaggcaaagatctgtagctaccgtagccagcgaccaaacctggacaagatcctttcttccaacgagcaaggcagaggcggcattcttctgacatgtttcctgaatatcattcacattcaatatgtacagctctcccagcgatttgtgaacaggcaggaggcaagcaatatcctggatgatgactttcccagcagccttgatctgtcgattgccagagtctgatccctcacgc

SEQ ID NO: 310780 - DNA, 925 bp, Homo Sapiens
ttctctcttttttttgtttttcaaattactagaattttattagccaagggatagcagctggaggagaaataacaaaaaaatacatcttaagaatccttaagtacagtgcatatttacaatttaagtgtcgtattttagaaggccactgtccatcagctcagtaaatgtaccagcttctaaagccatgatgccataggtccatttgttgatgaaattcctacccactgtcctcgggcatctgactctggtctctgcactggcatcaagagaacgctgctcggtggtttaaggctaacaccttacagggtaacactgtaacactggccctggagccaggtgcttttctccatgaaaacttccaccttggtagctcagccgacatagacaacacacaaagcgcagctctgcacttctgtccttatcttcacacagtgacatccacaccaggtggccaaacagaagagaaggcagaggcccaccaagagctgatactgcgcagtccttgggggatcatcctccggtctcactggggacgaacccaggttctggagcctctcccctgacagacggcttgtccatccggcacttatgggtcctctgggatttcagacaatacccaacgtctggtagggttcagaaagtgctttcaagcaggcagtggcacccacacccagtgggacacacctcctgggtccgaaaccactccatcatgtggctggtgtggccaccgtgcccacaggtcaggcagaaattggacgatccccgcacagccacgtgacagatggcacactggaacgtgaagcctttgcagatggcacactgcgtgccacggacctcactccggcagtggctgcagtacacgccgaactcgatccctttgtgcggacgcgtgggtcgacgatatcccggaattccggaccgtacc

SEQ ID NO: 310781 - DNA, 955 bp, Homo Sapiens
  misc_feature (925)..(925): n is a, c, g, or t
  misc_feature (928)..(928): n is a, c, g, or t
ctgtttgtctattatataggctggataaatttttctcccagtcatttgattttattgtgtttttactaagcatttttattatcttcatgtagtcaaatgtgtcaatattttgttgccactggatatttccaccacgtttccttctgtatttatatggcttcattttcttacatttggatcctggatccagatggagttcattcttgcatatggtgtgaagtacaggtctaacttcaactttctccaaggggctttccagttggctcagcaccattaaagtctgctttgacctgcgattgaagatgccacctttaactcctcatcccccacccctaagaaacctcacggaacatatgacccaagagcagagcagacataaaaagattaactgagctactgagattcggtcaagaatgtgaactaaaaatgaactgttgagaataaggctggaagatccaacagagggaaacggctgtggaggtcattgccaggtgaggtgtcagatccccggcattgggaagtggtcaactcgtgggttggtaaaaagaattcaccaacaacagtataggtttgaaaaaggaaaggtattagaagaatgctgcagaagactgccatggggcacctcggtgagaggactgaatgtaccacggtggatttttccttagggatatttatggaccttaaagcgggaccgtggggttgcagtgagtttcagcatggcattccggagatgtacagaaattttagttacttctaaggtttttttcggggaaaagaaatctggaaccagatgcctgctttagataataggaaagtctaattacttttaattttccccaaataaggcattttgcctctgcatggcctgatagtcaccaggtggtctttgctcccttttaaattcctcagataaaaagattttgtnctnctgggacctgttcaaggtcactaggtg

SEQ ID NO: 310782 - DNA, 551 bp, Homo Sapiens
tttgtttggcatgtctcaagaaaaatgggaataaatcatccgcatgagctgcaccgaagcaaatatcattcaaaacaatgtgaatgtccacatccagggaatgagactgcataatataatttctaaagcttatgaaagcttggtggaagagacgagcatcaagtccataatcagcacccagtttctgaatttctttcctcttgtaaaatttgtctaagaccttctttacttcattcttgtccagaggccgggttagctcggccccgacgtcgccgtcggcgctggggccctgaggtttcacagtcaggggcacgaacaaggacgtgtttggtattttggagccaccggaggcagaggaggaggcggtggcaaggacagaaacttgccccagaaccccgggaaagggcccaaagtggggacgaagggcagagcagatggctgcccggtggccagcctggcgccccgccgggagccgagcccacaatagggcacgggagaaggacatcgaggccgcaggttctacactgtcttgcgcagccgcggacacggcc

SEQ ID NO: 310783 - DNA, 1198 bp, Homo Sapiens
gacctgtcattcgttcgtcctcagtgcagggcaacaggactttaggttctttatggtgactgcagccatgctgctacagtgctgcccagtgcttgcccggggccccacaagcctcctaggcaaggtggttaagactcaccagttcctgtttggtattggacgctgtcccatcctggctacccaaggaccaaactgttctcaaatccaccttaaggcaacaaaggctggaggagattctccatcttgggcgaagggccactgtcccttcatgctgtcaggaactccaggatgggaagagcaagattgtgcagaaggcagccccagaagtccaggaagatgtgaaggctttcaagacaggttggagtcaagttccaccttatgcaacctttactcctaatgcttgaacacactacgtcacagtcctgagctaggctaatacaaaagcagccagtacacatcccatgatgagaagtccagtctttccaggggagccatggtaggcaacagtttaggctgtatgctgaagcacaccatacctgacaaacacatatgtacgggctcctgaaacttttagtcattattctaagatgagccctctagaattttgactcctctttttcaggtggctaaactgatcccaacaggctggggtcccacatttcagcaagaccactctatgagaatatggatttgcatgaaagaggaagagctgggagtaggtacctcctttaaccagggtgcagatccccaggtcaacttaattagtgcagaccacccaagataatcacccttgagatatggccacactgttgacatctttcataggcccctttgggatatcattaaggacaaaaacttcaaaattgaaatttaatgatgtttagaaaagaagagtaaggtacattatcctgcatctactttctaaatgcaggacccagggtggctgctccagttacctgagccaagggaaaatcctagtggagagaagtatgattcaccttatggaaggtttcctaacaatgtaatagtctccattcggggggataaatagaagctcaccttggagaagatttcttctcgctgtagaagctgcccttaccttataaacttgaattttcatgtgttgcattgagcttaaagaggacaacacatgctttctttttcccccattctcttcacggccaatgaatctcacatt

SEQ ID NO: 310784 - DNA, 1000 bp, Homo Sapiens
aggtggacaggaagtagaatttattggtgagtattaagaggggggcagagaagtggtaaagatgaagcctgcagcataggagcgcaccatgtccaccaagtcacgggtgctggcaatgtagccgcccacacagccaaaggccttgccaagagttccagagattgatgtcaatcttatgcataattccatcacgctccccaatcccagcgccccgggacccatacagtcctacagcatggacctcatccacgaaggtcagggccccatactggtgggacacatcacacaactcctcgaggggacagatggcaccatccatggagttggacagtctcaaaggccacaattttgggtatcttagggttagacttctctagaagtttctttaggtggtcagggtcattgtgcctgaagacaaacttggctgctccactgttacggataccttggatcatggaagcatggttgcctgcgtctgagtaaatctcgcaccctggcaggatcttggccaaggtgaagagagtagagtcattggcaacaaagcaggaggagaagagcagggctgagtccttctggtgcagctcagccagctcctgctcaagctccacatgaaacttactggtgcctgagatgttgcgggtgccaccagctccagcaccatgacgctgcagggtctccctgtcttgaaagccttcacatcttcctggacttctggggctgccttctgcacaatcttgctcttcccatcctggagttccgacagcatgaagggacagtggcccttcgcccaagatggagaatctcctccagcctttgttgccttaaggtggatttgagaacagtttggtccttgggtagccaggatgggacagcgtccaataccaaacaggaactggtgagtcttaaccaccttgcctaggaggcttgtggggccccgggcaagcactgggcagcactgtagcagcatggctgcagtcaccatcttgaacctaaagtcctg

SEQ ID NO: 310785 - DNA, 1803 bp, Homo Sapiens
ttttttttgctgtggtttgtgctttatttttaggctcaattcagctagaggcacacaacaaagcagaagacaggagtaggcctggacccaagtgaagcgcaggtggggtgtgaatcctaggcagctggcttctcaggcataggtggtgacatactggggccccatgttcccgaagtaggaacgttcccactcactcatgagctcaaagtgtacaggacggcgacagaaattgcaggcagccacagacacatcctggaggggcagccccaccgcagtccaagccagcagcagcttctccacaaaatcttccatcatctgagggctgtggtggggggagggtgccaagcgcaggagctcttcaccccgggggacagttgggtagttgatggcctgcacatagatgccatgcttggagagcaggagatcacagagcttgctgttgagtgctgcattgcccacccggatggggatgatgtggctggggcaggggatgacaggaaggcccctgtccatgagtagctggcgcatgtgcttgacattgcgctggtgggctcgcctcagggcttggccctcctctcccttgagcagccgcacagattctagagctccagagagcaccatggggggcagagaagtggtaaagatgaagcctgcagcataggagcgcaccatgtccaccaagtcacgggtgctggcaatgtagccgcccacacagccaaaggccttgccaagagttccagagatgatgtcaatcttatgcataattccatcacgctccccaatcccagcgccccgggacccatacagtcctacagcatggacctcatccacgaaggtcagggccccatactggtgggacacatcacacaactcctcgaggggacagatggcaccatccatggagtggacagtctcaaaggccacaattttgggtatcttagggttagacttctctagaagtttctttaggtggtcagggtcattgtgcctgaagacaaacttggctgctccactgttacggataccttggatcatggaagcatggttgcctgcgtctgagtaaatctcgcaccctggcaggatcttggccaaggtgaagagagtagagtcattggcaacaaagcaggaggagaagagcagggctgagtccttctggtgcagctcagccagctcctgctcaagctccacatgaaacttactggtgcctgagatgttgcgggtgccaccagctccagcaccatgacgctgcagggtctcctgtgtggcttgcaagacctgagggtgtcggctcatgcccaggtaatcattactacaccagacggacacatcctttgaggccacagatgcctcagagaaatgttgggcaaagggatatgcatcagcccagcggttcacagtcttgaacacacggtaggtgtgatcctgtttcttctccatgatcttgtccctgaaaaactggtcataactgaagacatagtttcctgtcttgaaagccttcacatcttcctggacttctggggctgccttctgcacaatcttgctcttcccatcctggagttccgacagcatgaagggacagtggcccttcgcccaagatggagaatctcctccagcctttgttgccttaaggtggatttgagaacagtttggtccttgggtagccaggatgggacagcgtccaataccaaacaggaactggtgagtcttaaccaccttgcctaggaggcttgtggggccccgggcaagcactgggcagcactgtagcagcatggctgcagtcaccatcttgaacctaaagtcctg

SEQ ID NO: 310786 - DNA, 1127 bp, Homo Sapiens
  misc_feature (1005)..(1005): n is a, c, g, or t
  misc_feature (1009)..(1012): n is a, c, g, or t
  misc_feature (1017)..(1018): n is a, c, g, or t
  misc_feature (1048)..(1048): n is a, c, g, or t
  misc_feature (1053)..(1053): n is a, c, g, or t
  misc_feature (1056)..(1058): n is a, c, g, or t
  misc_feature (1067)..(1067): n is a, c, g, or t
  misc_feature (1069)..(1069): n is a, c, g, or t
  misc_feature (1087)..(1087): n is a, c, g, or t
  misc_feature (1092)..(1092): n is a, c, g, or t
  misc_feature (1105)..(1105): n is a, c, g, or t
  misc_feature (1110)..(1110): n is a, c, g, or t
  misc_feature (1118)..(1118): n is a, c, g, or t
gcagggcaacaggactttaggttcaagatggtgactgcagccatgctgctacagtgctgcccagtgcttgcccggggccccacaagcctcctaggcaaggtggttaagactcaccagttcctgtttggtattggacgctgtcccatcctggctacccaaggaccaaactgttctcaaatccaccttaaggcaacaaaggctggaggagattctccatcttgggcgaagggccactgtcccttcatgctgtcggaactccaggatgggaagagcaagattgtgcagaaggcagccccagaagtccaggaagatgtgaaggctttcaagacagatctgcctagctccctggtctcagtcagcctaaggaagccattttccggtccccaggagcaggagcagatctctgggaaggtcacacacctgattcagaacaatatgcctggaaactatgtcttcagttatgaccagtttttcagggacaagatcatggagaagaaacaggatcacacctaccgtgtgttcaagactgtgaaccgctgggctgatgcatatccctttgcccaacatttctctgaggcatctgtggcctcaaaggatgtgtccgtctggtgtagtaatgattacctgggcatgagccgacaccctcaggtcttgcaagccacacaggagaccctgcagcgtcatggtgctggagctggtggcacccgcaacatctcaggcaccagtaagtttcatgtggagcttgagcaggagctggctgagctgcaccagaaggactcagccctgctcttctcctcctgctttgttgccaatgactctactctcttcaccttggccaagatcctgccagggtgcgagatttactcagacgcaggcaaccatgcttccatgatccaaggtatccgtaacagtggagcagccaagtttgtcttcaggcacaatgaccctgaacacctaaagaaacttctagagaaagtctaaccctaagatacccaaattgtggcnttgnnnntgtcnntccatggatggtgcatctgtccctcgaggngtgtntgnnntgtccacantntgggcctgacttcgtggntgagncatgtgtaggatnttggntccggggntggattggg

SEQ ID NO: 310787 - DNA, 1089 bp, Homo Sapiens
  misc_feature (4)..(4): n is a, c, g, or t
  misc_feature (15)..(15): n is a, c, g, or t
  misc_feature (19)..(19): n is a, c, g, or t
  misc_feature (24)..(24): n is a, c, g, or t
  misc_feature (30)..(30): n is a, c, g, or t
  misc_feature (33)..(33): n is a, c, g, or t
  misc_feature (39)..(39): n is a, c, g, or t
  misc_feature (46)..(46): n is a, c, g, or t
  misc_feature (56)..(56): n is a, c, g, or t
  misc_feature (61)..(61): n is a, c, g, or t
  misc_feature (67)..(67): n is a, c, g, or t
  misc_feature (79)..(79): n is a, c, g, or t
  misc_feature (99)..(99): n is a, c, g, or t
  misc_feature (110)..(110): n is a, c, g, or t
  misc_feature (113)..(113): n is a, c, g, or t
  misc_feature (116)..(116): n is a, c, g, or t
  misc_feature (119)..(119): n is a, c, g, or t
  misc_feature (122)..(122): n is a, c, g, or t
  misc_feature (139)..(139): n is a, c, g, or t
  misc_feature (155)..(155): n is a, c, g, or t
  misc_feature (166)..(166): n is a, c, g, or t
  misc_feature (173)..(173): n is a, c, g, or t
  misc_feature (187)..(187): n is a, c, g, or t
  misc_feature (191)..(191): n is a, c, g, or t
  misc_feature (217)..(217): n is a, c, g, or t
  misc_feature (264)..(264): n is a, c, g, or t
  misc_feature (623)..(623): n is a, c, g, or t
  misc_feature (1029)..(1029): n is a, c, g, or t
  misc_feature (1034)..(1034): n is a, c, g, or t
  misc_feature (1069)..(1069): n is a, c, g, or t
cagnaatttatgtgngttngcagngctgtnagntcacanaagactngccctgtttntctcntgtttntgcaaatacttnctttttcactttgcaaaatnctgcagggtcnatnttnctnagncgcaggaaccatgttcnatatcaaagtatcgtnacagtgagcancaagttntctcagcacaatgncctnccaccttaaagaacttctagagagtntaccctagatacccaaaattgtgcctttgagactgtccactccatgnatggtgccatctgtcccctcgaggagttgtgtgatgtgtcccaccagtatgggccctgaccttcgtggatgaggtccatgctgtaggactgtatgggtcccggggcgctgggattggggagcgtgatggaattatgcataagattgacatcatctctggaactcttggcaaggcctttggctgtgtgggcggctacattgccagcacccgtgacttggtggacatggtgcgctcctatgctgcaggcttcatctttaccacttctctgccccccatggtgctctctggagctctagaatctgtgcggctgctcaagggagaggagggccaagccctgaggcgagcccaccagcgcaatntcaagcacatgcgccagctactcatggacaggggccttcctgtcatcccctgccccagccacatcatccccatccgggtgggcaatgcagcactcaacagcaagctctgtgatctcctgctctccaagcatggcatctatgtgcaggccatcaactacccaactgtcccccggggtgaagagctcctgcgcttggcaccctccccccaccacagccctcagatgatggaagattttgtggagaagctgctgctggcttggactgcggtggggctgcccctccagggatgtgtctgtggctgcctgcaatttctgtcgccgtcctgtacactttgagctcatgagtgagtggggaacgttcctaatttcgggaacatggggccccagtatgtcaccacctatgcctnagaanccagctgcctaggattcacaccccacctgcgcttnacttgggtccaggcctactc

SEQ ID NO: 310788 - DNA, 966 bp, Homo Sapiens
aataaatgctaatgataacccactaagctgattttgtgacccattaattgtcttgatccagtttgaaaaactctgaattataggctgtgagcactcgctattgttagggttaggataatctaataagcatgaggtaatggctgatgcaaggaaaagactggttaatccagaatggctgataatttttcaaaaagggaaacaaagctggcaataaagggaatggttagcaggaaagcaaataattgaagacagcaacagatgtaggtttgttgggagcgtgaggctcccagaataaataggtggagagggcaatgggcatggtggggctctcacccggatggggatgatgtggctggggcaggggatgacaggaaggcccctgtccatgagtagctggcgcatgtgcttgacattgcgctggtgggctcgcctcagggcttggcctcctctcccttgagcagccgcacagattctagagctccagagagcaccatggggggcagagaagtggtaaagatgaagcctgcagcataggagcgcaccatgtccaccaagtcacgggtgctggcaatgtagccgcccacacagccaaaggccttgcctggagacagaaaggaataagatatacacagatcccataatcagtcccagagcaacaggatcatgtgccagataacacaagggggtgcaccagaagttggggctcccaggctgtcttcccaggcctctgctcatctgtccatgacaaggcagtcgtagctgataattctgctgctttgagataggactttcaagtcttgccatatgcaatgactagataggcaggagctgggtggggacctttagctggatagggtcaggagtggagctaagatgaagcttggggctagggtgggggaggggtttagaaacacagctcttcacatactcaagttgaatctaactactcgtgccgaattactgggg

SEQ ID NO: 310789 - DNA, 861 bp, Homo Sapiens
cggccgggggaggtttccagaagcgctgccgccaccgcatcgcgcagctctttgccgtcggagcgcttgtttgctgcctcgtactcctccatttatccgccatgataagtgccagccgagctgcagcagcccgtctcgtgggcgccgcagcctcccggggccctacggccgcccgccaccaggatagctggaatggccttagtcatgaggcttttagacttgtttcaaggcgggattatgcatcagaagcaatcaagggagcagttgttggtattgatttgggtactaccaactcctgcgtggcagttatggaaggtaaacaagcaaaggtgctggagaatgccgaaggtgccagaaccaccccttcagttgtggcctttacagcagatggtgagcgacttgttggaatgccggccaagcgacaggctgtcaccaacccaaacaatacattttatgctaccaagcgtctcattggccggcgatatgatgatcctgaagtacagaaagacattaaaaatgttccctttaaaattgtccgtgcctccaatggtgatgcctgggttgaggctcatgggaaattgtattctccgagtcagattggagcatttgtgttgatgaagatgaaagagactgcagaaaattacttggggcacacagcaaaaaatgctgtgatcacagtcccagcttatttcaatgactcgcagagacaggccactaaagatgctggccagatatctggactgaatgtgcttcgggtggttaatgagcccacagctgctgctcttggctagggcctagacaaatcaaaagacaaggccatgctgtatatgaattaaggggtggaaccttttgatatttcca

SEQ ID NO: 310790 - DNA, 1211 bp, Homo Sapiens
gcccagcttcgcagacctctggcgcccggcgggttcccagttcccccgcttcttccgaggagacagcggaggcgaggccaccgggctgtcaggctgaagctccgtggcggccgggtcctgcacgcagagaagaccccagcgccggcgcggctcagggctgggcccacgggactccggacgcgccgcgaaagcgttgcgctcccggaggcgtccgcagctgctggctgctcatttgccggtgaccggaggctcggggccagcatggccccacgctgcaacaggcgtaccggaggcgctggtggatggcctgcacggctgtgctggagaacctcttcttctctgctgtactcctgggctggggctccctgttgatcattctgaagaacgagggcttctattccagcacgtgcccagctgagagcagcaccaacaccacccaggatgagcagcgcaggtggccaggctgtgaccagcaggacgagatgctcaacctgggcttcaccattggttccttcgtgctcagcgccaccaccctgccactggggatcctcatggaccgctttggcccccgacccgtgcggctggttggcagtgcctgcttcactgcgtcctgcaccctcatggccctggcctcccgggacgtggaagctctgtctccgttgatattcctggcgctgtccctgaatggctttggtggcatctgcctaacgttcacttcactcacgctgcccaacatgtttgggaacctgcgctccacgttaatggccctcatgattggctcttacgcctcttctgccattacgttcccaggaatcaagctgatctacgatgcgggtgtggccttcgtggtcatcatgttcacctggtctggcctggcctgccttatctttctgaactgcaccctcaactggcccatcgaagcctttcctgcccctgaggaagtcaattacacgaagaagatcaagctgagtgggctggccctggaccacaaggtgacaggtgacctcttctacacccatgtgaccaccatgggccacaggctcagccagaaggcccccagcctggaggacggttcggatgccttcatgtcaccccaggatgttcggagcacctcagtcctgtggagcctcctcaccatgggcatgacccagctgcggatcatcttctacatggctgctgtgcacgatgctggagtaccttgtgctggtggc

SEQ ID NO: 310791 - DNA, 897 bp, Homo Sapiens
catcagttgtgctcattactgtcccacaaaggtcagaaagaagcttagatgtcatctctctatgactagccttcccctccaatgctaaggatactgccaacactggtactccacttttcatttcaccaagatttaaatctcttaacatttccgcaacttcattagtatctccatgctcaaaatattcctgtatgattggtgttaaagtcttctcaaatgccctttcatccaaaggcaaaactacagtttcataaacacagttctcctggtcatcatcatagttaggatctttcacatccacctcctccacatcatacacctgtccaggtgtaccccagacacctttgcctcctgcaccacctttctttggtagtccccttcctttcccagatctggatcgcctatccagcaaccttccctttggactggttggcacagttaatccacttctaagggcgtcactcccactgtcgctgaccgaatcgcctctgccagagtcccgggatgagtttttccttagtcgcctttttgccttggcattaattctagcttcgttaatggaggatgctgaaatccaatttccatttatttcattctttacttcctcagtcccagcattttcttcatcaccggaaaagagagagtcacttaagttatcaggatctgcagggtttacattcagtatctgctcattttctacatccattttcccttaatttcgcttgcactgattaaacaaattacctaatggaaatcttccttcagaatccctcgggcccccgccgctgctcgcccaggttcctggtcagccggccccgaccccgctcttctgtctctgccgccgcctcggagagtctctggcccttctcgctctgtttgtttttgttttcttctacc

SEQ ID NO: 310792 - DNA, 730 bp, Homo Sapiens
  misc_feature (172)..(205): n is a, c, g, or t
  misc_feature (277)..(467): n is a, c, g, or t
attactaaaagattggttttgagagagacataaaaattttgagagaaaaaattaacagaagacatgggggttgggagcaaattatgtatttgctgtggttaatgattctaatctatatattggcttattgtattctgattttgtaaaagagcagtgacatataaattctacnnnnnnnnnnnnnnnnnnnnnnnnnnnnnnnnnngctttgttgtccaggctggagtgcagtgatgaattatagctcactgcagcctcgaactcttgggcttaagannnnnnnnnnnnnnnnnnnnnnnnnnnnnnnnnnnnnnnnnnnnnnnnnnnnnnnnnnnnnnnnnnnnnnnnnnnnnnnnnnnnnnnnnnnnnnnnnnnnnnnnnnnnnnnnnnnnnnnnnnnnnnnnnnnnnnnnnnnnnnnnnnnnnnnnnnnnnnnnnnnnnnnnnnnnnnnnnnnnnnnnnnnnnnngcctggcctagattctatttttatatgcgatcaatgtatgtagcatgtctttgtcttgtgctaagtggggattattaaccacttagaatataaaattgtacaacaatttcacttgtttatttgcattttgttttttataactcttactcccttttcccctcaaaggagaactgtgtttatgaaactgtagttttgcctttggatgaaagggcatttgagaagactttaacaccaatcatacaggaatattttgagcattgagc

SEQ ID NO: 310793 - DNA, 1053 bp, Homo Sapiens
  misc_feature (10)..(10): n is a, c, g, or t
  misc_feature (20)..(20): n is a, c, g, or t
  misc_feature (33)..(33): n is a, c, g, or t
  misc_feature (47)..(48): n is a, c, g, or t
  misc_feature (80)..(80): n is a, c, g, or t
  misc_feature (82)..(82): n is a, c, g, or t
  misc_feature (89)..(147): n is a, c, g, or t
  misc_feature (168)..(303): n is a, c, g, or t
  misc_feature (864)..(925): n is a, c, g, or t
tcccagcatntctcacttanggacagaacgagngagagaatgacatnncatcggccaagctagacactagaagtcagatntngtcacgnnnnnnnnnnnnnnnnnnnnnnnnnnnnnnnnnnnnnnnnnnnnnnnnnnnnnnnnnnnagcagcctgaccaacatggtnnnnnnnnnnnnnnnnnnnnnnnnnnnnnnnnnnnnnnnnnnnnnnnnnnnnnnnnnnnnnnnnnnnnnnnnnnnnnnnnnnnnnnnnnnnnnnnnnnnnnnnnnnnnnnnnnnnnnnnnnnnnnnnnnnnnnnnnccatgccctcagagctctccggaccagccaagtcatgctcctctgggaccggcctcagcatcccctcgacggcctggagggaccacagccccggccagaggcgcagggcagaggacatcccttccggaggttctgcggcggagggctgccgacctctcccccacgcgccaggtgaggcgcgtaaaggaaggggagcttgtctcactcacagagggcccggctcgcgggaggcgcctgcggggtgggcgcgaactgagatccaaatttctgcccttttcactacgttccatacccccgcccctaacacagtctctcaatccagctcccttctaactccccgaaacatccagaggggtgggcgggaggagaagggaaggccctcaggccacagacggtgggagtggaaaggtctgtcggaagtcacttttggggcccaacccaactttcaaaaagaggcagctgcaaccctcctagccggtcaccgtactcaaggactctcccgagccgagaggcgaaggccgagccctgcgtccagcagctgagggggggcggccccctgannnnnnnnnnnnnnnnnnnnnnnnnnnnnnnnnnnnnnnnnnnnnnnnnnnnnnnnnnnnnnccccagatcccggaaggaggccgccgccagccgcgccagcgccagttgttcacgttggtcccgtcctcccgctcctccacgatccagtgggggttcccctggccccacttggccatggcggcgtggac

SEQ ID NO: 310794 - DNA, 869 bp, Homo Sapiens
cccgctgggctgttttacaccagttcttttggcactggggacatagacacattagaatggaaataactcactgatatgattgagggctttctgggcaactccgtaagtcaaaataataattgctttatagtggccactgtttagtaagtgtcagctgcatgcttagcacagcctttataaattttcccacaattgtcatctcacacaaagaagtgagacaatttaaggcctggacagggccgtctggtaagtaccttcatctctcccagatttcttatctgcacagtgaggattatatagctactattttgtagtgaagatcaaatgcattcatacatgtacagcacttagattactgactgacacataaataatcaataattattagttgttaatataccatttattctttacacggatgcagagtatccactttatagatgagaacaaaaaagaaatctcatactgtataaatgatttgtcccaaaccacaaggctagacaaagtcagagatggactcatgcctggtcaaggtgtgtagggtgagtggaggagaggatgaactcagtttccaccaggtgagctccactacactttacctgcaggagccagtttggagagaggaaagttatttgaccaaggaacagtggctatgaaaccaggcagaccttgtttaaaatttatctttatcagctactagctgtgtgggccttggcaagtcacttaacaattccaggtacgtgtttcataatttgtgaagtagagctaataatgctgggctcctaaaattgctatttggtaaaagaaaatatcatagcctgtctatctctctctctatctatccatctaccggtctgggtgtctgtctg

SEQ ID NO: 310795 - DNA, 458 bp, Homo Sapiens
  misc_feature (315)..(338): n is a, c, g, or t
aaaagctgtattttattcaagcattgaatttagaaagataaactataaatttattactgcttttcaacatgctttggattttaaagctaatggatcttttattaataccttttttcctttcatcttaacccagtgttactaaaattagatttcccattttttcccctatatgaaagataatttacatttaccttgtaaaaattatcaccctgctccacttgagaaccctgctgttgtttgcaaaatcaggaccaagcccatattttttgagagctctctagaagaatttatcttcaagaaaatatggtttggtgnnnnnnnnnnnnnnnnnnnnnnnncaaagtcccatggccagatatcctataatatactagatgcatgtttgctaatttttacttgaattttttttaaattgtaccaatcaaaaggttctttttctttccagctccaattttttg

SEQ ID NO: 310796 - DNA, 774 bp, Homo Sapiens
  misc_feature (122)..(131): n is a, c, g, or t
  misc_feature (576)..(576): n is a, c, g, or t
  misc_feature (613)..(613): n is a, c, g, or t
  misc_feature (617)..(617): n is a, c, g, or t
  misc_feature (621)..(621): n is a, c, g, or t
  misc_feature (644)..(694): n is a, c, g, or t
  misc_feature (701)..(701): n is a, c, g, or t
  misc_feature (726)..(726): n is a, c, g, or t
  misc_feature (738)..(738): n is a, c, g, or t
gggcacttacagggctgtaccctcagtaaaggcaggctgcagtcgccagcttgctaagtattccaagaggaggaaaatttttaaaaaattataatcacctaaaaggttataagctctgaatnnnnnnnnnntttttttagctgggattacaggcgcgagccactgcccccggcctctgagtaaaattaactggcatctgtgaccacaggtctttgaaaagtgcctgcctccgtctgtggtctccctctgtagtggctgcaggtggacgctgcactgacccagcatctctgcttatcaggaggctctggagccacaccgcagaagcacacacccttttgagccagacatgctgactttctaataaggatgttctctctccacagctgaaagatgaaaattctaagctgagaagaaagctgaatgaggttcagagcttctctgaagctcaaacagaaatgtatgtaagcttttagttaggaatgcaatccacaacatctaatacacagggaaatccgtttttaaatgataatgaagtaatcagagtcaaaccagatcctgggttttattgtatataantgttcagcatcaaacacatttctgtgttctgcctaanagtntatnttgagacagtcttgccgtgtcannnnnnnnnnnnnnnnnnnnnnnnnnnnnnnnnnnnnnnnnnnnnnnnnnnccttggnttcaagaaatcctccaatctcagcntccttgagtagntgggacacaggcgtttgcaattgaacttgggttatt

SEQ ID NO: 310797 - DNA, 1284 bp, Homo Sapiens
caccaccatctcccaaggaagtgaatcagcccctggccccagtacacccctttaaatcaaaggagcaggatttgcactggaaggttaaaatgcctcttcccacccagcagtgccctgctctttttatttcccaggtgtctccagtcttgaatggcaggacttacccacgggtagtccagtactttccttctgctgacagtcttctgtccaggactgcctttcctccggggtagctcaggggatctggggttgccttctctccacacggggaggcacaggcttctccccaggctgtgtgcagggatggcaggaggcacacaggagtccagggtatgtcaaattctccacggggaaatgggaactatttatcaacaaactagctccctactcccacccccagttttcagtataataaactgattccaggaaatggtcattaaaaatttagacaaaactacaaaaaatggagaacccccttttggaaagtctgattgctacaggatagtctttgaacttaaagactaagagaaacatttctcaggacaagactggtcatccctcactacccagagcaccaagaggctgccagaaagggtcatgatgtgcttgcagggccaagggcagcggcagggacgcctctgcttcctgagtctcctccagcgctgtcgtttcgattccctgcctgatttttcatgtgcactctgacagatgagtcctgttttaagaaatacctaattggtgccagatgcatctgaacacatcacacaatggggatgcgtttcttgggtttgttattcatgtatcggggcctggcgagaacctggatatccagcatatggcacaaaaacatcttaggtgaaactcagacattgttatatttaataaaaatacatgaagattttttctgttttatgtacactccgaatgtctgaacattctggacactactgtatagttatgtacaagtgcaaggtcagtgttgtcttgactattttaatttatatacaggctctcttgtgacgcgcaacactgccagatgacaaccaattccttcttggaaacaggctccgagcccagcgcctcttactccctgccattccctttttatgccctgaggccggagaaagctgtttgctgtcggttgcaaaggagaagcaggtggattcagcggcttccccaccgctggagcagaatgaaacttcacttgcttcttccttcctttttaaaaataaacattatcttttaggaaaaaaataagacataaccagatggctgtgggtcatg

SEQ ID NO: 310798 - DNA, 835 bp, Homo Sapiens
acagaaaccaaccttttaaggacataatttcatctaaaacatgacgatatttagcacaccttttaatgtgggtatatatcaagtgtttaaggactggctagtatgtgatagagcaagacctgagactttataagtatttgctcgtgtctgttgacagacctctttctttcaaacttgttagaagagtggtaagacatatccaattggaaaataagatgcagtgttgtatagcacatacatttaaagtgcttgcgttaaaattagtttctcaataagataaaattattttaaaaatttggttcactttctttacaatagtggcaatttagcttttcagtattacaggaatttaaaaattggtttcttgtaggggacatctcaactttgggaatatcttcacttaatttttaaagaatattttcatgctttattgtccagctatacaatatgtcgcaaaatcctgacaagttcattgtattaaggtattaactattacatggaaagcaattctgttcatcttttgatgtttgtgttgaaaatgcttatctttgtgttttgatcttccaacagctgagagcttgaactgatttaaacatttgtcaatatacttaagaatgctttaagtaaagaaggggaaaattttaagtaagttttttcccttctaggaagaaaaactatgatgatgttaagaaaatgtcattatagagcttgctcaataatatgttctttaaatccacctccatttgtacattataggtatcattctgtttttgcttaaaataatctgcaaccatttcagatagttttacagcaaattgatctaaaagccactaat

SEQ ID NO: 310799 - DNA, 1383 bp, Homo Sapiens
  misc_feature (930)..(930): n is a, c, g, or t
  misc_feature (935)..(935): n is a, c, g, or t
ctgaatccatggaaaaatgcttacaggacttctgcttaccttttctcagaatcaccagccttcttcagcaccacctttttggggaagatttacctagctgccaggaagaagaagaattttcagttcttgccagctgcctgggacttctgccaacgttttaccaaacagaacatccattcatcagtgcctcctgtctggattggccagttccagcatttgatattataactcattggtgttttgagataaaatcatttactgaaagacatgcagaacaaggaaaggccttgcttatccaagagtcaaaatggaaattaccacacctactacagttggcctggagaattataacaccattttttcagttactaccacagaaaaacctgtagtgtctgcaccaaggttcctaaagatcctgctgtttgccttgtgtgtggtacttttgtatgcctgaaaggactttgctgcaagcaacaaagttactgtgaatgtgtactgcactctcagaactgtggtgcaggaacaggtattttccttttgatcaatgcatcggtaattatgcatcattcgaggtcaccgcttctgcctctgggggttccgtgtatttggatgctcatggagaggaagaccgggatcttaggcgaggcaaacctctctacatttgtaaggaaagatacaaagttcttgagcaacagtggatttctcatacttttgatcacatcaataaaagatggggtccacattacaatgggctgtgactctccacctcagcattgcatcgtatcatcattttcgctacgaatttatttttcaacaataagctttaacttaatttgggggattaacacttttgctgagggagaaaaagaaaacatacattatgaagcctttccaaaattaggtgcttggtaatcacgttaatggtataanttttnttttttaatatctggagaacattaataacaagttaaattattctttagtggtcattttttaagtgcacaattaataagaagcacaacttgttcacaaactcattcagaaatgattctcccaacaatgcatatcagctattcattgatacttagagtgggtgtgatttatttgacattttactgcttctttctgtctgtgtgttttaatttgcatctgccaagcataatgcatcttttttcctctgccattcttgtgttgattggagaatttttctgtatgtaattagaaaaaaatgtaaaacatgatttatgtgaaatactgtatagtaaaagttggtctaatagtagaactttaaaattttttcttattgtgaggaatctgttaaaagtttaaagctttgctgaaaactgaattcattctcaggaatttcataaatcttctccccag

SEQ ID NO: 310800 - DNA, 2103 bp, Homo Sapiens
ggtataactgtcaggtaaaaacagacaatcgtttacaacttgggggtcccaagtttaaaaaaagaaacctctactaccaagcacaccatttcacagacaggaaataaacgacatgaaaacagctcaagaaatacactaacgagcaaaaatatatgaatatatggggaaagaggaacgtgttgttttgacttaactgaagaaaccaagaggaaactggtctacgtatgaaaatgtgcatcctggaaagtcaggtgtcaagattttcgagtaggaatctatacgacttgaatctccccctatttcctgaataaaagtgacatctttcagtatttatacttcatggctcagacacctacctcatttggctctattccttactcactctagcctttacttaaatgagtctgaaaaacttggggatatagcataagaagaaaaataatcacacataatattcccctttctgtagctactttagacctgggttactagaaaattcctgaagaaaatttcaacgttaagtctgtggctttgttgaatcaagcccccctattaatatttagaaaacacccacggtttgggctaatagcattatcggtggtacctattatatagagggatagctgaataaagtctgtctcaaaaccagtgttaaatcactctcagggttgagaagaaaaaaggggagtctaaaatcacaacaagtaaagacatatctaggacccttgtccttctggatccacgcttccttcagggtcttcatcattataaatgttctctgccatttgccacacttgcatgatattgtcttctgatacagaacaaatcacccaaggttcattgggattccaggagaaatcagatatcttggcagtatgaccaccatgaataaacaacaactctggtggcccgtcttctgcatcttctggggattgttcctctccaattttacttaaatcccagacattcagtctgcgatcagtaccactggaagctaaaatagtctcattgtgaggtgaccactgaacctggaatatttcatccttatgtgactcaaaggaatgcaacttaagtttcagatttctcagatcccacaaggcaacagtcttgtcagctgatcctgtggcaagaatgaactcactataaggattgaaagaaaggcagttcacttcagcagtgtgagcatcaactgagtggcttggtttggaagtattgtttgaacgagtatcccaaatcataagtttctgatcatcagcaactgacccaaacagagacttatggagtagatgccaggaaacatcttctactactgccgtatgccctgtaaagatggtcttcgcatctaccacttttccctcctttggaacggcactgatgtcccacaggcagatggtatggtcatctgaagcactaagtaagtgcccactgagatttgggttccaagaaagcccatagccttccttctgatgtccacggagacgcaagtctgggttgcactctccagaaggatctggtttagaaggatgttttgtatagtcaaagacaagaacatcactggaaggagtctttgttgcgatgatacaagggttctggggcatataacgggccctgtttacttctccttcatggttgatcttgatttctatttcaatttttccactaactgaaccaaaacctccaaattctcctttctcactgtcgtagtgtgacgcatcaaactgagcatcatcattagggagctgcacactggctataacaagatggttttgttcatccgatgtgtgtgtccccaggacaagtcgatgaatgctgaaatctttcccttctggtctggttacatctggaagccactgggcagttaggctgggccactccagagcatgggtcatcaccaaatcataaagaaaaggggtgttctttttccatattttgtattcctcgttgatcactcgttcttccactgcgtcgtcgaaggctgcttccttgtcggccatggcgggcaggcgagccgggggaatcctggggtcgagcgttgcgggaggggcggggaggctgcaagagctcgctctgtgcgcgcggcctctattgtttcctgcgcccccc

SEQ ID NO: 310801 - DNA, 1155 bp, Homo Sapiens
aggtaagggtaatattttaatagtagtcagtaatctagcttaaggctgtaactcttctatcggggctaattgtatgaataggtgtcagtatgttgaagattactttcttttgtgactttcttctacctcatgccactgtttaaaagtaaaatgtattttaatgatgttagaataagactaccattctaaatatcacctacttatgaataacatgtaataatttttaacattaatgattccataaattgtattattgggattagaatgtgctttatgacaggttagtgtttcctctgaggcagaaaactcttttttggagatatcttccatcaagcagtactcgtgcccatatacaatctcttagtggctaggagaaataaataaaagggccataatggtttgttctctttcagacataatttagtaggggacaagaagtctgttcttcagtgagtacactagagatttactctggtgactgccttttgagttatgggtgaagtaaggtatggctttaccataaccttgattcattcacccttgattcatttctcgcccccgtcactgattatttccttgagcatatatctctgcctaacactttagtaggtgctatagaggatacatgaaaagtatgagatctggttccatccagtaagacattttaatagagaagatcaaaatgttacctggcagttggggaataatctgacttcgttggcagttggccttaacttcttaatcattgatccaggaatatttcaaccagagacacaactttctggcagacagacaaattgtacaacaccaacaatatcctggaccttgaaattctgtttacttcagtccattgtatcctttaaggcacctgtgctagcctagattttgtaataacactgatttatgagaatggacaaaagtggtagggaaattgttccctctccacttctgaaagtatgatgatgtattaaggatggaggagttattatgaacacttagaaattcagggatattgggtctttagccttatgaatttgagctgcttatttaattgggggaatttactacatattagtactatattcgtaaggattttttaataaccattacagattttacaaacagctagttatatggtaaacagattattatgcc

SEQ ID NO: 310802 - DNA, 3261 bp, Homo Sapiens
  misc_feature (30)..(30): n is a, c, g, or t
  misc_feature (33)..(33): n is a, c, g, or t
  misc_feature (1917)..(1917): n is a, c, g, or t
  misc_feature (1978)..(1978): n is a, c, g, or t
  misc_feature (1996)..(1996): n is a, c, g, or t
tcctatatatatttagcttttaaatacaantantgtaaatgtattaagagacaaatttctgttaaagttttcattgtttttcacattcaagtactgcacaagttaaaatctgataaaggatttacattcggttatctgaaactccccatctcatgacttttgtatttaatgtggtgggtaacttcatcatttccatagataccactcagcaggaaagtgtctcttttatggcttctaggactttcattagttagtgtgcatacagttttcatatttctatatcattgtcattatcattgctatcttcatcactttctaatgggatgccagtggcagctgcaagcaccatttagttatctcggtcaagaggaaaaaagccagttccactgaaagtgtcttgtctctggtagaagagtacatatgctgctttggacacaatttggtcttcagatgcagtggagacacatactgtcatcaaaatagtacccattttccatcatctttatttatttgcaaaagcagtatagtgtcctcctcccatccctccatagtggttggaaacagcaatcagattatagcggcaaggacctgcatttggattaattaagaattccgacatatccaagtcattgataggaaaatcaactaaggtatccaacttgtctctcatgtatcgactgtaagaaaatcgcttgagatgtactacaagtactggaggcagggaccataaatccaatttctttgtggcttgctgatgttctttacaattcggacaataccagggatcttcagcacctagcttttcttttgttgtaaaaagttcaatgcaatcttttaatttcacaaagggttttttaggaggtttatactccacactttcatgtttttcaaagtcctcagcagcattttcatcaaaatatctttttttcaaatcaggatcccaatccaaagcaagaaaagatctttcatctagcctaagctgcctatcatcaaatcttatatgcctggtatcatctttgatgtagttgatatcagtattgcctaagttgttgaactggaatgtagacaatcgttttttgtgtcccgtgagttgacctttgcaagtatcctcagtacataatccattttcagaatcattatctcctccaactgaatcttcagactgactgttttcattctctgagggaagttcttgatcctggctggattcatcatctggctcatctgtttccatttcacttggtgagccttcttcatgtatgccatttgggccattcccattaatattttggtccttacagcagtgtagggatccttcagtttcttcagtttcagtagatattttgacatatcggcacattctcaagagcaggagattataaagtttgtcttcagtattgtttcgtggtacagccataagaaagggctgaccaaaaagtgaagaaccagtatggtgggtataactcgagtgtctgaatttttctcttaggcaaacaggaataatcacgtgctctgtatcttctgtcctattgatgttaatttcaaacacataaatatcatcccgttccataatactactaaggttttcatccatagcgaatattctgtgaaatctatgattgtatatatcagtaactatcatcttatctgcaggtattcctgacaaagcagacaatgctgtacaaagatctaatatgtttccaattttggggacaaccactttgtactgcataggtttggtaagtggatccattctaactaagtaaacttccaaggtgcgttcttttttcatgggcaatggaagtgtcaagtaacaaaaaggatcaaatgttactgaaatcttagcacactcaggacaaactaaagttgatttgaaaaggccatgaaatatatctactatgatagaatcatttcgtntttaaatggttttcccaggcttcttcggcaaccaccttatctggccttccatctgcatctnttaattgtatatatggtnttttcctaattctattcaaatcctcatgtaatccatctaataggaaagctaacagttcttgacagtcttgctgctgatatccagagaactgaggtgcaaaacgtcctacctgtgtcttaaaggctcttggggtgacgtagctaaactttccagaccacatttgcttgatcagttcggcataagatttagctatttcacctctcattcctaagggattgtcaaaattcagttcttcttgatacttatcattgaggaaatactcagtaagtggaggtgtgttgctcaaacactgaatagctgagttcatgaaacacgtatttcccaagttacttaggccacagaggcctggctgttcattgtttcttccaggttccgaataatcatagttcttataagcggtatatgatggaagacagtaatttgagtttttcacatttctgttgttcatgttgttataattatttgatagagatgaaggagagatctttggtaaagttgaaaaattggatgcacctggggacttaggagtagaaggaccccttggccatgttccatcttcatttttctgttctatcactaatacctgtccttggtataaaccagcatcctgaatggtgctgtctggtttattcagtggttcaaatgtgttactcatgtatttgttccacaatctggtctccttttcatctggaatactgaagatttttcttatttccttttcaattgtatctattgtgtcagctttgctaaatcttcgagttacaacattattcatgtttccattttcacatagcttcaattctgtgagatatacttctactttgcagtgctttacaaacataccctgttcaaccacctttcgtgctattggctcttgaccttccatcaatgtgtaccagctgacaagtttattccaaccttcagttggcaacagtatgtaatccaattcatcaataagatgttccttaagtgactgggcatcaccatctttgagaagtccagagttatcaatgggtccaggatacacattttgatctcccatctggtatttgtcccaactgtcaaagccaacatattttttccactgtttgaaccagcgactatcgactaggtaccaggtgtcccctttccggagcgaggttttgagcagcgtcgcgatgtcagaccgctgggtgtccagatccgccgctccgccttccgccatcttcttccactagcggtaggggaggtggcagcgacggcggcggcacgccccagagcattat

SEQ ID NO: 310803 - DNA, 1073 bp, Homo Sapiens
  misc_feature (14)..(14): n is a, c, g, or t
  misc_feature (59)..(59): n is a, c, g, or t
  misc_feature (275)..(347): n is a, c, g, or t
caaaaggtccaaanaatgcctcccatgttcaacatcatggataacataaaaggtaatgncagtgtaaaaacagccagtaaatcaatgtatagtagcatatgcattctggtctagtaattacgcaattcaattaggaaatggctcccatagtaaataaatgttaaatatatctgttaataacaacatacctgtatgtagttcaaatacacaggcacaactgtttgcatattattattgaataatacactcccatagtttaaaaaaaacacttaggnnnnnnnnnnnnnnnnnnnnnnnnnnnnnnnnnnnnnnnnnnnnnnnnnnnnnnnnnnnnnnnnnnnnnnnnnttgaatccataatacaaaactctccaaacattacatgaacattctaaatggatacttatcattttctcagtaacgaaatagctcagctcacctaaaacagtatctggatgtgcaatgataaaatgcactgactcttatgaatttacttaaataattatttaagttaaattcctgcaaaagcctaattctgacctggctttacctggaatatatttttgggtatcagtaactgataccctcctttcttatcataaacaatacttctccatcaagagataccaataaagaaaaatatgtaaggaacaaaaaatgtgatggagaaaccaaccattccataggtaatatactgataaggaagttcaacttccatgtgctgtcttgcttttcgaatatcatcacacggtatattgaagattttgcaggctaaaggaatggtgatctttttcattacatctctgattattagtacaaataccatccctatgaggatccgcaatatggcttttccaaacagagtcacagtaatggggggcccagctaaaggtaatgtatctagagaaggatctaatactagacccatgttataagtaacatgagatccacatgcaattccagcaccacttcctagtatctcggctgtgtctcctcgggatgtgctccaggtgtcaagagtgaaagaaaagatccccaaagctaaatgaagcccgatgatgatgaatggagcat

SEQ ID NO: 310804 - DNA, 663 bp, Homo Sapiens
  misc_feature (492)..(492): n is a, c, g, or t
gtatcataaaatggttatttaattgaaacgtagtgtggtatactcttgatggttagaactcttacagccttatttatttttaagtttgttacagccaaagggttggagtgtgccagtgcacaggtagactaaggaaaacattatagaggagtgaagagaacagaccattgaaaagactattatctgaccagcggaggcagaaaagagaggaacccagttgaataggatccaatccctggttagcctctacacaataatagggagacaaggattaggagccatacctcccagagcaaggtatctttctagagcaaatttctctttctagaaggggagggtcacagggtcacagattcaccaaagctgaaagggctgaggagctcatggtagcctgggttgacctactctggagcacggtgtcttccttctaaactgagtgactgtagtactatctgtgcctctgatggtaataaaactgacaagatgtctaanttttttttaagtaggaccaaaggaaaacaagatttagatagtctgactttgcttttgaacaacagacattgcaagtcaaaattgttgtcaaatttacatatggtaaatgatgaactttaaaaatgtgtccaggtgtcagatgacttcattacactcttttaatgctaatgg

SEQ ID NO: 310805 - DNA, 962 bp, Homo Sapiens
  misc_feature (613)..(613): n is a, c, g, or t
gctgggtggcgaattcggcacgagggtgaatctttaataatttgtggacattaatacaaatctagagtgtgacagaacatctttgaattttatattctcacttaacaaatattggactaggcaaggtgtggatatctttccagctgaaaatctgatcaaggaggcaggcttcttggctccatgctaagaatcatcgatgatttgtcatattggccctcttgctggcaaaatcttagtttcttaggcagtggaatgaagcataacaaaacaaaatccctagaggctaggaacagatagtttgaaagagaagacactgtagcatgtgctgcttaagtacatatcttctgcttttggaatggaaactaggaagtcatttaaatagatatgtgtcttttttatcctatctgtagtaatttatgtgggatattcaaataggaaaatacaggctagcactgcatattgtatccatgtcttacattgtatacaaatgactattagatttaaatgactgttcaactagccccaatctaacagatcagagattgtggagtttcacttctttggactgtgtctttttcattttggcactgagtctgcagtcaccataaccacnttagaaaaaactgtattttttctgttctccctggtgggttctgagttttagaatcttgccttttgtgttgttcagtcatccaggtgccctttgccctctgtaagccattaaaccttttgaagaggcagctttgcctggaaaatcgtcagcggaatttgggaccccaaggacttttatgaagactggtgggcaggaaccctaacgcctgccgggggtgctctgtcccccagtgcctggagggcccacccgcggggaagttgacgactacgtccgcaactggtagtcgcggcccctgaatgccccaagacccgtgccctcgaacggacccaccttgcagtgccgccccagc

SEQ ID NO: 310806 - DNA, 857 bp, Homo Sapiens
  misc_feature (216)..(283): n is a, c, g, or t
ggtacaatgatgggagccctggcagagaattctatatggataaagtgctgatggagtttgtggaaaacagtaggaaagcaatgaaagaagctggtaagggaggcgtcgctgattccagagagctaaagccgatggcttcgggagcaagttctgcttgaacctagccgacggttatggaaacccattgacattccaaaacaatatatacacataacnnnnnnnnnnnnnnnnnnnnnnnnnnnnnnnnnnnnnnnnnnnnnnnnnnnnnnnnnnnnnnnnnnnncacacacacacataaatcagccaaaatcagagaaaaggaacagggatttaataccttttttatgcttatttttgtcaaacatgtactcctttcatacgggtggcttttacaaggctacttccgtcatttaatgttttcaactgtaattgtcttaatggaaatgttaaaattcatatctgattaacatttttaataacttagaggagattttaactttatttaaaaataggtaaaattattgtacctaattatgtctaaagtttattcaggggtaatttccctgatgtctgtataaaatcaagatcttattttactgatgcataagtcctagtgggtcaagactaggcatatgctttcagataaataaggaattactccaatcagttttccccaatcaaagaagccatgtcattttacttttagaaacatacaattgggcccaatatgggaattttcataatagttcatacatttgtcagccaacattaaaaggtaaccaactcctcaggtatttgtagtttaccctaacgcttctttaaaagaaagtaggtaaaaaaagttcctttttgactct

SEQ ID NO: 310807 - DNA, 363 bp, Homo Sapiens
aacatagccaaataagatgactggggagaaaacagattaacacaaaaggtcccacctgtaagggcaacttcctaaagctagatatatagaaccgatggttttaaacataaaacttgattatgtagaagtttgcaaatgaaatatatcacgaaagcaaattcccatgcagctttattcacctcaaccatgtgtaatctacttaaggtgactagtgccactataaggcattactgtcccagggtgacaagaagcaatatttatactcaattcctgaaactgggggtctgatatgctttttaaaaatcctaaactaactaatatcagtagccatggagtcatcggcttgagggtaaactaatcccc

SEQ ID NO: 310808 - DNA, 531 bp, Homo Sapiens
aagacctgttactcaaggcttacgtgctataaatacgacaatgaattttattcttttataggaccaaggattaaattctctactattgactggatattgtcacactgaggtggctacttgatgttattttggaaggaagaggtcaatgaattacacaaacaaattttcttattgtgtcagcatgatctgacttaaaatttcttaacctggagaaaatatgtattttgcacattaattagaagttccatagaaacccatttgtagctaggtttttgtccaacatgaaaattcgtattagagctaagaaattatggatttgggctgggaattctaggtcaaatctgagagagggggtggggaacaggaaggttagaagaacattcacaggggtttagcaagaatgaaaaccggaagggcaatgacaaggacacgatgatggcatccaatacagcaaacttcccctcctgaagaccaacactcttccttaataagataatatgaatttcgttcagagagtaatgtgcctagctc

SEQ ID NO: 310809 - DNA, 572 bp, Homo Sapiens
  misc_feature (303)..(308): n is a, c, g, or t
cgtcgcctctctttgcttctacttcgctttctttcacggcttttgctctttttcctttctctgtctctacttcgcttccgttccttacttttgcttctctttcgttcatgactacgacttctgctcttgctttttttcctctttttgctacgttcttcatggccgttggcactgctcaacttgttctcatccttcttgtaaggagcctcaagcattgcttcaatatcaatatcgtctgccattttctctaaacgcctgttccggccttcgggcgcctgtggtgctcgtgttcgggaagagatnnnnnntgctgctgctgctgctgccgccgccgccgcttctgttgctactgttaagcccctaggcccaggccgcggaaccgcccagcccgaatatcgggttccaaggacggctaggcccgagagaatctaaaaaaaacaatggaattagagaagcccacgcgggagagcaggacggcggcttcggcagctcaggatccacccctgcgacagcgtcgacaagctccctgaaatggcggccgctgcttccctgtactcacattcaccagcacc

SEQ ID NO: 310810 - DNA, 1963 bp, Homo Sapiens
  misc_feature (14)..(14): n is a, c, g, or t
  misc_feature (57)..(57): n is a, c, g, or t
  misc_feature (92)..(92): n is a, c, g, or t
  misc_feature (103)..(103): n is a, c, g, or t
  misc_feature (147)..(147): n is a, c, g, or t
  misc_feature (472)..(472): n is a, c, g, or t
  misc_feature (1028)..(1039): n is a, c, g, or t
  misc_feature (1765)..(1788): n is a, c, g, or t
ttgttgccttacantttaagtcctccaagattacaaaaattaaaaaaattttccccntattaaacatgttaaaattttaactttccttatanagtttagatanttaaaagttatcccagatttaacaatgttgaaagtggttaaatnataatttcccataaaacatgaaagtcctgttttgagttttattcccatgtgctatggtccctttggtcagtaccatggctctatttctgcctaagccccaagtggccatgctagcagccagccactatcgatttcctgtgaccgatgccattcctgagatcttcgcccatttccgttggagggttgggactgtaagagcttgatgccacctctgtcacacatctcgccctgaagcaaacagggattcacactgctttagtaatgttgactcccaagaacccaagaaagtcaattaataatccaccaggtccagcctaaacatttnggtacttccatacctgtttacatggaattacatccatgttaaaaaaatctaagacacaagattcttaccattaaaacagaaagtagctcttcaagagtctaagcattacaaaattacatacactatttaaatctatcaagaattcatccaaattggtaccacatggtcgtgctatacaatccaaaacaaatgtattatttttaaaaggtttagtgaaatgtttattttaaagtttgattacatcagctataggagtaaagtgctaacttacaaagcttacagtttgtgaccccagtgataatgcatgcatactgctattttcaccaccaactggtgaaacaatgaaaagacagtttacttttactgagataccgaaatgagtcaaagactatattagccaatataattcctttgtttttagtgtgaaatactatggtagggcctaattaaaaataaaaacaatatggagaacagtaaaacagtcatcaagtgactctaagcttgtatttactctaagcttgtattaagcttgtattgactctactgcctcttgtannnnnnnnnnnnaatttctattcagggatccaagaattttagtaattattaactgagcagcagattgccactggactgttttaagatttactatcaccagtcttacatagatacataaattttaaaatctcacccatttcttcttataagactattagaagatttaacttgccacagactggtcatgctttgttattcttggacccctgctttttcccaaaccactacattcacctttttgctataccaaactggaggtggtaattcttagttgagtcattttacctaggggaccacggtacagcgataagtcactcaattactaccttatgattgacagttcacactggaatcaaaggtgaattcatgggagtagaggtgagatattgttaggccagttttccaagagagattgattggcatttttttattacggtgaagttgaaactattgcacaatattattccatccatagcatatatttacttttgtaagttacacgtaatgcatctctgataagataaatcaagagggctccggggaggttagtttacatttcagcagtagtttcgtgaataatgctaaattaagaaatatataaacctcaccgacatgttttttctcaccttcttgtaaggagcctcaagcattgcttcaatatcaatatcgtctgccattttctataaacgcctgttccggccttcgggcgcctgtggtgctcgtgttcgggaagagatnnnnnnnnnnnnnnnnnnnnnnnncgccgccgccgcttctgttgctactgttaagcccctaggcccagtccgcggacccgcccagcccgaatatcgggttccaaggacggctaggcccgagagaatctaaaaaaaacaatgggattagagaagcccacgcgggagagcaggacggcggcttcggcagctcaggatccac

SEQ ID NO: 310811 - DNA, 349 bp, Homo Sapiens
tatctcagtaaaagtaaactgtcttttcattgtttcaccagttggtggtgaaaatagcagtatgcatgcattatcactggtgtcacaaactgtaagctttgtaagttagcactttactcctatagctgatgtaatcaaacttttaaacatttcactaaaccttttaatgaattcttgatagatttaaatagtgtatgtaattttgtaatgcttagactcttgaagagctactttctgttttaatgttaagattcttgtgtcttagttttttttaacatggatgtaattccatgtaaacaggtatggaagtaggtgtttaggctggacttggtggattattttgctttct

SEQ ID NO: 310812 - DNA, 373 bp, Homo Sapiens
gtcgacgctgtcgcaggggtggatcctgagctgtcgaagccgccgtgctgctctctcgcgtgggcttttctaattccatatgttttttttagatatctctcgggcctagccgtgcttgtgaacccgatattcgggctgggcggttccgcggcctgggcctatgggcttaacagtagcaacagaagcggcggcggcggcagcagcagcagcagcaatctctttccgaacacgagcaccacaggcgcccgaaggccggaacaggcgtttagagacttggctaacgatatctcacactctactcccatggattcacctttgattccagtgtgaactgtgaatcataaggtagtaattgagtgacttatcgctgtac

SEQ ID NO: 310813 - DNA, 497 bp, Homo Sapiens
  misc_feature (246)..(246): n is a, c, g, or t
  misc_feature (250)..(251): n is a, c, g, or t
atgtgtgctggtgaatgtgagtacagggaagcagcggccgccatttcagggagcttgtcgacgctgtcgcaggggtggatcctgagctgccgaagccgccgtcctgctctcccgcgtgggcttctctaattccattgttttagattctctcgggcctagccgtccttggaacccgatattcgggctgggcggttccgcggcctgggcctaggggcttaacagtagcaacagaagcggcggcggcgngcanngcagcagcagcagcagcaatctcttcccgaacacgagcaccacaggcgcccgaaggccggaacaggcgtttagagaaaatggcagacgatattgatattgaagcaatgcttgaggctccttacaagaagacttgcctaacgatatctcacctctactcccatgaattcacctttgattccagtgtgaactgtcaatcataaggatgagaacaagttgagcagtccaacggccatgaagaacgtagc

SEQ ID NO: 310814 - DNA, 511 bp, Homo Sapiens
  misc_feature (437)..(437): n is a, c, g, or t
  misc_feature (458)..(458): n is a, c, g, or t
ctctgtctctacttcgcttccgttccttacttttgcttctctttcgttcatgactacgacttctgctcttgctttttttcctctttttgctacgttcttcatggccgttggactgctcaacttgttctcatcctaagcagggttgatagaagaacatcatgaggacgaagtggtaacatttcaagttgtcaaagggtaaagggaacaggaataagaaaatacaaaacaattttaaaactaattatttacttatagtttaacatggaaggctataaaaaaatttagatgggtatgtgtttaaccactttgttgcttacatttaagtcatcaagatacaaaaataaaaaaattttccatattaacatgttaaattttactttcttatataggtttaggatattaaaagttatcccggatttacaatgttgaaggtgggnttaaatataatttccattaanacatgaagtcctgttttgagttttattccatgtgctatggtccctttggtcag

SEQ ID NO: 310815 - DNA, 665 bp, Homo Sapiens
tcttaaagagggtcccccagattgcatcagcttcaggtcctgcaaagcctgagtgcactctggaaacagaatagccggggagagagagagaagcccatcctcaggccacctcattcccgaggccctctccagttctcacccctgcactgttataatgaagggcagctttcccagggtcatctcagtgagtctcaactcctgtgaccaaaatagcctgagccagcaccagggtctggtggtgagacaagcttttgctttcagtgggaaggctcaacctgcttctcccaggggtgacaccaaaacaggaccctgggtctgagagctggttcattcagggagaaagccctggcacagactgggtgttggtgctgtccttagagagggctgccacaggggcctggtgcaggtgctccctgccagagctgcaccccagctccagtgtctggagtctccatgcagcccaggctggcccaggtccaaacttacctctattccaggggttaaaaagcagtgtgaactgacccaaggggagttgctttctgcctgagacctgcagcagaagcgagtagtggccaatgacagcgtccgcaggtgtggtcacagagatggtccaggactgggcatctctctcctccaccactgcactccaccactttcggtccccc

SEQ ID NO: 310816 - DNA, 1075 bp, Homo Sapiens
  misc_feature (1002)..(1002): n is a, c, g, or t
  misc_feature (1016)..(1016): n is a, c, g, or t
  misc_feature (1044)..(1044): n is a, c, g, or t
  misc_feature (1050)..(1050): n is a, c, g, or t
  misc_feature (1059)..(1059): n is a, c, g, or t
  misc_feature (1065)..(1065): n is a, c, g, or t
ttttttttcttcctaggcacatgtttggtttagattgtagaacaagggttggcaggagagtggtgatagagctggaagtttaagctgatagttcaggggctaccacggtgacgcttttatagttggttaggttctggaacatgttgcagtccacttccacagtgagtctctggagccccacatgtgttggcgtgaactggaacttggcacacatggtgttttcaggccacactgaacggaatctgtagctcctctctctgtgaatgagcccccttcccaggatggagatcacacagtcctccatgggggcatctagggagttctggaggctgactgaggctgtgaggggttgatactgctctgctttctctggcatcttgatggcaaggtgtggtctacaaatggcaatgtcttcctgagcaaagcagctaaggttggattcagagtgtgttgccatggcggtgagtctaaggaaggtgttctcgggtgggtttcgctcaaaattggagaagaacaggccgatggttattatcttttccaggttggcactgagcgtgaggtgcagcttcttcctccagagcttggcagcaaggacaccgttgtagtgtacagcctggaccccaattgccagctgcactgccttctcctgctcactgtgattaaccagcgtcactgagatctgggcatcccctctcaggggtagggagctgggtgctttcaagagcaggtacagaggactggcagtctcgagactgggaggacggatgccgttgtctttctcacgttccattttctctttctcgactctctccagcacctctttttcctgaagagacccttcaggatacttgtagttctgagtgatgtcctcgcagcggtcactgcccacacccttggtgctgatgttgttgccaacatactttgtgttggagtcagtcaactccagtgtcccatcctcacagcacttccagaccacacatgaggcatttttggcagcaaaangtctgacaatgctnggggtcagcccagcgtcccctccttgantctctnaacggcacnagatanaggacccagg

SEQ ID NO: 310817 - DNA, 2055 bp, Homo Sapiens
  misc_feature (18)..(18): n is a, c, g, or t
  misc_feature (26)..(26): n is a, c, g, or t
  misc_feature (49)..(49): n is a, c, g, or t
  misc_feature (58)..(58): n is a, c, g, or t
  misc_feature (66)..(66): n is a, c, g, or t
  misc_feature (125)..(125): n is a, c, g, or t
  misc_feature (370)..(370): n is a, c, g, or t
aaggggccctaaccccanttgaaacnccttttaaaaaaattggtttaangtttcctgnaaaaacangtttgcaaatccccacttccccacaatgaaatcctcctggaaccccccacatttgttgnccttgaaactggaaacttggcaacacatggtgttttctaggccacactgaaacggaatctgtagctccctctctctgtgaatgagcccccttccccaggatggagatcacacagtcctccatgggggcatctagggagttctggaggctgactgaggctgtgaggggttgatactgctctgctttctctggcatccaggttggcactgagcgtgaagtgcagcttcttcctccagaacttggcancaaggacaccgttgtagtgtacagccttgaccccaattgccagctgcactgccttctcctgctcactgtgattaaccagcgtcactgagatctgggcatcccctctcaggggtagggagcttggtgctttcaagagcaggtacagaggactggcagtctcgagactgggaggactggatgccgttgtctttctcacgttccattttctctttctcgactctctccagcacctctttttcctgaagagacccttcaggatacttgtagttctgagtgatgtcctcgcagcggtcactgcccacacccttggtgctgatgttgttgccaacatactttgtgttggagtcagtcaactccagtgtcccatcctcacagcacttccagaccacacatgaggcatttatggcagcaaaaaggtctgacactgctggggtcagccccagcgtcccctccttgactgctctgaccggcaccagatcacaggaccccaggactccacctccattaggagcacttgggtgcagaatctgccatccatcataaccctggggcaaggcaggccgcgtcatccagcactctgtggaagtctggaagatccagattctgcctctctggccttctccgttctgaagtccctcctcattatagtattcatctatgagaagacgcccaccggtgccctgtgctgaggcaaacgtggtcaccacgcgggcagggattcccaggcatcgcagcactgtgcaagcaacagcagccaacacccagacctggccatcatacacaggtcggcctcggccggtgagccactgccgcaggatgggcacgctgccccggcgcttgttcagcaaggccccttcctgggtggcctgggtctgcggggtgggcaggaccctctgctccttgagaaaatgcagcaaggcacccaacacacgggccacgtgcaccggctggctccacttctctacctgcttgtccttgctcagcaagcgcaggctgaggtcaatgacatccccctcgaactggccaaagtcccaggactctgcctggatgcagtcagctgtacccaggtagatgagaccattctggttcaacaagtactccatgcgctgagcctcattcttcaggaacacagcatcctctctattccaggggttaaaaagcagtgtgaactgacccaagaggagttgcttcctgcctgagacctgcagcagaagcgagtagtggccaatgacagcgtccgcaggtgtggtcacagagatggtccaggactgggcatctctctcctccaccactgcactccaccactttcggtcccccagactggaaattgggaatgtggcttgggtcctgttgatcttggaaggctgctctccagtttgtgcagtgagggccaccttcttcagggcaggcagaaatgcacggactggagcgcggaagtacaggatgatggtgaagggctgccccctcctcacaaagaggcgccgggagctgagggccttggtgtggtgctcctcattgtttcttgctgcctgaaagtcacagctcttgatacccagggcctgtcccatggttgcaggccgctcctcttatccacttggccgcagaaagcgcctctctcaaactgttgcttctgggctccttctgggctttctgtcttccagacagaaaatatgaaggcacttttg

SEQ ID NO: 310818 - DNA, 413 bp, Homo Sapiens
  misc_feature (350)..(350): n is a, c, g, or t
  misc_feature (360)..(360): n is a, c, g, or t
  misc_feature (367)..(367): n is a, c, g, or t
  misc_feature (373)..(373): n is a, c, g, or t
  misc_feature (382)..(382): n is a, c, g, or t
ctcttcctagcacatgtttggtttagattgtagaacaagggttggcaggagagtggtgatagagctggaagtttaagctgatagttcaggggctaccacggtgacgcttttatagttggttaggttctggaacatgttgcagtccacttccacagtgagtctctggagccccacatgtgttggcgtgaactgggaacttgggcacacatgggtgttttcaggccacactgaacgggaatctgtaggctccctctctctgtgaatgagcccccttcccggggtggagatcacacagtcctcccatggggggcatctagggggagttcttggagggctgacttagggctttnaggggggttnatacctnctcctnctttctctnggccatctttatgggcaaagtttgggtctac

SEQ ID NO: 310819 - DNA, 676 bp, Homo Sapiens
  misc_feature (288)..(302): n is a, c, g, or t
tccatgcagtacaatttatttgggggcagcttattccagcctggggggaggtgctctcctgccactgtactctgttaaactcagcaaacacttctcacactgctacgaagggtctgtttacttatctgactgcagttggcatcgtgtttttttcctgcttcaggcccaataaatatgtgttgaatgaatgaatgagagagaacatgagagtgagcagcaggggctcaaagccatctctagagactgcagggggtgccctgtggctgctgctgcccaaggaggggccannnnnnnnnnnnnnncggggggtgtctggtggggccatagagcattacccaggttggcactgagcgtgaggtgcagcttcttcctccagagcttggcagcaaggacaccgttgtagtgtacagcctggaccccaattgtcagctgcactgccttctcctgctcactgtgattaaccagcgtcactgagatctgggcattccctctcaggggtagggagctgggtgctttcaagagcaggtacagaggactggcagtctcgagactgggaggacggatgccgttgtctttctcacgttccattttctctttctcgactctctccagcacctctttttcctgaagagacccttcaggatacttgtagttctgagtgatgtcctcgcagcgg

SEQ ID NO: 310820 - DNA, 1801 bp, Homo Sapiens
  misc_feature (150)..(156): n is a, c, g, or t
  misc_feature (158)..(166): n is a, c, g, or t
  misc_feature (168)..(174): n is a, c, g, or t
  misc_feature (178)..(179): n is a, c, g, or t
  misc_feature (182)..(183): n is a, c, g, or t
  misc_feature (185)..(207): n is a, c, g, or t
  misc_feature (209)..(222): n is a, c, g, or t
  misc_feature (225)..(229): n is a, c, g, or t
  misc_feature (231)..(231): n is a, c, g, or t
  misc_feature (253)..(266): n is a, c, g, or t
  misc_feature (806)..(820): n is a, c, g, or t
ggggggaaattccaagcccttgtcctgggcccggggttttcttagggaaccagtattgggccatgttccctttccctttcggggggccgcgcgccccaaagaaatggttttaaaaaaattttttaagggcccgaggcgggccaacaaggnnnnnnngnnnnnnnnngnnnnnnngggnnggnngnnnnnnnnnnnnnnnnnnnnnnngnnnnnnnnnnnnnnttnnnnnancgagcaagaatctgttaacagnnnnnnnnnnnnnnatgttaaataccatgggacaggattgtaaggatgaaaaactcagtcaacaactgcctcacaagggataagaaaaattctgccatgatattagcaaaggtaaaggaggaaaaatttacactgtaagaggcaccatttccccaaggaatacctcttggcatttcctgaatgagtgggattagcaatctaaataaatcatatttcaagaggtaacagcaacagataaaatttaaagggattattaaaataacatttacaagactctgaacaattcttgaactcttattaaaaccacaaagaaagaacaattctttatttatgaatttcataaaggactcaatgtgcaactgacatctgctagtgatgatctggtaatatacaacctgtccagtagccgaacagtttgtttttattgtgttttctaaccgtaagagatcattaaaggcaaagcctatatgacgctgtacacacaaaaaaatggtcaccgtgggccatactaccaatgaaatggtaggtaaacaaatctttttctggtcaagagnnnnnnnnnnnnnnngaaacagcactctgcatgcttcactctacaagatgaatttccctagaaagaatccaatgaaaatggctgcaattacaacaagaagtgaaggaagaggactggtgacattatctctgaaggatgcagttgaggttgatccaggtttatccgaatgtgctacctttctgagccttaaaccttcatctctcaggtgccgattttcttctgatagcttcatcatttctccctgaagtcttttacactcttccattagtttccttgtttcggtatcattaagtgaaacactgtgtggttttggcataggtccatcttgcttagatgcattcagtggaacagctttgctaggttccatatcattcaatttatcattttcattgggcatttcaaatacgcatctcaatttggaatccattaattcatcaggttttgcctctttccacacagcttccatatctgaagtgtttggtggagcaaaaattgtctgtaccataaacttgtgtttactcttttcattcggatcatagtcaaagggctgtagcattactgaaacagtcacagttgaccctgggtcaataattccactgttgggcctcacacagtaccggcgaggtgctgtagtcttcactttgaaacacacttttctatccgatggatttcgcaatttaagatttgtagtgactacatctgtgaaggggcctttgaatttgaggtctgtgggcggatcgaggaccaggatctgctcgtgcttcgccatggcccctgaggcggacgccatcggagagacagcgcagagcgggggcgcgcccgcggcggcggtttgctgactgggggcgggggacgacggcggcgacggctcggccgagctctaggacgaggccaggctcgcggctcccgagccctaacgcctgccgctgtgtcaccggttcggtgggccacccgctgggtcagcagctccgggtcccacaactgactcaaccccac

SEQ ID NO: 310821 - DNA, 382 bp, Homo Sapiens
aattcatgaggttttgcctcattccacacagcttccatatctgaagtgtttagtggagcagctgtagcattactgaaacagtcacagttgaccctgggtcaataattccactgttgggcctcacacagtaccggtgaggcacggtagtcttcactttgaaacacacttttctatccgatggatttcgcaatttaagatttgtagtgactacatctgtgaaggggcctttgaatttgaggtctatgggcgggtcgaggaccaggatctgctcgtgcttcgccgtggccccggaggcagacgccattggagagacagcgcagagcagggggcggcttgctcgctgggggcggtggacgatggcgagaggggagggggagcgagt

SEQ ID NO: 310822 - DNA, 634 bp, Homo Sapiens
ccaattcatgaggttttgcctcattccacacagcttccatatctgaagtgtttagtggagcaaaaattgtaccataaacttgtgtttactcttttcattcggatcatagtcaaagggctgtagcattactgaaacagtcacagttgaccctgggtcaataattccactgttgggcctcacacagtaccggtgaggcacggtagtcttcactttgaaacacacttttctatccgatggatttcgcaatttaagatttgtagtgactacatctgtgaaggggcctttgaatttgaggtctatgggcgggtcgaggaccaggatctgctcgtgcttcgccgtggccccggaggcagacgccattggagagacagcgcagagcagggggcggcttgctcgctgggggcggtggacgatggcgagaggggagggggagcgagttcgcatctctccttttcctggttagactctgttcaaccacattcttatgttggcagatctgcttccagattgatttttagagcaccatcactttcacattcctgattctgattttgttttggtttggttggggtttctgaaacttaaaatgctgccccgtggggggaaatacaggatccttcagcacttgagggtt

SEQ ID NO: 310823 - DNA, 773 bp, Homo Sapiens
attcggcacagcatgaagtgaagcactgtgtggttgtggcgtgggccgtcttgcttagatgcattcagtgggacagctttgctggttccatgtcattcaatttatcattttcattggggatctccatttggaatccattaattcatgaggttttgcctcattccacacagcttccatatctgaagtgtttagtggagcaaaaattgtaccataaacttgtgtttactcttttcattcggatcatagtcaaagggctgtagcattactgaaacagtcacagttgaccctgggtcaataattccactgttgggcctcacacagtaccggtgaggcacggtagtcttcactttgaaacacacttttctatccgatggatttcgcaatttaagatttgtagtgactacatctgtgaaggggcctttgaatttgaggtctatgggcgggtcgaggaccaggatctgctcgtgcttcgccgtggccccggaggcagacgccattggagagacagcgcagagcagggggcggcttgctcgctgggggcgggggacgatggcgagaggggagggggagcgagttcgcatctctccttttcctggttagactctgttcaaccacattcttatgttggcagatctgcttccagattgatttttagagcaccatcactttcacattcctgattctgattttgttttgttttgtttgggttttcttgaactttgctgctggatcttttgggggaaatacaggatcccttcacactgaggtgttta

SEQ ID NO: 310824 - DNA, 917 bp, Homo Sapiens
gaattcatgaggttttgcctcattccacacagcttccatatctgaagtgtttagtggagcaaaaattgtaccataaacttgtgtttactcttttcattcggatcatagtcaaagggctgtagcattactgaaacagtcacagttgaccctgggtcaataattccactgttgggcctcacacagtaccggtgaggcacggtagtcttcactttgaaacacacttttctatccgatggatttcgcaatttaagatttgtagtgactacatctgtgaaggggcctttgaatttgaggtctatgggcgggtcgaggaccaggatctgctcgtgcttcgccgtggccccggaggcagacgccattggagagacagcgcagagcagggggcggcttgctcgctgggggcgggggacgatggcgagaggggagggggagcgagttcgcatctctccttttcctggttagactctgttcaaccacattcttatgttggcagatctgcttccagattgatttttagagcaccatcactttcacattcctgattctgattttgttttgttttgtttgggttttctgaaacttaaaatgctgccccgaaaatactatatttttgagtttgtgttctgaaagcctccgtgctgctggatctttggggggaaatacaggatccttcagcactgaggtgtttaagatttgcaactagcaatgcaattttttctaaatatggggatatttacctttattaagaaattatactaaacattgatgtccttgatcattttatgttctcatattacttttgattctactatgattgtgtggtggtgaacaaagatcattacaaacaaaaactgtaattttgttatatttgattcaatggaatttacctaaaaaataaagactaaaaatgtggtgtg

SEQ ID NO: 310825 - DNA, 537 bp, Homo Sapiens
tctcttgaccagaagatttgtttacctaccatttcattggtagtatggcctgcggtgaccatttttttgtgtgtgtacagcgtcatacaggctttgcctttaatgatctcttatggttagaaaacacaataaaaacaaactggctactggacaaattgtatattaccagatcatcactagcagctttcagttgcacttcagtcctttatcaaattcataaagaattgttctgggaagtgaggagcacctctgcctggccaccctgtctgggaagtgaggagccccgcttcccgggagccgccccatctgggaagtgaggagcgcttgcctggccgcccaactgtctgggaagtgaggtgtgcctgtgcctggctgccgcactgtctaggaagtgaggtgcgtctctgctgcccgccgccccatctgggaagtgaggagcgcctctgcccggctgctgtgcaatcctgcaagtatgaagtgacagccttgtgtgtgatctttctgccctccccaagtttgcattttcgacataaaatt

SEQ ID NO: 310826 - DNA, 1967 bp, Homo Sapiens
agagtcaaagactgatgttttattttataacaatatttaattattggacattttatgcaaaatagactttgatcagatagcatttgagctcgttgcaaatagtcaacatgcaaaaggaattaagaataatattcatgcaaggatacaacattactaactagactatttttaaaataaaaagcactacctaaaatcatcatattactactttacacacatgcatttctttaattatttttttacatagatttctcacatctattcttgcttcatgggtttcagttttataatttttgggattgaagacatagtgtctacattaagaaactgacatgtttactctgtatttactcactgccaaaagctttttgggaatcctggagaagatctatttgattatctgttttatgagtaacatcccctcaattaattattgaagagcaagagacagcatcagacataaggacatttttacactggccatttgggacttaggatctattcactctggtccatactctctttggttactccctttttgtttatttggacttgattctggataatgggaaaggaagctggagagcaggaatggtgtttagacttcaggttccagctggctgtggtcaccatgtccatggaactgattgtcaagttatctcgtcttagggaccttccaataaacagaatcatcatagcagttctggtcagatggctgtccccagagaggcaactttagaattaaacctgtcatcagacctccaacaactgctgttccgatagaggaacccagtgcagctgcctgcatggccatagacgtgttggaggcgcccattgctactgccacaatgcctgcaaggcctcccactacaccaggtaagccgtggaggttatggaccccacatgtatcatggatcctcagtttagtagtaaaaagtggagtcaggaacttgtatccaagcacagagaccattcctgcaatgctcccaataatcatagaaccaaatgggtgaattgccatatccgcacaagtgcccacagcaactcctccagcaagggtggcattctgaatgtgaaccatgttgagcttgcctcggtgctccactaggctggagaaggcaaaggctgtgagcacacaggcagcgagagagaagtacgtgtttacaatggccctgcactgtttgtctccaggttcagcaatggccgagttaaagctgggccaaaacatccacagaaagagagtcccaatcattgcaaacaagtctgagtagtatgcggactcttcattttcatgcccctttctcagtccagatcgatacaagatgcctgctacagccaagccaaagtaggccccaaaggcatggatcgtcattgatgctccaatgtcagaggccttaaatatttcactaaccaggtattcattgtgggcaaagaaaacaatttctaaaattgtcatgatcagcatttgggtggggctcgtttttcccaggacagctccaaaagatatcagaactgtggctgcactgaagtctgcatttatcatgtttttgattccaatgttaaatttctgtccctggctttgcaggattccctgtacaatagtgccccactggaggcccaaagcagcaacgagtaggttgatacccacactgctgaagccatatttcttcaggaaggtcatgaggaagccaaacccaacaaatatcataacatgtacatcttggaacagaggatataactcaaagaatatgcccatgtctgttggcttggtgatgttgagctgctcgagaacagtctggtccgtttcatactcaacaaataatccaaataaaacaatcatggcaatttccaggactatagccatgagagggaatgtgaacctcatgtttgtggcaaaggacagaggcacactgagagcttcacaggctgtgagatgttgataagaacaaaggactgctctgtgtgtc

SEQ ID NO: 310827 - DNA, 409 bp, Homo Sapiens
  misc_feature (203)..(203): n is a, c, g, or t
  misc_feature (295)..(295): n is a, c, g, or t
  misc_feature (350)..(350): n is a, c, g, or t
  misc_feature (384)..(384): n is a, c, g, or t
  misc_feature (390)..(390): n is a, c, g, or t
gcaaactgcatcctctggactgtcttccatattcagaactaatatcccctcttttggttcactacagggactctctttctgtggatgttttggcccagctttaactcggccattgctgaacctggagacaaacagtgcagggccattgtaaaacacgtacttcttttttcgctggcctggtgtggttcacagcctttgccttnttccagcctagtggagcaccgagggaagttcaacatggttcacattcagaatgccacccttgctggaggagttgctgtgggcacttgtgggnatatggcaattcacccatttgggttctatgattattggggagcattgcaggaatngtctctgtgctttggattacaagtttcctgactnttaagntacagcagatgttctgtag

SEQ ID NO: 310828 - DNA, 423 bp, Homo Sapiens
  misc_feature (33)..(33): n is a, c, g, or t
  misc_feature (46)..(46): n is a, c, g, or t
  misc_feature (59)..(59): n is a, c, g, or t
  misc_feature (71)..(71): n is a, c, g, or t
aaaaacatctggctggtaccttaaaagtcgggnaacttgtaacccnaaagcacaagagnccaatcccctgnaatgctccccaaataatccatagacccaaaatgggtgaaattgccccatatccccgacaagtgcccccacagcaactccctcccagcaagggtggcattcctgaaatgtgaacccatgttgaagcttgccctcggtgctcccactaggctggagaaggcaaaggctgtgagcacacaggcagcgagagagaagtacgtgtttacaatggccctgcactgtttgtctcccaggttcagcaatggccgagttaaagctgggccaaaacatccacagaaagagagtccctgtagtgaaccaaaagaggggatattagttctgaatatggaagacagtccagaggatgcagtttgc

SEQ ID NO: 310829 - DNA, 700 bp, Homo Sapiens
  misc_feature (178)..(252): n is a, c, g, or t
tttttgctttagaaaataccataacttctgattttatctggctgggcacatcatctcaatttctttctataaataggtagttcattcagtttcttttcatttatttatttttcttttacacttgacatcccattgaaagaaaaattttaaatttattatttataatttttgtagagannnnnnnnnnnnnnnnnnnnnnnnnnnnnnnnnnnnnnnnnnnnnnnnnnnnnnnnnnnnnnnnnnnnnnnnnnntgtgtgagctacctaccatgccaggctaactcaatttcatcacacctatgcacacagatatctaggcttgaagtgtgtaaagctttcactaatggagtcatcgtttacattcttgtttagaatactgtacagtaccttccaataaacagaatcatcatagcagttctggtcagatggctgtccccagagaggcaactttagaattaaacctgtgacggtagagggaaaatgagtcatgttgtgacgctgaagaggaaaatctacttgcatagtagcttatatactattataaaatcatcccctttaaatgacataattactttactgccagaagtttagaacatttttgaatttagcaattgacttgctcattaattatctattgtaaataatctgagagcataagatacagggaagtgttcactttttatgctgacctgtcatcaga

SEQ ID NO: 310830 - DNA, 2075 bp, Homo Sapiens
  misc_feature (1055)..(1055): n is a, c, g, or t
aattatgatcaacttttattgattttacataaatagcttatagaatgcctttacaaactatgtttttgcaatatatttgttacaacacacatttccttatgaatgtatttgttaaatctttttgcagaggaagtagggaaaagtgaggggagaagaggaggaataagattttagaactaatcgtcagcaatgggcctaggtatttggcaattatttcctttacaaaaaaattacaggtttgtaacttcaaacatcaaaagtgtagtgcatcaatttaactaaaaaatcagtagtgcctaatatattatctgggcatcaaatttctttttttaaatatatccagattcacatatttttactcttattaaataatggttttaaataataatcatcacaatgtttagctacataatcccagatctggattaaatcatggtgatatcgatatttttaaattccaatttatttgttaatcagtaaaatgtaataggtgatagtgtgtccagagaatgagcctcctatgtgtaggaagacgatagtcttattacacctgctatcaattaggtcatttacatagctgctaatgtatcagaattttttccacactgatgtagtactttattcaagtcaaaacaagttatcattatcataccaacgttgaagaattaaccattcctgaaacaagaaacaatctttacattagtatttcttggttatggtgcttagtcttggtattattaagcacaatgattcttaataaacatgggtggatgaaggcaaatgcatatagcctagtcccctcaataatttattctccatcttatttaaaattgttgttgaggctatacaaactacagatctgctgctagaaagatacaagttgtcccccgaacaacatctggcattttaagcataagattaaagtcctggtgttcacagcatcttcttctgacctaccactaggatcattcctcagcagtgcccacgatgctgatttccaaatgataccatttactatgtatcttgactgtatggagattattttttccttattnaaaaaaaagaaatacgatgatatttccttctttgtccttacttaagaataactgggcaataatctattcagtctttgtaaactctccattgaataatttttcattcttacagccatttcctgaatggctgctgcgctttccctctgtcatctccttcacataactgagcggtcccttcccctcaaaggatgaaggatttttgaatgagccgccaatcctatcccacaaagtgaaatattgtccataattatagtcaaagaacatatggtggtctgtatgatgagctgagccattaataaatggctgtaagatttgggggacacgaaaatcaccgtcatgaatggaaattgtccagatattaaccaagatgtacagacttaaataaaccaccttgtgtaatggaaagataaaagggtatatatggtaaggtagactctgaagaaagccatcaatagggtgaaaagcatgacttgcaaatggagtaggaatcttccaaatatggtgaggtttatgtaggcgcttatataccagtctatgatgaaggcctctgtgaatccagtagatgaacatgtcagtgaaaaagaggaaagatattatactaacgacaagttcaaacaatccatatggaaactctcctaggtcatcatgtaatttgctgtaacctcttatctccagcaagaacagtgcaacagtaagaatacttatccatggcaatgcctggacagtaaacttaatctctcgacggacttgattctttaaaaattgtggatgtttcattaatgcatgatcgaagacaaaataatagctcagtgttgcacagaagaaataaaggatgtaagcaccaacatttgttacaatcagaagactaatagcttgtcggaagatgtcatcttctggccatgtggctggatacacgtatggtgtaaaaaaatagtaatctgcaacacggagtacaagatccatcacttagcccctggaggtggtccgccgccgctccgcacgccctcgtgccgaatcctg

SEQ ID NO: 310831 - DNA, 964 bp, Homo Sapiens
tcgccgctcccttgcgaaaaattgcagtcttgccgtgcccaattcatcattccccgacccctttcaagggtggtccaatgctccccatttttggagggatggcgccgaccgttaaacatttagtccccggaccattgcctcaggttttccgcgggtgccggtaagaattcttgggggcccccctgaggatgttccatcagggtttaaagtgattcccacagttgttgcagttgtttgtaaggtccccgtactgatgggacgtggagtccatgcagcccaggctccaggccgtcaatagttccttcgctgaggcagcgctcaggggtcagctgtaggaagcgcaccaccccctgcacggtgccaggccccccccggatggccactgctgcccccagattctctgcaaggtattagacacttgggctggcttgccacctcacccagcacacctcttcagcagctcgggaagggcagggagtctcacataattttcacaccttcctcaaagccactccaacccagagcctgagaatcctatgattagatttgtaccagctctgagccacctccctccgagaggggccaaggccacagtggtcactcacgcaactggccgctgcccatgcccttgagtaccgcctgccgccccgtgccttccaggagagcctgcacctcctggctgggtagagtggtgtgtaccaagaccatctggtcctccaagtgcacctccacatcctggacacctgccaccccttgcagggatttgcgcaccgcgtccacacagctctgacaggtcatctgcaccgcgaactccaacgtgcagagggtcccctggttccccgaatccgaagccattctggacccagtcaccaccccgagacgcagaactcctccggcgcaggagcaccaaccagcgcggcgtcgcggggactgagcctctaaagccacccttaactcctcctcc

SEQ ID NO: 310832 - DNA, 668 bp, Homo Sapiens
tttttcccaaacgaaaataaaactttcatttgccaagggaacaccacagcagctcctgccctgtactgagctctccaaagactgggcaggcaaagtccctctggccccctctggaagtggaaagtgctcgccctggaggacagcaacagagccaaggtgaggtcctgctcaaaggtgggcagggggctgcgctgactcctttcggcccttgccagcgatgggccggcctcgctcctcccagatggtgaggccatcgcaagagcagatctgcttggggttctggaaaaggccagcggagcgtgcaatgatgccacaggccaacctctccccggagttccctgtgatcttggataagggatggcctccccggcccaggtcatcttctccctcatcaataatcaggctgcggccaatcacatcccacaccttcagctgctcatcctccattctgaagatggcgcggccgtcagcatcagcacggacattgcccaggtctccgcggtgccggtcagagtccttggggcccccatgagatgctccatcagggttaaagtgattcccacagcttagaaagaaaggaaacaggtgggcaggaaagcagctcacaggccaggtgctctaccctctcatctatttatatttgcttcattcattcattcattcattca

SEQ ID NO: 310833 - DNA, 1143 bp, Homo Sapiens
ctttccccggagttccctgtgatcttggataagggatggcctcccccggcccaaggtcatcttcttccctcatcaataatcagctgcgccaatcacatcccacaccttcagctgctcatcctccattctgaagatggcgcgccgtcagcatcagcacggacattgcccaggtctccgcggtgccggtcagagtcctgggggcccccatgagatgctccatcagggttaaagtgattcccacagctgttgcagttgtttgtaaggtccccgtactgatggacgtggagtccatgcagcctagggttccaggccgttcaatagttcccttcgatgaggcagcgctcaggggtcagctgtaggaaggcgcaccccctccctgccacggtgccaggccccctcaggatggccactgctgcccccagattctgcaactggccgctgcccatgcctcttgagtaccgcttgccgctccgtgccttccaggagagcctgcacctcctggctgggtagagtggtgtgtaccaagaccatctggtcctccaagtgcacctccacatcctggacacctgccactccttgcagggatttgcgcaccgcgtccacacagctctgacaggtcatctgcaccgcgaactccaacgtgcagagggtcccctggttccccgaatccgaagccattctggacccagtccaccaccccgagacgcagaactcttccggcgcaggagcaccaaccagcgcggcgtcgcggggactgagcctctaaagccacctttaactcctcttcttagtgcgtgcgcacgcaaggccttgcttcgtcagccaccgggtggcggccgcgcaggcgcactcgggccgtcgggctcctggttgccttagtaacccctcggctttctgttcctggacggtggcggccgccggctctatgatggagcccccgaagcccgagcttgagctccagcggttttaccaccggctgctgcgtccgctgtcgctcttccccactaggacgacgtccccagagcttcagaagcgccccccgcaggagggccggattctgcagtctttccttctggcgaagctgacggtggcgtcgctgtgcagccaggtggccaagctgccttcgtctgagaatcgccaccc

SEQ ID NO: 310834 - DNA, 1447 bp, Homo Sapiens
  misc_feature (65)..(65): n is a, c, g, or t
  misc_feature (430)..(430): n is a, c, g, or t
cccgcggatacacgcgaatacttcctggtgggggcgccctttttggagaaaatgggaaaagggtnctgcgcccggggaagggacagacaaaacagaggccaaaaggggaaggtccctgctcaaaaaaggggggccaagggggtctggcgaagattcccgttggggggccctagcccaagggatggggccggcgcttcaaattcctccccagaagggtaacgcccatccgcaagagcaagatctggcggggggttctggaaaaagcccaggggaagcgtgcaattaaggccaaaggccaaccctcttcccgggaggttccctggaatttgggataagggatgccttcccgggccccggtcattttctccctcatcaataatcagggtgcgcccaatcacatcccacactttcaactggtaatcctccattngaaggagggcgcggccgtcagcatcagcacggacattgcccaggttttccgcgtgcccggtcagagtcctgggggcccccatgagatgctccatcagggttaaagtggattcccccagctgttgcagttgtttgtaagggtccccgtactgatggacgtggagtccatgcagcccagggtccaggccgtcaatagttccctcgatgaggcagcgctcaggggtcagctgtaggaagcgcaccacccccttgcacggtgccaggcccccccaaggatgggccactgctgcccccagattctgcaactggccgctgcccatgcccttgagtaccgcctgccgccccgtgccttccaggagagcctgcacctcctggctgggtagagtggtgtgtaccaagaccatctggtcctccaagtgcacctccacatcctggacacctgccaccccttgcagggatttgcgcaccgcgtccacacagctctgacaggtcatctgcaccgcgaactccaacgtgcagagggtcccctggttccccgaatccgaagccattctggacccagtcaccaccccgagacgcagaactcctccggcgcaggagcaccaaccagcgcggcgtcgcggggactgagcctctaaagccacccttaactcctcctcctagtgcgtgcgcacgcaaggccctgcttcgtcagccaccgggtggcggccgcgcaggcgcactcgggccgtcgggctcctggttgccttagtaacccctcggctttctgttcctggacggtggcggccgccggctctatgatggagcccccgaagcccgagcctgagctccagcggttttaccaccggctgctgcgtccgctgtcgctcttccccactaggacgacgtccccagagcctcagaagcgccccccgcaggagggccggattctgcagtccttccctctggcgaagctgacggtggcgtcgctgtgcagccaggtggccaagctgccctcgtgccgaattcgccacccagc

SEQ ID NO: 310835 - DNA, 1118 bp, Homo Sapiens
gttaaataccaagttttcccaaaaaaggatgtaaaggaccaaggcctttaaaaatttaataattattctaaaggtatttctgaaatcttaaggtaaaagaactttaacactgaaaaagtgttcttcagaggccaaatctcaatacatttgcagaacatgttaataaaattcactcctccttcctgcttttccttttttaaaaaaacaacctgtactaggctaccaagctgctagaggagttgccaaaatgcagactactcaaatttaggttaagagatttattctaggaaagtgaataggctatacacctaattagaaagacaaaccacaacaccctccaaacactagtgcatgcagttaactcttccatttcataaactcaatggatagacaggaagggaacaaagagaggaggaaaagcagaacatagaagtaaaacagcaaatgaaggcatctgggacacattttagggaagagagcaaatgaggggggaagacaccaattaactgacattggatagtaggcagttagaacttatctttccgtttacctagcaagttacatcagtgctttatattaaacttgacaaacctactagtttgtccctttcactcttaaatataccatgaggtggttggggagggagaagcaaataaagcagcatgcagggagacgcaaggaagaagtggccaaggagaagaaatggtggcaggaatagttttaaatatcaaggccacttaaaacaagactcagcaaaccaaagctatcacttctgcattaccctttgtcctcaattaactactttgaaaattacagccaagcaaaccacaaacattttaatggtttatgtttggatgatatgtctcctgcacatgcttccaccagaacaaaaaaggaaaaccaaagaagttcctttccacataaggcacaggacaaaattaatcccatttacatattcaaggcgaaaatgagtgttttcctggcttttgtttgtttcttttgctatcacatgtctatagattatagggactcaagcacattatccatgacagaaaattccactgttgtacaaaataaaattgttaattctaactttattcttatacaatttgcagaat

SEQ ID NO: 310836 - DNA, 341 bp, Homo Sapiens
attttgtcctgtgccttatgtggaaaggaacttctttggttttccttttttgttctggtggaagcatgtgcaggagacatatcatccaaacataaaccatttgtttgtggtttgcttggctgtaattttcaaagtagttaattgaggacaaagggtaatgcagaagtgatagctttggtttgctgagtcttgttttaagtggccttgatatttctgcatgctgctttatttgcttctcccttcccaaccacctcatggtatatttaagagtgaaagggacaaactagtaggtttgtcaagtttaatataaagcactgatgtaacttgctaggtaaacgggt

SEQ ID NO: 310837 - DNA, 708 bp, Homo Sapiens
  misc_feature (57)..(57): n is a, c, g, or t
actgctgatgttttaaaaacccgaaaacatggcactattctgcctggtttatcaaantatttttttaatacaacgcactcatttttcgctagcaaaactgcttataatggcactaaatacactaacatactgtgttttagtacaaagcaataatactcagagtactctcaggaaatccgcaagctgagtaaatttgaaaagaagatcttgtaaccacccttccaatcgacttatgtagggttctatggccctaattaaaaaacaagaaaactttagcactcaagtccaaaggggactgcccaactcagtctcaggcttcaatttcgcatctggggaaaaaagaaacacaaaagggagatgctgcctccttggctctgggggtggtgacgggagcggggcccactggggagcgatttcacttaaacggtcggacatagccgtctcgggcccctagcagtctccgcactcactgcttccttctcgaacatgctaggcctcctttctttcctaggcgtcaccggagcctgctgaggggtctggttcggggtctggatggggctcgacttcacgcctcggcctcgcttctccatctcgctctgttctccaagacgcccaccgcctccccttcaccgccggcggtcaaacgccctagccagtcccgcgagggcggaagtctcccacctgcgcctcgtacggtaggaagtgccc

SEQ ID NO: 310838 - DNA, 1400 bp, Homo Sapiens
  misc_feature (1035)..(1035): n is a, c, g, or t
taaagcataacaatagttcgtattttataaaatacagtaatataaatttgatgaaacacatggatttttttaataaaatccaaatttcttaataaggacagattaaaataatttagttaaatttcaccagaattagttcaaaacagaatttcagaattactctctgaaaatgaaggaatatcatatgaccatctttcagagttatttcaaaattattcatataagattttgattagtttagctactacatgcacgttgagactatttccaagtaggcgataacgctgtttcactgttatcttctcagggaaatccgaactctggaggaaatccaaggagatttgctatttctttaggagtgaaatatcgcagtttaagtattaacagctttgttatctgttcttcttgtgacaaattggtaagggatttgtagatattctcaacctgcacatcctctgcagtctgtaacacagaccctgtcccttctatgtagcttccatatcctttggtaaagcacacggaccttctacaagtgggctgaacaatgtctaacagaagagcatatcgcagcaatgactttggtggtaaaagatactggttcacgtcagtgtcatcttcaagaaaatcttttagcattttcacagagagatcactatcttgttgatttttcctgtgaatttcttctgcagtttcaagcttaaaaagaatggcatcttttccagaacactgtatgctgccatcaaagctaatatttggttcaacgttcttttcttgaattttattttctacatccattgcatatttttgtggatgtacagattcaattttggggaactccatcagtacctgaccaggggcttgaaagggtaatggctctgactgaagctttgcaataagaaaatatcgtagccttgaatttggaatgccaagagaggttggagataatagaaactcttggtactgaaagccacaattttctattgtttgtatcaagaggtctcttgtaagaagatacttcaaaacctttaaacattnttccaaaagaatatactttggtaatttttgtaatcttgggagaatatctagaatatgtaagaagctattcgtccttgaatcagtcatatcaccctgccggccaatccttgtgaatggctggcagggagggctcattaaaatcatatcaaaagataatctgtcaaactcttcgagtgtaatgccttcaatcgtcttggcaagtaactgtgtgtgaggaaaattatacttgtatacttcattagcgacagtgttgacatcaatggcagccaccacttgtgcaggtatacagctttctcttcagcgcgtggtgcatgccgcccacgccgctgtatagctccagcacccgcaggggctccatccccgcg

SEQ ID NO: 310839 - DNA, 737 bp, Homo Sapiens
  misc_feature (694)..(694): n is a, c, g, or t
ggggacaatgaggcgtgtggccagagggagagggctggccctgccatcactagaacacaggccgtcctgttcatatgatgcactgccacttccgttttgtgaaaccaggaatcctgaggctcatctttattttttcagaacagacgtagagagatgaaggcttgtggaggaaaagatggtgagagacttgggcagaaaatgagtagtcctcaggaagaaatcttggttatgtgtttagagcatgaaggacagagccatatagtgtggcagtgaatatacctgctatctccatctcagaggtcgtctctacttttcccttttgccctttcagtatagatgtgatttctgattctcttacagattgtttgctttgcgagatctgatgttatgttgcagtctcttggtaaatgatgcctagttggtgttttattttcatttaatttttacagtctgttctgtgttgagggaattcaggaaagagacaaacatatgttagcattttaatcagggaattaagtttgagtcagcctagctgaacttcctttgctaaagaaagaagaaaacttttctggcagccccgttcatggcacagcttagggataacattcacgagcctgacaggtggagtggccagaaaccaacagttgtcccgacttgtggaggttattccgaagtaagggcagcccgtggcggnatttagtaactgcctatttccccggggcccgtgaccttgaacg

SEQ ID NO: 310840 - DNA, 305 bp, Homo Sapiens
  misc_feature (35)..(35): n is a, c, g, or t
  misc_feature (38)..(38): n is a, c, g, or t
  misc_feature (47)..(47): n is a, c, g, or t
  misc_feature (54)..(54): n is a, c, g, or t
  misc_feature (57)..(57): n is a, c, g, or t
  misc_feature (66)..(66): n is a, c, g, or t
  misc_feature (78)..(78): n is a, c, g, or t
  misc_feature (87)..(88): n is a, c, g, or t
  misc_feature (114)..(114): n is a, c, g, or t
  misc_feature (117)..(117): n is a, c, g, or t
atatacctaaatatttaatacttaaataagtatanatntaaaataanaaatttnctnaataatagnagtcatttcttnaaataatannaatatctggccctctagcatgtctcncanctgagcagcactagactcattaatgccatgtagtcgtacccaggttttaaacagtggtttctatggcttaggacaatgtttcctaatgttctaaaatccatatcctttttttaaaaaacagctttattgcaatataatcataatctcttttgatttgttgctctttttctctatcgccaccttttttt

SEQ ID NO: 310841 - DNA, 1991 bp, Homo Sapiens
  misc_feature (208)..(230): n is a, c, g, or t
  misc_feature (291)..(306): n is a, c, g, or t
  misc_feature (1057)..(1092): n is a, c, g, or t
  misc_feature (1601)..(1610): n is a, c, g, or t
gcctccgtataaattgctcccaccaaattgtttaccttttggggaaagagggcgtttaaacctcccaaaggggagaaaaatggtggggcgtggaaacccctgtgggaaaagccaaaaagtgctttcccacatgaagacccaggaaatttgccaccccattggcaattccccaacgtggggggccaaccagggaagactttttgttccnnnnnnnnnnnnnnnnnnnnnnnccactgtggttccattttccctttaaataccggataggaatttggtttcctggaaggtccnnnnnnnnnnnnnnnntcccaaataaaaatggcaatctctacactttaggtttcttgttaggtggatcttgaagactaaacttcggaatttcaccagaaggagcatatggaattctctttgaagacacctttttgccaattgtttcaatctggaagccaatggtttgtagttcattgtggagcccatccaggacacgccgtccatcgaagataaaggctggctttagcatttttttatgaatgcgttcataatccaattccttaaacatgtcccactcagtgcaaataacaacagcatgggcaccatcacatgcttcatatggatccttggaaatggtcacgagccgggacacttggtcatcctctgaaacacctggatgagaaagatccacaactatttgttccctaggtacttttggatcatatatatgtagatgtgcaccttcatccatcaaatatttgctaatatatatactagaagattctcttgtatcaccagtgtcctttttgaatgcaaatcccaaaatagctatcttcttatcagttactgtattaaacagactatctatgatccgggaagcaaacctcctcctctggtagtcattcatgtctatgacctgctgccaataacgagctacttctggcaaattcagagcctcacagagataaaccaaattcagaacatccttttggaaacagctcccaccaaacccaacactggcttttagaaacttgtttccaattctctggtccattccaatcgctgnnnnnnnnnnnnnnnnnnnnnnnnnnnnnnnnnnnnacagagcacttatggagttaatgctgcttattctctgggcaagaaaagcatttgctgccagtttggaaagctctgaagaccaagtattagtggtgaggatcttttctctgggaacccagtgctcatatacagcacacagggcctgcacagctctctggccctctggagtttcatcccctccaaatcagtactctgtctgggttctttaggtccttgatggctgttccctctgccagaaactcagggttggacagcacctgtaaattcaagttgggttttgtgtttgcatcaaatatgcgacggatactttctgctgcccgcactggaactgtgcttttctcagtcacaattttgtacccatttgagttttgcacaatgcgtctagcacaagcttcaatatacttcagatctgctgcccggcctttccccattccataggtttttgttggagtattcacagaaataaatacaagatcagcttctttgatggcgtcatcaatattggtagnnnnnnnnnngattttttcctcgacaggattctaccacttcttttagtcctggctcataaatgggaagtgtaggagaattccacgcattgattcttgattcattgacatcaacaaccgttaccctgatttcaggacacatatgagcaatgacactacatgtgggtcctccaacatagcctgcaccgatgcaacagatcttcttaatttcaaacatgattgtaccacttcccagcagcaagcgcagggaccgctcctatcccgatcgttcggacagcaccttcctacgggccgcgccgccgcagcttctccacccgcgccccgctcgatctgagctccctctcggcgcacgcccctccctcaggccctcgtgccgaattcgccacccaggcc

SEQ ID NO: 310842 - DNA, 930 bp, Homo Sapiens
  misc_feature (228)..(245): n is a, c, g, or t
  misc_feature (321)..(377): n is a, c, g, or t
  misc_feature (395)..(437): n is a, c, g, or t
tcaaccctgtaatccccagtattttgggaggctggtgtgggaagatcacttgagctcaaagggtttcagaccagccctggacactatagcaagcccctgtctatacaaaaaatagaaataaaattagttgagcatggtggtgtgtgcctgttgttgcagctacttgggaagcttgagcccaggaattcaagaccagcctggacaatataataagacctcatctctacnnnnnnnnnnnnnnnnnnttagccaaacatggttgcacatgtctgtagtcctagctacttgggaggctgagatgggaggatcaattgagtcaannnnnnnnnnnnnnnnnnnnnnnnnnnnnnnnnnnnnnnnnnnnnnnnnnnnnnnnngagtgagactctgtctcnnnnnnnnnnnnnnnnnnnnnnnnnnnnnnnnnnnnnnnnnnngtcaacataatccatgattatgtcttttctagcaatctaaaataagaaaaagtggagaataatgaaaagaaatctttaatatcagatatgttaagtaaagaaagaccttcttagatctcagttcgaaacttcagtgtagattccttcatttgctgctcataatgtttatcaaatttttcattcagggctactgtaaagtgatttttccagtctcctgtaattccctttctcatgaagggcgacaatttctggttcataatttcgtctggcagtgttgtgtaatttgtggatggattgttcttcatctcttggaacgaagtatgatgtataatcctgtccacaagctcctctgatggcttcctttccaggaaatgtatcaattttatcacctcttttctgatatcctctttcaggtcttcgtagaaaagaaatagtacacgtggactctttcccttttcccaccaagattttacatgtttataccaggaaccat

SEQ ID NO: 310843 - DNA, 447 bp, Homo Sapiens
  misc_feature (19)..(19): n is a, c, g, or t
gttaaacaaaaatttaaanagaaaatgtcaacataatcccatgaattatgtcttttctagcaatctaaaataagaaaaagtggagaataatgaaaagaaatctttaatatcagatatgttaagtaaagaaagaccttcttagatctcagttcgaaacttcagtgtagattccttcatttgctgctcataatgtttatcaaatttttcattcagggctactgtaaagtgatttttccagtctcctgtaattccctttctcatgaagggcgacaatttctggttcataatttcgtctggcagtgttgtgtaatttgtggatggattgttcttcatctcttggaacgaagtatgatgtataatcctgtccacaagctcctctgatggcttcctttccaggaaatgtatcaattttatcacctcttttctgatatcctctttcaggtcttc

SEQ ID NO: 310844 - DNA, 1250 bp, Homo Sapiens
  misc_feature (1172)..(1193): n is a, c, g, or t
agctgccgtcccgaagaggatgagggggccagcacaagcgaaactgctgcccgggtcggccatccaagcccttgtggggttggcgcggccgctggtcttggcgctcctgcttgtgtccgccgctctatccagtgttgtatcacggactgattcaccgagcccaaccgtactcaactcacatatttctaccccaaatgtgaatgctttaacacatgaaaaccaaaccaaaccttctatttcccaaatcagcaccaccctccctcccacgacgagtaccaagaaaagtggaggagcatctgtggtccctcatccctcgcctactcctctgtctcaagaggaagctgataacaatgaagatcctagtatagaggaggaggatcttctcatgctgaacagttctccatccacagccaaagacactctagacaatggcgattatggagaaccagactatgactggaccacgggccccagggacgacgacgagtctgatgacaccttggaagaaaacaggggttacatggaaattgaacagtcagtgaaatcttttaagatgccatcctcaaatatagaagaggaagacagccatttcttttttcatcttattatttttgctttttgcattgctgttgtttacattacatatcacaacaaaaggaagatttttcttctggttcaaagcaggaaatggcgtgatggcctttgttccaaaacagtggaataccatcgcctagatcagaatgttaatgaggcaatgccttctttgaagattaccaatgattatattttttaaagcactgtgatttgaatttgcttatgtaattttatttgcttgactttttatatgatattgtgcaaatgtttgccataggcaattgggtacttaaatgagaggtgagtctctcttttgccttggtgctttggaaattaaatgtcacaaacgagtatataattttttatctgtacttttagagctgagtttaatcaggtgtccaaaatgtgagttaaacattaccttatatttacactgttagtttttattgttttagatttattatgcttcttctgggagtattagtgatgctacttttaaaagatcccaaacttgtaactaaattctgacatatctgttactgctgactcacattcattctccgccattcaaatactannnnnnnnnnnnnnnnnnnnnngttcccaaactgtaatgtacaaggatatgtgtgataatgctttggatttgagtaata

SEQ ID NO: 310845 - DNA, 921 bp, Homo Sapiens
  misc_feature (108)..(129): n is a, c, g, or t
  misc_feature (187)..(195): n is a, c, g, or t
  misc_feature (667)..(706): n is a, c, g, or t
  misc_feature (760)..(760): n is a, c, g, or t
  misc_feature (803)..(803): n is a, c, g, or t
  misc_feature (810)..(810): n is a, c, g, or t
  misc_feature (846)..(846): n is a, c, g, or t
  misc_feature (858)..(858): n is a, c, g, or t
  misc_feature (873)..(873): n is a, c, g, or t
  misc_feature (910)..(910): n is a, c, g, or t
tctggaagtattagtgatgctacttttaaaagatcccaaacttgtaactaaattctgacatatctgttactgctgactcacattcattctccgccattcaaatactannnnnnnnnnnnnnnnnnnnnngttcccaaactgtaatgtacaaggatatgtgtgataatgctttggatttgagtaatannnnnnnnncttccaagaaaactgctttggatatttttagataatttaaacataatttaggataatgatattgctcaatctgaccacaattttaggtaaaacattaaatgtgtcaagaaatcttggcaacagagactctgcagcttgcagtggacatagataaaatgttacagagatactatttttttggttggaattactatattaaatttagaagcagaaactggtaaaatgttaaatacatgtacaattgcttttagttagcaattgattgtagcatgggttcctccaaggtttcaagcaatgggcagagtttaaaattatatcagattcgtttacttcgtttattattttacagtaaatttgaataaatcttaggggtcattatcacttaaataatactgtacctaggtctttcaaattaaaattatacctgaatgaagttgtttgtatacataaaggatatttgtgtacaattacnnnnnnnnnnnnnnnnnnnnnnnnnnnnnnnnnnnnnnnnatgggcaactgggaaagtatttactatggggattcatttatgtctgtctttccnatgcataaaagaattgatccattatgtaaatatgtggtttganccctggntgacttacagtgtcactacagctttttaggataacnagccctaatatntgttaggcggacccngggtgggccgtgggcttgcgctttttgtggagccggnggagggcgtcc

SEQ ID NO: 310846 - DNA, 266 bp, Homo Sapiens
  misc_feature (52)..(52): n is a, c, g, or t
ttcctcccatgctggatgcgtcctgccctcaaacatcagactctaagttccnttagcttttgaattattggacttacgctagtggtttgccaggggttctcgggcctctggccacagactgaaggctatactgttggcttccttacttttgtggttttgggactcagactggcttccttgctcctcagctagcagatggtctgttgtgggacttcaccttgtgatcctgtgagtcaatactccttaataaactccccttatatata

SEQ ID NO: 310847 - DNA, 1559 bp, Homo Sapiens
  misc_feature (38)..(39): n is a, c, g, or t
  misc_feature (55)..(55): n is a, c, g, or t
  misc_feature (99)..(99): n is a, c, g, or t
  misc_feature (101)..(102): n is a, c, g, or t
  misc_feature (105)..(107): n is a, c, g, or t
  misc_feature (117)..(117): n is a, c, g, or t
  misc_feature (132)..(132): n is a, c, g, or t
  misc_feature (138)..(138): n is a, c, g, or t
  misc_feature (141)..(141): n is a, c, g, or t
  misc_feature (145)..(145): n is a, c, g, or t
  misc_feature (176)..(176): n is a, c, g, or t
  misc_feature (192)..(192): n is a, c, g, or t
  misc_feature (194)..(194): n is a, c, g, or t
  misc_feature (196)..(216): n is a, c, g, or t
  misc_feature (222)..(222): n is a, c, g, or t
  misc_feature (228)..(228): n is a, c, g, or t
  misc_feature (231)..(231): n is a, c, g, or t
  misc_feature (249)..(249): n is a, c, g, or t
  misc_feature (275)..(275): n is a, c, g, or t
  misc_feature (291)..(291): n is a, c, g, or t
  misc_feature (297)..(297): n is a, c, g, or t
  misc_feature (1197)..(1337): n is a, c, g, or t
caccagccagacacagccgccgagggaccaataacctnncaaaacgcaaacggcngcctgcggtgagggcccaggggcctccacggagaggacaggcancnnccnnncccaccaggnaggagtgagcccggngcctcngcnatgngcaaggcggtgtgcaagcaccggctgcagcnttttgctcgcggcggncncnnnnnnnnnnnnnnnnnnnnncgtgcnggtgcngangctttggcctgtgaggcngagctagagaaatgtagatgttagangtgccagtgccatccngcgccncccaagcatgcccccactcactcacgtcggcatctcgacccgttcaattacagcaacgaagaagcccccgctaagcgtggtcttgggggaagcccgtaggcagtgctcggcacccgggaacgtgctcaggcctcggtggggccgggcaggcagggcgggagctagcctgaaggcgcccgggttctgctgcagcgcatcttgtaccatgtcttcattctcctcctggcagagggagcacatggagtagacgagccgctaaggaaaagcgtgtctcggttacacagcttcacaggctgcctcagtcctgaaatcctcgctcctgaaatcctcgcttcacagaggagaacttttgctccagggtcccaagcccattaaagtgtcagaactaagaccaaaacagatgactccaggtctaagctgctgtggacctctgagtccctcagccacgccttctcaccatctcacccgagccactgcaggaaggatccagcaggacatagtggacctcacgatagcgcggatctaagggggagaccgccaggaagtcctcctcagccagctcacagcaggagacgccagcccaggccagcagcgtggccatggatgccagccgcctggcatccaggtcaaaggcaaagatcttcccttggttcttcagaagagcagccaagtgactggtctttattgcctggggtggcacaggcatccatgacatgggagcctggcgggggtccagcagcatggctgggagacagctggccctgtcctgcagaatgaggtgtccggcccggtacagtgggtgttcatgcagatctgtctgggcgggaaacaccagcagctccggcatcaaggggtccaggagaaaatgcttccccttgagggctcgtaagtcatcgaggnnnnnnnnnnnnnnnnnnnnnnnnnnnnnnnnnnnnnnnnnnnnnnnnnnnnnnnnnnnnnnnnnnnnnnnnnnnnnnnnnnnnnnnnnnnnnnnnnnnnnnnnnnnnnnnnnnnnnnnnnnnnnnnnnnnnnnnnnnnnnagcccttggccaggtgccgcttgcagcttcttcgcactgaggaagccggcgctggaagatcacggattccacacgggggagaagcgctgcgttttgtacaccagcgcgtacagtggcttaacggtttggaaagtggctggagaacaccaacccccttgaaagaaccctggcggtttttccacgccgggcatgaacgcctgtcaccgctagggtaaaggccct

SEQ ID NO: 310848 - DNA, 1559 bp, Homo Sapiens
  misc_feature (1260)..(1260): n is a, c, g, or t
  misc_feature (1362)..(1362): n is a, c, g, or t
ggcctgggtggcgaattcggcacgagggttttgccacagagccgtaaaggcgcgcgggaacatggggctgtatgctgcagctgcaggcgtgttggccggcgtggagagccgccagggctctatcaaggggttggtgtactccagcaacttccagaacgtgaagcagctgtacgcgctggtgtgcgaaacgcagcgctactccgccgtgctggatgctgtgatcgccagcgccggcctcctccgtgcggagaagaagctgcggccgcacctggccaaggtgctagtgtatgagttgttgttgggaaagggctttcgagggggtgggggccgatggaaggctctgttgggccggcaccaggcgaggctcaaggctgagttggctcggctcaaggttcatcggggtgtgagccggaatgaggacctgttggaagtgggatccaggcctggtccagcctcccagctgcctcgatttgtgcgtgtgaacactctcaagacctgctccgatgatgtagttgattatttcaagagacaaggtttctcctatcagggtcgggcttccagcctcgatgacttacgagccctcaaggggaagcattttctcctggaccccttgatgccggagctgctggtgtttcctgcccagacagatctgcatgaacacccactgtaccgggccggacacctcattctgcaggacagggccagctgtctcccagccatgctgctggaccccccgccaggctcccatgtcatcgatgcctgtgccgccccaggcaataagaccagtcacttggctgctcttctgaagaaccaagggaagatctttgcctttgacctggatgccaagcggctggcatccatggccacgctgctggcccgggctggcgtctcttgctgtgaactggctgaggaggacttcctggcggtctccccctcggatccacgctaccatgaggtccactacatcctgctggatccttcctgcagtggctcgggtatgccgagcagacagctggaggagcccggggcaggcacacctagcccggtgcgtctgcatgccctggcagggttccagcagcgagccctgtgccacgcgctcactttcccttccctgcagcggctcgtctactccacgtgctccctctgccaggaggagaatgaagacgtggtgcgagatgcgctgcagcagaacccgggcgccttcaggctagctcccgccctgcctgcctggccccaccgaggcctgagcaccgttcccgnggttgccgagcactgccctccggggttccccctgaggacacgcttagcggtggcttcttcgttgctgtaattgaacgggtccagatgcgaaccgtgaatggntggggggcatgctttggaggcccaggatggtactggcacttctaacatctaaatttctctagctcagcctcccagggccaagcatcagcacccaaaacgcccaccccagcccagcccccaaagaaaaaagaagaaagcaaaaagctgccaacccggggccttgcaacccgcccttggcaattagacaaaagcttcga

SEQ ID NO: 310849 - DNA, 911 bp, Homo Sapiens
atcgtagagtacgttctgcattttatttctgcaggcaacacttttgctcaccagcaagaacacagcccgaggaagggacccaataacctttcaaaacgcaaactgctgcctgcggtgagggcccagggtcttccacggagaggacaggcatcttcctttcccaccaggaaggagtgagcccggagcctctgctatgtgcaaggcggtgtgcaagcaccggctgcagctttttgctctcttctttctctttgggggctgggctgggtgtgcgttctgggtgctgatgctttggcctgtgaggctgagctagagaaatgtagatgttagatgtgccagtaccatcctgcgcctcccaagcatgcccccactcactcacgtcggcatctcgacccgttcaattacagcaacgaagaagccaccgctaagcgtggtcttgggggaagcccggaggcagtgctcggcacccgggaacgtgctcaggcctcggtggggccgggcaggcagggcgggagctagcctgaaggcgcccgggttctgctgcagcgcatctggtaccatgtcttcattctcctcctggcagagggagcacatggagtagacgagccgctgcagggaagggaaagtgagcgcgtggcacagggctcgctgctggaaccctgccagggcatgcagacgcaccgggctaggtgtccctgccccgggatcctccagctgtctgctcggcatacctaaggaaaagcgtgtctcggttacacagcttcacaggctgcctcagtcctgaaatcctcgctcctgaaatcctcgcttcacagaggagaacttttgctccagggtcccaagcccattaaagtgtcagaactaagaccaaaacagatgactccaggtctaagctgctgtggacctctgagtcc

SEQ ID NO: 310850 - DNA, 856 bp, Homo Sapiens
  misc_feature (74)..(82): n is a, c, g, or t
ctaccagcaggaatgtgtttttacagagagagttcagaccccctcaaaaagcgcccccccccggagggttcacnnnnnnnnngtccgcacttacttaggcaacacgttacatttacaggctgagagtccaactggctctaccggtagggaaccagatctctacagtaagagaaccagcagcacagtgcatgtcagcgctgatcagtcaagaagatctcctgttctcagagacagcaagtactgtcttattgctgggtgcacagcatcatgacatggagctttgcggggtccagcacatggctggagacagctgccctgtcctcagaatgagtgtcggcccggtacagtggtgttcatgcagatctgtctggcgggaaacaccagcagctccggcatcaaggggtccaggagaaaatgcttccccttgagggctcgtaagtcatcgaggctgccagggaagaaccattcattcatcatttcctgaatttctccctgccaggccctatttcaacggtccattcatgcaacaaatgttaccacagctatggagaaatcaacagggtgataagggaatccgggatccgcagttgagggaatgggttgtcaagccagacttatgggtcaggagccccctctactgtttaccagcagtgggagcctgggcaagtgattcaatctcaagccccactggcatctctgtaaaatagtaggtgtgaggattcaatgagccaatatatccaagatacttacgtgccacaatttaataaatgttagctattcctgttgaagcataaccttggagaaaggttactttacaggggggtgaggagtggggaagtgagagctgagctcattc

SEQ ID NO: 310851 - DNA, 712 bp, Homo Sapiens
actatgggggcaccatccgtgtgaatacatccacaaattgtgcatcgctggggtccaatcggactaattcaggtgtgccctgaaagcaaggttctgctgggtccaaccctgtgatgcgtccaatggtcccattggttctccttccagcctccccagcagcgtgggcacccaggctgtggccaatgacatgcacgttggaaggtgagtaaccgaacgccgactgaagaaattcaacaaaatatgccacttctgctcccacgatcctgatgttctgcgaggcttgtgtgtatccagttcgggagccacctttccagtccacacagatacagttcacactttccaccttgaacagattcttgcacacattggccagccagttttcttctcccttgtctatgaatccatgaataataaagcgagtttttctatttgttttgaaattggagccactgatgcttgatgaatctgcggcaacttcttgaaagttgtttgggttctcattagtatataggaggaagcgggtgttgacatcttttggagaccaaggcaatatatggaggggtctttccgtaattcctgaccatggggagtcatcactgaagcagccgagtctttcgtagcaaacttcttttcctgctactgctcccagcagcagtgaaagagtccaaagtggcagcatcgtggcagttccgtcaggttccacacgcccccg

SEQ ID NO: 310852 - DNA, 1782 bp, Homo Sapiens
  misc_feature (30)..(30): n is a, c, g, or t
  misc_feature (1076)..(1077): n is a, c, g, or t
  misc_feature (1088)..(1088): n is a, c, g, or t
  misc_feature (1097)..(1097): n is a, c, g, or t
  misc_feature (1107)..(1107): n is a, c, g, or t
  misc_feature (1112)..(1113): n is a, c, g, or t
  misc_feature (1117)..(1117): n is a, c, g, or t
  misc_feature (1120)..(1121): n is a, c, g, or t
  misc_feature (1126)..(1126): n is a, c, g, or t
  misc_feature (1146)..(1146): n is a, c, g, or t
  misc_feature (1151)..(1151): n is a, c, g, or t
  misc_feature (1153)..(1153): n is a, c, g, or t
  misc_feature (1155)..(1155): n is a, c, g, or t
  misc_feature (1157)..(1157): n is a, c, g, or t
  misc_feature (1161)..(1161): n is a, c, g, or t
  misc_feature (1163)..(1163): n is a, c, g, or t
  misc_feature (1198)..(1198): n is a, c, g, or t
  misc_feature (1200)..(1200): n is a, c, g, or t
  misc_feature (1202)..(1202): n is a, c, g, or t
  misc_feature (1209)..(1209): n is a, c, g, or t
  misc_feature (1227)..(1227): n is a, c, g, or t
  misc_feature (1230)..(1230): n is a, c, g, or t
  misc_feature (1406)..(1406): n is a, c, g, or t
  misc_feature (1493)..(1493): n is a, c, g, or t
  misc_feature (1505)..(1505): n is a, c, g, or t
  misc_feature (1529)..(1529): n is a, c, g, or t
  misc_feature (1554)..(1554): n is a, c, g, or t
  misc_feature (1597)..(1597): n is a, c, g, or t
  misc_feature (1603)..(1603): n is a, c, g, or t
  misc_feature (1606)..(1606): n is a, c, g, or t
  misc_feature (1613)..(1613): n is a, c, g, or t
  misc_feature (1619)..(1619): n is a, c, g, or t
  misc_feature (1638)..(1638): n is a, c, g, or t
  misc_feature (1640)..(1640): n is a, c, g, or t
  misc_feature (1654)..(1654): n is a, c, g, or t
  misc_feature (1689)..(1689): n is a, c, g, or t
  misc_feature (1696)..(1696): n is a, c, g, or t
  misc_feature (1721)..(1721): n is a, c, g, or t
  misc_feature (1741)..(1741): n is a, c, g, or t
agctcagtgtcctggttactgcagcggcanaagcagcaggtcctactatcgcctccctctagtctctgcttctctggatccctgaggagggcagaaggtactgaggaaggttaaagggaccagccttggagtatttccccactctgagactcagctggccacaggccaggtttctgaagttcctttcttccaagccagtgattctggttcttgggacaaggtgttgaggaacactaggaaacagaggggactgtgacctggggactttttctgcagggaaggaaaacagcccaaagatgaggagtgatttcgcgtggggtacccgcaaggagccagcttgctcgcatacagacggacagtgtggtggcaacattgaaagcctcgtaccctggcctgcagtttgaaatcattgctatgtccaccacaggggacaagattcttgatactgcactctctaagattggagagaaaagcctgtttaccaaggagcttgaacatgccctggagaagaatgaagtggacctggttgttcactccttgaaggacctgccacactgtgcttcctcctggcttcaccatcggagccatctgcaagcgggaaaaccctcatgatgctgttgtctttcacccaaaatttgttgggaagaccctagaaaccctgccagagaagagtgtggtgggaaccagctccctgcgaagagcagcccagctgcagagaaagttcccgcatctggagttcaggagtattcggggaaacctcaacacccggcttcggaagctggacgagcagcaggagttcagtgccatcatcctggcaacagctggcctgcagcgcatgggctggcacaaccgggttgggcagatcgtgcaccctgaggaatgcatgtatgctgtgggccaggtacacttgaccagggaagccacatggtgacatatgccttccctttgttctcaaccaagaagcttgtctcacaaccttctgcatctgcttcccccagaatagcattctcagggaggggcagaccttgggatgctaccggtccaaaaggcgctggggagcaagtagatagaggtgnncccatgctttnccccattgnttgggaaaanatcanncctnatnncctangatgtttttccatcaggggnccttngncntnaaantncgagccaaggaccaggacatcttggatctggtggntntnctgcacnatcccgagactctcttcnctncatcgctaaaagagccttcctgagacacctggaaggaggctgcagtgtgccagtagccgtgcatacagctatgaaggatgggcaactgtacctgactggaggagtctggagtctagacggctcagatagcatacaagagaccatgcaggctaccatccatgtccctgcccagcatnaagatggccctgaggatgacccacagttggtaggcatcactgctcgtaacattccacgagggccccagttggctgcccagaacttgngcatcaccctgnccaacttgttgctgagcaaagganccaaaaacatcctggatgttgcacngcagcttaacgatgcccattaactggtttgtggggcacagatncctggnttnctgctgnccagtncctacatcccgggcctcantnccccattctcactnctatctggggagtgattaccccgggagactgaacnccagggntcaagccttccagggatttgcctcnccttggggccttgatgactnccttgcctccccagtatgtgggggcttcatctctttagaga

SEQ ID NO: 310853 - DNA, 1509 bp, Homo Sapiens
ttaattaccttcagaactggtttattagtaggattggttacattcaaaggctgttgcttggacttctctaaagagatgaagcccccacatactgaggaggcaaggcagtcatcaaggccccaaggtgaggcaaatccctggaaggcttgaaccctgcagttcagtctcccggggtaatcactccccagatagcagtgagaatggggcactgaggcccgggatgtaggcactggacagcagcaacccaggcatctgtgccccacaaaccagttaatgggcatcgttaagctgccgtgcaacatccaggatgtttttggctcctttgctcagcaacaagttggccaggctgatgcccaagttctgggcagccaactggggccctcgtggaatgttacgagcagtgatgcctaccaactgtgggtcatcctcagggccatcttcatgctgggcagggacatggatggtagcctgcatggtctcttgtatgctatctgagccgtctagactccagactcctccagtcaggtacagttgcccatccttcatagctgtatgcacggctactggcacactgcagcctccttccaggtgcctcaggaaggccctttcagcgatgcagcgaagcagagtctcgggatcgtgcagcacacccaccagatccaagatgtcctggtccttggctcgcacttccacgcccaaagccccctggcccacagcatacatgcattcctcagggtgcaggatctgcccaacccggttgtgccagcccatgcgctgcaggccagctgttgccaggatgatggcactgaactcctgctgctcgtccagcttccgaagccgggtgttgaggtttccccgaatactcctgaactccagatgcgggaactttctctgcagctgggctgctcttcgcagggagctggttcccaccacactcttctctggcagggtttctagggtcttcccaacaaattttgggtgaaagacaacagcatcatgagggttttcccgcttgcagatggctccgatggtgaagccaggaggaagcacagtgggcaggtccttcaaggagtgaacaaccaggtccacttcattcttctccagggcatgttcaagctccttggtaaacaggcttttctctccaatcttagagagtgcagtatcaagaatcttgtcccctgtggtggacatagcaatgatttcaaactgcaggccagggtacgaggctttcaatgttgccaccacactgtccgtctgtatgcgagcaagctggctcttgcgggtacccacgcgaatcactctcatctttgggctgttttcttccgccgttgcagccgcattgccgttaccagacatggctccgcttggaaagtaggctgtgtgtgggtgccgctaaggtcccccggccccgggaagccgggggctccggccggcgagtaccggggacacgtgggacccgaggtcgtcctacagtctgactcctggtctccgcagagcctcgcgtcactt

SEQ ID NO: 310854 - DNA, 476 bp, Homo Sapiens
cagtccaggcagccagatggctcagaaccagacactctccttttctgaagcctgaaaaaacccacctatgagctgccttcagcctctctaagggtttaagcccagcagcctatctgacaccccgggtcccagcaagagacctagcatactagggtcccagcaagaagactgggagggcaccacactctccctatctttacttactcattcttctcccagggcatgttcaagctccttggtaaacaggcttttctctccaatctgccggacagaaagagcctgagtgaaatcccttcagggaaggaaagaagagtggggacaagaactggggaggaagatgttgttaccttagagagtgcagtatcaagaatcttgtcccctgtggtggacatagcaactgaggagagagtcaatcaatcaggtgctcattattgatcagcatttactgagcctagcactgtgctacgattcatgat

SEQ ID NO: 310855 - DNA, 385 bp, Homo Sapiens
  misc_feature (325)..(325): n is a, c, g, or t
  misc_feature (332)..(332): n is a, c, g, or t
  misc_feature (351)..(351): n is a, c, g, or t
ttcatgaatcgtagcacagtgctaggctcagtaaatgctgatcaataatgagcacctgattgattgactctctcctcagttgctatgtccaccacaggggacaagattcttgatactgcactctctaaggtaacaacatcttcctccccagttcttgtccccactcttctttccttccctgaagggattcacttcagggctctttctgtccgggcagattgggagagaaaagcctgtttaccaagggagcttggaacatgccctgggaggaaggaatgaggtaaggtaaaggatagggagagtgttgggtggccctccccagttntctttgntggggaccctaggtattgntaggggtctcttttgcttgggggaccccgggggt

SEQ ID NO: 310856 - DNA, 429 bp, Homo Sapiens
  misc_feature (359)..(359): n is a, c, g, or t
tttgtaaattttctccatgaaagcctagagtctggcctctgattcacaatcttcccagcctacggtgttagaggtggggtggtcaagaagtgaagacagatggtccttgacttacaatagggttacatcaatactcctgaactccagatgcgggaactttctctgcagctgggctttctttcgcagggagctggttcccaccacactcttctctggcagggtttctagggtcttcccaacaaattttgggtgaaagacaacagcatcatgagggttttcccgcttgcagatggctccgatgggtgaagccagggagggaagcacagtgggcaggtcccttcaaggagttgaaccaaccngggtccactttcattcttctccaggggcatgtttcaagctccttgggtaaacaggcttttctctcccaat

SEQ ID NO: 310857 - DNA, 310 bp, Homo Sapiens
  misc_feature (83)..(83): n is a, c, g, or t
  misc_feature (87)..(87): n is a, c, g, or t
  misc_feature (253)..(253): n is a, c, g, or t
  misc_feature (266)..(266): n is a, c, g, or t
aaggaacagtgactgccctagtgttaaaatctcattgtaacttcctctctgggcagtgtggtgggaaccagctccctgcgaangtangcccagctgcagagaaagttcccgcatctggagttcaggagtattgtatccttttagaagagtgacgggttccttttggaagagtgacggagacagcagccaaggaaaaagacaaggtctagagggttctgggagtccggagagtggaaggggttccagcaagcangccgtggggtcanggcacgctcatgtcactgagttccagccgcttttagagtaaagt

SEQ ID NO: 310858 - DNA, 449 bp, Homo Sapiens
tgatgataaacgactttactctaaaagcggctggaactcagtgacatgagcgtgcgctgaccccacatggggccccctgtgcaagcagagctggccggcccctccttgctggcagaggcacgggaggcctgctggggatgaggccactggccagggctatgctgcaccagaccaatggcaccgcccccacccctcccagcgcaggggcagcttggagcagaggcagcactggccaccactgcgggggcaagtcagcgtcaagagagtccctgagtgagaaggcccagataagcccaggccccccaggccagcggacaggcacaggcagggcctacagaggtgccaaggccccaggccagttgtgctaggagcctggacctgctcttccacacccccatcccgcccctactgcacaggcttgtgccttggtgccccctggaggcagcagg

SEQ ID NO: 310859 - DNA, 925 bp, Homo Sapiens
actttacaaggaaaatacccttggtcgggttttgttttctacatttttggcaggtcttcctttacttggcacctttctttctggttcgttttcattagcagctcttgtgactggctttcttgctgtggtagatgagactgttctgggaacctgctttgctgcttgagtagctgatcgagtcattctcaacgacgtgggcattacaggctgcacaacttttttctctttgtctgacactttcttttcagaagtttgtcttggaccaggtcggattgctcgaacatcactctcgttatcaatcttagtctgctccatttggtctttggcctttgaccttgtaatccgtacagaagatggaatagccttttttggctcagctttcacagcattctggtttgataaaagaaaacaaggcatatcaggtctataacgacccactttaaatattcctcgtttagctttctctctctgctctttcaatttttgaagttgcttttcttctttgtatttttggagcatctgttttcgttgatcacctagaatagttttcattgcccttggcttaacattggtcttttctggaacaagcccttgagatgtctcatctaattcaacaagaattctaccttccaaggttggaatgtttacatctttcaaaccaaagtgtctatttcgttcgtattccttatgtctattttctttctgagacagtgatttcctatgagcaattttagttctaatcatttcagtacttatatccttcctgtgtcgactggcaaaatgtgatgaagacatcctgagccaccttctagcgtgaaacctcaaccaaacaaaaagtaaagaacactcggtctggacgaccaccgccgactccgaagcaggaaccctcacaacccgagcctccacgaaattcaaacttgccgcc

SEQ ID NO: 310860 - DNA, 867 bp, Homo Sapiens
  misc_feature (631)..(748): n is a, c, g, or t
tgtcttgagggatgccagtctccgcaccacgcggcgcttaaacaggtccacctggcctccgagctcccgctggctctgccgcgacgcctgccgctgggcctggaccacgaggcctgtgcacaggagcatggccaccagcaggatggcgttccacagctgctgcaggggtttctgctcctgggcacgactgcctccaaggcagaccaagtcctgccatcctccatagccatccttggagaggccacaggtggtccacaaggtcaacttccactcgatattggcagacagggactctccgctggtgatctcagccgtggcctgggtcctctgcagcaatgcatccaacagcttggtgacattggaggaataatggaggacgatcactggcctgagcagaagctgggatatgtccagctctcggaccacgttgtggttcaggatgaggagaagcagggcagaggcacccaggaagagggcccgccgcatctgctggaccagggccttgggataggcctgcgggccactgcccttattctcctggtggaactgggccgcctgctccttgcccacgtatgccactgcaatccagccttccactggtgcctcctgctcggcatccacgatgtccatnnnnnnnnnnnnnnnnnnnnnnnnnnnnnnnnnnnnnnnnnnnnnnnnnnnnnnnnnnnnnnnnnnnnnnnnnnnnnnnnnnnnnnnnnnnnnnnnnnnnnnnnnnnnnnnnnnnnnntccgtctcttttgtcagaaattgaagagggccaggttttccagggtcctagtcaggcagaacaaatgcagcaatgtggaacagacggaaactccagctctgtcatttcctcactgtgtc

SEQ ID NO: 310861 - DNA, 2295 bp, Homo Sapiens
  misc_feature (1440)..(1451): n is a, c, g, or t
  misc_feature (1587)..(1587): n is a, c, g, or t
  misc_feature (1635)..(1635): n is a, c, g, or t
  misc_feature (1649)..(1649): n is a, c, g, or t
  misc_feature (1844)..(1872): n is a, c, g, or t
cattatttttctatttgggtcaaattaattttattatgctccatgatgaattgccaccagtgcaacatcctattcactatacatttcaaaaaaagaattcacatactaaacaaaatttcagttgtctgaaaatgaaatgattgaaagtctttatgaatctcatacatacaatatgtggctagctgaaattgtctatcacgtagcatttagatataaaaagcctcatgctagtttgttaaatgcaaaggctaccagacgaccatttagctggagaatatacggaaggctttcagacaacgcacaggtatagtgctgctcacagtgcaggatggtagaggactgaaacatgcaaccttacaccttacttggtaaagcagatttagtcttcatgcctggactgaactccacagctgctgtgtttcaaccaacagtaatttagactttttgtaacaacaaccaatgtctttttcttctttaagaaaaaaagaataaattaattacctttggcaaattatatatccattttacatgtttaaaattgtgctttgaactcgaagaatgggtactctctgctgagagaagttcctgataaatatatattataccaaagtcagctggaaaatctagaatttcttggccacaagttaagagagatcttaaattggcattaccctgaagacatttctaggaaatttaaaatgttttttatattgtcaaaaagaaaaaattttttcaattaacattacttaaaataattataatgttccatttaacttttgtacaaactcctgattttattggttagtagttgtccagcctcatctgcaccagattgactgagctcaagccacaataaaaatgatagtaagtagaaaaaggtttctagcagcagagggcactgttgttgcaagaaacaaaaagtctagaatctttcccatgtgcttaaattactcttgcaagaaagataacattctttgaataacttaagtattttactgcaccacttactgctttcagcaacaaaaccttttaaattatttcttatgataactagatgcatgatcactagagattatgtaataaatggttaaaattcaagccacatcttgcaggtccagcctgtcaagatctgccaatacgagattttggttggtacaattctagatagcgtaatttttagttggatattgtgactatagtaatgaaatacatttggaactacattatgcatattactcaatgtgagaaaaatatgtttgtatttaaatcagataattttctacctaaaatttaaagtaggtaggtatgataattagcattataaatatgaaacaaccacctttaggcagattagtgtagtgtagagaggcaaagaaaccctaattttaacacaccatttagtatgcataacaaatgtgcaggttgtaaagttttatcttnnnnnnnnnnnntctatcattcagttatctgttccaagaactctgacattgggaccaccaatcttttaagaaaaatgtaactcttccacatggctatttgacaaaaacccctcaaaaaggttatcccaaatcaatgcatgttcggttnccgtgttttggcgcacaccctttgccaactaggattacattttttatnggttggtatttctngaccaccctcaatccacaccaaagtgcaaaataaaaatgcttaaaattctacagtattttagtactattctgatttgtatagtttttttaaccaaatattggagttaccataatattacctcagttcatgtagaatgaaaactactccctaaatccctgaaactccaacttaaattttgtttcagagtaataccnnnnnnnnnnnnnnnnnnnnnnnnnnnnngagcctgtcacatttgctacagcataaaaataaccccagtcaataacaagtatttaagggctccttatgatcccagtctgcaaataccactgctataccaataacaggcagtattactgtaagaggtgtgttaatcgtcttccccactagtatctctgtagtgattttatgtagagcatattgctaaaatttgagaaactacatcggtgtagtgatgtctacagaactgtgcaatgtatcagcttcaacattcatatgtagcattgtattcaaaataaaggggctaaagaaactaaggtctgcatcacttaaaaaagaatgtagtgctatactagatttttttaagaaaatttaggtacagaaaaagtagggtatgaaaatagtgttttccttctggcattataagtaaattacacccccccc

SEQ ID NO: 310862 - DNA, 543 bp, Homo Sapiens
atcttatgcacatgcaatgtatttattctagttgtctgtaagttcctatttaaattctgttgtagtttaacagtgatctttaaaaactcacttaagataaactttattgaaatgattaagatgcattaaaaatgtctcctgtgattttatagactgtcattaaatcttccttttaaaaatttgtattaaaaatgtgttccttgaaaaatgaaaataatgaaaagaatacatttaaaatgagatgtgctcattgccataacaattatggaaagaataattatctaaaaattgggcttttgcatgtttaaattcacagaaactttatttttgatgaagtattttaaatggaatacttgttttaaattgaagtttcgataatagttaatttttaacaatagacagtgatagaaaggcttctgatacaagtataaatactaaatcaattcagaagttaatataattaagagggttaagacttgtgatactgtaattaacccatttctatattcctgaggtccaaaaatattttaaataaccaatgac

SEQ ID NO: 310863 - DNA, 1184 bp, Homo Sapiens
tttttaagcaatttaactttttatttaaaagagatggggtctctctgttgcccagattggtctagaactcctgagctcaagtgattctcctgactccctaagtgttgggattacaagcatgagccaccacgcccagctgcaatttaattttaaatcagagttcaaaacaatagaatttatgccactgtgtgtgcctgccaaacgaactgaacagacagtaactgctctaatagttcagaggagggaaagatcacctcaggctgggggcgagggatgggcttaaggaggggcactatttgagctgagtctggaaaaacagccagaattacaggaagcagagaggctaccagaaagtgggtgtagaccagactgaaaggaggcagcattctcctccttgggccctgggagctcctggggagtaagacttgagtctcccccatctctgcaaccccactgcaggtacatagtagtggcagtttgtgacatgaacgggcaaacagccagggcagatgcagctaacgggtagcccccagtgctttttgcacctctccaagattgggtgactaccagtcccctgaccccttcacctacccaatcctttcctgtcctcggttcttttccactgtctccaccctgggaagtggcatcaacacaggagggcattgtgctccttcaatgtggtctattcatacacatatagcccctttccactgctcagtgtcggtgatgtgactcagaagggcccacattttcgctgggtccccatctaaaggcctgacactgcagtgaagggcatgctaagtctaggcacaggtccctggcagcaggaaggagacagagcctctcccaggcacacatccccttctctgtttctggaagaagactaagaaaggagtgggaaatcgcagggaggtcccaggcccagggctaataggtggatggatctccctgggttcagttccttctctgagctggctcccactcctcttctgggatggtgaggcccaggagactacatggccaccatgcccctgccccaatgctggagcatcagagagaaagttggggctgggttttgttggagatgattcagcatgttcagccagcaggccctccatggaggattcatgtccaaggagggtggaggtcatcctactgacatcttgctctagaggtccaatgtc

SEQ ID NO: 310864 - DNA, 1542 bp, Homo Sapiens
cttcttcgtagagtcgttcttcttgtatttgggacacgcgtgtgcgtctccacgtgtttggtcgaatacaatgccttgtcgtccctgatgacttgctcggtctgtattttaccccccctctttctctggtatccaacttgcggattgtgtgagacgttgtaacccacccagtttttcgtcttttggccccaaccccacctggttctggttgctaagcccggccttgtggcggcctccacttgaaggagagccacctctggttttaaaaagggtctttccttctgccatctatttgtttctgaaggcttaatctccttttcagaattagtttccttttgtcctttctgctgcgaatctttgtcctcagctccagtggccgacacaaggcttatactctactcctatcaaagacttgtactgtgcctttagctgaaggagttcttgaacagctatatctacttgatccttaggggctttttcagttttaagtttccgaactacttccccttgagaagctactttgtcaaaaagtactttcgcttctggtgtttctaaaccagcaggttcagaatttctggttgggcttgaatccgaactttgagataatgggggctgaccaggtatgtactccttcccagttttttctttatactgagccttcagggacagtaagcattctacagcttcatttattttagccttaggggatttttcagcttttagcttacgaaccacctccccttgtgcagcaacttcatcatacagagatttactttccagaatacttgctgaggaattagaagaaatattctgtcctatttcagcaggagggtttccaggtttatattcctggccagttttctccttatattcagctttcaaagacaaaagctgttttacagctgcatctacatcttcctttggtgctttcttggcttttaattcacgaaccacatctccttgaacagccactctattgtaaaggaccaaggaatcctcagatgtagtacaattattattcagagaaggtgttggtctttccttaaaaggagcagaggtctcattttttgtggcttctactttggtcttttcctttgaccctgatgttggcatttcctttgtgtgcccatcaggaatgtgtatcaaaacacacggggcttccttgcaactatatgggctaacaggttcataaggttgatcacatatgaagaatcctcttctctggagttgtataatatctccttttttcaaatccttaaggcagggatcccctagcattagctcttcatgcttactgttcttgttgacatactgcttaaagtcctcgtcttttcctagcactggctttgtgatcaagtgctcataagtgacacagattactggaataggaagagcatgtgtagtctctgcaagccaagtgaccttagtggttttcttgtagtctttgttttccaaattcaactttgcatcaagagatatatttttccatctgcatttttgtgtatttttgtaatgttgaggttgccccaatttataaatgta

SEQ ID NO: 310865 - DNA, 2385 bp, Homo Sapiens
  misc_feature (2080)..(2080): n is a, c, g, or t
aaagtcacaagaattttctttattatagcaaatactttcacggcatttgacagaactcagaactatttacaaagaaagaaagaaaaatcaaacaaccaaaagatacatttcatataataggaaaatataaaaatcgaagccaagtgacagaatgaaaaagttagctaagcaatggatttgaaaaacttcgattctaactatctgacttgttgctaattgtccaaacatataataatttaagatggtcttttgagacttcctagaagtaaaaaggaattattgaaaaaatgttcaaatatttcataaataaataccaaaaatatttattttcattgtactttccgacttgcttcagtgaaggtgtccttttacaacactctgtttcttgtttcaaattctcatctggagatgttactttcttccagagtgatactcccagcttaccacaatattcctgattaagaaaatgctagagctgtcctacctgaggaaaagaagagagaactgcagaacaatctgtaaagttcctagacagttcaatcaagttaaggatggtccaactgagatattttgttactccagcacttttcaagtgttattatgaaatcacaattctatctcagtgtgagatttcttatataagtaggaagaatttcatttctgtaaacatttgcagggccagctgtttctctaaatagatttgtttctccttaagagagctgctccagtgaaaaatcttttcttacatttcatgtccaaacccagagagaaacccaatgtttttctgtgaaaagacagaaatactcaagtaatataaaagcttcctgtaatcaaggaattgcctacctattacaagcatgttatcactcattgcagattcctaaagaattaaaaatgttcttcagttactcatagttcatcagatgtactgttagcccttgctaattcacattcttcactggtttgacaactctgaaggatgtccttgtagtggttcttcagatcttcataaaatgaaacagtttcttgtgagtaagccaaaggtaacaccttttcatttaataacatctgcactcggaattgttctttaggagtcttagcattttcacagtggtaaagcacaaatatcaggttcgaggcataaggtacaatgagaccacttcggactttccgatgcatttgttttttgtaattgtacgctgttaggggttccttgtctttgaagtagcccatgagagaaagcagtggaagaagagtctctgcatgaccaaactggaggatgactggagaagaaattggctgagacctttgtttctgttcaactgctttgtccaagtgctgaaagatatcctgaaacaaggtgcagctggatcgactgttaatagtatacccatatcctcttttccaatattgtttcagatcatttaaatattctaatacctttgcatcatctatgtcaaaaacatcacaccaaggagatttaacacctttaattgccaggtcaaatgaacaggtgaaaaaggctacttgaattaaatctgcatttaaatcatttactggcacttgcaaagtagctgcaactttttttaaaatgttctgcatttctggtccagttttgaaggcttccacgtgataaagagctgtagcatttttttctacttcagttaaaaacttctcacagtgatcaaaaaatctcattagtttatcattaactgttggaggtccaaactccatatctgcgacgtccggcggcggcaagccagggtggtagtgctgccacagcccctgcaggaaggcggcgctgctatccatgcagcggtgcttggaactggtgatgagccgcaggcggccgtagttctcacggctgaaaagggccgggaagagcgaggccagacgcagcgccagctgtcgcatatcctgccgtcccttctctactagctgcccgtccatccagtccgcgtaccacaaaggccagtcggccagcgctgcacccaggtcgcggctgccggtactactagccccgccatccctggacccgcgggcctgcagcaacccgtgcagctgcctcagcttgcggatntgtttgaccgtggggtagcgggtgccgtggcgaatgagggcgaccagctgcaccggggtgcaggtcccctccagcagctcagggtcccgccacggagcctcggggcccgacaatagcacggggttgacatcctcgtagcgagtcttggtgccgaaataggggctgagcgacgaggccaccgggtccctcggctctagaagagagcagcgcgcaagcgacgagagcagcgccgcagccagggccgcggcaggcgctacggaggtccggaggaggcagccgggcgcgcgtagcatcgtcgggacggt

SEQ ID NO: 310866 - DNA, 1076 bp, Homo Sapiens
  misc_feature (135)..(135): n is a, c, g, or t
  misc_feature (464)..(491): n is a, c, g, or t
  misc_feature (744)..(744): n is a, c, g, or t
  misc_feature (810)..(823): n is a, c, g, or t
atgtagatacagtttttaatgtatcacaatgagcaacaaacatacttgatgaactatttccagaagaataagttcaaataccatctacaataaacatcatttcaactatgacaacaggtctgtgacaaaataaanaaaagttttcaaaaccatgttatttaccgtaatacggtgcatttgagacttcaaacattacagtaacaaaaactaatgagactactctctatatataaaacatcaataacatttttggtttagtttatttaaagttatagccataggggcttttattaaaacctcagggtgcatttcctatgtaacccaggcgttgagagtacatgttgtgtagacaatgattgcgctgtgataatccctttgatatccaggaaaaaacaattctcattctcaacctttggaggctgtccttttatttctcaccctaacaacgtccatccagttaaagnnnnnnnnnnnnnnnnnnnnnnnnnnnnggctgctgtgcagttgtaaaagtttatgtcgacacactgtcggaataatcatttgtaaaacagtcctttgttttgtgaaaagcgttctgttccatgctaacacactgttgcacatcgtgttaactgccaggacagatcgatctcacaatgctgctgcttaacattcatgaaaaaggcaaaagcaattttctgaagcctttggattcaggacattagctccactatagcggcaggattgcaccttagggggccnatgttgtctcttacgaaacacaatcaaaaaagtgtcttcaggattaaaataaatgttaaaatactnnnnnnnnnnnnnntccaaattaaagacattaaaaaagttcacataaaatgtatagaataaagattgctgtgatcatcatccgaaacaaaaactgtacaataataaaatgtaaaatgaaatgtgtcttgatttgatcattaaaacagtttgaagcatgacttgagttaaactgtcaaacagttcattacatgctacttgttcatctcggaagagaaatatcaaaagcaatacattttgcatttcttcatattaataaatttgtacca

SEQ ID NO: 310867 - DNA, 394 bp, Homo Sapiens
gctgaagctgttgttggttcttactaacactagattgaggggctggaatgttacagattgcaggatctccactacctgtcctcttccttgctgccaagcccaagataacaagtgttgctttctgacagatcccttcctttgtctcaatacagaagcatgggccgatctgctgagttcagcctaggagctgaggccaacatctgagtctcctcagcacacaagtttgagagaagtcctagtgacttcaagctcggaactaacgcggcagcggctccctctcgacgtcgaagcctccctccctttccagggagagacgaggcacggaccgacaaagcccacgaacaccgatgagcgagctgccggccaccccagcttctacaacccgaccttctcc

SEQ ID NO: 310868 - DNA, 544 bp, Homo Sapiens
  misc_feature (527)..(527): n is a, c, g, or t
gtgaaatgcagtatgggactatctttttttcctcctctaagcccaaagattaactagagtccctccaaccttatagattgttggctttcacaatcttataacctaggatacaggtagtttcgagtatggtgccagtgatgttttgtttttgtttggtcaaggggtaggtgcaacccaatggaccacttatgcaaaagatgtaaactcttgcataatacattgataacatgttttgccaactttaaatgcttaaacataagcgaaaccagtagcaagtatgtgggtcagcttaaaaattttgattgttaatgccctattttctaatttggcacctcttgatgcctaagcaggtaagcagatgcctaagctgtatttctccaaataaatcaagatgaagtactgcccaagttaaatattgatagcctaaagacaagtttatgtagtacttaatgtacatgatatgaagcataacattaaataaaatttttccccattgggttggttttatttcgccgcggcgcggagancgcgggcaaaaaactgt

SEQ ID NO: 310869 - DNA, 2307 bp, Homo Sapiens
  misc_feature (30)..(30): n is a, c, g, or t
  misc_feature (105)..(105): n is a, c, g, or t
  misc_feature (139)..(139): n is a, c, g, or t
  misc_feature (144)..(145): n is a, c, g, or t
  misc_feature (157)..(157): n is a, c, g, or t
  misc_feature (177)..(177): n is a, c, g, or t
  misc_feature (204)..(204): n is a, c, g, or t
  misc_feature (217)..(217): n is a, c, g, or t
  misc_feature (229)..(229): n is a, c, g, or t
  misc_feature (239)..(239): n is a, c, g, or t
  misc_feature (242)..(242): n is a, c, g, or t
  misc_feature (248)..(248): n is a, c, g, or t
  misc_feature (258)..(258): n is a, c, g, or t
  misc_feature (269)..(269): n is a, c, g, or t
  misc_feature (276)..(277): n is a, c, g, or t
  misc_feature (324)..(324): n is a, c, g, or t
  misc_feature (352)..(352): n is a, c, g, or t
  misc_feature (356)..(356): n is a, c, g, or t
  misc_feature (371)..(372): n is a, c, g, or t
  misc_feature (378)..(380): n is a, c, g, or t
  misc_feature (383)..(384): n is a, c, g, or t
  misc_feature (388)..(388): n is a, c, g, or t
  misc_feature (390)..(390): n is a, c, g, or t
  misc_feature (423)..(424): n is a, c, g, or t
  misc_feature (436)..(436): n is a, c, g, or t
  misc_feature (443)..(443): n is a, c, g, or t
  misc_feature (469)..(469): n is a, c, g, or t
  misc_feature (493)..(493): n is a, c, g, or t
  misc_feature (495)..(495): n is a, c, g, or t
  misc_feature (624)..(624): n is a, c, g, or t
  misc_feature (1888)..(1888): n is a, c, g, or t
  misc_feature (1893)..(1893): n is a, c, g, or t
  misc_feature (1898)..(1898): n is a, c, g, or t
  misc_feature (1931)..(1931): n is a, c, g, or t
  misc_feature (1950)..(1950): n is a, c, g, or t
  misc_feature (1958)..(1958): n is a, c, g, or t
  misc_feature (1965)..(1966): n is a, c, g, or t
  misc_feature (1995)..(1995): n is a, c, g, or t
  misc_feature (2014)..(2014): n is a, c, g, or t
  misc_feature (2026)..(2026): n is a, c, g, or t
  misc_feature (2043)..(2043): n is a, c, g, or t
  misc_feature (2065)..(2066): n is a, c, g, or t
  misc_feature (2078)..(2078): n is a, c, g, or t
  misc_feature (2109)..(2109): n is a, c, g, or t
  misc_feature (2128)..(2128): n is a, c, g, or t
  misc_feature (2132)..(2132): n is a, c, g, or t
  misc_feature (2136)..(2136): n is a, c, g, or t
  misc_feature (2145)..(2145): n is a, c, g, or t
  misc_feature (2147)..(2147): n is a, c, g, or t
  misc_feature (2159)..(2160): n is a, c, g, or t
  misc_feature (2170)..(2170): n is a, c, g, or t
  misc_feature (2193)..(2193): n is a, c, g, or t
  misc_feature (2215)..(2215): n is a, c, g, or t
  misc_feature (2217)..(2217): n is a, c, g, or t
  misc_feature (2219)..(2219): n is a, c, g, or t
  misc_feature (2222)..(2222): n is a, c, g, or t
  misc_feature (2224)..(2225): n is a, c, g, or t
  misc_feature (2229)..(2229): n is a, c, g, or t
  misc_feature (2234)..(2234): n is a, c, g, or t
  misc_feature (2240)..(2240): n is a, c, g, or t
  misc_feature (2253)..(2253): n is a, c, g, or t
  misc_feature (2256)..(2256): n is a, c, g, or t
  misc_feature (2260)..(2260): n is a, c, g, or t
  misc_feature (2291)..(2291): n is a, c, g, or t
taaagttgtgtttagggtatgaatatttangttggggagtagttgatgttgatttatttggagaaatagaggttagggatgtggttaggtggttagggatcaagnggtgggaaattagaaaataggggattaagaatgnaaatnnttaaggtgaggnagatagttggtagtggtttngcttatgtttaagcatttaaagttggnaaaagatgttatnaatgtattatgnaagagtttanatnttttgnataagtggtngattgggttgnacctacnncttgaggaaagaaaaagaaaagatgagtgggaggatagtggagagtnggtgtatggtaggttataagattgtganaggnaagaatgtataaggnngggggnnntgnngttnangtttggggttagaggaggaaaaaaagatagtgnnatagtgcatttnacatgtnttaaaaatagttttaggaggttaaanctttttagttataaaagttattanantagggtttactttgaaatatagtttacaaggaaatgaagtataagatacatacactgggactttaggagaaggggaaagtttaaaaacaagttattttggacgtttaaaattagggcatattataaaanacagtccacggtcttacattcagcaaattcatactaaaatactccatttttgtaagataaaggccaagaaaactttacatatgctacaagtttattacagatatttacatggctctttctcccctaggtacttaaaattttcacattatccaactccccaaagcaagctttgcaggaatgatgaggccagagcactattagaatagcttgtgcagtgctgtaatacaaaaatgtattttgaaagctattgagtgaccattaaatactgtttctataaaaaatggttttggtgtatttgttgacagacacttaatccactacatttaataaacagggccattggggtgtactatgtctcattctaatgagctccaaatgccctttccacccactgtacaattcactaaaatgcaattattacgaaaaattcacattttctttcagcagtgcatcaggttagcatattactggtttgggtgtttctaatatactaaaccttcagatgtttacctaattctgaatccttgtgttagctagaagcttataatccgattcaccaactttcaacaatctactggtccatgaatgataaattactgtcttcccctaacaatagaaaaagctgattcctttaccactccccaaatctaaacttggtttccacttaaaagttactcagttgagaacacttaatatcaagtacaatcattagtttaagttgcactgatactaccattatatcacagtgcacacaacacgagatggtctattttttttacattaattagttctacacaaatagattccctagcaaatttgtttcagaccaattgacaactacccgtgaacataactaaatttaaacatttgtcttattttatacctgtactttaagtaaggttttaagttgaaatgtcattatttccttatctgaaggattaaaggaaacagggacccagtggcttggtggtttgggaagaacacttggtgatggcggctcactaaatttggcaccagcatagttctgattagcttgagatttaaaaagtaccctgggacctgataagctagaatttcaactttgattatttggaaaatttttgttcttccccccattttccatcccctcccacgcacctgctcatcacttataaccatctcctctttcttttttcttatgaacaatcttcatctgggaattctgttccttggtcttctgtctgttaagctgttgttggttcttactaacatttctagattcacnccctncaatnttatacctctctccaccacccatcttcagcttntttttcacctttcactctncttttcanattccannatctccactacctgtcctcttccttcctnccaaccccaagataacaantgttcctttctnacacatcccttcctttntctcaatacacaagttttcatnnccccatctcctnagttcagcctaggagctgaccccaacatctnagtctcctcaccacacaantttnaganaagtcctantnacttcaacctcnnaactaacgcngcaccccctccctctccacctcnaaccctccctccctttccaccnananacnanncacncaccnacaaancccaccaacaccnatnaccnacctcccccccaccccaccttctacaacccnaccttctccttctgcc

SEQ ID NO: 310870 - DNA, 1040 bp, Homo Sapiens
aagatctctccctaaccgcgcttaccaagtctgtccccctgcttatccgcacgtggctccccctaggcgcccgcagcggcccattcacgcactggtaggcgagctcacatccccgccgcaccgagttcgtgtacaagagtcacccatggtccccaccatgtgtccgcccatggcacaccgggacttgactgagtggacgtgtgctaggaaaccgtacgtaagtaggttttagttgaaagtcattattcgtatctgaaggattaaaggaaacagggacccagtggcttggtgtttgggaagaacacttggtgatgcggctcactaaatttggcaccagcatagttctgattagcttgagatttaaaaagtaacctgggacctgataagctagaattccactttgattatttggaaaatttttgttcttccccccattttgcatggcctgccaggcagctgctgatgagttataaccatgtcctctttcttttttcttatgaacaatcttcatctgggaattctgttccttggtcttctgtctgttaagctgttgttggttcttactaacatttctagattgaggggctggaatgttatacctctctccaccacccatcttcagcttctttgtcacctttcagtctgcttttcagattgcaggatctccactacctgtcctcttccttgctgccaagcccaagataacaagtgttgctttctgacagatcccttcctttgtctcaatacagaagttttcatgggccgatctgctgagttcagcctaggagctgaggccaacatctgagtctcctcagcacacaagtttgagagaagtcctagtgacttcaagctcggaactaacgcggcagcggctccctctcgacgtcgaagcctccctccctttccagggagagacgaggcacggaccgacaaagcccacgaacaccgatgagcgagctgccggccaccccagcttctacaacccgaccttctcctttaccgacagcgtggtcgacaaatcccgaattccgggcgtacag

SEQ ID NO: 310871 - DNA, 366 bp, Homo Sapiens
tttttatggatatttagttttatttgatacacttggatgcaactttactcattaccatttttaaacccatgtttaaaagttttaaaatttgggtagaggcagaaagaggaggttgagttggagatgctgggggtagtcagcagctcagtcatcggtgcttgtgggctttgtttgatccaggccttgactctctctggaatgggaggcttcgacgtcaagagggagctgctgccacccgtagttctgagcttgaagttgctaggacttctttcaaacttgtgtgctgaagagactcagatgttggtctcagctcctaggctgaattcagcagatcggcccatgaaaaatcctgtaatcccagccact

SEQ ID NO: 310872 - DNA, 745 bp, Homo Sapiens
  misc_feature (638)..(638): n is a, c, g, or t
tccatcttccgagtatcgccgggatttcgaatcgcgatgatcatcccctctctagaggagctggactccctcaagtacagtgacctgcagaacttagccaagagtctgggtctccgggccaacctgagggcaaccaagttgttaaaagccttgaaaggctacattaaacatgaggcaagaaaaggaaatgagaatcaggatgaaagtcaaacttctgcatcctcttgtgatgagactgagatacagatcagcaaccaggaagaagctgagagacagccacttggccatgtcaccaaaacaaggagaaggtgcaagactgtccgtgtggaccctgactcacagaatcatgaaaagcaggaaagccaggatctcagagctactgcaaaagttccttctccaccagacgagcaccaagaagctgagaatgctgtttcctcaggtaacagagattcaaaggtaccttcagaaggaaagaaatctctctacacagatgagtcatccaaacctggaaaaaatgaactgcaatcactactccaaactttaagaagcttcatgaagctcattttaaggaaatggagtccattgatcaatatattgagagaatcaataagggggggggtcagggactccagtacctncaagaggaagactctctgtggcttctactcccatcagccaacgacgctcgcaagggcggtctttgtggccctgcagtcagagtaccttgggtctgaaggggtcctcc

SEQ ID NO: 310873 - DNA, 385 bp, Homo Sapiens
gaagtttggtgatccatcttccgagtatcgccgggatttcgaatcgcgatgatcatcccctctctagaggagctggactccctcaagtacagtgacctgcagaacttagccaagagtctgggtctccgggccaacctgagggcaaccaagttgttaaaagccttgaaaggctacattaaacatgaggcaagaaaaggaaatgagaatcaggatgaaagtcaaacttctgcatcctcttgtgatgagactgagatacagatcagcaaccaggaagaagctgagagacagccacttggccatgtcaccaaaacaaggagaaggtgcaagactgtccgtgtggaccctgactcacagtcatggcagggccaggatctcagagctctgc

SEQ ID NO: 310874 - DNA, 704 bp, Homo Sapiens
  misc_feature (13)..(13): n is a, c, g, or t
tctcaataatatngatcaatggactccatttccttaaaatgagcttcatgaagcttcttaaagtttggagtagtgattgcagttcttttattttttccaggtttggatgactcatctgtgtagagagatttctttctttctgaaggtacctttgaatctctgttacctgaggaaacagcattctcagcttcttggtgctcgtctggtggagaaggaacttttgcagtagctctgagatcctggctttcctgcttttcatgattctggaattcagtgggattacttatttttatctctgaatgattctgctgtgagtcagggtccacacggacagtcttgcaccttctccttgttttggtgacatggccaagtggctgtctctcagcttcttcctggttgctgatctgtatctcagtctcatcacaagaggatgcagaagtttgactttcatcctgattctcatttccttttcttgcctcatgtttaatgtagcctttcaaggcttttaacaacttggttgccctcaggttggcccggagacccagactcttggctaagttctgcaggtcactgtacttgagggagtccagctcctctagagaggggatgatcatcgcgattcgaaatcccggcgatactcggaagatggatcaccaaacttcgtcagcgcggttcaaatccctggcgccactcttaactttccc

SEQ ID NO: 310875 - DNA, 2219 bp, Homo Sapiens
  misc_feature (142)..(186): n is a, c, g, or t
  misc_feature (794)..(822): n is a, c, g, or t
tatgacaatgagaaaaaattttatttatgacgatcttgagcagtataaaactcagaagctccactgaggtgaaggaaacatggacatgatactaagcaaagcctagtcttttccataaaatgaataagaagtacatttggtnnnnnnnnnnnnnnnnnnnnnnnnnnnnnnnnnnnnnnnnnnnnnaaagcattaaagcattaatcctcgcatttcgatagggctatgtagcttttaagtaagcaatgttagaatgagttgtagagttttatttttgtgaatatagtgagtgacagatggcaattacatgaggatatttgaacgaaggtacataagcctaaacaatttcacctaggtaaaatattgatgtcataaccaaactatatggccccgtttcataaaggttactatattctatagagagtgaagaggtggcctttctatcccagcttaccctattcttgttattgttcaaattctcctgaagcttgcataactagctgccatcaggtaaatgctattggctagcagaagactgcagttctgttaatattagaaccagcagggggaacttgggaacttgacattaaaaatctagaaacagaattttaggatgggtctcgttagaaacctgaattgttaatggacttaagtaaaaaccatcccaaagaatttgagctttaaggtgataacgtcttttcagagatcatagcacatgaagaacccatggacactacacagactatgaacagttagcagaaaaagatctcgtgactaaagtggggatgacagcnnnnnnnnnnnnnnnnnnnnnnnnnnnnngttgagaatacaggaatatttacaagatgttaaaaaattattaatcttcagccaaaatgaggccccttcgcattcccaaaacctttgctttcttctcctttcgttcttgctcgcgtttcttccgttgctcttcctttgtctggagatggggttgtttgtaagttttcttgtagaagttaattctgttgacatgttgatttagataattattttctttagattgcccccatggttttagctttcctttgtgtggttcatagttgaggggacgagacaaacttgctttaagatcaaacactggtttcttattggagactggagtctgcgttgcctcagttgtcaacttgaatggggtaataacagcagcagaattccccgtgatggtctttaatttgtgtgtcccaagcacagcctcgccttttggggtgcccccagacacggtcacatgtgcagactttctggctggagtcttggtcagtgaacgcttatgctcattatctttagtagcagctgaaaacctgacacccgttttagctgcagagatagcagagcgcttgagtgaccccttcagacccaaggtactctgacttgcagggccacaagaccggccttgcgagcgtcgttggctgatgggagtagaagccacagagagtcttcctcttggaggtactggagtcctgacccctcccttattgatgggctgcttcagttcattcatggaattgtgttcttcaaaatgtttcttttttctctcaatatattgatcaatggactccatttccttaaaatgagcttcatgaagcttcttaaagtttggagtagtgattgcagttcttttattttttccaggtttggatgactcatctgtgtagagagatttctttccttctgaaggtacctttgaatctctgttacctgaggaaacagcattctcagcttcttggtgctcgtctggtggagaaggaacttttgcagtagctctgagatcctggctttcctgcttttcatgattctgtgagtcagggtccacacggacagtcttgcaccttctccttgttttggtgacatggccaagtggctgtctctcagcttcttcctggttgctgatctgtatctcagtctcatcacaagaggatgcagaagtttgactttcatcctgattctcatttccttttcttgcctcatgtttaatgtagcctttcaaggcttttaacaacttggttgccctcaggttggcccggagacccagactcttggctaagttctgcaggtcactgtacttgagggagtccagctcctctagagaggggatgatcatcgcgattcgaaatcccggcgatactcggaagatggatcaccaaacttcgtcagcgcggttcaaatccctggcgcccccc

SEQ ID NO: 310876 - DNA, 485 bp, Homo Sapiens
  misc_feature (438)..(438): n is a, c, g, or t
  misc_feature (460)..(460): n is a, c, g, or t
caaggttgggatgattcatccgtgtaaagagaattcttccctctgaaaggtacttttgaaaccccggttaccatttattccacgtttacctggaggaaacagcattctcaagcttcttggtgctcgtctggtggagaaggaacttttgcagtagctctgagatcctggctttcctgcttttcatgattctggaattcagtgggattacttatttttatctctgaatgattctgctgtgagtcagggtccacacggacagtcttgcaccttctccttgttttgggtgacatggccaagtggctgtctctcagcttcttcctgggttgctgatctgtatctcagtctcatcacaagagggatgcagaagtttgactttcatcctgattctcatttccttttcttggcctcatgtttaatgtaggcctttcaagggttttnaacaacttgtctgccctcaggnttggcccggagacccagattttggg

SEQ ID NO: 310877 - DNA, 1678 bp, Homo Sapiens
  misc_feature (231)..(521): n is a, c, g, or t
tcggcacgaggagataatttacaggttaccaactcatgtggggaaggtcttactgccatggtgcttttcaggggcctgtgtgtacacacatgattaaatggatttgcctgtgggaggtatgggcaggagaggaacccttaccattccagtaaatagcagtttctgcaattctgttgaatatgaaatgccatagagctttatttatttatgtaagtaaaagctaaatgaggnnnnnnnnnnnnnnnnnnnnnnnnnnnnnnnnnnnnnnnnnnnnnnnnnnnnnnnnnnnnnnnnnnnnnnnnnnnnnnnnnnnnnnnnnnnnnnnnnnnnnnnnnnnnnnnnnnnnnnnnnnnnnnnnnnnnnnnnnnnnnnnnnnnnnnnnnnnnnnnnnnnnnnnnnnnnnnnnnnnnnnnnnnnnnnnnnnnnnnnnnnnnnnnnnnnnnnnnnnnnnnnnnnnnnnnnnnnnnnnnnnnnnnnnnnnnnnnnnnnnnnnnnnnnnnnnnnnnnnnnnnnnnnnnnnnataaagctacatgaaagattgatagaatattttagattatttattggccaaaagtttttaaaactcatatttggaagcaaaatgaaaagcaagtaaaatgttttaaatggttcatggaaaacgtatttgggtagaaggcaactcgtgcttccggaaggggttccctgtcctccatgtgtccacatggcggtcaggtagggacgacctgttctgtaaagtccttggcactgctgaatctgtggcatcatagaaggccctggagcttccccgttcctttcagtcagggactccatatagagtctcatgtggacgtctcccgtgctttcctcttgacctctacagtcacacttctgttaacatctggtaactgtgggcaacctgactgatgccgtcttggcaattgaggtccagaagatgatagttccgcaacgcaagcagtacctactttttttcttcatctatgcattgactctcagattaccatgcagagcttcacgttatcatccacgttaagtagtgctaggtaggaccttagagatgttcatgagaaactatttgttatgactttcctttgtatctttccttttaatttaaactttaatgataatgtacttttaatatggattctattcacatttgttttaaaaaccttgtaaatatgaatgtttaagacaacttactgcaagggtaattcaagtttacatgatttttaaatttgcaatgatgttttttttattctgtgtattgaaaaaaattttctgttaccaaattttacaacttctaataagactactataactttatgtaaactgatgaagatgtgctgattaacatattctgtgatatggtttacaacttttaatcataattgtccatgattttggaatgctgttatttatcagtaaatgtaaaatatttgaggcatttagccatacacacactagaactttttaaaactttgtcctatagtgtaattataaactgatgactattatcttcatacattgagtcttcatgcatcaatgaaatgaaaaatataggattatttatttactttttgtaactaagtgggaaataagaaaaaaagttagaaagtacttaaggggaaaatcgttcttactaagtcatgtattttcaacttgtcttccctggtatat

SEQ ID NO: 310878 - DNA, 1005 bp, Homo Sapiens
  misc_feature (83)..(83): n is a, c, g, or t
  misc_feature (432)..(722): n is a, c, g, or t
  misc_feature (991)..(991): n is a, c, g, or t
atttttttggccccccaatttccccaaggcggcatcagtccaggttggccccccatttcccaggatgttaacagaagtgtganccgtaggggtccaagaggaaaacccgggaggccgtccccatggagcctctataggaagtccctgactgaaaaggaacggggaagctccaggggctttctatgatgccccagattcagcagtgccaaggactttacagaacagtcgtcccctacctgcccggcatgtggacacatggaggacagggaaccccttccggaaagcacgagttgccttctacccaaatacgttttccatgaaccatttaaaacattttacttgcttttcattttgcttccaaatatgagttttaaaaacttttggccaataaataatctaaaatattctatcaatctttcatgtagctttatnnnnnnnnnnnnnnnnnnnnnnnnnnnnnnnnnnnnnnnnnnnnnnnnnnnnnnnnnnnnnnnnnnnnnnnnnnnnnnnnnnnnnnnnnnnnnnnnnnnnnnnnnnnnnnnnnnnnnnnnnnnnnnnnnnnnnnnnnnnnnnnnnnnnnnnnnnnnnnnnnnnnnnnnnnnnnnnnnnnnnnnnnnnnnnnnnnnnnnnnnnnnnnnnnnnnnnnnnnnnnnnnnnnnnnnnnnnnnnnnnnnnnnnnnnnnnnnnnnnnnnnnnnnnnnnnnnnnnnnnnnnnnnnnnnncctcatttagcttttacgttacataaataaatcaagctctatggcatttcatattcaacagaattgcagaaactgctatttactggaatggtaagggttcctctcctgcccatacctcccacaggcaaatccatttaatcatgtgtgtacacacaggcccctgaaaagcaccatggcagtaagaccttccccacatgagttggtaacctgtaaattatctcctcgtgccgaattcgccacccaggcctcgctaccattacctcgtgagnattactgccacgaa

SEQ ID NO: 310879 - DNA, 1056 bp, Homo Sapiens
aggatgaggaggaagagcaggatcaacaaatggttcaaaatgggtactatgaagaaacagattattcagctttggatggaacaataaatgctcactatacaagcagagatgaactaatggaagaaagacttacaaaatctgaaaaaataaacagtgactatctgagagatggtataaacatgcctactgtctgtacttctggttgtttgtccttcccgtctgcaccacgagagtctccttgtaatgttaaatattcttccaaaagtaaatttgatgccattacaaagcagccaagcagtacttcttacaacttcacttcttcgatttcctggtatgaaagttcaccaaaacctcaaatacaagccttccttcaggcaaaagaagaactgaagctactaaaacttcctgggttcatgtacagtgaagttcctctgctggcatcctcagtaccttattttagtgtagaagaagagggtggttctgaagatggagtacatctgattgtctgtgtgcacggtttagcatggaaacagtgcagatctccgattagtaaaaaacttacattgaacttggattgcctgggggaagaattgattttcttatgtctgagagaaatcagaatgatacttttgctgattttgatagcatgactgatcgtcttttggatgagataatacagtatattcagatatatagtctaacagtctcaaaaataagctttattggacattcgttgggcaatttaataattcgttcagtgcttacaaggccaaggtttaaatattacctcaacaaacttcatacctttctgtctctttctggacctcaccttggtacactctacaacagcagtgctcttgttaatacaggtctctggtttatgcagaaatggaaaaaatcaggttcgcttttgcagctgacatgtcgagatcactcagaccctcgccaaacttttttatataagcttagtaacagcagggcttcattatttcatgttgtgctagtgggatccctacaggatcgctatgttccttatcactctgcccgcttgtgtgt

SEQ ID NO: 310880 - DNA, 1109 bp, Homo Sapiens
  misc_feature (287)..(287): n is a, c, g, or t
  misc_feature (289)..(289): n is a, c, g, or t
  misc_feature (616)..(616): n is a, c, g, or t
  misc_feature (635)..(635): n is a, c, g, or t
  misc_feature (670)..(670): n is a, c, g, or t
  misc_feature (972)..(972): n is a, c, g, or t
caaaaaagataccaccaatgccccgccgttctccacgatgggctataaagaagtaatcatcacacccattttttaaatttggggtagagatctggaccatgctggtcacaagcctccttcagagttctgtgaaaatggacagcgtcttcttgattcaagtatgttggagtgaggtcacatccaccaccaaaccaccactgcttgtggccatcagcttcttctacttcaaagtatctgtagttgaaatggatagtaggagcatgaggattcttggggtggataacagnantcacgcccatagcacaaaatggcaatttaccatctttagtcttcagaacttttcctctgcttctcatttgttttgcagcttcctctgaaagatttccatgaacaacagaaatgctcaccccagccttttcgaaaacacacccatcttgaagtacacagctgatgccgccacctccttccttcctctcccaccggtccacagaaaagttggcgcccccgtctacctgtgccagagcctggcacacctgggcctgggtctccagaatcagcagctccatcttgtgtcttcatgtcgcccggcctccttcgcagctcgcccaggtcggtnacaggcggggccatgaagntgctgcagcggtgggccagttcatcctcctcctcntccggcctccccagcgaagtggcccgcgtccccgaggttttaggcaacatctccgcccgctgcacatgcccgaaggcggcggtggccagccccaccaaccccgccagcgccgcggccagccctgtccccacccaggggccgcctctcgacgtcgagccgtgccccagcccgcggctctgctccgtgccagccgggccagggggccggcagacgcgtccggctgcgtgcgctgggaccaggctcggagccctccgccgccgcactgggaccaggcgcggggccctccgcagccgccccgcgcnacgagccagcaggggcccgagctcagcctgcccagctgcaaggccatgttcccgcactatcacctggagcagtgcctgcgtcccagagccctgcgtttgagccccccacccagacccccggagtattgagccggcga

SEQ ID NO: 310881 - DNA, 631 bp, Homo Sapiens
ttaatttggggtagagatctggaccatgctggtcacaagcctccttcagagttctgtgaaaatggacagcgtcttcttgattcaagtatgttggagtgaggtcacatccaccaccaaaccaccactgcttgttgccatcagcttcttctacttcaaagtatctgtagttgaaatggatagtaggagcatgaggattcttggggtggataacagagcctctgcttctcatttgttttgcagcttcctctgaaagatttccatgaacaacagaaatgctcaccccagccttttcgaaaacacacccatcttgaagtacacagctgatgccgccacctccttccttcctctcccaccggtccacagaaaagttggcgcccccgtctacctgtgccagagcctggcacacctgggcctgggtctccagaatcagcagctccatcttggtcttcatgtcgcccggcctccttcgcagctcgcccaggtcggtcacaggcggggccatgaagctgctgcagcggtgggccagctcatcctcctcctcctccggcctccccagcgaagtggcccgcgtccccgaggtcttaggcaacatctccgcccgctgcacatgcccgaaggcggcggtggccag

SEQ ID NO: 310882 - DNA, 1585 bp, Homo Sapiens
  misc_feature (677)..(677): n is a, c, g, or t
cttatttaataataaaatttattagcagatctcttgtaagacagttgaagaattcatacattttccagccccaaaaaggccacacagaatcacaaacattcaacgtgttccacgataatgatatgtatgagatgctcttccttataaactttattacgaagcaaataaaataatacattcataatatatgaacaaagaaatcatacattaagaatcctgttgtgatttgctcttaagagcaaagagctgcagaatctctaatataaaaaagaggacattttcaatgtgtccattttcctaagaaacgtgtgtatgaaatgcctccaagtttctcatactatatatacttgctttaaagaaggaaattatttctcatttcattttccaaatgagaaacattgcctaaattcatgacatccctaggattattcttagtctcaacttccacacagagatgtctgaaatagaaaactcttaagtatcagaattcagggatataagctttcacattcaaaagtgcagagaatcccaacattaacaaacaatggttccacaaaaatcaaaattacaacttagacatctctaaaataatagtaatgtcactttagagtttacaaactacagaaataacttgattgtgacacatggcgagattatagaatatttcaagtgcttcnaaatacctattagaaaaatgtgtatctatttgacaatattatgttctctggagaaagatatataaggattacagcagagacttcagtattgccaaagtaaaatttttaccttcaagttgctttctaaaattactatgaagtctcaacttcactgaattaatgaaaataaaatatattccacgacagatttttgtggcacaaatgaaaactttaaaaaatacatgaaacaaaaacaagatgagagatttcctgatacatataatactatttatattcccttatctcaatacttggaaactcaatgtcctattttgtaaactagtcatataaaatgacactagaagtataaatgaggtttaatcaattgactctgacaatctgccatctcaccattcatcactgacagcatccaaaacatgttatcatctgcccacgaggtagggtgcagagtggagaagactaaggcacgggtaactgccacacagtggcaaagtgccgaccagtggcatggggagcacacatcgtgtgccctccaaacccctgcacagccattctgcctgcatcaacgcacccagtcccttggatggcgtagaacttccagaatttcagcttctttggaattctctgagggtgaatgcatgtactcccatcgggcagttagaggtaaagacatcaagatactttcaattctggatcctggagtgaagaggccaaactttgtgccccgatcatacagcagattaaattctacataccgtcctcttctgagctgctgccacagcttctcctggggggtgaatgagtcatcacagtgctttttcacagcgggaatgtaagaaggaactacagcctggcacagctctgtcggacgcgtggtcgacgatatcccgacattccggaccggtacc

SEQ ID NO: 310883 - DNA, 2942 bp, Homo Sapiens
  misc_feature (145)..(145): n is a, c, g, or t
  misc_feature (969)..(969): n is a, c, g, or t
ggttcttgggccgggggtttgctcttggggggaacaaggttatggccccattgttccccttgccctaacgggggccgcgccccccccaaaggaaagtgttttggaaaacttttgggggggccggaggggggccggcaaggaaganttaggggaaatacgcatgggacgtggtaaaacataagtatgggtatatttatttctctcaaatgcatacaagacaataattacacagcaacaaatcttttgttcaacaatgatttgattcataagcatttgaaatttacataatttcatatcaatacccttgtatttttaaatacagtaagtaaaaaagcccccaaataaccaattcttatatttcctatttatccctctatacatccaaacttttaaaaagttacaaactgaacattatacagaacatataaatcatgtttaaaaacttgaggttttaaaatcactgcttccccaatatgattcagaaaaattctcatactgacaagtacagtcataggtggtaaagtaagttggtggcggggaaaatgaaagaagagacagacacaagtttgctgtcttaatgttttactaatcctgtcagttaaaaatggtgacgtcatgagaagtaatagtttaatatgaggaatggagtttgccttgcagcttgagacatgcatttcaagtattttcctatttgatctgagctcactgtagcaaactgatgccagaagagaataattattttcttccatacattcgctcaatgtccgcctggtaatgtgtttttaagctctttgcgtttcagcttgaaggcatctgtcaccagaccagtttcaggggtcccacggttcaggacttcaaacgaattttttactggaatttcaaacttttccagacttgctgaaatagcagcttcggaaagcattttaagtacctcattttccatttcacaactgttacacagctcctccncaagtccctttaagtcctttctttcgagctagttcagttagttccttttgatttggcacaacaaatccaatgacataagaatgataactgtttgcatatgcacaaatgttatctactagtggaagattcttcaaagctgcctctactttcccaagagaaacatattcccctgcctgtagttttacaaggtcctttttacgatcaataatctttaagcatccatcgggttcaaactctccaatatccccagtacagagccacctttgtccattttcatcttcaaagaaatcagcttttgtttttgcttcatttttgtagtaccccattgtcacactttggcccccaataagaatttcacccctggggtgtggcttatcagtattaaagtatccaccttcctcccagttttttaatttgatttcacagcaaactaatggtgctcccactctgccagtattgtagtcccacacttcggaaattgttccagccccagcagattcagtgagcccgtatccctgaccaacaggacagcagaaacagatgttcatgaatcgctgcgtggttgcagaaagtggagcgccaccacacaacaggagacgaatatttccccctagcaagcttcgaactttccggaaaacaaagctgtcgcacagtggagtattacgtccttttgaaatctgttccattttgtaattataggccagaataaacagattacgttgaaagctactcatttcactgactttattcatgacatttttgtagatccgatccatgatttccggaactgctgccatcagtgttggtttcaacatggatgtatcccctttgcttccttttttaatttttgaagactgatctgctaaagtctgtggtgaagagtaaccaatgcggcatccgtgagaaagacagacaagctcagcacttaattttagaacatgggcccagaggcaaatatcccaatgtagacatcttcctctcctagttctggaatcttttctgccatcccagttataccagcaataatgttactatgtgagatcatgactccctttggaagtcctgtggatccacttgtgtacatgattactgcaatatctgagggcaatggtttgctatgaggttggttttccatgctggccttggctcccagggcctccactgcagccatggtatgcacaatgatgcccttggggaactcggaccaggtcggtggctttccatcaacagtgatgatgtgccgcaggcgtgggaccaaagaaactatatccttcaactttgtttgtaagagttctttactagtaatgatgttggtcacctctgtttcatttaatgcatgaacaatggctggacctcctagagtggcatataatgtaacaagctgaaaattatacataaaacacgcctgtgcagctatcatccactcggccctggtctcacagaagatggcgatgttggtctttggtttctgacccaacatctgtaatccatttccaaaattaaaggctcgaacaaagacatcttcataggaaagccaattatactgtccaagaataacctttttaaaaatttttccatttggttgtacttcatcttcctcatttaaaacttcacgtgttcccaagagtcttttgttcttaactttgttttttgcatatgtaaaaactttatctaaagtatcacatccagggtataatactgaagccaaaccatccaaactattaacagatctgtatgcagaatcaggttttgaatttacaggctttgctttaattcggtttgatttttcttgtcttgactcggagaaaaaataaaacggaatgtatgttaaaatagtataaagtgatattagaaaatgtataaaatataaaagaatagggttgatggtatgttttagcttcatggtagatggttttgaagacacgtggttattcataagtactcaaaaagtagaattaacagacttcagcgag

SEQ ID NO: 310884 - DNA, 605 bp, Homo Sapiens
aaaacataagtatgggtatatttatttctctcaaatgcatacaagacaataattacacagcaacaaatcttttgttcaacaatgatttgattcataagcatttgaaatttacataatttcatatcaatacccttgtatttttaaatacagtaagtaaaaaagcccccaaataaccaattcttatatttcctatttatccctctatacatccaaacttttaaaaagttacaaactgaacattatacagaacatataaatcatgtttaaaaacttgaggttttaaaatcactgcttccccaatatgattcagaaaaattctcatactgacaagtacagtcataggtggtaaagtaagttggtggcggggaaaatgaaagaagagacagacacaagtttgctgtcttaatgttttactaatcctgtcagttatgcagcttgagacatgcatttcaagtattttcctatttgatctgagctcactgtagcaaactgatgccagaagagaataattattttcttccatacattcgctcaatgtccgctggtaatgtgttttaagctctttgcgtttcagcttgaaggcattgtcacaagacagttcaggg

SEQ ID NO: 310885 - DNA, 1454 bp, Homo Sapiens
gaagttccccaaaaatcaagtttccccgcagaggcattcttcgccaggaccttggccgatgatcaaccataaaggcagtgttctgggcagtttcatgggttcaagggcaaacagttctttctcccactcaaaagaagaacatgtctccgctgtagtgctgccagtggcccgaggtcatccagagtcggctgttgaagatgtttgggggtgactacctcctggattcctcttttcctatattcgctcctaatgaattcaataagtgcattataaatgtaggctccttttggcagaaaaaagcaactttccaggggctgagttcatgaaagaaatatagttcttggtccctgccaattttcctatgatctcggtttttagcttcctcttggaacttctcccactctttcaacattttaggatctgggaatgaaatgccataaattctctggagagtctccatatctgctttgccttcccagtacgtggaggaatttttgtgtatttttaaagccttaattttgcccgtgtgtctaacatgaggaccccggcagagatctatcaaagggccacatctatagactgtggtagttggagtattcaccttttcattcaatatccggcatttgaacttgttgtacttaaacattgccagtaaagtttctttcttaacttccagtctttcaaaagcttgtttttctttaatgattttcttacacaaagcctccagagaagagaaatcattgctagacacacccccttcttcgaggtacatgtcataatagaatccattttctattggcggaccgtagcataaacatccaccatagactctttccatggcttcacccattatgtgagcactagagtgccaatacactgcctgagcttcctcatcctcaaacttgagaagctccaaggtacaatcttcttccagagggcggtccaggtcccacacaacattatttactttagcaataacggtgttgtcggccaggccttgactaattccacaggcaatttgatatggtgtagttttccaagattccgcatcaacctgtttaccatcaggcaaagtgactttaattggcttgctatctttttctgccttttctgccagaatggaatcatgttctgcttttagtatattatacatctcaagacgtgtgtaaatatattcaggccaaggattcaactcagctcgacctccatctccagatccttctttgttcttctttttgcctccttccttttgcttctcttcaccagcaccaatcggcttctcctcgcctcccatcttccctgaaggactgctggccttctcctcaaacattggcgaacgacgaagcgatgagagaacccgaaagcgacggcctagaggagaggagccaagaggcgggtcggaggtgggctagcgcccgggacttggcctcggctggaccagctgatgcaatccc

SEQ ID NO: 310886 - DNA, 1228 bp, Homo Sapiens
  misc_feature (1094)..(1131): n is a, c, g, or t
acacccccacgaaagcagtaagaaccactaagaaactcttttatgagttggtcatctgtcaatttggatatgtgggttgtcccaacagtgagcactggctgagagccaatagcaatcgacttgtggatcgctggaaatctctcttctttagttgattgcaaatcttcctctttatttctcctaaaaggcacccttagtatttcttcctgctgctccagctgcctcagggtgaggggcttaaatggagatcctggcagtgattgacaaaatatgtcattcacaggagatgctctgaacctatatttaggatgactgcacaagagtggtgtcaaaatgacaacttcatattcacaagttgtaacttcagctactgaaagaatttcatgcttagattcaggatgacatatgtacatcacagtacttgatctgggccggttctgtttcaaactacaaggtgtaccatttcccattcccacaggatagtatggtgtcatctgaccttcgatatttttagtgggaatctcatttgatttttccttttcttctgcttctcgttctttttcaaatagaaggttcttggccaacatattcccaaggtagtactcgtgaatatttattttctgaccagtttctttctcttcatggtactgccgaatgtgttttccatgacatacttcgtaagtccaataagactcaattctgtaggaacaactgctttgtttaaatagtggctccaaaagctctcttggattagggcctttataatccttttcttcttcctcatccccacttgtcacaaggggaagtatgcatttatatttttctttatgtgcagttgtcatgatgacataattatcttctttatataaaactccagttgtgggcagagagaactcggtgccgggccagttgactcggaaagggatgtcatcgctgagttgaggaagggctcggccgccgccggacgcctccaggaggccgcagaggaccagtaacaccggcccgcccgggaccagactccgtacgccgccgcctccttcctccatcctccgccgccgctttctccagccaccgccacaacctcctctgctccnnnnnnnnnnnnnnnnnnnnnnnnnnnnnnnnnnnnnncggcgggactataaagcgcccgggtatcaccggcccaaccgccgccacgtctccttccggagagcccggcaacgccgcctccgcccccttgagcctc

SEQ ID NO: 310887 - DNA, 2074 bp, Homo Sapiens
acttttcgattgggggtctttattgatttaacataaaacttatagaatactccagagaaaacatgtgatataaatgtcattgttagagccatcaaaataattcttattttcattaataatttgtggaggaaattattgagaaatgttgattctcttatcagagctcaggaggagttaatggtgctaactgggggtggtggaaatagtcccgtgagaagcagaggagccaaatctacctcctcacactgatttggtcacctcctttatattcccaagtataacactctacacagacaatgagagagctcaatgcatgtacagaatccccggttatttatgcagtccattggatgaagcccatcttcatttcagagttctattcacaaagtaatttgaggtctctggtgttctcaggcacagatttcttgaagagcaaagcagaagtccttaggaaaattcaggctccacttacggtgccatcccttgactcaacctttagaacaacgggtttttctggttgaagaagtcctcctaagcttaatttcagggggatctgtgtttctttacaaggtttgaaggagaagttctgaaggactctgattagagcaagtttcatgttcatgagagcaaacctcatgccaatgcagtttctgggtccacttccaaagggtgtgtatatgtaaggatctatgttgtccttgttcttcttgctgaatctttcagggaggaacttctcaggctctgtccagtactttgggtcacggtgaagagcatagcttggaatcatcaccaccacccctttgggaatgaacatcccattgatctcaacatcttttttgcagaccctctcaagtctcatagcaattgggaataatctgagcgtttcattcaccaccatgtcaagatactccatctgtagcacagtatcataggtgggtggtgccttattgggtaaaactgcatcaatttccttctgcagtttctgctggacatcagggtgagtggccagttcatacataatgaaggagagaacactgctcgtggtttcatagccagcaaaaataaagataattgattgggccatgagctccagatcagacagagctttgtgggtctcagagtcttttgaattctgagagtcaatcatcagctgaaggaaatccactcggtgcttttgtgtctctttgaggcgaccttcttttatctgttttacagattttgttagaaaacttataacttttcttggaaacacagtgatatttaatgcttcaagaattggggtaaggaatggaaagacttttattgagagaacgaatggatctaatggattaaatcttaaaagcttcttggtgttttccacaaaggggtcttgtggattgttgagagagtcgatgctcactccaaatgatgtgctagtgatcacatccatgctgtaggccccaaagacgtgtttcaaggtgacaggcttgcctgtctctgcttcccgcctcagatttctcaccaacacatctccatactgggcaatgatagggaccatctccttgagttttccgctggtgaatgttggagacagcaatgatcgtattctcttccattcttcatcctcagctatagagatggcatttttcataaatcccactggcccgaaaaggcctccggtttgtgaagacagaataacattctttcactagcactgttttgatcatgtcgggatctgtgatagccagcataggctgttgacagtcataaataccccagacttttctatactttttataacattccatgtcaaacgtccaatagcccttacggtaggacaaagcatttcccaaaaaaggcagaggtgtgggccctggaattccaagcttcttaaaaagtccatgtgtacgggttccatatagatagaggagtatcaggctgacagccaggagaagccaggtttccacggccaagtttgggatgagatccatcactactttccttccttatctctctcctctgagtctttttttcagcagcgtgctgctgtttgctgggctgtgtgtgtggagctttcctgccctgcacagcagtc

SEQ ID NO: 310888 - DNA, 1251 bp, Homo Sapiens
aaacaacaaagcagaacaaaaaaccaacttgcagagaaagaaaaaagtggagcataagtggtttcccaatctgtttctctattatctggcaattgaaagtgaatcaatgtgggaaggagatgatgccatgcatttatgagcacatattagaagggtctgagacaatgcatgtgataaaagggcacctaaggaagaaaaaaagaagaggggaataggcagacactggacagaaggcgatgctgggagtccctgggccaccaaaacctgcagaaaagtggtaaccacaatgctcctagcctagttcagactgaagacctcgatacctggtgacacatgggatccttggtaggacaagcctcgaaaagttttacaatagcgagtgtgaactttatcagaaccaaagtgatgtcactaattgttttttaaccctgacaaataaatcccaagaaggctatgaagagaggattcttatgcttgtgttcctggaaacaaaactattacaaaagtgtctacaaaaaccacaactttgcacaaaggctatttcaactttacacaaaaatatttctgcaaggacacctgtccagcaactgcctgtccaaccttggtgtggcatcacccttgttattgatctttgtagctaacaataattatctcaaaacagttatgagattcttctcatattttctatggagcatctttgtcttgtttacctccctgaatttgcacatagtttataacggcaagcagattcccattgcaatattctactcccaagtaattatcctcttctttcagagaacctctctctgtttgtatttaggttgacaagagcttcatcccatgaagacctgggcagagactatcctgcagtggggtaacctcctcacagtagcaggtcgtatccaatggaggttttcagcatactcacccccacatttttccatattttttatagcactctgtgtcggatttccagagaccctgacgataggacaaaacatttcccaacaaaggcagaggtgtgggtcctggaattcccagtctcttagaaagtccatgtgtacgggtcccatatagatagaggagcaccaggctgacagtcaggagaagccaggtttccaccgccaaatttgggatgaggtccatcgccactttccttcttcaactgtgttctgtgagtcttccttttagctgagtgctgctgtttaacttggctgtttgcgtggagcttccctgccctgcacagcagcc

SEQ ID NO: 310889 - DNA, 1272 bp, Homo Sapiens
  misc_feature (11)..(11): n is a, c, g, or t
  misc_feature (61)..(61): n is a, c, g, or t
  misc_feature (219)..(219): n is a, c, g, or t
ctggaaaaaanatttaaggtcatgggcatactaaagtcttggtggcctggatatcaaaatnttaaagtgctctcctctggactcattcctccatatcctcccttccctcaaactcccactttcctgcattccctacccaaatgaattatccttgctcctaaacataagtactctttatgttaaaatctttctctaaaaacatacagggaagtgcaccgntcatatgtatatttctaaaaaattatgaaaactaaacatcctcctataactaccaccacgttttaccttttgtgtctctttgaggcgaccttcttttatctgttttacagattttgttagaaaacttataacttttcttggaaacacagtgatatttaatgcttcaagaattggggtgaggaatggaaagactgttattgagagaaagaatggatccaaaaaatcaaatcttaaaagcttcttggtgttttccacaaaggggtcttgtggattgttgagagagtcgatgttcactccaaatgatgtgctagtgatcacatccatgctgtaggccccaaagacgctgagtggagaaagatgtggaaaattaaaatcagcacctttttaccatccttcctctatgcatgcaacaggaaacccacatgtccagtcaagacagacaaacagccacagactttcagatctactagatcaccttctatcacactccatcagaaggtgttatcaggtgccagtgatgcagctggccctacgctgggtgtgatggagacactgaactgaattagacctacctctgagatcaaggagcccatcataggaagacagagacccactatcagacaactacagtagcatgtattgattgtggatgatacaagatgggtaagcactgtgcttcagcagaccaagagtagaataattcactctttctaaggggctcaagacaggtgatattgcctgactgcagactctatgcccagagccgattcctcttcagcactttacaaagcaacagtaccctgttctgagctcctagaaatatcatccttattctctatactccctgctcaagctttggaaaattccactatccccagctgtggtgagctgaggttgccctgatggcagaattatttttgtaaaatataatgacaaatgatgtcctggttaaaaaaaactctcaaaatttgatttggaaacttctatagtgagtgaccacatatcccctgtctgcccaggacaggctcagattacacctgttgttcctgcccc

SEQ ID NO: 310890 - DNA, 344 bp, Homo Sapiens
acagcaacccaacatcagtaagcattcactcatcaggtcccctgactattctgagacccctgaaaagtctcaatgattagctgaaagcagctgaagtcttcatagtcccaatcctggagtgaatacttgataaatgtcctcaaatgctcctgagaggttcaggcaggaattcttccaggacacttcatttccttatgtctgtttagtaagtggactcttcgctgatttggggactctcatcagatagaggagcaccaggctgacagccaggagaagccaggtttccaccgccaaatttgggagctgagtgctgctgtttgctgggctgtttgcctggagcttcc

SEQ ID NO: 310891 - DNA, 384 bp, Homo Sapiens
aaaccaccagcagtgttctttccttcactttatatgaactggccactcaccctgatgtccagcagaaactgctggtacagatggagtaccttgacatggtggtgaatgaaacactcagattattcccagttgctattagacttgagaggacttgcaagaaagatgttgaaatcaatggggtattcattcccaaagggtcaatggtggtgattccaacttatgctcttcaccatgacccaaagtactggacagagcctgaggagttccgccctgaaaggtacaagtctccagggaaatggagctcaccctgacccaggctggttcaagcatattctgcctctcttaatctacatgacaatcgtgtggttgtacaatcatttgctt

SEQ ID NO: 310892 - DNA, 1236 bp, Homo Sapiens
  misc_feature (1187)..(1187): n is a, c, g, or t
  misc_feature (1204)..(1204): n is a, c, g, or t
tcaaaacagtgctagtgaaagaatgttattctgtcttcacaaaccggaggccttttggtccagtgggatttatgaaaagtgccatctctatagctgaggatgaagaatggaagagattacgatcattgctgtctccaacattcaccagcggaaaactcaaggagatggtccctatcattgcccagtatggagatgtgttggtgagaaatctgaggcgggaagcagagacaggcaagcctgtcaccttgaaacacgtctttggggcctacagcatggatgtgatcactagcacatcatttggagtgagcatcgactctctcaacaatccacaagacccctttgtggaaaacaccaagaagcttttaagatttaatccattagatccattcgttctctcaataaaagtctttccattccttaccccaattcttgaagcattaaatatcactgtgtttccaagaaaagttataagttttctaagaaaatctgtaaaacggatgaaagaaagtcgcctcgaagatacacaaaagcaccgagtggatttccttcagctgatgattgactctcagaattcaattatctttatttttgctggctatgaaaccacgagcagtgttctctccttcattatatatgaactggccactcaccctgatgtccagcagaaagtgcagaaggttgatacagttttacccaataaggcaccacccacctatgatactgtgctacagatggagtatcttgacatggtggtgaatgaaacactcagattattcccagttgctattagacttgagaggacttgcaagaaagatgttgaaatcaatggggtattcattcccaaagggtcaatggtggtgattccaacttatgctcttcaccatgacccaaagtactggacagagcctgaggagttccgccctgaaaggtacaagtctccagggaaatggagctcaccctgacccaggctggttcaagcatattctgcctctcttaatctacatgacaatcgtgtggttgtacaatcatttgcttgtaagtctttttatcacaaaaaagtgataattatcaaactttacaaaccacagactagaaaaaacgaaactacattcattcacagtcccaggacaagacaaagataatcaattatgtccctgtgggcatttttctacgcctatataagattnttaaacaggaaactatncacttgcctatattactattaatatacatatt

SEQ ID NO: 310893 - DNA, 783 bp, Homo Sapiens
aggtgacaggcttgcctttctctgcttcccgcctcaagtttccgctggtgaaggttggagacagcaatgaccgtattctcttccattcttcatcctcagctaaagagatggcacttttcataaatcccactgggcataaagactgtcagagaaaaagacaaactccatgttgtgactgtaggacagcaggagggagccacatggtgacggaatgggtctgcatcttgatggtgctggtcgttgcacaaatccttcgatttgtgaagacagaataacattctttcactagcactgttctgatcacgtcgggatctgtgatggccagcacagggagttgaccttcatacgttctgtgtggggacaacggagctgattaaacttcactagcccgattctgcagctggagccacacccaggaagccagactttgatcattatgttatgtaatccatacccctagttgtacgacacacagcaaccttaggttctagttcattagggtgtgacacacagcaagagtctcacacaggagccacccaaggcttcatatgatgaagggtaatgtggtccaggcagggaagagatactgaaagacaaaagagctctttaaagagattatggttagaaatgacagtagagcattcgtatatgtttaaaatacttcattatcaaaaagaatattaggtcagtgaaaaattgaaggcaggtaaatcatcaagtgctcacaaggactaaatgctgcaagggcagttggtgtggggcccatggacatctagagctgtg

SEQ ID NO: 310894 - DNA, 1548 bp, Homo Sapiens
  misc_feature (35)..(35): n is a, c, g, or t
  misc_feature (61)..(61): n is a, c, g, or t
caaggtggagaagcctcttccaactgcaggcaganacaggtggccctgctactggctgcanctccagccctgcctccttctctagcatataaacaatccaacagcctcactgaatcactgctgtgcagggcaggaaagctccatgcacatagcccagcaaagagcaacacagagctgaaaggaagactcagaggagagagataagtaaggaaagtagtgatggctctcatcccagacttggccatggaaacctggcttctcctggctgtcagcctggtgctcctctatctatatggaacccattcacatggactttttaagaagcttggaattccagggcccacacctctgccttttttgggaaatattttgtcctaccataagggcttttgtatgtttgacatggaatgtcataaaaagtatggaaaagtgtggggcttttatgatggtcaacagcctgtgctggctatcacagatcctgacatgatcaaaacagtgctagtgaaagaatgttattctgtcttcacaaaccggaggccttttggtccagtgggatttatgaaaagtgccatctctatagctgaggatgaagaatggaagagattacgatcattgctgtctccaaccttcaccagtggaaatctgaggcgggaagcagagacaggcaagcctgtcaccttgaaagacgtctttggggcctacagcatggatgtgatcactagcacatcatttggagtgaacatcgactctctcaacaatccacaagacccctttgtggaaaacaccaagaagcttttaagatttgattttttggatccattctttctctcaataacagtctttccattcctcatcccaattcttgaagtattaaatatctgtgtgtttccaagagaagttacaaattttttaagaaaatctgtaaaaaggatgaaagaaagtcgcctcgaagatacacaaaagcaccgagtggatttccttcagctgatgattgactctcagaattcaaaagaaactgagtcccacaaagctctgtccgatctggagctcgtggcccaatcaattatctttatttttgctggctatgaaaccacgagcagtgttctctccttcattatgtatgaactggccactcaccctgatgtccagcagaaactgcaggaggaaattgatgcagttttacccaataaggcaccacccacctatgatactgtgctacagatggagtatcttgacatggtggtgaatgaaacgctcagattattcccaattgctatgagacttgagagggtctgcaatccaagctatgctcttcaccgtgacccaaagtactggacagagcctgagaagttcctccctgaaagattcagcaagaagaacaaggacaacatagatccttacatatacacaccctttggaagtggacccagaaactgcattggcatgaggtttgctctcatgaacatgaaacttgctctaatcagagtccttcagaacttctccttcaaaccttgtaaagaaacacagatcccccttgaattaagccta

SEQ ID NO: 310895 - DNA, 1341 bp, Homo Sapiens
acttttgtaaagaggtttttattgatttgcttaatataaagcttactatagaatactacagatataacacatgatataaatgtcactgttagagccatcaaaataattcctatttttattaatgattgtggttgaaattattgagaaatgttaattatgttatcagagctcaggaggagttaatggtgctaactgggggtggtggagatagtcctatgagaagcagagaagccaaatctacttccccagcactgatttggtcatctcctctatattaccaagtataacactctatacagaccatgagagagcacaatgcacgtacagaatccctgattatttatgcagcacattggatgaagcccgtcttcatttcagggttctatttgtaaagtaatttgaggtctctggtgttttgaggcacagctttctttaagagcattccagaagtcctttggggtctctggtgttctcaggcacagatttcttgaagagcaaagcagaagtccttaggaaaatttctggttgaagaagtcctcctaagcttaatttcagggggatctgtgtttctttacaaggtttgaaggagaagttctgaaggactctgattagagcaagtttcatgttcatgagagcaaacctcatgccaatgcagtttctgggtccacttccaaagggtgtgtatatgtaaggatctatgttgtccttgttcttcttgctgaatctttcagggaggaacttctcaggctctgtccagtactttgggtcacggtgaagagcatagcttggaatcatcaccaccacccctttgggaatgaacatcccattgatctcaacatcttttttgcagaccctctcaagtctcatagcaattgggaataatctgagcgtttcattcaccaccatgtcaagatactccatctgtagcacagtatcataggtgggtggtgccttattgggtaaaactgtatcaatttcctcctgcagtttctgctggacatcagggtgagtggccagttcatacataatgaaggagagaacactgctcgtggtttcatagccagcaaaaataaagataattgattgggccacgagctccagatcggacagagctgaaaggagaggaaagacattttaggtaaatcagatcaatgtagggcatcacagtttagatgaagagaaatctaagtgaagccctcaaatccttaagggaaaagaatagaaaagcaattcagaggtacacttgggggtggtttcattctgatgtgtattctacaagaaccagaataaggcaaatcattttaatcaagttttccccaggtcttcgagaatgtggcccat

SEQ ID NO: 310896 - DNA, 1180 bp, Homo Sapiens
  misc_feature (207)..(207): n is a, c, g, or t
  misc_feature (356)..(356): n is a, c, g, or t
ctttcttgaagaccaaagtagaaatccttagaataactcattctccacttagggttccatctcttgaatccacctttagaacaatgggtttttctggttgaagaagtccttgcgtatctaatttcaaggggatctgtgtttctttacaaggtttgaaggagaagttctgaaggactctgattagagcaagtttcatgttcatgagancaaacctcatgccaatacagtttctgggtccagttccaaagggtgtgtatatgtaaggatctatgctgtccttcttcttactgaacctttcagggcggaactcctcaggctctgtccagtactttgggtcatggtgaagagcataagtnggaatcaccaccattgaccctttgggaatgaataccccattgatttcaacatctttcttgcaagttctctcaagtctaatagcaactgggaataatctgagtgtttcattcaccaccatgtcaaggtactccatctgtaccacggcatcataggtaggtggtgccttattgggcaatactgcatcaatctccttttgcagtttctgctggacatcagggtgagttgccagttcatataaagtgaaggaaagaacactgctggtggtttcatagccagcaaaaatgaagattattgactgggctgcgagctccagatcagacagagctttgtgggactcagtttctttcgaattctgggagtcaatcatcagctgaaggaaatctagtcggtgcttttgtttgtcgttgaggcgacttttcttcattctgtttacagatttacttaaaaaatttatggtatcttttggaaacagagagacatttaatgcttcaaaaactggggtaaggaatggaaagagtattattgagagaaataatggatctaagaaaccaaattttaggaacttcttagtgctctccacaaaggggtcttgtggattgttgagagagtcgatgttcactccaaatgatgtgccagtaatcacatccatgctgtaggccccaaagatgctgtagttaaatgtgcagactcaagtcccagaaggatatggctttctccagcatggagcagtaagtgacattttgtaatgaattttgtgatgtcttttctccttgagttttccgctggtgaaggttggagacagcaatgaccgtattctctatcc

SEQ ID NO: 310897 - DNA, 1709 bp, Homo Sapiens
  misc_feature (107)..(107): n is a, c, g, or t
  misc_feature (121)..(121): n is a, c, g, or t
  misc_feature (158)..(158): n is a, c, g, or t
  misc_feature (162)..(162): n is a, c, g, or t
  misc_feature (164)..(164): n is a, c, g, or t
  misc_feature (177)..(177): n is a, c, g, or t
  misc_feature (179)..(179): n is a, c, g, or t
  misc_feature (191)..(191): n is a, c, g, or t
  misc_feature (193)..(193): n is a, c, g, or t
  misc_feature (195)..(195): n is a, c, g, or t
  misc_feature (236)..(236): n is a, c, g, or t
  misc_feature (248)..(248): n is a, c, g, or t
  misc_feature (284)..(284): n is a, c, g, or t
  misc_feature (291)..(291): n is a, c, g, or t
  misc_feature (301)..(301): n is a, c, g, or t
  misc_feature (324)..(324): n is a, c, g, or t
  misc_feature (330)..(330): n is a, c, g, or t
  misc_feature (335)..(335): n is a, c, g, or t
  misc_feature (337)..(337): n is a, c, g, or t
  misc_feature (339)..(339): n is a, c, g, or t
  misc_feature (347)..(347): n is a, c, g, or t
  misc_feature (352)..(352): n is a, c, g, or t
  misc_feature (373)..(373): n is a, c, g, or t
  misc_feature (375)..(375): n is a, c, g, or t
  misc_feature (414)..(414): n is a, c, g, or t
  misc_feature (417)..(434): n is a, c, g, or t
  misc_feature (449)..(449): n is a, c, g, or t
  misc_feature (454)..(454): n is a, c, g, or t
  misc_feature (457)..(457): n is a, c, g, or t
  misc_feature (470)..(470): n is a, c, g, or t
  misc_feature (475)..(475): n is a, c, g, or t
  misc_feature (487)..(487): n is a, c, g, or t
  misc_feature (505)..(505): n is a, c, g, or t
  misc_feature (508)..(508): n is a, c, g, or t
  misc_feature (516)..(516): n is a, c, g, or t
  misc_feature (527)..(554): n is a, c, g, or t
  misc_feature (761)..(761): n is a, c, g, or t
  misc_feature (820)..(820): n is a, c, g, or t
cagggaagctccaggcaaacagcccagcaaacagcagcactcagctaaaaggaagactcacagaacacagttgaagaaggaaagtggcgatggacctcatcccaaanttggcggtggaaanctggcttctcctggctgtcagcctggtgctcctctanctanangggacccgtacananggactttttaananantgggaattccagggcccacacctctgcctttgttgggaaangttttgtcctancgtcagggtctctggaaaattgacacaaagtgctanaaaaaanatggaaaaangtgggggtgagtattctgaaaanctccantgganananctgctacngtgangaggttaccccactgcagganantctctgcccaggtcttcatgggatgaagctcttgtcaanctnnnnnnnnnnnnnnnnnngttctctgaaagaanagganaantacttgggagtanaaaantgcaatgggaanctgcttgccgttaaaaanaangtgcaaantcagggaggtnnnnnnnnnnnnnnnnnnnnnnnnnnnntatgagaagaatctcataactgttttgagataattattgttagctacaaagatcaataacaagggtgatgccacaccaaggttggacaggcagttgctggacaggtgtccttgcagaaatatttttgtgtaaagttgaaatagcctttgtgcaaagttgtggtttttgtagacacttttgtaatagttttgtttccaggaacacaancataagaatcctctcttcatagccttcttgggatttatttgtcagggttaaaaaacaantagtgacatcactttggttctgataaagttcacactcgctattgtaaaacttttcgaggcttgtcctaccaaggatcccatgtgtcaccaggtatcgaggtcttcagtctgaactaggctaggagcattgtggttaccacttttctgcaggttttggtggcccagggactcccagcatcgccttctgtccagtgtctgcctattcccctcttctttttttcttccttaggtgcccttttatcacatgcattgtctcagacccttctaatatgtgctcataaatgcatggcatcatctccttcccacattgattcactttcaattaaaagccaaaactccttcatttagactgaatttaacatgtgcttttgaaagaagggttgagagataatagagaaacagattgggaaaccacttatgctccacttttttaaactttctctgcaagtatggaattttttgttctgctttgttgtttaaatttaagccaaaacttcttaatagaaggatatacaaatatttattggtttataccattgcacttactttgaagaagagatgctgaatattattaaaccattgtgttccctggtgggctgatggactgtgattttataaggtggtctcagccaattgcagcagctgttccctgtcagaggggctagaggtttggtgagagcagtggatgaggtgcagtggtttgttttgttcactagaagcaagtgggagaaaggtttgcctctttgtacttcttcacctctcccctcaggcctcagaatcacagccctgactgggaagtgcctgggagttggctgggccctccgggcccatggcttagtggacagatgacccacttttagagtccagtggcccccaccaactggccttg

SEQ ID NO: 310898 - DNA, 1044 bp, Homo Sapiens
  misc_feature (945)..(945): n is a, c, g, or t
  misc_feature (955)..(955): n is a, c, g, or t
  misc_feature (960)..(960): n is a, c, g, or t
  misc_feature (964)..(964): n is a, c, g, or t
  misc_feature (978)..(978): n is a, c, g, or t
  misc_feature (980)..(980): n is a, c, g, or t
  misc_feature (996)..(996): n is a, c, g, or t
  misc_feature (1011)..(1011): n is a, c, g, or t
acattagattaagcccatctttatttcaaggttttattgactaagttgaaatctctggtgttctggggcacagctttcttgaagaccaaagtagaaatccttagaataactcattctccacttagggttccatctcttgaatccacctttagaacaatgggtttttctggttgaagaagtccttgcgtgtctaatttcaaggggatctgtgtttctttacaaggtttgaaggagaagttctgaaggactctgattagagcaagtttcatgttcatgagagcaaacctcatgccaatgcagtttctgggtccagttccaaagggtgtgtatatgtaaggatctatgctgtccttcttcttactgaacctttcagggcggaactcctcaggctctgtccagtactttgggtcatggtgaagagcataagttggaatcaccaccattgaccctttgggaatgaataccccattgatttcaacatctttcttgcaagtcctctcaagtctaatagcaactgggaataatctgagtgtttcattcaccaccatgtcaaggtactccatctgtagccacggcatcataggtaggtggtgccttattgggcaaaactgcatcaatctccttttgcagtttctgctggacatcagggtgagtggccagttcatataaagtgaaggaaagaacactgctggtggtttcatagccagcaaaaatgaagattattgactgggctgcgagctccagatcagacagagctttgtgggactcagtttctttcgaattctgggagtcaatcatcagctgaaggaaatctagtcggtgctagaagcaaaaggagagatttctttggcagaaagtgactcgtgaagtcagaagtaaatcaaaagtgcagtcctcaacctcccttcttgacttcctccctcaacctccctatggcttcttganacgtgttacngagtnacantgaacaaaaaatananctaaatcttggaaagnggatgtttcctgaanaaatctagcaacatgtcaattgcttttcgcttt

SEQ ID NO: 310899 - DNA, 3030 bp, Homo Sapiens
  misc_feature (1710)..(1719): n is a, c, g, or t
tacttagcattattgtgataacagtaaacaggtgaaccagggccagcaatattgtacaaagatcttatgcttctgccagtagcaaccgttctctatgtttctccctttgtttttctcctcagaggcttcctacattatgtcagtgaaggaatcagtgattatgctttttataaaaattctcctggggagtggtgaggaggcatttttgctaaggcttcacctcttcccttcatctccaggggtcatcccctcaccttattgggcaaaactgcatcaatctccttttgcagtttctgctggacatcagggtgagtggccagttcatataaagtgaaggaaagaacactgctggtggtttcatagccagcaaaaatgaagattattgactgggctgcgagctccagatcagacagagctttgtgggactcagtttctttcgaattctgggagtcaatcatcagctgaaggaaatctagtcggtgctagaagcaaaaggagagatttctttggcagaaagtgactcgtgaagtcagaagtaaatcaaaagtgcagtcctcaacctcccttcttgacttccctccctcaacctccctatggcttcttgaagacgtgttacctgagtcaccagtgaacaaaaacattcatctaaatccttggaaagcaggatgttttcctgaaacaaatctagctatcatgtccaattgctttttcgcctttgccctccctgtttctcatcttctctgtcttttggatacagctttctggccaaagagttgccggttccatctctggtcataactgcttacccaggaagaagtactggatcttttattcttctacctttttcttcagcagtgtccgtatagattaatctcctgacatttccagaactcatcagcagcttttttgggggagcattttcaaatattccaacattctcaaactctatataatcttcagtgacagctgggttacctggtcctgtctccctgacctgcagatatcttttggctggcctctagggctcgtgaaggcaaagctgagttagccagccttgcagcctcaattctcagagaagacctctgttcactcgaggctgtcagagggctcaaatgtaacacacactacacttcagcaggtggcctgataggaccttttgttggagaatgtgtaaaataatagccttgtacttgaaatgactctttaccaatctatgatctagagaaagcataataccaataaaatgtatttccaaacagtaatgtttatcctttgacaatttattgaagggaagtgctgtgataaggttttatctgaataatatttatgtcatggcatactaattcttgtgcctgatatcaaattttaagtgctctctctgactcattctcatatctccttcctcaaactccactttgtgcattcctaccaaatgaattatcttgctctaaacataagtactctttatgttaaaatctttctctaaaaacatacagggaagtgcaccgatcatatgtatatttctaaaaaattatgaaaactaaacatcctcctataactaccaccacgttttaccttttgtgtctctttgaggcgaccttcttttatctgttttacagattttgttagaaaacttataacttttcttggaaacacagtgatatttaatgcttcaagaattggggtaaggaatggaaagacttctgtagnnnnnnnnnnccaacagaaaacgaaaccattgtgaacatacaaaatttacctggagcaattctaattttctctaccaatcagaagagtgaaatacatcagtgttctcaactggaagccattccttctatgacttttgcccctcttccaggccagtggctgagcaagggaaggtctgtgcatagggaccaccactacagcagtgagatcagcagccccttctgcattttttgaatgatgaaaggaacaaaattcaatgccctaatctctttgcctttatgtattgggctagggtctcttaggataacccaaatcataatttgctgcttaaattaatcatgctgttcaagaaatcagatagaaataacacagtgtatctctgtcacctatcataggataaagctaaaatcaataaggtaacgaaaattgggaaactcacacatacgtggaagttaaacaataaacttttaagcaaccaataagttgaagtagaaattaaaagggcaaatagaaactgttttgagctgagcaaaaattaagatgtgataggccagaatgtcatgttatttagcaaacaagtgcccagagggaaatttatagttgtaatgtctaaatttagaggaaaaaaacccacaaatcaataatctacattcatgccacaacacggtaaacggagaagggcaaactaagcctgaagccagcagaagaaagaaaataatacagactaaagtacaaattcatgaactagagaattaaaaaaaccctgaaaaattaatatcatttctatgaagtgtccagaataggcaaatctatagatgcagaaagttgactagtggttatatacgacaacaggatttctggcagggggttgatagctaaacatgtatgaggtttctagaatgacagaagtgttttaaagtttacaatggtgatggtcgtacatatgttcatatgtactacaaaccattgaattgtaccttttaagtggatgaattatacgatatgtgatttatatgtcaataaagcagttatttttaagagagagggagagaaaaggaaatagtagtccacatacttattgagagaacgaatggatctaatggattaaatcttaaaagcttcttggtgttttccacaaaggggtcttgtggattgttgagagagtcgatgctcactccaaatgatgtgctagtgatcacatccatgctgtaggccccaaagacgtgtttcaaggtgacaggcttgcctgtctctgcttcccgcctcagatttctcaccaacacatctccatactgggcaatgatagggaccatctccttgagt

SEQ ID NO: 310900 - DNA, 662 bp, Homo Sapiens
tcatcaaaaatgtcataattaaactatgaatattctttctaaacaatgggcaaagtcatagtgggttaactttcacctatgttaataatcaaattctagttctgacaaaggccccacgccaacagtgattacaatgaccaaaaatatttacttgttggttctcattcagttctatagatttctccttaatgtgcaggaaagcatctgataatacttttgtaaagtggtctttattgatttaacataaaacttatagaatactccagagaaaacatgtgatataaatgtcattgttagagccatcaaaataattcttattttcattaataatttgtggaggaaattattgagaaatgttgattctcttatcagagctcaggaggagttaatggtgctaactgggggtggtggaaatagtcccgtgagaagcagaggagccaaatctacctccctcacactgatttgggtcacctccctttatattccccaaggtataacactctacacaggacaatgaggaggagctcaatgcatggtacaggaatccccgggttattttatggcaggtcccattggggatggaggccccatctttcattttcaggaggttcctatttcaccaaggtaatttgagggtctctggggtgttctcagggcacagg

SEQ ID NO: 310901 - DNA, 470 bp, Homo Sapiens
tttacttagcattattgtgataacagtaaacaggtgaaccagggccagcaatattgtacaaagatcttatgcttctgccagtagcaaccgttctctatgtttctccctttgtttttctcctcagaggcttcctacattatgtcagtgaaggaatcagtgattatgctttttataaaaattctcctgggggagtgggtgaggaggcatttttgctaaggcttcacctcttcccttcatctccaggggtcatcccctcaccttattgggcaaaactgcatcaatctccttttgcagtttctgctggacatcagggtgagtggccagttcatataaagtgaaggaaagaacactgctggtggtttcatagccagcaaaaatgaagattattgactgggctgcgagctccagatcagacagagctgaaaggagaggaaagacattttaggtaaatcaggtcaacgtacaacatc

SEQ ID NO: 310902 - DNA, 578 bp, Homo Sapiens
tttttataaatatttcctttttctcagaaatacccaaaagaaacatgaaatttgttgctgtaaaatttccgctgggttcttcaacaggaaaatattttcatttgttagtctttagaaaatccatgaattccaaggctcagttaactgacgagcaacctttaaaaaatacagtcaacgagtccaacccataggattataaatttaaagaaaagctgtgatctgtgaccagaatgaaaccacttgtcttctaaacttgtatttcagtagtcaagatgaatactccaaagttaatgtttctttatgcctcagaatgttaagcttaagttatcaatcttattttcttttcagtgcagagtttcagagacttaaacattcccaatttgtcccattttacttcttgcttcttttaaatgaagttttccttttttgttttcctgcagtggatcccagattgtgggtaagcagaagagtcttttaaagattccgaaataaactcccaagcttgttagctcttgttgaattgaggccttttcctcagttgccagttgtatcttgaggtcgctttctctccccggccg

SEQ ID NO: 310903 - DNA, 372 bp, Homo Sapiens
atacaactggcaactgaggaaaaggcctcaattcaacacgagctaacaagcttgggagtttatttcggaatctttaaaagactcttctgcttacccacaatctgggatccactgcaggaaaacaaaaaaggaaaacttcatttaaaagaagcaagaagtaaaatgggacaaattgggaatgtttaagtctctgaaactctgcactggtttggagtattcatcttgactactgaaatacaagtttagaagacaagtggtttcattctggtcacagatcacagcttttctttaaatttataatcctatgggttggactcgttgactgttttttttggttgctcgtcagttaactgagccttggttcatggtttt

SEQ ID NO: 310904 - DNA, 641 bp, Homo Sapiens
aatggttggatttaggaaacacaaataatatttgtgtgcagaaagatattaatttaaaaaagaaaaagaatactttatataaaatatacatcctagagtgttataggtagaaaaaaatgtgaggcacttagatgaaacagtgaaggaggaaagcactgagattatctttttataaaaagcaccaaaccatttattttaacatctgagataaaagcagaggttaacatgataggaaaaactagtttagttctctaactttgtatttggggaactaataagaatccagtagctcaaaactcaaagtattttatttttactgtgacagaaataattcaaatagagaatattttctaatttaaaagaatcttagtttccctgataaagttttgtatattttgtggtgcccagaataatgtgaaatgtagacggtacctcaccactccgtggcagcaccctttctatcttgactgtagtatatgtaattttgataccatttttaaactcccttttctaaaagcaaaaattaaaatttggtttggaataattgtgaatagcatgcatcaatgcctccatgtgaacttgctgacgtccaacagtgacagttttatttttccataatccttcacaaactaatttaatcc

SEQ ID NO: 310905 - DNA, 1150 bp, Homo Sapiens
ggagttttcataaactacataatttaccagggtttatctcatcttctcaatacatagatttaacaacatggaatactctgcttttcaagagctgcgtaagctagtcctgagataagatgttcaagagagcatgctaatttgcatgtgctagatgagagacacctttacagcccctccgctccaaccagaggtgacacaggaagctctgtaaagttcaagtaaagcttgaacacaggaacactacaactgccagatgctgaggagaatcaggaaagcaatgagctagactctttttttagtcaattaagtgggttgttttagatgtatagagtattgatatgagttaacactttttagtagatggcaactgtgggcttgatgttcaaaagtaatgttcgagttagggttcatggtccctttctcagtaattttttcttaataaaagtaaacactggttcaaagacaaatagcaagtattccctcctgtgctatttatagagggctcaattcgtagaaaggcataccctccaatgcaattctgtggctgtcccttacagtggtttcagaatcacgaaaaaacagctagtaaataggatagaaacaataaaagaaagagtttagaagttccctgtgagcaatctgtgtgtcttcagcgagcttgaaccaaagtcttcatatcctgacccactgaattataagcaattgctacttgcccatcttgccaaagtagtccaaacacgcttcaatgaggacagttatatttagcaggtcctcacccctgcaagagacagcatatcctcactattattattcatgtgttattggcaaaaacatagcttgcatctttccagaggcagagtttcaaagacagggttttctttgagacataagcacattgcttaagtacataacaaggttattaacacttgcactcaggggaaaggaaatagctattgcaaattaatgtgtgcaacttaataaaataagctgtttgtgtatatgaatttagctctaggtaagcaaaatgcacacatcatataaaaataaattgcaatgatcagaccaagtggctgtgctggacatcggacatgctgttgccatcaggagaactctttcttatatgcgatagccaagatatcttctttaattg

SEQ ID NO: 310906 - DNA, 866 bp, Homo Sapiens
  misc_feature (57)..(57): n is a, c, g, or t
tttttctttaaaatgaagcttttatacatagctatccacatatgtacaagcagctcnttaaggcaatgagaaggttaattccaaatttttatgagccatggaggctctacagattatacggagtttcaaccagtgattaaatctgaggtaacagcatctggaggctcagccttagcactgagtggagggaaaaattaagccaagagtaaaatcttcacattctgaaaataatagtggcaaaacataacactcctggactgcgggaaataaaattgagagggacatgattagaagtaaacttctagaattctactaattccaggttcttcaaattggtacaactggtgacaatcccagagtcaccagtcatcacatcaaagtttgatagagaaagatgacccacaggagcagccttgctgtgcttgaggattgttcaacacttgaaatgagcttcggatcagttcttggctgaagtccacctgggcccctttcacgaaggccaagctatcagagtcaaccaccactcttgccccaccctgttcaaataccctgtcgtcggggttgataactgtatccagtgaaaatttgtattggaatccggagcatccacctccctccacttgcagcctgaggaattctgacccttcggtgatttccaaaagcctctggacgcaactgtctgtgaggcggatctgcccttcgccggcctcggggctggaggacgacgcctcccgacgcgcctggggtcccagggaggccgtgaggagcctgcccctcggccagggagtgaccgctctctgcgtcgcggccgttagggacgacccccaggcggcagccatcttcctccacaagctccgcccctcgcc

SEQ ID NO: 310907 - DNA, 2522 bp, Homo Sapiens
  misc_feature (34)..(34): n is a, c, g, or t
  misc_feature (42)..(42): n is a, c, g, or t
  misc_feature (507)..(517): n is a, c, g, or t
aagaagtgaaaaattaaaaggccactcctaaagnacaccccnggtctccctctacatattccccaatatggaaatgctggctagcaatccatggcactctcctcagaaaccagcccactggaagttaaaacttctggatttcaaaagctagtacaggctgctaaatttaacaaaggaacaaaccttcataaatggtacaaactacctgcccaacacactcttctattttccagaccctttaatattgagtagtctagtcttggattgactatggtgggttaggtctaatctaagtatcttaatagctatctagggataatgaataaaattaaatacaactggtacctcaagtatcataagagaataaatttatgaagacaagcagaccaaagcaactcaagattttctacacctgactactgtagctgtaacttcaaataatgtgttacctatgaaacttattatgtacgaattagttcttaaagacagaaatgatggaaacatgtnnnnnnnnnnncaacagtaagtgttcaaacagatccctgttttgttataaagaactggagctctaggtggcatctagtggatattttaatagcaataaaaataaaaaattgggtgatattccaactaaataaaaaatgcagctgctttttaaaatttaaaaacatactttaccaccctgaattataaactcaaggcaagtagcttattattccaataaggacgtggtgtgataaattctctcacacaggttgtcatcaatctcaaatagataaaaggcacagaaccgatctaattctttcaatgcattttaaggctttgtcccgctaagggtcaactttcactgtggttaaagttaaatttattttctctaaaactcttcttttgaaaggatctgttatagagatcctttattcacctgctcctacagttccacatcaagactaaaataaagataaaagaattagggtcttagtattaaaatgcttttaactggtgacaagaaggaagaagcctatagttaaatatcccagaaatttatttgatgtttgcttgaatacattttatatagaaagattgggattgtttgccttggatgcccctggcaaatctcgtgaggcattgaactagaaaggggtgccaatctggagacatcagaaatggaaatcacaagcccaattttagaactattcttaaagatttgtctctagtgaaatgaggccactcccttaaaaatgctcaaagtgttggagctactgtgtgacaacagctgacatttaggagggcatttcatgttctgatctgttagaacatttaaatacttagaaataaaaaatattcagctttgaagttttcaatactggaaaactttcaagtctaggatttacagccaggaagcgctgctctgtgttccttaaattggactctgtttcccacaaagttaatcttcagctttggcttccatttcttctgcatcatcatctccatccacttcggcattttctctttcaagcctctccatctgcctcgcaagttcagtctcatctgtatctgtgaccactttgggctccatttgaacattgaacacacccctcttttcctcaatcttctctttgataacagccatagcttgactgaggacagaaaggccttctgttctctccagggttgtcgtagtcattacataccgaggaggagctattagattaatcttaatgggcatgttttctgtagaacaattcaaacctgctcttaggggcttcttttacagcatcaattgccttcataaccataaccaagccacttcaatatctgctcgaattttgacagcctgtggggtcaagcgcctattaatattattaatgagtacttcccgttcatcttcattcaaatctaaactatccaaaatagatgggtctgagactgcatgcttaaatgcatcataggcaccatatccaggtctcttgtacttgtcatcaaagacccaggcagtcctctggaataggctttccagctgctcatccttggtgtattctaacacctcagcaacatgacgaagaatgctataaacagttttggattttgtgaatttgtcttcacatttgattgcttcctctggagaaactcttctttttgacaaatcaatatatcctttttctttgtccaccctaatgacaaccacacactcattcctgccaattcggatgagtttgttgatagaacggatacgccttctggataattcactaagaagaatcatgccttcaatgttgttgtattccagcaagctgacataagcccccatttcagcaatggatctgacattcaccatcactacatcttccacctcaggaaatttgtgttgataaaatctacaacttagacccggcattctgaggtatgtgtgtgattcccgcactggagcccagagccgacttcttcaatcacagagaccagacttgcttccccctcaccggccgccgatcctcctcagcgtgcgcttcgctcactccaccgcc

SEQ ID NO: 310908 - DNA, 734 bp, Homo Sapiens
  misc_feature (31)..(31): n is a, c, g, or t
  misc_feature (33)..(33): n is a, c, g, or t
  misc_feature (49)..(49): n is a, c, g, or t
  misc_feature (72)..(72): n is a, c, g, or t
  misc_feature (76)..(76): n is a, c, g, or t
  misc_feature (138)..(138): n is a, c, g, or t
  misc_feature (299)..(321): n is a, c, g, or t
ttttataacagacagtaattttatggaaacntntttttttgtctaaaantatgcatggagatataatttctngttnataaattaggttaagtctaacatcattatttgaaaccagtgttattaacaaaaatgaacttnttctttgctttattgttggtttacaggaataattttaaaccaacctcaatctatctttaaaaatcttcctgccttcaaatgcccagcaacccttataaggtagggggcagccctttgacagcaacattcatcattcaccaggaatgtagaaccacaagtgnnnnnnnnnnnnnnnnnnnnnnngattaaatcattcccaacaattcctatttgcttttccaaagcatgctatgtctaattctgcctttctatgcagacaggtgggagagggagcccatagagtatattaatgttaattaaattaacttcctttaaaagctaacaggatggcttagtgtggatgaggatgaactgctgtggatgacactagcagataatgaagtaaactttaaacccagattagtaacatgtactccagtaactgaccagctcagatagagacttctcatttactctggatcacatgtacaatattttaccttccaattaaatatagtgccaaaatctacaacttagacccggcattctgaggtatgtgtgtgattcccgcactggagcccagagccgacttcttcaatcacagagaccagacttgc

SEQ ID NO: 310909 - DNA, 457 bp, Homo Sapiens
  misc_feature (13)..(13): n is a, c, g, or t
  misc_feature (27)..(27): n is a, c, g, or t
  misc_feature (43)..(43): n is a, c, g, or t
  misc_feature (54)..(54): n is a, c, g, or t
  misc_feature (65)..(65): n is a, c, g, or t
  misc_feature (130)..(130): n is a, c, g, or t
  misc_feature (167)..(167): n is a, c, g, or t
  misc_feature (170)..(170): n is a, c, g, or t
  misc_feature (189)..(189): n is a, c, g, or t
  misc_feature (200)..(200): n is a, c, g, or t
aacaggacgaagnaaggctataaacanttttggaatttggtgnaaattgtcctncacatttggantggcttcctctggaagaaactccttctttttgaacaaattcaatatatcctttttcctttgtccnacccctaatgacaacccacacactcaattccctggcnaanttcgggatgagtttgttgnatagaaacggnatacggccttctgggataattcactaagaagaatcatgccttcaatgttgttgtattccagcaagctgacataagcccccatttcagcaatggatctgacattcaccatcactacatcttccacctcaggaaatttgtgttgataaaatctacaacttagacccggcattctgaggtatgtgtgtgattcccgcactggagcccagagccgacttcttcaatcacagagaccagacttgcttccccctcaccggccg

SEQ ID NO: 310910 - DNA, 1051 bp, Homo Sapiens
  misc_feature (74)..(85): n is a, c, g, or t
tcttacttttcatctctatctttttgttttactttcagagaaatttccccaactttatcttccaatccttctannnnnnnnnnnncctgttaacttttattaactggggttataaggagagtctggtcacaacacacattatgaaaacattaggaaattacagaaggacttgcaataagtttaaacagaacaaattaagccaaccccttggtcatctgagaaacaataaggtaaaattgcagagaccaaatctttgtcagcgataaaggatacagaataaaaacgtagacatcatcgccccctggtgttgtaaaataaacatgcaatgttatttatttattcatttttgaagttgtaatcttctcctttgtcactgagcctcaattatttccccaatttcaagccctctttagacaatcttttccctgtcatcaataactttcaagtatcttatttgaaaatataatttgtactaattcctctttcagactccataaattcctttccaggaaactggccacctcccagcacaagagcctatgctcttgctctttgaaatgcaaaccaaaacaagagctttagtctttcatcaaaattagaggattagcatgtatttattgcaaaccttaatttcctctaaaaggcatctttactctgcaacttactcgtcattgccatttttcataaccagaatgcattccttcaccgtctgcctcctgacttggcaaccatcaagaattctggcctgaccagttaacttgctaaaccatctttgctgttatataccaggaaacactggaaaagagacataaataatatacctccatatcctagtgtcctggcttaatttataggcagaatttcgtttgttggctaagggaagaaaaaccatctacgtagagtgagcttgggaggaagctggagtagggagaaaacatgatggcaggataggttggtgggaaccgtgggtgcagtcctgctcccaaggttttcatttctgtgacaagagctcttttttgtatgttcacttttattgattcctgtttttatt

SEQ ID NO: 310911 - DNA, 1535 bp, Homo Sapiens
ttttaaattagcatgggtgataatttatttaggtaataagcatagattacacttaatggcttagacattatacattatgaacacagtattttatgttgaagtaaatgtatatgataattaatatgatatctaaatgtaactcagaaattgggaattagagagtttaagcaaagttaagcacgtattacagtgcatcagcacttaaattaaaggcttaaggaaagtttcacaatggcaaagcatatcatacggttcacccataccacgtgttagggatttgtttattttttagattctcttctcttttccccataaaccaactcattctgttactgaagaacattgcttctttcttgacaagtaacacaacatcaaaatttaggcttctggagctgaggtgagtaatctgtcagcagggacaccatgacagccatgattgtccactttctgttttctgcctctgggaacactagtgatcgaggagaataaaagacttcatcatccacttcttctggctttctgggcaagcagtgtaaaaatgtccagtcagaggcagcaactttagcagtcttcattgtaacctggtaaccttggaaagcctggagccgctttttcttctcctcttcttgtcccatgcttatccaagtgtctgtaattaatacattgcctccatgcgctgcttccaatggatcatttgtcagcaacagcttggtaccattctctttggcatactgctctgccaacttggttacactagcatccggctcataaccctttggagtagctgcctgaaggtgcattccgaatttcgctgcgctcatcatgatggagtgcaggatattgttcccatccccgatccagctgagggtaagacctttcagagagctatagtgttcctggagcgtgaggtaatcagccaggatctggataggatggtacaaatctgacagcccattgataattgggatggatgcttctttagccagggtgtccaaatctgattgtttatacactcgagccaatactgcatctgccatgctagacaatacacgggccgtgtccgtgagactttcattcacacccaaatgaatatcttgtgtggtaagaaacaaggattgtccctcaaaaatcatgcctaaggacttcccttgcaataaaggcaaatactctcctttctgttttatcctaaatttcagatctgctgatagccatagcatatatttaatttcttctccggtaaagttttttagagtgagaaggtcacggcccttcagctgcactttattttgtagtggttgtccacaccgaaaatttcgaaccatgaagttgtgaccatttctaaaagctgcattgtttaacaggatcctcagattaaacagcatcttcttttaattgtgtaaaggacgattctatgcccttgaaaactccacagcaagttagccagcgggggccacctaaaaactaagaaatgtgttcagttgcagtgagggagcaaaggtaatatcacccttcagcttccttatcaaagtcccctc

SEQ ID NO: 310912 - DNA, 646 bp, Homo Sapiens
  misc_feature (613)..(613): n is a, c, g, or t
gggcgggctcctagacggccgcgcgcccgggaacccggcgcccacagagccgcggcaccatggcacctgctggacgcccgggggccaagaaggggattttggagcgcctggagagtggggaggttgtgattggagatggcagctttctcattactctggagaagagaggctatgtgaaggctgggctctggactccagaggcagtgatagaacacccagatgcagttcgtcaacttcacatggaattcttgagagcaggatcaaatgtcatgcagacttttaccttttctgccagtgaggacaatatggaaagcaagtgggaagatgtaaatgctgctgcctgtgacctcgccagggaagtggctggcaaaggtgatgctttggtagcaggggggatctgccagacatcaatatacaaataccagaaggatgaagctagaattaaaaaactttttcgacaacagctagaagtttttgcctggaaaaatgtggacttcttgattgcagagtattttgagcacgttgaagaagctgtgtgggctgtggaagtcttcatgcgtgatataacccccggagaatgtgctgtgaagcttgtggcacgggctttcatcgntggcgtgctgccgctttggccccacaccgcttg

SEQ ID NO: 310913 - DNA, 589 bp, Homo Sapiens
ttgtttcttctttttactaaatagacatcatcgcactgaacaaatgatccctgaatgaaaacttatatgttattgttataggaatgaaaatgtttactcagaaaggtattctttagtcagtctgatagacacacattccttagcaagttttattatgcatatgtttatattctatttggtaatttttataactgttttgctatatttacctttaccattcaaaatctgctttatgtttggaccagtagaaaaagtgacatttctcttagtattttgagcacgttgaagaagctgtgtgggctgtggaagtcttaaaagaatcagatagacccgtggcagttaccatgtgcataggcccagagggagacatgcatgatataacccccggagaatgtgctgtgaggctggtgaaggcaggtaatttggacccataccgtgatacacagctcagttgttgcttacgaaatttaacaaagtgtgcttgatattgtgagagcagtttggaaatagaagaatgaactccaatcagttttcttatctgtaaattgtgggaggtggaggggaatggctaacctctaaggtaccttcc

SEQ ID NO: 310914 - DNA, 941 bp, Homo Sapiens
  misc_feature (143)..(143): n is a, c, g, or t
  misc_feature (181)..(181): n is a, c, g, or t
  misc_feature (215)..(215): n is a, c, g, or t
atttcaggcctggccccatacccaagaaaagcctcctcccaggtggagaaagccctgcccccctcgcacaaggggaagggctgacaagcccaggccccttcggggaaatttctggatccccgattccaaatgggccaaattcnctggcactctcaaaggtagccaggatgccgtcttttcntatagcccccaaatcccaactcccaacagcgagnaccctttggaacgttgtgtatagtgatggccaagatgagcagtgcgatcctcctccaagctgctgccgccgggctgtgccagattccctcgagaaggcacagggacagcaggaccctctggaaggccagtggctgccgccttctttctctgatatgcctcaccattctcactcttgtctgaaagaagcccagctctacctatccggatggaaagttcactctcagggaagagcagcgcgggaccctcaggatcagacttcttcttcatcaacgtagagccgaagttcagtgccagggccgtctgggggtcttctgctgcacccaagtgaggcatcaggaggtcagccaagtagacaaaagccgctccaagggtgaagccaacagccacagggaagaaggcaaaggcaccgaagcccccagaggacgtggccatctcaactgctggggccagaagagaccaataggaagctgccaacatgacccctgcagcaaagccaagacttccatctaagatccgcctctgtccactagagaatacgaacacgagagctgccccagctgctgtcatcccccaggtgaagaaggtccccagcaaggcctggaacacagagctgtggccttggagcatgctggatacagtagggtgccctctccagcccccactgcacttccatcagcccccgctgccactctctcgccggctccactcccgcagtcacttcctgc

SEQ ID NO: 310915 - DNA, 1219 bp, Homo Sapiens
  misc_feature (1063)..(1063): n is a, c, g, or t
cttttgtctacttggctgacctcctgatgcctcacttgggtgcagcagaagacccccagacggccccggcactgaacttcggctctacgttgatgaagaagaagtctgatcctgagggtcccgcgctgctcttccctgagagtgaactttccatccggatagacaagagtgagaatggtgaggcatatcagagaaagaaggcggcagctactggccttccagagggtcctgctgtccctgtgccttctcgagggaatctggcacagcccggcggcagcagctggaggaggatcgcactgctcatcttggccatcactatacacaacattccaaaagatctcgctgttggagttggatttggggctatagaaaagacggcatctgctacctttgagagtgccaggaatttggccattggaatcagggatccagaatttccccgagggcctggctgtcagccttcccttgcgaggggcaggcttctccacctggagagctttctggtatgggcagctgagcggcatggtggagcccctggccggggtctttggtgcctttgccgtggtgctggctgagcccatcctgccctacgctctggcctttgctgccggtgccatggtctacgtggtcatggacgacatcatccccgaagcccagatcagtggtaatgggaaactggcatcctgggcctccatcctgggatttgtagtgatgatgtcactggacgttggcctgggctagggctgagacgcttcggaccccgggaaaggccatacgaagaaacagcagtggttggcttctatgggacaacaagcttctttcttcacattaaaacttttttccttcctctcttcttcatctcattatcctgattgactctgattataatagaaccatttttactttgctttgagggagattgatttaatggggaattttaaggtgtcatggaaatacagattctttgttttggccactgaatggactctctcttcagtgggattatcaaggaacttcagatcagggaaatctccacttcgggaccttctatctgcctcccaanctcctcaaggtcacctatagaagcgagctaccaaaagacgtctcctaagcattttgggtggcctagtgactcagggcagagtgggcagcacaccttctcaatccggccctcctggctccatcactggctgaagcctctcccccattctagaatgtt

SEQ ID NO: 310916 - DNA, 606 bp, Homo Sapiens
gtgatggacaacggacccagaatttgtgccacttggactcttggtatggagcagtaaaatggtacaaacagagcaaacacaggtgccaggctttattttatacacagtgaggtggcggcccaaagaattcagctgacttgcttgatgctctttcttgtgtctgacaatgttcctccatactcacagcactttagacgttagaagaacctaatgacataatccagaaggcaaattactagctgcagtgatgccaaagaaatactgcatagcttcaatgaggagaaagtcaaataaggctgacaaaacccaggaacccagcaaaaaggatgcaaattttctgcttccatatcttctttcaaatatcctaaaattataaataagcagactactgcagaaagtatctttcaaatcaaggcaaattattcttccacatatcaacctccaaatctggaagtcgttcttgactgcgtgaaggtcatacacaaagagcttctggcagtgaggcaggaggagggcgagcaggagggagagggcactggggaccagcagaaggctcttcgacagaggcgccttgtagagcccactggagccggtgctggtgaacat

SEQ ID NO: 310917 - DNA, 985 bp, Homo Sapiens
ttgcccctgtattgtgtttctagtgcctctttatccgttaatcctgatcctatgcgaccgtcacaatttagcgcctctcctctccccgcttattgttcttttccactaatgtgaaaagatccaatgatatcctcctctcgtttatggcgcctctggcaaatgaaggacatcagcgccgttccacagccccttctctgcgttcccgggatgctcagctggctcccactcccatttcggcttcgctggtggtttctgaagaaaagaagattgggttcaagtgtccaagaaaagattttgccatccagctgggatgcagagcacctgatgcacctgaacatttttgctgtcgtagcacagaccggacataagtccacttatggctacaatccagatgtaggaaccagaggtgaaaagctgcagtcccaatatataaatcaatgtcttgtttgtgatggacaacggacccagaatttgtgccacttggactcttggtatggagcagtaaaatggtacaaacagagcaaacacaggtgccaggaatccagaaggcaaattactagctgcagtgatgccaaagaaatactgcatagcttcaatgaggagaaagtcaaataaggctgacaaaacccaggaacccagcaaaaaggatgcaaattttctgcttccatatcttctttcaaatatcctaaaattataaataagcagactactgcagaaagtatctttcaaatcaaggcaaattattcttccacatatcaacctccaaatctggaagtcgttcttgactgcgtgaaggtcatacacaaagagcttctggcagtgaggcaggaggagggcgagcaggagggagagggcactggggaccagcagaaggctcttcgacagaggcgccttgtagagcccactggagccggtgctggtgaacatggtcccgccgggccgacgcgtgggtcgacgatatcccgtaattccggagccgtaccag

SEQ ID NO: 310918 - DNA, 1381 bp, Homo Sapiens
  misc_feature (198)..(198): n is a, c, g, or t
  misc_feature (229)..(229): n is a, c, g, or t
  misc_feature (336)..(336): n is a, c, g, or t
  misc_feature (960)..(969): n is a, c, g, or t
  misc_feature (1327)..(1339): n is a, c, g, or t
taatactttttttatgctactggatatgacatgtatgctctatcctaaactaatatttcctacctttcccaatgatgtcttcagttcaaaacaaaacaaagagtctaaattttgttagatgcttaaaggctggctcactgtttttctaccaggtattagaatactagttagctaaatgaggtataattaaaaaatagnccttcaaagtaaagagtatagtcttctgaanatttataacaaagactgcacaaaatgtttctgtaaatagtaagaaaccctgcagcacctactaactgatgcacaggtagattattgtatcataatctgtctgaagtnaaatatagctaaaataagttcccagcgaaacgttttacaatcaactgatttacatgctacttagttacagcacattttcactgtctgataccctcagactctatttgaaaaggtctagtccaatcactgtcaaaaattaacaccctgattattaaagtgcagcccactgaaccacctaatactgctgcaaaaatcttcatgtactttatccataagaccacaaaaatgttcacaaaaaaactagatttcttcagtttcagcggggaacagacaattatttgtcattaaattcatctacaaatagaaaaaataatgcactgtatgtacattattaagcaaagtggaatatttattgggtcattttatcatgcagaaagtgaatttcctaaggtcttagctcaatgtatatacaatctagcaaagctaaatgtaagaaaatagcaaggacaatttatttctatataacagagcatatactcccaatttgctgctacttcaaagagcacttttagactcatctaacttttacaggctctttcaagtgaagttcatggagactagttattaatccatataagacaaaagaagaaagaagaaatataaccaaagcaaagcattctgttnnnnnnnnnngtaataaaagctaaccacagaatatgtcagttttggtttgcagacaacccctgagattatataaaccaaagcgttaagacaccaaatagtcagaggtaaattactaagagaattacattcatacatggtgtcatagcacttatcttttagaaggtactttgttaccatccagaaagcgttaactgcttggattttttcaggaaatagtgaatattaagatgtttctaaaaaattatcttttccttttgaaaatgtatctaatttgaagatagtagaattacaataaactttcaatcacggaactactaattatactagaacagcaacgaatgacttttaagcctataggtaattaccnnnnnnnnnnnnnttaaggaggctgaaatttgtcaacaataagtttagtatatct

SEQ ID NO: 310919 - DNA, 1004 bp, Homo Sapiens
  misc_feature (17)..(17): n is a, c, g, or t
  misc_feature (48)..(48): n is a, c, g, or t
  misc_feature (150)..(152): n is a, c, g, or t
  misc_feature (154)..(154): n is a, c, g, or t
  misc_feature (156)..(156): n is a, c, g, or t
  misc_feature (163)..(163): n is a, c, g, or t
  misc_feature (165)..(218): n is a, c, g, or t
  misc_feature (220)..(237): n is a, c, g, or t
  misc_feature (250)..(250): n is a, c, g, or t
  misc_feature (252)..(252): n is a, c, g, or t
  misc_feature (258)..(258): n is a, c, g, or t
ggcgaaccgcaagcggnggagacggagcagagacgaggcggcaaacancagacgggaggaacggaaaaggggggaaagcgaaacggggggaagagagaggcggaaagaagaggggggaaacaaaagggccaaacacccggcaaccccccnnncncnccgcggncnnnnnnnnnnnnnnnnnnnnnnnnnnnnnnnnnnnnnnnnnnnnnnnnnnnnnncnnnnnnnnnnnnnnnnnnaccccccaacccncncacccngggatatttcagagtccagcaatgctggacacctatgagaagaagagagtatctatgggaggagttgaggcctaggacccctggagagtcactcttccccactgttgggaggcagcctccaggggcctgggatctggaatgagttgtaaatgttgttcctgtatcaagcactgtcctgcttggcgagacgtgtcactggtactcgggaagctggagacagaagcttcccctccctcgggcatctgacaagagaggggaggacctgccagaaaggctgctatttgctgggccccggcgacaggctgtggaggtggatctcagcagtttcctggggcaggagaacatcttgcatccatggatggttctggatttcttcgaaggttggcctatctgatggtctcagggccaagcaccatctaatgagatgctgacattctgaagagaccctctgcctgaagaaaacctggcccctgatgatctcttcgtcatgctcgaaaggaatatctccacacaccatatcatacagcaggatccccagggaccagactgccgccgacctgccatggtagcgatggtagcggatccactctggagggctatacactcgggtcccatcgaagtccgtgtagacggtgtccttgagcagcgcccccgacccgaagtcgatgagcttgagctcgccgcgattgaggtcgataaggatgttttcgtccttgatgcctcgtgccgaattcgccacccaggcc

SEQ ID NO: 310920 - DNA, 654 bp, Homo Sapiens
  misc_feature (606)..(607): n is a, c, g, or t
gtgggtcagaaccctgccatggaactgtttccttcatcatgagttctgctgaatgccgcgatgggtcaggtaggggggaaacaggttgggatgggataggactagcaccattttaagtccctgtcacctcttccgactctttctgagtgccttctgtggggactccggctgtgctgggagaaatacttgaacttgcctcttttacctgctgcttctccaaaaatctgcctgggttttgttcgctatttttctctcctgtcctccctcaccccctccttcatatgaaaggtgccatggaagaggctacagggccaaacgctgagccacctgcccttttttctgcctcctttagtaaaactccgagtgaactggtcttcctttttggtttttacttaactgtttcaaagccaagacctcacacacacaaaaaatgcacaaacaatgcaatcaacaggctgtaaatgtgtgtacagttggcatggtagtatactgtttttgtttcttgttttgaaagatgcgcattctaacctggaggtcaaatgttatgtattaattattttatttggttcccttcctattccgcttccatagctgctgccctagttnntctttcctcctttcctctctgacttggggaccttttgggggggctgc

SEQ ID NO: 310921 - DNA, 674 bp, Homo Sapiens
ggaggaaaggaggaaagaaaactagggcagcagctatggacgcttggaataggaagggaacccaataaataaataaataaatacataacattgacctcccggttagaatgcgcatctttcaaaacaagaaacaaaaacaggtaaaataacttaaaggcaaaatttcttaaaaattagatccactacaatctttttgtatactaccatgccaactgtacacacatttacagcttttctgttgattgcattgtttgtgcattttttgtgtgtgtgaggtcttggctttgaaacagttaagtaaaaaccaaaaaggaagaccagttcactcggagttttactaaaggaggcagaaaaaagggcaggtggctcagcgtttggccctgtagcctcttccatggcacctttcatatgaaggagggggtgagggaggacaggagagaaaaatagggaacaaaacccaggcagatttttggagaagcagcaggtaaaagaggcaagttcaagtatttctcccagcacagccggagtccccacagaaggcactcagaaagagtcggaagaggtgacagggacttaaaatggtgctagtcctatcccatcccaacctgtttcccccctacctgacccatcgcggcattcagcagaactcatgatgaaggaaacagttccatggc

SEQ ID NO: 310922 - DNA, 1600 bp, Homo Sapiens
  misc_feature (41)..(41): n is a, c, g, or t
  misc_feature (117)..(117): n is a, c, g, or t
  misc_feature (491)..(514): n is a, c, g, or t
  misc_feature (666)..(722): n is a, c, g, or t
  misc_feature (779)..(789): n is a, c, g, or t
tttcaaaaccagacaatcgcttgggaggagagttgttctcncccacaagtgtgtggatttttataaacgcgtggggcctccatgaatggaagccagcagtgttttgttgacgacccncccgtgtttttcccccacctagggcggaaagaatatttatgtatggccagagagggcaaacaaggggtgggctggaatgctccgcgcgggcggagttcaagggtgtcaatccacttggcgggttttgtggaagggggttttccccattttcggcgcaaggaatgggcgtctaaaggggagttacgccagcccagttctgtgtgcgattaaagagtggccaccgggccggggggcgctaaaatttgatatattgggaagcctcggccttggagaactccccgttttgaataagtatcccacgtgaagaggcccctccggagaacgtcccatttgggaaatttgtttcagaaaaccccttcgggttgcccgccgcnnnnnnnnnnnnnnnnnnnnnnnnagattccaaacgccttagtcactgggccagggttcttccttgggaaaccaaggtaagggccatgtgttcccgttccctacgtggggcccggggggccaaaaagaaagggtttagaaaaagttttcagaagggccggaggcggccgaccatgnnnnnnnnnnnnnnnnnnnnnnnnnnnnnnnnnnnnnnnnnnnnnnnnnnnnnnnnnggggttttgttttctttgttaagacaaaaggtttttcatcaaaaaacgccaagtatnnnnnnnnnnntaagatctcttttattcccctgtacagtatttcactcagataaaaccagcaggctacctgctgctcaaaacacagccccagagaggatctggaaggcacaccatccagaactgcttttcataattatcctatatacacagtcagcaatgcccctccccatcacccacagagccgggacccacctgggtaagtaggtgaggggccccacagaagccagggagctgcagcactgtcccgcctgagtcccgtcaccccacaaacagagcaagcgtcgcagccctcccccaaaaggtccccaagtcagaggaggaaaggaggaaagaaaactagggcagcagctatggaagcttggaataggaagggaaccaaataaataaataaataaatacataacattgacctccaggttagaatgcgcatctttcaaaacaagaaacaaaaacaggtaaaataacttaaaggcaaaatttcttaaaaattagatccactacaatctttttgtatactaccatgccaactgtacacacatttacagcttttctgttgattgcattgtatgtgcattttttgtgtgtgtgaggtcttggctttgaaacagttaagtaaaaaccaaaaaggaagagccagttcactcggagttttactaaagggaggcgaaaataggggcaggtggctcagcgtttggccctgtagactcttccatgtcacctttcatatgaaagaggtggtgagggaggacatgaaggaaaaatagggaacaaaagccggtcgatttttgggagaagccgcggttaaaggaggcagttccagt

SEQ ID NO: 310923 - DNA, 493 bp, Homo Sapiens
  misc_feature (22)..(22): n is a, c, g, or t
  misc_feature (35)..(35): n is a, c, g, or t
  misc_feature (41)..(41): n is a, c, g, or t
  misc_feature (48)..(48): n is a, c, g, or t
ttttaaccttaaaggccaaaanttcccttaaaaanttaganccccacnaacaatcctttttgtaaaactacccagcccaactgtaacacacatttaacaccttttcctgttgaattgccattgtttgtgccattttttgtgtgtgtgaggtcttggctttgaaacagttaagtaaaaaccaaaaaggaagaccagttcactcggagttttactaaaggaggcagaaaaaagggcaggtggctcagcgtttggccctgtagcctcttccatggcacctttcatatgaaggagggggtgagggaggacaggagagaaaaatagggaacaaaacccaggcagatttttggagaagcagcaggtaaaagaggcaagttcaagtatttctcccagcacagccggagtccccacagaaggcactcagaaagagtcggaagaggtgacagggacttaaaatggtgctagtcctatcccatcccaacctgtttccccccta

SEQ ID NO: 310924 - DNA, 1230 bp, Homo Sapiens
ggaacaatatggcggatggcgaggagccggagaagaaaagaaggagaatagaggagctgctggctgagaaaatggctgttgatggtgggtgtggggacactggagactgggaaggtcgctggaaccatgtaaagaagttcctcgagcgatctggacccttcacacaccctgatttcgaaccgagcactgaatctctccagttcttgttagatacatgtaaagttctagtcattggagctggcggcttaggatgtgagctcctgaaaaatctggccttgtctggttttagacagattcatgttatagatatggacactatagatgtttccaatctaaataggcagtttttatttaggcctaaagatattggaagacctaaggctgaagttgctgcagaatttctaaatgacagagttcctaattgcaatgtagttccacatttcaacaagattcaagattttaacgacactttctatcgacaatttcatattattgtatgtggactggactctatcatcgccagaagatggataaatggcatgctgatatctcttctaaattatgaagatggtgtcttagatccaagctccattgtccctttgatagatggggggacagaaggttttaaaggaaatgcccgggtgattctgcctggaatgactgcttgtatcgaatgcacgctggaactttatccaccacaggttaattttcccatgtgcaccattgcatctatgcccaggctaccagaacactgtattgagtatgtaaggatgttgcagtggcctaaggagcagccttttggagaaggggttccattagatggagatgatcctgaacatatacaatggattttccaaaaatccctagagagagcatcacaatataatattaggggtgttacgtataggctcactcaaggggtagtaaaaagaatcattcctgcagtagcttccacaaatgcagtcattgcagctgtgtgtgccactgaggtttttaaaatagccacaagtgcatacattcccttgaataattacttggtgtttaatgatgtagatgggctgtatacatacacatttgaagcagaaagaaaggaaaactgcccagcttgtagccagcttcctcaaaatattcagttttctccatcagctaaactacaggaggtttggattatctaaccaatagtgcttctctgcaaatgaaaatctccagcatcacagcaccctaagggaa

SEQ ID NO: 310925 - DNA, 1219 bp, Homo Sapiens
  misc_feature (48)..(68): n is a, c, g, or t
  misc_feature (71)..(71): n is a, c, g, or t
  misc_feature (120)..(120): n is a, c, g, or t
agggcagtgttgagtcccctgtaatagtaaacattttccatttctttnnnnnnnnnnnnnnnnnnnnngtnctacaattttgtagtacagtgcagcataatccttaaatataaaaatatnttctcttctgttgggataatagaccttgcatcctggaaagaagtaacaatactgctactgatagaagatctgtttatatctttcaagtcatgtaaggcaattactgtgttggtttatgatatatggctaaaagaaaagtccagaaagacgaagtatcagtttttgttatgttttccgactactccaggtatgctccggtgtacttttgtgttcaactgaatgttcaaatggagatctggagccataagatctctgatctagtggtgacctagggccactgctggaagctctgtggtccatttgccagtctgagtgatacctataatccctggaagatttatggtgcgtatattcagaacttgaccggtggtctgaatgtaaccgatgatctgagtgagaacgatgatcagaatgagatctatcttttaaacttccttccaaatttgacctgtgatctctactcctgtgatcatccagttttctgtgtttctctctgtcactgtaatatctgctgtcttgcttgtagtgatcccaatcgcgatggtctttaccattactaaaagaagaatagggtcttttcctggaatcactttttttgtaagaatctccctgatgtcggtctttatgatgatcatggtactgagttaagtgtctatcagaggaataactgtccctgctgctatcatcgtgatttgtattctcttttaatctttccacatctggatttctaatcacgtgaggattcaagttgctgttttgatcactgttttgctgagactcctgctcgttttttaatagcatgcttatataatttatgtaattttcttgcatcaaattcagtcatcttagatacaacaatccacaggttttttctgcattgcttaatttgttcaggatttgtatactcttttagacattctgtgatatggtctccaatttttattaaacattgtctagtatgctctagttgttctctttgtgaaaggcctttctcaggcctatcaagttgtttcaaagctgctttaacagtcgtcattctttctttacaaatgctgaatgtcttctgatccagctcttcagattcttcagaaatgggaac

SEQ ID NO: 310926 - DNA, 546 bp, Homo Sapiens
tttttttgaaatttatcacagtcatttatttaaaacataaactttccaatttctgcagctttttatttggtctatactaatgcctcacaaaggcaaactcaggttgtagagttcctcctgcctggtcctcagagcaataccacatctattttctgaactcttcaggaaggattcaggactgctggccaagacttccaatggcatatgactgttcttccactgttatggccttgaagagagaaatcccctcctcctctgaatgatagtctcatggccaacattcttctgagaggactcttccatgctcacaggcacatcatgctgattttaaaaaaggaaagttggagagaaagaaagcagagcttctcctctgtggggaacagcttcttcatcacagtgcagttatgatatgttccctccttatccccctgaagccaaggcaatagatctgaaggatggtgtcaggcatcataatcgggagccttgccctgggcttgccttagccagatctgtagtgtaacaaatgctcccacagtcacatgaaag

SEQ ID NO: 310927 - DNA, 449 bp, Homo Sapiens
  misc_feature (59)..(70): n is a, c, g, or t
caaacaaaataccctcacagagtttaaaagtaacattaaggcaacattgagcaataagnnnnnnnnnnnntccaaactcacctttatttccttgccctttaggtctctgatccacgctagtggctgacattcttcaccgcaacccgagagccggcgccgccgccgctgcctgggcctctccccgtgcactcacagcagttggctgtcgcccttggccgagtgattgttccagccgccgccgctgccgccgttcgctgagaacccaaaatgagggcctcgcgctcgggagtcggaggaagaggcccgtcttttccgcttgcacgctccttcttccccctcttcgctctctgcttctcgggtccacaatggcgggcagactccctagtctcacttccgctccgagcctccctgaccttccgctctccactctgacgtccgcgctcacctcc

SEQ ID NO: 310928 - DNA, 867 bp, Homo Sapiens
  misc_feature (215)..(241): n is a, c, g, or t
  misc_feature (373)..(402): n is a, c, g, or t
gacgctggcagtcttggttttctgctagtgctgctgctgctgggaggacgacggacggcagcggccaagcaagaagaaagacgtggcagcaagcgggagtcggggatagtgtcatcggttcggtaaagtttctgttctctgatttggggatattccctgcccaaaaaattcctggaaaattgactagtattaagtgtgagtaaaaggtgtccacnnnnnnnnnnnnnnnnnnnnnnnnnnngtcttggaatagtatttggcaagatttagcctagaaaattatgtagtatttattacataagaaatcaaaaattgctttgttactgggctggtttcaaagtttagaactcatttctatgtatcaaaatcgggnnnnnnnnnnnnnnnnnnnnnnnnnnnnnnacattcttaaatggtaaatatgccattgtgaaatgaaatctcaactccaaaagtttacccttttactaactggagtaaatgtatacttacaaagtctttagctgtagccattagtagtaaagaatttggacctaggctgcgtaagcaagcctttccagggccactatttaatggcaaaccagtgatactggtgttgatacaaaataagaaataaattttcccttaaaataaagctttctgggttttgacagtgcccagtttaaaaatggctataatgctggctctgccttcctacagcctggcctgcaccactcctggaatttactctattacccataccgtttctaatcctttttggggtaaaaccctcccctgaatgaccgaatggatggaatatatatacccttacctccccttatttataccctactggatattatgggggaaagggaattttacccttct

SEQ ID NO: 310929 - DNA, 2183 bp, Homo Sapiens
  misc_feature (252)..(387): n is a, c, g, or t
  misc_feature (396)..(397): n is a, c, g, or t
  misc_feature (599)..(599): n is a, c, g, or t
ggtggagaggggcgacatgtttggcccccgccggcgggcgcgttgttttgtttttgggaagtgagagtcagagcgcttgtgttctatcactcagcggggtgtgtccggagttaagggaaataaaaagcgcgcgggttctgcttttgggtcgcgggcaaccgcggggcgccaccgcggagggtaggtaaagagaaaattctttcggggcggcggagcggggcgcacccccggaaataaacgcatataaaagtnnnnnnnnnnnnnnnnnnnnnnnnnnnnnnnnnnnnnnnnnnnnnnnnnnnnnnnnnnnnnnnnnnnnnnnnnnnnnnnnnnnnnnnnnnnnnnnnnnnnnnnnnnnnnnnnnnnnnnnnnnnnnnnnnnnnnnnngtggggtgnnactttcaaaaaaaatttattcaatgaatacacaatataattccatttcgagtgattaaaacctatttgttgtttagaaccaaacaaaactacaagaaaacattttcaaaaccttttttttcaggctgaagaaatcgtttaatccattttaaagaaatctcacatgatgttctgtcgggattaaaaatatacacggaaaaaantaaaacaaaatatatacacagaaagaagctcgcacagagtcaggcgtgcagcaacgtcacacactcattcctttctgtttcctctggacactcaaaatgtgaaagcaagtaagaggggggtggttaaccaaaccttttggtccaaggaataaaatttctttaaaaaatttaaaacgtcaaaacctgccagaataagacaatagaagagcgtatcgtctggcgctgggaatggcaccacgacaaggcattaatgtggattcacttgcacagctgctctcataaaagctacacgattcagaggtaaccctaactatccgcaatcccaaccaaagtcatgttcatgccgctgtcctagtctggacaatcatctgtcactcatccaacacagttatatacagaatgcgcagtcccagcaacagtgtagattacagcaggcgttctctacctggactcatgattggatttcatttctaaattacatcagagctttcaaagattgaaatacacaaatctgcactacccaagcctccttgcctgtacgggaaacaaatcagaagagcatttattgggaactgacacgtcaggcctcacaggtgctgggcaggaatcacagaggcttgctctgcatcatgtcttccgttaacctgaagctttgggtttattgtgtttggcaaaccactcgtcacttttatctgctgccattgcatcatccaacaatttgcttccctctggatccatcttagaaagttctcgaaatgcttcatccccgacaaagcaaatttcatgtccgtcagggtcggccagaatgaccacctgtactgttgctttccctggggtgtccaggctcaccaggggagtcagaatcttctggttctcccttttcatcaagtcttctaagtctggcaactctttctgggggcaagagaaggcaattcttccaaaagctgctgcatggtccaccccacccttgacgccctgtagctccagcttacactggttatcagcatagcccagcaaagccctttgcttttcttcatctttttcataaattttcattcccagtagattacaccagtagttcaaggacttttgaagatcagacactgctagagttacttttaatacaggatctgactgaggcagactgcgattctgcaaatagaacttatatcctcccggggcctcggtttcaaaaacaccttctgcaacttccgtcagtggccactccagcttcctggcgttgctgacagcctggctagaagcgagcgtgattcccataaagtcattgccaagcttgtagtctccgacgccataattgtaagtcagttctgcgacaaaatgatcatcctcaggcccaaatcccaccattgttttactccatttcccatcataaggcccattacaggcagctttgcagccttcttcaaattcctcatgccgcagaaccttcatccccaggacgtcccgatagaaacgcgccgtctggaagcggtttcccactttgaatacgaagtgcagagctctgcgagcagccatgattcccgccgcacgcagccgtcacgcgcaccgtacagcccagtcccc

SEQ ID NO: 310930 - DNA, 604 bp, Homo Sapiens
ggagcaggaagggattacaggcagaaaaaaatagcaaatagcacgagcaaaggctgtgatgaaagagtaacccaagtacttcaggaggctgtgagtggatcggcgtggctgactgaggcaggacactagtagataatatatttatgaatgtaagttaaaagccaatctaaggcaggccctctagacatcaccctataaaactggggagctcctgaaaccctgggctggggattaacatgccctccctctccagaagcaatcagtgcctgagcaaacatcacaatgctgggctcaatcccgggggcatctgcccgaccaactaactgctgtgaactacctgtctcaacaggaattctgtggatgttcatggagtggtccggggaagtaagtattccttggccaattgcttttgagattgattatttgatctgttattgaattattagttggatgacagatcagagcaaagatgccctggcaggtagcgggaaggggatgtagggagaaaaggcagaaaaccaccacctcgtgaacctgatgtgggctcccttaccggcaaaggccataattttcaccacctggagaggttccatcttgtgattcc

SEQ ID NO: 310931 - DNA, 798 bp, Homo Sapiens
  misc_feature (497)..(505): n is a, c, g, or t
cttcttagcttgttttcctccagtaatctgtgggtttctcctaagggccatgttttatttacatttaagtgcttagctgccatcaatatgagatgaacgaaaatagtctaaccatgtgggaatgttgttttaagatgttatcacaaatacattatttcttatgactgagaatgtcaaaatatgcaattggaaaagcatcatgaataagataaattctactatttaatcagtgtttgcaaaatgctagttcttcctattgatgcttggatatacaaaattcttccttcaaaaaatgtgtctcaagataaaagtttaagagaaaaaaaattagtaattcaacatgaggttagatcattatcttaattccctaataagtgaacagtcctacctctgcatcaaacttagtaaatattgatgaccctaatattaacttttaatctgttgttttaaattatttgttctgttatcatgataatcaagatctaataacattaagnnnnnnnnntgcctgcaatgctatttcccaagatagccagttcatttcatacttaaggagtaggtacttacctctgaataaagaggtggaggcaagaatcgaaactcctggatatatgcaaacagtggtccttgaagggctctctcaaagtcatcacaagcactcactggtgcaagattgttccgcctttgttcctctgttaccacttctgcatagctgggtggtgcttcagtctttcgggaagtgataaactgagccagttcatattcatgctacactgactgcttacacttgaggttctg

SEQ ID NO: 310932 - DNA, 622 bp, Homo Sapiens
  misc_feature (331)..(523): n is a, c, g, or t
  misc_feature (558)..(558): n is a, c, g, or t
ggttgctgaagcaaatgagaaacttttagtcaggaagaagtatttctgtttctgtgctacagagtgcagcaccttccattttctccagtcatatgctagagcatctcattttatcataggcatttctttactgaataattcaaagttattttcttattttagagatttaaacacttcttaaaaataaatgttacccagtggagaagcagaatcgcaagtcaataagatgattattcagaggtcacacagaggtgaagtgggagttctggaaatagagttttttgttttattttgagacagtggcacctaggctggagtgcactgaagcgtnnnnnnnnnnnnnnnnnnnnnnnnnnnnnnnnnnnnnnnnnnnnnnnnnnnnnnnnnnnnnnnnnnnnnnnnnnnnnnnnnnnnnnnnnnnnnnnnnnnnnnnnnnnnnnnnnnnnnnnnnnnnnnnnnnnnnnnnnnnnnnnnnnnnnnnnnnnnnnnnnnnnnnnnnnnnnnnnnnnnnnnnnnnnnnnnngtgtgagccaccatgcttgttctggaaatagtttncatcctagctctgtctcctgagaatatcttactcagtgtaaatccccattactatccaacttaa

SEQ ID NO: 310933 - DNA, 827 bp, Homo Sapiens
cgcccgcaatcatttttggcttggggttcggatgaggtttccaatgggtacaaggacctttcctttttccttaatgcctttccctttaacggtttctaaaatctcctgagtccacttgggaagtttttcctttttcatttcccctcttttcttgggctgacaaaatgtctcccggctctgtgatttacctgtcactagaaattagaagattcctcttttgaagccaatttctggatggacctttggggttgaaggtgagacaagtcaatggtagtatcaggataatttaatgtctcttccccttcatccttcatttcaccaacagaatcctgatcttttctaacctcttcatattctccttcgtcttcagagctttcttcctgaatgagctcctcatttagttcatctctgccactctgaagagtgatatcctcttggtcaacctgagtcatgagttctacttccacaggagtttcatgttcttctttatcctcatcactgctcgtgtcacctccatctaattgttccatttcttctgatatgagttcacttgtacaacttgccagtgtctccatgtcttcatcctgtactctgacttttcgttcaccctgatgtctccaaacacaagactcatctaccttaaaaaggaagctaaaccccatcattagatatgagggaggaagaaaattcttttttcctcttatcatgaagcttcctgttgtcaaatattctccagttggtgctgttttagatacctgatgatggtacacccaccaagcactagtgataactcgtgcatcccaagcagcactgtagcaaagtgcccc

SEQ ID NO: 310934 - DNA, 2878 bp, Homo Sapiens
  misc_feature (820)..(820): n is a, c, g, or t
accatgttttctttgtcccttttctccccccctcgggattgttaataaaaacatttattttgcattttatacagaacaacctgaagtctccatcatgacttgacagttacccaggggtttacagtgtgtccaactcaacagtgtggttctgggactgggtatccacacaaacacaggcaggagtttggaggaaagatgggggcacagcaggagtgtatcttaatcctttctcaaagaaaaagaagtagagcattctgagttgctgaaaacctgtgcaaatggggcttctgaaacattgtactgtgagctctcagggaaagggaggaaaaagatgttgataaataaggaggcaatttcttgaggcaggggacgaggagggaggcttactatttttaatgccctcagccccagtacctgataatcagaggagaccatgtccaatcttgaatcaattccctgttcaaaaagaggtgctaataccccggggacaagactctgaaaatatcatgctggtcattccggagttctatgccccacagcatattaaaagatgggggttggtggggggtggggaggtcagaaggtagtggcttgtattctgtggaagtaaaaaacttagttcacattaagcactgataaaacccaatgactgggcccacagatctgttgagaggtctctagtagggaccaagagggggaggtccagaacatcctctgcctgaggtgcaacaggtgtagaaagtctgggaggaggtgagtattaaagtaatgggaaacagaacactcccagaccttaattttaattggatagttttaaagnaaaaatcaaacattgggtgccagtcacaacaaatgccatgcctttatggtcacttggtagtataaaaaaattgccaaagcatgtccagctaaccaacaggtcttgctaggaggtgtttgtgtgcatgggagagggccaaggggcttggtacagctgactatccaacatgattcctatggaaacagaaggggcagagtcctggtttgctggcttattgagggcttggcagagaagctaaagctccaaagtgactacagattctctgcaaccggctttgacccatggaaacaggagccagattctcactctagagatagtgagggggccaaacctactcataccacatgcattagtcctggtcatcctccaggaccatgcgtatgatgggcaactcataccaggcaggggaagggagctgattagggaagaagggaccatttttcatcttttaaagtcttaatttatattttaacctcaaacatattatcagtgcctcagatataatttaatcttaagtctttaaaggccccctgaaacaaaagtatactttttatttaggcttcctcactttctggtagtcactttcacccagtctccagttttaccctgacttagagtccacaaacttcatcagaccctctgtgctcatggacttgggcctttctagagggaagcctaaggctcggctccagatgagctgtgccagtacacccaatgctcgtgacaccccaaacaggaccgtgtagtaattcatctccgtcatgccataatactggagcagcaccccactgtgagcatctacattgggccaaggattcttggctttaccctgctctaagaggacattgggcacaatcttgtacagctgagcaaccaacttaaacatggggtcattaggcaggtgtttcagagcaaactctcgctgacaggtatatcgcggatcagtcttccttagtactgcatggccatagcctggaacaacccgtcctgagttgagtgtgttccagatgtagtctcgtaacttctcatctgacacatctttgccaacttccttctgcagctgtgttagccagacaagcacttcctgatttgccagtccatggagaggccctgccagcccgttcatggctgctgcaaaggacaggtaagggtcggaaagggcactgcccaccaaatggctggtatgggcacttacattgccaccctcatggtcactgtggatggtgaggtacaggcgcgtgagctcagtgaactgatgatcagtatagcctaacatgttggtgaaattgtgagaccagtccaggttagagtcaatggccccaataccgctgccttctctgtagagatttcggtagatctttgctgcaacacaaggtagctttgcgattagatccatagagtcttcataaatcaactcccagtacttggttcggctgataccctgtgcatatgctcgggcaaagttactttcactgttgagggctgtaacagctgcactgagctgagacatggggtgtagattggtgggaaagttgtccagcatggtgaccacatgggaaggcagagctgccctctttgcccactcttttgagagccaagatacctgttcctctgttgggatatgtccagttaccagcagccaaaataagccctcaggcaggggttcttccccacccttagccttgggtagcagtttctggcattcagggatactaaagcctcggaaacggatgccctcatcaggatcaagaactgatgtttcatagaccaatcccttcatgcctctcatgccaccatacatcatgtccacagtgatttggcccaccaccgtcttgccatgttgctgcctgaaagtcttaattctggcctgctccttaggtatcaggtcagccaatatgtctttcaaattcgtggaggaagcactggcatgccgggctgcaagaacaagacaagatgcattgcgttctggactgcgggccgagggcgggcggcgtgcacttcacccccaggagccagaagggaagcgcggcacatggtcctgtagcttcacgcagggct

SEQ ID NO: 310935 - DNA, 602 bp, Homo Sapiens
tgcccactcttttgagagccaagatacctgttcctctgttgggatatgtccagttaccagcagccaaaataagccctcaggcaggggttcttccccacccttagccttgggtagcagtttctggcattcagggatactaaagcctcggaaacggatgccctcatcaggatcaagaactgatgtttcatagaccaatcccttcatgcctctcatgccaccatacatcatgtccacagtgatttggcccaccaccgtcttgccatgttgctgcctgaaagtcttaattctggcctgctccttaggtatcaggtcagccaatatgtctttcaaattcgtggaggaagcactggcatgccgggctgcaagaacaagacaagatgcattcttggttcccaagagccgggcggccgcagtaagtaaagccatggcgggcgatctccgggatctggtggggaggtaagaaagggagagagctgcggcaggaacaggagccgccgccgctgcaccagaggccgcgccgacgggttgacaaggttgaaaggaggcggctgaaggaaagagtagacgaaccggcggcggcgcccagcccggggtcctccccc

SEQ ID NO: 310936 - DNA, 1264 bp, Homo Sapiens
tttgaaaagggggagagtttgaagaaaagaaaacatcagaccctctggggtgtcccagtctcacaaaataaaatgcgcacaccccctttatggggcccacgtgtggatggtgtaaagaaaaaatttggccaaaaggccatgtcccgaggtttacacccagccggggttctttggtttggggagggggggttttatgttcgcagtgggagggaagggggcccaaagggggggtttggtgttaacagcttgagtttattgcccaagccaatgaatttctctaagggggaacccaaaaaaggggggggcagggagttcccctgtgttttgcggggggctcttattggagggggcttttgggccaggggaaaaggtttaaaaagctccccaaaaggggagtttaccagatttctttgtggccaacccgggcttttgggcccccggggaaaaccagggagcccaagatttttcccttttaggggataggtgaggggggcccaaaccttacttcattccccacatgcattagtcctggtcatcctccagggaccatgcgtatgatgggcaactcataccaggcaggggaagggagctgattagggaagaagggaccatttttcatcttttaaagtcttaatttatattttaacctcaaacatattatcagtgcctcagatataatttaatcttaagtctttaaaggccccctgaaacaaaagtatactttttatttaggcttcctcactttctggtagtcactttcacccagtctccagttttaccctgacttagagtccacaaacttcatcagaccctctgtgctcatggacttgggcctttctagagggaagcctaaggctcggctccagatgagctgtgccagtacacccaatgctcgtgacaccccaaacaggaccgtgtagtaattcatctccgtcatgccataatactggagcagcaccccactgtgagcatctacattgggccaaggattcttggctttaccctgctctaagaggacattgggcacaatcttgtacagctgagcaaccaacttaaacatggggtcattaggcaggtgtttcagagcaaactctcgctgacaggtatatcgcggatcagtcttccttagtactgcatggccatagcctggaacaacccgtcctgagttgagtgtgttccagatgtagtctcgtaacttctcatctgacacatctttgccaacttccttcctcgtgccgaattcgccacccaggcctcgctcctt

SEQ ID NO: 310937 - DNA, 1265 bp, Homo Sapiens
  misc_feature (96)..(191): n is a, c, g, or t
  misc_feature (213)..(213): n is a, c, g, or t
  misc_feature (220)..(220): n is a, c, g, or t
  misc_feature (225)..(226): n is a, c, g, or t
  misc_feature (255)..(330): n is a, c, g, or t
  misc_feature (832)..(832): n is a, c, g, or t
  misc_feature (1227)..(1227): n is a, c, g, or t
tatcgatacctgagacagttgattgatgggagtattgatagccataaaggttggttccaggccaggtgcaatgggtcaagcctgcaatccccacannnnnnnnnnnnnnnnnnnnnnnnnnnnnnnnnnnnnnnnnnnnnnnnnnnnnnnnnnnnnnnnnnnnnnnnnnnnnnnnnnnnnnnnnnnnnnnntactggggcatgttgccgtagnttggaanttacnnagaatgggggaaggctgaggcagagttgnnnnnnnnnnnnnnnnnnnnnnnnnnnnnnnnnnnnnnnnnnnnnnnnnnnnnnnnnnnnnnnnnnnnnnnnnnnnaaaaggttgattccaggcctgtagaatagataaacagcatgggatatgagggaaatcctcagcagtattaattttgcattccaatttcatgttgatgatatacaccatggctttttgttttaaaggcttttatcttgagaacatggtgtctggagttaaaggtatgtctcaatttgagttttcacatcatatttgtttatgtgtaggaaacagtatgttgtcagagcaagtttcattttattcagggacatttctaccatgcttttaattcccatttatactgatttctgaaaagaagaatcctagattcacacattttatagtgatgtgtcagattcattttagttgcaagcattagagggtcctgaatttgttagtttgtagcaataatcagaactttggatttcctacttgaagcctacagcattattttgaattaatgcacaatctaaaatgaggcagaggattttatggtttaatgcaaaatatagtataataaaanatgattacacaggtcataagaattcataaatttgaatgatgtagagtttgattaaaagttatataatgccaaagtcgtaacttacaggcacattatattcctgtattttataatggatgacaattaattttgagccaagaattaaaatttgctgaaatcttcgaattgggaaaacaacatcctctgttgcaatactgaagttcataacaacagttagactttaaacttaaatcttaagtttaaatctttttcctttggttcatgtaaaggagctacttgatgttactttttatttatcattcctctgggctcctaagcacaacgtgattgtgaaattattgtttttgtggattaacgtagtagggaagtttctgccagttgggcaatattgttangggccataattccagttcctgctccaaaattcctttcc

SEQ ID NO: 310938 - DNA, 1250 bp, Homo Sapiens
ctaaattgttgcctttaataatttcattaattcttgtcaacaatttttatgggcctgcttattaaaaataaaagatctaagtggaaacgttgattagacaaaggtacctcccctctgagaacacctaacattacaatatgaaaacggtggcttcaagaatctgagttcttttaattacctgtatcagatgagtaaaaagacactccggacataatgaatgctttcttaacacaacagaaccacctacacacatgaacaggactgttcagggagcctggtttggtgtgaactggggctggctcccagggtggagcctgctcttagaacacaccagaaggctggaaggctctagtggggccgcttgcacacgcaacagtacagttttacttttttcctgggacagtgcagacagtgccatcagctctagccttgcaggagggcacagtcattcttcagacttgcactcctggctctggtgctgcatcctggaaaggacgcgctcgtagaacagcaggtaggcgctggaggacaggacctcctgcaggctggccttgcggacagtgtcatcggagacccacagccactgattgctagttgagagagggttcctggcagaaggtggggaccgtcggtaagtgacaaagtgtccagagtgcatgtctccatggtggacgacaactgccatcagccggaagaggtatgtggaggagctgtagtcgggaacagctgggagagggaagggcatcggcgctgacagcgttggcaataaagatggggagcaggcgtcattcataaaaatctgtgttttgggggcccctggctgattcagaactggtgtgggggctcccggcccatcctgcagctccagtgtaggccctgggttcttgttcagtttagggttgtgttgactaggtttatgtccaaggaggtggtacttgtaaatgtccatcatcaggaactcattgaactgcacgtgctcatgccgcttcagaggcgtgccgtggctggaccagctcagccgctgtaggtggatgcagagacactgagggagcttccctagttttaactgtttaacaaaagtggtcctctggtgttccaccttttccccgttcaacgttcccttggcttcaatctttgtacagttgtcacacacaacatcccgcactgattctgatgagatgaagtggtgaaggcagtggtccagggtcaatgggtgaccccatgtggcggctggaatacttagtgaaagg

SEQ ID NO: 310939 - DNA, 1799 bp, Homo Sapiens
gtcctatcttttacttgctccagaatctcattcaatagaaccagaagatcttttgcaagatggctactgagttctaaagaactcaaggcttttgtatagactcgaatttctggcgagcacggacttgttaagatctcattgcaaattttcatagccaaattgtcatgtactgttaaggcctgataatcttgggaagtcttggcctgaggatttaatccacttggtcttgtcaaatctacaagtaactcagcaacatttgtgatatcaatttcagctaaaggagaagatgcaggggcattggccagtgtttgcagggttggaagaaaagcttcttcaaagcattcctgattagtcctgcttgcataagcaaacacggggaagaacacgcttaggcaatgtcgaagttgaacatcctcttcagtcacaggattgtaccataacaaaataagacgagaaagaatcctgctgctgaccaaaagcccagagaacatcagcttggctagtccttctgcagctccagtcctaagttcagatacctcactatctaagaaatcagaaaggagtttcagaacattcttagctgtagcagtctcttcaacttcttttgattcttgctcatcatcactgtttatttctgtaccttcacaatgaagtgttttgatttttttagttttaaatggttcaatcccgaacgtcatcagttggtcaaagattgcctttaaagcacttatttttattgtgacatcatcaatttgcaaaacctgcaatagtaatacgaagtgtttccttgcaaaatcctgattctgtagtccacagcatcccaagcataaaacagccaggtttcttacaacaggatgaatacttattattccaggaagaatcaaagattcgatgattccattcatggttgcacttaagcctgttgaaatggacatctgcttcaacagttcatagcataaaataagacatttctgcaatgtttcagcatcattcttctctatgtggacttctttaatttcaagttgctctgtctctttcaaaaggtttattctggcatcttctaatgcttttatttcttcttttaattctgatgcccgaattaaaatcctgtaaggtaatgcaattttccaaagcttctttggcttcgataagcttaacttttatttcagccatcttgagttctttctttcttacatcagctggatcgttattaacaccaacagtaacaatgggcgcccgaatctctgagataatttctgtaacaatttgtgttctcttattatcatctataatgatgtggagtagtctttcaacaagaaaagaaaccagggatattgggattgtgggtaaaataagaatctcctgtaagacagccagcagtttttttcttcctccttcttcactggtatccaaagacttaataattagaatcaattgttgacctatgaattcttttgtcatcaaatttcccatatgggaaaaatcacctttgtgttcttcataaaaaactggaatgctctggatgtgactcaataaatagtctgcatatactacaggctctggcaaaatctgctctaaaaattcttcaccttcatctccttttgatttcaaatattcacaaagggcacaccaatacaaagcaatttcaggagttaatgtttccactggaatcaatttcctgccatcattgtttttacagagtcccaccagttcactgagaggagttattgaaaacaaggcattgagaacagagacttccacttcaggagaattttctacatccaaccgatggagccccg

SEQ ID NO: 310940 - DNA, 1087 bp, Homo Sapiens
  misc_feature (16)..(16): n is a, c, g, or t
  misc_feature (21)..(21): n is a, c, g, or t
  misc_feature (24)..(24): n is a, c, g, or t
  misc_feature (26)..(26): n is a, c, g, or t
  misc_feature (46)..(46): n is a, c, g, or t
  misc_feature (62)..(62): n is a, c, g, or t
  misc_feature (71)..(71): n is a, c, g, or t
  misc_feature (83)..(83): n is a, c, g, or t
  misc_feature (96)..(96): n is a, c, g, or t
  misc_feature (120)..(120): n is a, c, g, or t
  misc_feature (123)..(123): n is a, c, g, or t
  misc_feature (184)..(184): n is a, c, g, or t
tttctccacttacccngcgcnttngngcataacgcatctgttttcnacactcttcagctcancatccagcnccagctgtttcntttaaattcactntattttctctgatactgagctccnccngatccagtctctcagcctcagcctggaccttctcgagatttctgccactatcttgcggttnttttccacgtcttccagctcctggatcagcctctcctcctctagtgccagctcctttagctccatctgtaactgttcactgtcatcctcattcatttgctctaagatctccaaacagcgtttgtagttctgacactcattttcagtgacgttgagctgagtgtccagctggtctaaaagagtatctgtgcattcctcacagagtgggtgatccacatctgtctggcccgacatgatgtcaaaaaggtccccagtgaccttcagtcttcggctgaggttctccatggtgccgccatcagatgcctccccaatcagagtgaagctgttggcactttctgtggacatcatcctgcagacagccccccgcccacgggccacatgagggaacagagaggcttcctccacctactacaatgccagtggcagagactctcaagcaccagctgaggggcctcaaggaacatacccactcctagcccgactgacctcccaagggtacctctctcccaaaggaaggccatgctggtcttccacagggacactcagcatgaaggttggccttggtggactaaggagggagagggagcataaaaaattcatatgtctacagtggaaaagaagggagaaccaggaaaggccattttagaaaatattataccccttgccagcaagctctttacctgcagcaatgagaactaaggacctgaacatctaacaacatttgctagtttgaaacttctcaagagcccatctcttggtgattggtcaatcactccctcaatttttttcaatacttcatcattaaagctactatcctttcccactctgtgaacagctacaggaaaaaatccatactggaaggtgacgggccaggtataagggaatacatcttttctctcgtgcc

SEQ ID NO: 310941 - DNA, 2086 bp, Homo Sapiens
  misc_feature (5)..(5): n is a, c, g, or t
  misc_feature (7)..(7): n is a, c, g, or t
  misc_feature (12)..(15): n is a, c, g, or t
  misc_feature (327)..(339): n is a, c, g, or t
  misc_feature (474)..(474): n is a, c, g, or t
  misc_feature (494)..(506): n is a, c, g, or t
actgnancaaannnnttattacaaataattaaatctctccataatgtctcaaacagtatcaaacaccatttcatatctctaacacagagcagagtcggcattcagtataagaaccaagtgaaaagtgttaaatttcaagcatctgatcacatcacatggtgaccaggtaaagcttagatgtcattttcccacattatccaactgtgcatctcaaacatatcctcatctcagtaaagacaaaagtttctatttcatattgttaagtgcaggaagttgagagagataaaaatccagtgaaaacacatcaatctcaattcaactcagttnnnnnnnnnnnnngcaaattttaattagtttttttcagagaagaaagggaaaggagtccatggggttaagaatcaaaactgaccagggctggcaactatagatggcatgttgtagctctggaaagtatctgtcacatgatattttatnataaagtggcttttgtggannnnnnnnnnnnnggtattgtaaacatgtactgtttaatattacccgaatttaatttaaaacatgtttgcaaacaaaacaaaattaaaagcctttaaggcaaacctccccctaaggaaaaaagtcatttgttataaaattgtgaggacacccaagcaagaccccacttaagattcgtcagcatgaacttgagagcttttgtccactgctcctcagagttaaactgggttttgatggaataggagccgccactgcctcctgtgtcttcaatcttgcctttctccacatccatcctgtagggaagacaaaaacgtgtctcgcctttctcaacctcttctttgaactgctgcacacagtccaggaaagccaccattgcatggtcaaacttgttgtcccagaaaaaccgcaaccccccagaacagtataacggcagctccttagatttgtctgtcagagactccagatatgaatggtttccgtaaggaacaagtcggtatctctgaaatttcagacccatcttattggccagagcatggagcagcaacacagtctggccccaagcagcattaatctcattccattccacggggaaacactgggcagggcgacccagcctgaagttattgattgtgccaaactgtccactgtgccagatgtggaaaggttgcattaaagacgttggttttcttcagcttatccagctgcgtctgggcataacgcatctggttttcaacactcttcagctcatcatccagctccagctgctgtcgtttaaattcactgtattctctctgatactgagcttcctcctgatccagtctctcagcctcagcctggaccttctcgagattttctgccactatcttgcggttcttttccacgtcttccagctcctggatcagcctctcctcctctagtgccagctcctttagctccatctgtaactgttcactgtcatcctcattcatttgctctaagatctccaaacagcgtttgtagttctgacactcattttcagtgacgttgagctgagtgtccagctggtctaaaagagtatctgtgcattcctcacagagtgggtgatccacatctgtctggcccgacatgatgtcaaaaaggtccccagtgaccttcagtcttcggctgaggttctccatggtgccgccatcagatgcctccccaatcagagtgaagctgggcacctgtggacatcatcctggctggggggatgaatctgcgagagacaccatcctggcgaggagtttcaataaatggctcctctcctgagttagtctcttcctcctgggtctctcctggtttcgcctgggctgtggtaagtaatggagctgtgagttcctggatggtgacacggtccaggatcttgaaactcgtgtccagtttcaggggctggctgcagcgctggcacacgaagctcacctgcatggtgctgttgttggacgtcttagacccttccatccctcgggagcccggagcccgtcacccaagtccggtctaccgcggaggcactgtggcctcgggtcggccccggagcgaggcctccagaactaccatcgctctgtcttcagcgacttcc

SEQ ID NO: 310942 - DNA, 477 bp, Homo Sapiens
  misc_feature (81)..(81): n is a, c, g, or t
gaggttctccatggtgccgccatcagatgcctccacaatcagagtgaagctgttggcactttctgtggacatcatcctggntggggggatgaatctgcgagagacaccatcctggcgaggagtttcaataaatggctcctctcctgagttagtctcttcctcctgggtctctcctggtttcgcctgggctgtggtaagtaatggagctgtgagttcctggatggtgacacggtccaggatcttgaaactcgtgtccagtttcaggggctggctgcagcgctggcacacgaagctcacctgcatggtgctgttgttggacgtcttagacccttccatccctcagcccccgatgctcttcacctcgggagcccggagcccgtcacccaagtccggtctaccgcggaggcactgtggcctcgggtcggccccggagcgaggcctccagaactaccatcgctctgtcttcagcgacttccc

SEQ ID NO: 310943 - DNA, 443 bp, Homo Sapiens
taaagacacacgtataggaaatatattttcccaattgagaccacacagttcaaagaaacctgaaccaagtggaacttcattacaacgccaaccttaggattgtaaagcccccaaagcaaaggtaaattgttgccaaaatgcaacaaagttacaaattaagaaaaatacatataaattaaaaagagggttcccataaagaaggcagtaagaaacgcaaaatagaatacacgtgagctgggccccttggagaagacctgggacaggttcttcctcgaaaacgcccctcttccctctctccaagtcgccgcgggagggggcaacagcaccatgaaggtaaacgggagtgaccttggcaaaactaccaaacaaaacgcccccctcccctcagctctccggccgagtacctcggcgcagcgctcctacacgtgcgacagggacacctg

SEQ ID NO: 310944 - DNA, 677 bp, Homo Sapiens
tcaagagaattataaaaagagcaattccagtattagccatggcataagaaagcccaagattccactgcccacaatcgcattgctgcagattaaatactgacattccaaaggaagtagtacctggatgaaattctgtttcatacttcttcttccccaaattcgattcaagtaaaaagttctggttttcaggatctacatctgcataatggcttttcagagcagcttgcttggtggggtaggagtagttgaagtcgctgttggaactgtagctgctgctgtcttcatccggggaaatactgaatcgtcccatttcggccttcttcatgctaagcactgggaggaatcgggtgcagctagtagcgctgggctccttttgtccttggcggtgggtgcagcggcccgcgagtcggcctcggtggtctctattctcacgcagacgtcttcagtgggtttctctcagtcaaatacaaatcatataaaacaaacataagatttccccaaatccaacaacaggcaggaaaaataattttaataaaaaaggaaaagacaaattgccgccccaatcctccggcgtccgccgtgtcaagggaaaggcgcgagcgtgcggtaacgcgtggtcgggctgctgctagcagtactggaaaggcgttctaaggcggcggcgtcgcgcggctgtc

SEQ ID NO: 310945 - DNA, 664 bp, Homo Sapiens
ggtttgtccgttgttggtttatactaatttgacaacagccgcctgttgagtctcctccagatcgcagctgaaggatctgttgagcgcttcaggaaaggcggacaggcgacactaacaggtgaagatctcgggagaccatgactaagaaaagaattgctgtgattgggggaggagtgagcgggctctcttccatcaagtgctgcgtagaagaaggcttggaacctgtctgctttgaaaggactgatgacatcggagggctctggaggttccaggaaaatcctgaagaaggaagggccagtatttacaaatcagtgatcatcaatacttctaaagagatgatgtgcttcagtgactatccaatcccagatcattatcccaacttcatgcataatgcccaggtcctggagtatttcaggatgtatgccaaagaatttgaccttctaaagtatattcgatttaagaccactgtgtgcagtgtgaagaagcagcctgattttgccacttcaggccaatgggaagtggtcactgaatctgaagggaaaaaggagatgaatgtctttgatggagtcatggtttgcactggccatcacaccaatgctcatctacctctggaaagcttccctggaattgagaagttcaaagggcagtacttccacagtcgaga

SEQ ID NO: 310946 - DNA, 798 bp, Homo Sapiens
  misc_feature (312)..(312): n is a, c, g, or t
  misc_feature (785)..(785): n is a, c, g, or t
gcccaaagcagcttcagcccacgttttattcccatcgagggagggagaatgggtgccgctgagtgggcgggggagtggtccctgaaagaggtggagtgctacagcccctccccgttggctctcgctgtttgtccgttgttggtttatactaatttgacaacagccgcctgttgagtctcctccagatcgcagctgaaggatctgttgagcgcttcaggaaaggcggtgagatccggtaccgcagcagagcactctcagctctgtgtcttgcaggcgcagggctcccccatgccagcagaaagatttcctctngtggaagaggaccgtcgaatctgtgctcctcaagacacctcttttacagaatttattcgaatgccacggccaagggcttccttgatggtaaccgatgtgtgctttttggcttttggcatcctttctttaagacaggcgacactaacaggtgaagatctcgggagaccatgactaagagaagaattgctgtgattgtgggaggagtgagcgggctctcttccatcaagtgctgcgtagaagaaggcttggaacctgtctgctttgaaaggactgatgacatcggagggctctgtgaggttccaggctaaagagatgatgtgcttcagtgactatccaatcccagatcattatcccaacttcatgcataatgcccaggtcctggagtatttcaggatgtatgccaaagaatttgaccttctatagtatattcgatttaagaccactgtgtgcagtgtgaagaagcagcctgattntgccacttcaggg

SEQ ID NO: 310947 - DNA, 684 bp, Homo Sapiens
ttttgagactgcatagggctcggcgtggttcatggctggcaatgttgtccaggatgactctatgcctattcagaagctttttggaagcaatcaggtcctttccaaggtaggtggaagtagctgagggttcagtctcttggatccaggcttcctcatcctctgtgtctctacaaatcagctgcagatggagaagttctaagagcttcttctttctggtggccagtggctctttcagagcttcaaatcggcataccaaggactcttgccttgcccttatatccttagaatcaggatggcctatttcttcaaaatatgcagccaggtctgtaaggatatccacctgatcctgacgagcagccacagccgactccaggaggccgtgtttcctgagtcgattctgtacctcggccaggcctttcccataatcctcagaggtgacttgccactcaacatcctccagccagcgctgcaaatcttctgcattattttcaaattgcagctggctggttggcctcatgcaactgggtccctttctgttttgtagcctccagcaactcctcccagaggctggcaacttcactcagacgagtggtcacattgtcagaggcatagtgaccaccctcaatcatctcttggccagtattctgtatgttttgcagctgggtcttattaactgccaactcc

SEQ ID NO: 310948 - DNA, 836 bp, Homo Sapiens
  misc_feature (264)..(272): n is a, c, g, or t
  misc_feature (372)..(382): n is a, c, g, or t
  misc_feature (531)..(540): n is a, c, g, or t
aaattttagactttttccatggttacagaatcatacctgtttcagtttcgatacagtataatgagcaaggcttacctacaggggaagccattgttgctatgataaactataatgaagctatggctgctattaaagatctaaatgataggccagttgggccccgaaaagttaagttaactttgctgtagagagagagcatttctaaattcagttatcttccttgcagtattgatggagtaaaatacatttgttttaaaaaagtgnnnnnnnnnaaattatctaatgaaatattttatttttgacctgtgaatagaacaaatgtaaatagtagaatgtgaatctggttttcttttgcttgcaaattgccattcnnnnnnnnnnncaaatttaaaattacacatgctgtttttttctttgatggggagaaagaactcattccctgagttcattcatttttgttgatgtcatcggtaatcttcaagacttattgaagtagagttgtatttggggaagatacattttatattcacnnnnnnnnnnctttctgtagtctacctcttttactcaaactgtataaggaaatagtgactgattgttcaggtttggcattttcattgctacctgcctgcagaattaatgccctcttccttgtctaagatattactgtgttaagtgtcctgttaattataaatagttcaaaatggacagactgtcaacttgaaatttacttatgtaaaaagcttaggtgattcttagggtttccatgttcataactttacaaagctttataaagataaaattgcaacttaatagagctaattaacttgtatttgtat

SEQ ID NO: 310949 - DNA, 631 bp, Homo Sapiens
tttttcccagatctcatcacagccagctttctcctgaaaactcagagccaaatcatagttctctgcttctgaccaaacaattaatgtatcctgttgtttctgatatgcagtatttggatttatctttgattccaagagtagtgatccgtcggactctgcccgaaccagcagcgacatccccttgagctcctccacgtaagtggaggagacgtgcccggtgcctcggtcgtcccattgccggtcttcgttcagggtatagaccttcactcgccgccgcgtatccgacatggtggctgctgtctccaccgctccagccgccgcctcctcgcttacctcgtccgcgctcctcactcttaggagacggtaaaggcagtagtggcggtggcggcggcggcggcttcggagaggcccgaattcaccatggctccaaaggttcagccgcgagaaggggtgacaagagccactgaggcctctccgcccggaggccccgttacctctcacttcacccgcgcatacacccactctcccgtctctttgccccccagggctcgcttgctctcccgccgccgcggtaactactacagatccgccatcttgtaacccgactctctctgcctttctcttcctcctc

SEQ ID NO: 310950 - DNA, 898 bp, Homo Sapiens
  misc_feature (228)..(258): n is a, c, g, or t
  misc_feature (412)..(412): n is a, c, g, or t
acaatcaaagaggtaccaattacatagcaggaaacatgttgccttccagaagacctagtggacaagttcatttggcccagagatatttgccaggaaaggatcagatagatgaagtaaaaccaaatcgaaagggataggtaccaaggagaatccaagctacatagtcaacagatggtgatggatcaggcttcttcctcccaagaaacatttgctgcactgtgctgcctnnnnnnnnnnnnnnnnnnnnnnnnnnnnnnnatgtctgctcaagctgagctgcctgctcctgccttacagggtgctcagctaccaggactaggtttgggttgcccagggctcttgctataatttagcatagaccttggggagaactggtcacacatgggttggctttgttgctggttgttctcanacaaagaaaacccctgaagcattcacatgcagagtagtctgagcttctccagtcacagtcaaacaccctcacacaacatcctcaaaagtctgaaatcttgtagcagctgagctatagttaaagctgcgaggctcacagaattatcaaggaagccagaatgagataatgcaggtaggaggtcccagcagttaatctcaatccttctttcttcatttcggataagctctgatatacctgatgtgggatgtagccagctactgtggagcaagctgggtcttctgctgaatttgtcatcaaataccaaggggaaacaaggggtggggtggattttattcttaaaaagcctcagaagttactgtattataaagggacctggctgaataggtaagaaacggattcttcattgtgacggacgcgtggcgacgcgtggtcgacgatatcccgaggattccggacctgtaccagcctgcttttagtcgagttcaa

SEQ ID NO: 310951 - DNA, 610 bp, Homo Sapiens
tggtgtacatggtgaatcttgaataccatttgcttgctttctctgcaactccttttccagcagtgaacatactgtttcttagaacatctagtttaggtactagtagtgtatctaagttaaatgaaggtgatgagtgggttaatgtatcctgagattcttccctaaatgggcaagtaggtgagaaggctggagaagaccaaagtctatcccttggtttctcctcactttttgtgtaacttttagatttggtaagtctcactggcttaggagaattaggaggcagactagatcttctgcatgcctttaccaatggtggacttttcttatttaatttatcatcacatgcccgttgtacatcaatgcttggtgtacgacttgtcaaaggactgctcatgttattcatatacatcacaatttcttcagctaaatcacgcctagcagatggtgttgaaatgcttttgctatcatcttcatcctcctcctcttcttctttttgctgctgttcagtctcagcaaccaaaagagagaggggatcaaatcctgttgcgacatcagttttttcaaaagaatttactgaaaaggtgctgttcatacgttgaatcctcttggg

SEQ ID NO: 310952 - DNA, 1181 bp, Homo Sapiens
ttaaggtcattaatcaaattttaatcttatcttgcttaaaacttctggctttgaaattatatgaaagttctagatttagtatctgggatagtgaacaaatttgtaagagtacacagatggcaccagctgagatgtcatggaacacaaggaaaattaaatagagcaaagtggagggaattttagaaagctcattcaactataatctaaacgatgactggtaaaagtattggtaattttcactccagaggattacataccagaacgtccagatttccaatggcctcaaagcagaagtctataccagcatctgtcatatcaaataaaacttcttgaatggggtttctttaagtcctgagggttgaggcactcagtagcacccaattcctgtgccttcttaaatttctccttgttgacatccactccaatgatcctggctgctcctgctgctttacaacccatgacaacagacaagccgactcctcccaggccaaacacagcacaggtagaacctggagtcaccttggcagtattgattgcagcaccaaacccagtggaaaagccacagctaattaggcatactttctctagaggagcgactgcatcaatcttggcaactgagatttcctttatcactgtgtattcacagaaggtgctggtattaccaaagtgatatattgattttcccttgcaggtaaacctgctggtaccatcagacatcagttgggtttttgactgtttgaattgtatacaaaaattgccctcagaattcaggcaagaggtacattctccacactgtgacagaaagagtgtgataactttgtcacctggtttcactgtgcttactccttctccaatactctcaacgattccagccccttcatggcccaagatggtgggatacaagaggtccaagtgtttactccccaacactttcatctctgtaccacacagtccggtggccacaacctttatgcgaacttcctttgcctttggtggggccacttctacctcttcaatagaaaatggtgcaccaggcttccagagtatggctgctttgcatctgatgacttggcctgtagtactcatgctgattttctccaccgcagatgaatttattgagaaagggagatcctgtagcaactttcactgtagaaagtacaaaggtacacaggcgactggtc

SEQ ID NO: 310953 - DNA, 350 bp, Homo Sapiens
agacagcacatacctaaactggttgctgattatatggcagagaagttgaatctagatccactaattactcatactctgaatcttgataaaatcaatgaagcagttgaattaatgaaaactggtgtatccgctgtatcctgtgtactttaagtacaatgtaatacatgcaagacccggatatttcaccaactcaatggcatttgatgtaattttcatgatttagaagaattattcacccaatcccatttctatattctgacttctgattcacttcgcagtggacctatatctggcttctgacctaaccatttcatctagattaaggttggcttgaatcactcctccactcc

SEQ ID NO: 310954 - DNA, 1067 bp, Homo Sapiens
agttatgaagatgggtactatgaacctgctgatagtcaaatcatcctgactaattgaagaataattttgaattttctttggcaatcccaggagaggagagatttgtgccaaggagataggataagtgagcatttgagactgggttaacttgattccaggttaacctgaatcttcaataaactcattaatgcggagttttgtttctttagagtaaaatggcagagtttcatgtctaggcctgtgagagagacatatagtgtacaagaatataaaggtccacaggtagaggaactatgaaaatgggagcatcttgcattgaccttttatgtctgaaggatgtggagttgagtgattcaagccaaccttaatctagctctgaaaaggaggctgatccttggtgacactgggttacgtaagaacaattttgatgaaatggttaggtcagaagccagatataggtccactgcggagtgaatcagaagtcagaatatagaaatgggattgggtgaataattcttctaaatcatgaaaattacatcaaatgccattgagttggtgaaatatcctttgggtcttgcatgtattacattgtacttaaagtaacaggatacagcggatacattttccagttttcattaattcaactgcttcattgattttatcaagattcagagtatgagtaattagtggatctagattcaacttctctgccatataatcagcaaccagtttagggatgtgctgtctgctcttccagcctccaaaaacagaacccttcaaagaacgtcctgagaagaacaactggccactgattttgagttgaacactggcaggcaacaccccaacaaccacacagaccccatagctctcattgcaggaggcgagggcagctgccagaacgtccagatttccaatggcctcaaagcagaagtctataccagcatctgtcatatcgaatatatcttcttgaatgggtatctttaagtcctgagggttgaggctctcagtagcacccaattcctgtgccttcttaactttctccttgttgacatccacttcaatgatac

SEQ ID NO: 310955 - DNA, 964 bp, Homo Sapiens
  misc_feature (876)..(908): n is a, c, g, or t
tgtgatcctgaatgttgttgtctgcaatggcttgcagaaatgcctgggaatggtcccccagggcccgtctgtgggagcagagtcgagatttgctggcaggtgtgccccctggggagctgcagtggtcctcgtctttctcctcgttgtagctgtagtggatctggctggtctgcaggcctccagagaagatggatgactgaagccatttggcacattcaatctcgacaggagacagcggtgtgctcattgctaaataggaagcgtgtaatccgagaagcaggcccagattcctctctgtgtctatcagaggtgaggagagactccccagatctggtatggtgacgccttcttggtcaggctccaaatactggccaacacaaaatgcgtgcatggattcccgggtgtcttcaaactgcaaagcagcttccaaagctaccactgggtcttcccctgcaaactgagcaagaatactattttctgttaacgactgtgtctggaagtcctttatatcatacactttcccgtcaatcacagtccagaagcctccatcgttattatggttctccaaatcagctatgcgtacaaatgtcactttctcattatttctacagttctgacctgtaaaaaatgactcttatgagacgtcggagagctacacagaggaggcatctacagggtgtagccagacggtctaaatgggccatgacaacaaccgccgtttgttgcagatcaatggcaagcctgttgtcttgtggaagggtgaggtacctcaggaaactctcactggggctcagaggaccagacaaaagctgtaacagatccagtataattttcataaagaaaccaatatattggccgggcgtggtggctcatgcnnnnnnnnnnnnnnnnnnnnnnnnnnnnnnnnntggatcaggaggtcaggatatcgacacgatcctggctaacacggtgaaacctcgtc

SEQ ID NO: 310956 - DNA, 639 bp, Homo Sapiens
ttttgcggtaaggatacgcctccctccgagggcaacatgcaccttttgtctggccctctgagccccagtgagagttttctgaggtacctcaccctccacacgtcaacgagcttgccattgatctgcaacaaacggcggttgttgtcatggcccatttagaagatctggctacaccctgtagatgcctctgccgtgtagctgtctgacgtctcataagagagtcattttttacagttcagaactgtagaaataatgaggaagtgacacttatatgcaaagctgatttggagaaccataataaagatggaggcttctggattgtgattgatgagaaagtgtcatgatataaaggacttccagacacagtcgttaacaggaaatagtattcttgctcagtttgcaggggaaaacccagtggtagctttggaagctgctttcgtgtttgaagtcagccgggaatccatgcacgcattttgtgttggccaatatttggagcctgaccaagcaagttgtcaccataccagatccgggaagtctctcttcacctctgatagacacagagaggaatctgggcctgcttctcggattacaaaaagggctcttctgcctgtagaagaattagaactatgatttaatttg

SEQ ID NO: 310957 - DNA, 463 bp, Homo Sapiens
  misc_feature (73)..(73): n is a, c, g, or t
  misc_feature (112)..(165): n is a, c, g, or t
  misc_feature (407)..(407): n is a, c, g, or t
ttgtcattcagatctttctttgtcccacttggttcgacactatgatctgttacagatccagtataattttcantaaagaaaccaatatattggccgggcgtggtggctcatnnnnnnnnnnnnnnnnnnnnnnnnnnnnnnnnnnnnnnnnnnnnnnnnnnnnnntatcgacaccatcctggctaacacggtgaaacctcgtctctacttttcccaggagggagctatccgttctgggttgattctgttccagtgtatacaatttctccatctttaaccatttcattccacaggaccacagagcccatctcttgtggaatgcaaggaaggaaaaatgacacgtgggtcggggcgagggtgggcttcatgctttgttcatccccagcactttgggggagggccgagcngggggcacatcacggggggatccagggattttgaggccagcctgggggccaacacg

SEQ ID NO: 310958 - DNA, 611 bp, Homo Sapiens
agtctgcctaatttcaagaagaaaagattcatcatcgcttagtgtataataccaatactggacataatccctcaaggaaaactggataacttgctggagaggttcatcaattatattggcacccgtcaatcttctatcaatcttaatagtcctggcttcccgtttcatttcttctaagcacttaggaaccccaggtgatgttggaggaagaaatgagtgttcacactgttctaggtacttctctgagtttgtttttccaaacaggagagtaaccactaaacccccacccacaaagcagaggatataaaatgtcaaataaaatattacaaagggtccaaaggttatcagaaaaaggacaatgccaaggcttccccatccccatatggatagactggcctcagttaacattattacaccccggggaagtgaggtcctccctagcctcgcctcatggcaacagccgtagcagcagcgaaaactgctcgggccgccgccaacggcggcaactgctccttcagtcttctcccgggcggcggttttactcggcttcgctggcctcccctcggcccggtcgctcgcgacggacgcgccgccatcttggaagagcgacc

SEQ ID NO: 310959 - DNA, 590 bp, Homo Sapiens
caagttgtaattatttaagacttaatatatgagccacctagcatagaacttttaagaatgaaaatacattgcatatttctaatcactctttgtcaagaaagataggagaggagagataaaatagttgatggggtggagaggtctatatttgaatgtagtctaaaaattgttctcttaagattggaagtatgtaggctgggagggtaaataccaaatcttggtatatcagaactgagcatgtcccttgaaggttaagaaatagttaatgggcaaatagagcatggcaatattttgtagagcagcaagtagtaggccttgaatagatgtcgctcaaaaagtaatatgtaagctgaacacaaaaatgtaacaaatgaatttagatacatatttgaatattaaattcaggttgtttgggagatgcacctagtctttgatggttaaacctttccctccatagaagagacagagaccgaatggcttgctggactaatgtcccaattcaatagagtcttatctatgaaggttaaaaacaagaagagacatattatacagtagatatttattgtgtggctcatacacatggtgctctt

SEQ ID NO: 310960 - DNA, 1574 bp, Homo Sapiens
gagttttacttgatatccataccattccaaaatatactaattcctatttggtctagtattgcaaccagtgtccaaaccaaatagtagtccaagacctctattaagtacatttattaaaaatctaatgttagtgtaatattactctgaagttgtgataacccattatccttgcaagtcattgaaacatgcatcacagacacgaacaggcttcttggaggaaggagttaaggcatttttggctgaacattcagcacagaagatatttccacactgtcggcagtgatgccgtctcactgttactgaaaagcctttcccacaggccatacagttttgtacttcattgtcttcggcccactttctattcaacgcttgtgtatgtttgatctgaagtgattggttttctctgcccagctcctgcactgctgcagttgtattatccagctttctttgcaattctaatactttggtttgaagcttttctatttcaaccttctcctttaagacatctttccagtagtgctctcctttcatcttgattattctgaaccgttgcttctaatactgcaatttcaccccgtaagtcatccgtttgtttctcaagctcactaactctccgttgactagattgccactccttcttcacagtgcctaagttttcatttaatgctgtaatctgcatggtaagtttagcctcattttcttcatgcttcttcattcctacttccttttcttttatttcggaatgcaacttagcttctttctcaataaattctttcttcagctcctcttcttcctttttcacctggtcttttagtatctgctgatttctcttctcctgttcaacagctgccttcagggagtccgcttttccttgaagttctaatttctgctgaattagaagctgtttagcatctttaagatttgttatctcctttatgctttctagtttgtgggacttgagttcttcgtttagtttagtgatttctttttcttgtctacatttaatttcttctatctctgccaatttagacttctcatttaccagttctttttctttcagtgacttttctttctgaatgtcttgtagtgctttacatcgctcctgcaattgctgttctttctttgctgaatcctgctccaatgtagccttggcagtcttcagttcttgaatcaatttattttgatttccaatttgatttctgtttgaaatcaagtcctcctgtgctagagaaagcttctcttctacagacttaagatcttgcctggtggctagaagttcagattccctcccatagaaatcagattgaagctgtttgaaagtttcctgacttttttcatagttgttttgtaatactgatattttctctttctctgctgcaagttcctgggctgcctgtgttaactgctgtctgtagtttattctgcaagctctgtctgtctgtaacacgagctattttaagctctcccttggagtgcttctatttgttttttcttctgttcacttgattgctttagctcatttatgttcccctgaagttgttgctcttcttgcttcattttgttttaaagtattc

SEQ ID NO: 310961 - DNA, 537 bp, Homo Sapiens
gtacatatgggtttttgctggatttgttaatttggggaagacaaatattttattgatgattttgaattttaagagctttttaaattcacttttagcctgaccttcctagtaaggaataattttattttattgaaaaacaccaatatcatgaccattaatcataatggaacatcatttagaagactggagattgatatgtttttattactcagaaatttgagggatgtgaattaaacatagcatcattcatcaaatcaaattggtaattcttagcttttgtaaattgatggttcagttccattcttaagagcatattttctagagtagcctcattcttttattctttgtttttgcagttgaaattttattaaacaatagtgacttttggtttcattcatttggaaaccttgatataatcttgtttaaaaaatatagttttatttttttataattatattttgagaaaatagtcagcttttctctcttagtataatgcctttcataatcctttaacatgcctattaacagatacgaaaa

SEQ ID NO: 310962 - DNA, 1186 bp, Homo Sapiens
  misc_feature (819)..(865): n is a, c, g, or t
aagatctgaatttggcttgtttggagcatctcctctgctcccctggggagtactgggcacagtcaggtggtggcttaacagggagctggaaaaagtgtcctttcttcagacactgaggctcccgcagcagcgcccctcccaagaggaaggcctctgtggcactcagataccgactggggctgggcgccgccactgccttcacctcctctttcaacctcagtgattggctctgtgggctccatgtagaagccactattactgggactgtgctcagagacccctctcccagctattcctactctctccccgactccgagagcatgcttaatcttgcttctgcttctcatttctgtagcctgatcagcgccgcaccagccgggaagagggtgattgctggggctcgtgccctgcatccctctcctcccagggcctgccccacagctcgggccctctgtgagatccgtctttgggcctcctccagaatggagctggccctctcctggggatgtgtaatggtccccctgcttacccgcaaaagacaagtctttacagaatcaaatgcaattttaaatctgagagctcgctttgagtgactgggttttgtgattgcctctgaagcctatgtatgccatggaggcactaacaaactctgaggtttccgaaatcagaagcgaaaaaatcagtgaataaaccatcatcttgccactacccccccctgaagccacagcagggtttcaggttccaatcagaactgttggcaaggtgacatttccatgcataaatgcgatccacagaaggtcctggtggtatttgtaactnnnnnnnnnnnnnnnnnnnnnnnnnnnnnnnnnnnnnnnnnnnnnnnacgtttctttagaaaacaaatgtatttcaaaatatatttatagtcgaacaattcatatatttgaagtggagccatatgaatgtcagtagtttatacttctctattatctcaaactactggcaatttgtaaagaaatatatatgatatataaatgtgattgcagcttttcaatgttagccacagtgtattttttcacttgtactaaaattgtatcaaatgtgacattatatgcactagcaataaaatgctaattgtttcatggtataaacgtcctactgtatgtgggaatttatttacctgaaataaaattcattagttgtt

SEQ ID NO: 310963 - DNA, 743 bp, Homo Sapiens
catattttcaagacagatttacttcagaagtcaattgaaatccttgctcatgttctaagtatggccattgtgataagacctaagatataagcagccactaatttttgattcacacttaagtggaggtagagaggcaccagcgattccacatcccccagtgtaggcagcatcagggctgcaatgcacaccactcccaggaagacagttagtaaactaggtcctgaggatacagctctgttttctgtaaaaagacaaaaatccctaagcttccttctaaaaactttaagacaaaagttccttcacaaacactggccaccacagaccagtattctgattttgtctaacttctccaattgtttccccatcattttttccatctgagagttaactgctgggctgatgtggaagcccatgtcttaactggtctgaatcattgcaggatggaatgctgacgtggcattgtgaggtagtgagttcttactgaaaggtggtcaccaactcccccgaccatcccaccctagtcagtagaaagtattcaagcatgtatcatcgatgtatgcacattttaaaattatatgcacaagttctgtactgtgttatgcttaatataaaacatacaaatagatttttggaagaatgtgctaaaaataaatataaattgaagttctgatactttcttccagtaccccagtggcttgcctgtgtatattcaatttgagcctgccacactagacctccactac

SEQ ID NO: 310964 - DNA, 732 bp, Homo Sapiens
gagaggcaccagcgattccacatcccccagtgtaggcagcatcagggctgcaatgcacaccactcccaggaagacagttagtaaactaggtcctgaggatacagctctgttttctggttgaaacgactgctcaaaaaataaactttcagttaaatgttcctttaatcttttttcctcttcttccttttgttgttcttttgctgatgggagaagagtagcaacaacctcttttcttcccaaagccttcctttggctttgctcggaaacttggagacggaatttgtctattacaccatagtgacaggatcgaaacatctggatgacgaatcacaatatccacacaacactgaggctttactgcacctgcagcatcaacgacaacatacttatttggagtagtacacaaaactttgaactttaaggcaaactcatagggattgtacagtgtcaacacttgcttatgtgttgactgatcatctgcataaaatatgagctccgtggggaacacgaaaacaggaagatttccttccactaactctggttgtcttttttgttgatgcattggcactgaatcccccttgctgcagtttctgtttttacagtctcaaatctattttggacttttcttagattcagttaaaaactccaaagcattttggcaatctcggcaacaccggcttcctcggaaagcagctgcgactgctcctccgctcctttgtcagcgtctctccc

SEQ ID NO: 310965 - DNA, 694 bp, Homo Sapiens
caagtcaaatccaataagctagatgacaagagttagcttttattcacaaatgtagttaaacatgaggggtgttttgtagaaactccaatttctacaaacattagtggtgcattttggtaacattgggacaataaataagttatttaattaataatacaattttaagacaaaagataccccaaacaaagcattatctgttgactgcctgagaaacatgaagatcttcaatgttagtacttttctgttcctcctttcttaggtggtcatccattggctttcttctactaggttgtctgccaagacttgggtctgaaggctgaagtgaaggccctttcagaaatgcattctggatgccatccttagttccacgcatgaaatgggctaaaatcccatataaaagaggtattgtattatcctttgattcttcaaatgcatttagttcatggatgagaaactgtctgtccaacggaactacaggttgaccagattctgctatgaggacagatgctgtatacttatatttgttgaattctaaatactctcgaattaattcattaattagaaggttttcatgagacaatgatggtcggggttcacggtcatcatctagggcattgaaaacttcaggtcggatccttgcttttaaatgccctaataccccctttttttccaaggtatcctttaaaacagcctt

SEQ ID NO: 310966 - DNA, 1241 bp, Homo Sapiens
gacaagggccactgcaaacgccccgccagcagcggaaccgttatctcgcgagatgacggatccccataaggcacaaacctagcgccaaggttggctgtcaaggtagattccagggtgtggaagtggctttgtggtgccacctctaaccgctcggaggtcaacccccattctacaccgaaaactaggcctcggctgctatggaaggacagcggcaagaaagccacgcaaccctaacactcgcccaggctcatttcaacaatggagagtacgcggaggccgaggcactgtactccgcttacattcgccggtgcgcttgcgcggcctccagcgacgagagtcccgggaggtaactatcgcgagacctggggccgcggcgaccccgggtggaggcgacgttggggttgtttgggctcctatctttgcctctggagctcacggtcggcgcttgttataacccagcactaggactgagcgggcggacgttcgtctttctagaaaggcctaggcgaggcctaggacgagggcggcggagaacgcggggagaagcccacccgtgaggagccagctgccgcgacgcaaatgcagccctgaggatttggctactgcatataacaacagggggcaaatcaagtacttcagggttgatttttatgaagccatggatgactacacatctgccatagaagtccaacccaattttgaagttccatattacaacagagggttgatactgtataggctgggatattttgatgatgctttggaagatttcaagaaggtcttagacttaaatcctggatttcaagatgctactttgagcttaaaacagactattctagacaaagaagaaaaacaaagaagaaatgttgcaaaaaattattgatatttttaacttaatggaagtattgattcatgatccttacatctgcatctagttatcagtaatttagatattgagctattttgatttatatttaagaaattaatacattagcactgaaagttaaatagtgtgtttaaggtagttaatttcaggttgaatggggttttttttaatgaagtgtaaataataccaatgtataagtgtatattattatattaaatattatagtaaaaaggaatgtgtggtattttcttcagcaaaactatttttgtgatttttttattctcaactttttatttaaaaaatgttacatctgcagaaaagttgaaagtataataaactcttcagttacttccct

SEQ ID NO: 310967 - DNA, 825 bp, Homo Sapiens
cctgttgtttggtttcaataatatttattttaataatatccacttatacattggtattatttacacttcattaaaaaaaacccattcaacctgaaattaactactttaaacacactatttaactttcagtgctaatgtattaatttcttaaatataaatcaaaatagctcaatatctaaattactgataactagatgcagatgtaaggatcatgaatcaatacttccattaagttaaaaatatcaataattttttgcaacatttcttctttgtttttcttctttgtctagaatagtctgttttaagctcaaagtagcatcttgaaatccaggatttaagtctaagaccttcttgaaatcttccaaagcatcatcaaaatatcccagcctatacagtatcaaccctctgttgtaatatggaacttcaaaattgggttggacttctatggcagatgtgtagtcatccatggcttcataaaaatcaaccctgaagtacttgatttgccccctgttgttatatgcagtagccaaatcctcagggctgcatttgctcccgggactctcgtcgctggaggccgcgcaagcgcaccggcgaatgtaagcggagtacagtgcctcggcctccgcgtactctccattgttgaaatgagcctgggcgagtgttagggttgcgtggctttcttgccgctgtccttccatagcagccaaggcgtagttttcggtgtagaatgggggttgacctccgagcggttagaggtggcaccacaaagccacttccacaccctggaatctactttgacggccaaccttggcgctaggtttgtat

SEQ ID NO: 310968 - DNA, 820 bp, Homo Sapiens
  misc_feature (361)..(361): n is a, c, g, or t
  misc_feature (789)..(789): n is a, c, g, or t
  misc_feature (807)..(807): n is a, c, g, or t
taaaactaacgtggtaatcaaattttaaagttctgtgaaatttaggtttagagcttggaacaaaggaagtgtccctgagtttattttaggcttttgataggcgttatagatcacagcagagcactggggtgggaattggacctgggcgcaggagcaggggtgaccccattactttgtgcttgtgcattcccagctgtgaaatgagggcaattcagatgttcacctgtgaaacttttctgagttaaaatctttgaagacacacaagacaatagaaagtgaagtttagattcttggattaaagggaccataggtagtgtttcttcatttaaagtgtcaaaaaggaaaattagttcccgtttcnttaattttactgcaattatgtaaaacaggtgatacagttttattaaaattttaagatgattgataatatttatctgttaaatctcaataaataaacccatagctaattttaggtgtattattccctaagggcacacaaaattactttgatatacacatctctatattattaagataaaaagattcctttactagaagtgactgaaagctcataaatataaaagcaaaagtacatgtatcaaagcttttccatgaataatatatataaatactcggtttcttttctcttttccattttttgggttctggtacaggatattttgatgatgctttggaagatttcaagaaggtcttagacttaaatcctggatttcaagatgctactttgagcttaaaacagaccattctagacaaagaagaaaaccaagnagaaatggtgcaaaaaantattgatattttt

SEQ ID NO: 310969 - DNA, 809 bp, Homo Sapiens
attcccatggctggccagaggaggaacgctttgtgttctcatcggagctgcatgggaagtctgcatacagcaaagtgacctgcatgcctcaccttatggaaaggatggtgggctctggcctcctgtggctggccttggtctcctgcattctgacccaggcatctgcagtgcagcgagacccatccactgtggaggacaagtgtgagaaggcctgccgccccgaggaggagtgccttgccctcaacagcacctggggctgtttctgcagacaggacctcaatagttctgatgtccacagtttgcagcctcagctagactgtgggcccagggagatcaaggtgaaggtggacaaatgtttgctgggaggcctgggtttgggggaggaggtcattgcctacctgcgagacccaaactgcagcagcatcttgcagacagaggagaggaactgggtatctgtgaccagccccgtccaggctagtgcctgcaggaacattctggagagaaatcaaacccatgccatctacaaaaacaccctctccttggtcaatgatttcatcatcagagacaccatcctcaacatcaacttccaatgtgcctacccactggacatgaaagtcagcctccaagctgccttgcagcccattgtaagttccctgaacgtcagtgtggacgggaatggagagttcattgtcaggatggccctcttccaagaccagaactacacgaatccttacgaaggggatgcagttgaactgtctgttgagtccgtgctgtatgtgggtgccatcttggaacaaggggacacctcc

SEQ ID NO: 310970 - DNA, 1293 bp, Homo Sapiens
  misc_feature (205)..(393): n is a, c, g, or t
acaggtgtgggtttgccaatgagtctcaggggacttaagtcacctgccaaggtcacccattcatcaggtgtagaattggatttaaacggagcctgaccagccggggggtcttcctccttcacttctctgcctcttcatacatcacagtttctaaaactgtttttaaaaatggtagatcaacaatcagaaatggtcttgttagatnnnnnnnnnnnnnnnnnnnnnnnnnnnnnnnnnnnnnnnnnnnnnnnnnnnnnnnnnnnnnnnnnnnnnnnnnnnnnnnnnnnnnnnnnnnnnnnnnnnnnnnnnnnnnnnnnnnnnnnnnnnnnnnnnnnnnnnnnnnnnnnnnnnnnnnnnnnnnnnnnnnnnnnnnnnnnnnnnnnnnnnnnnnnngttcttgcaatagactgtgctactggtatggaaaaatgtctatgttatattaagtaaaaaatgcaagtggaaaaaaagatgttgcacagaattaaacttatttttatttttaagaaagcaatatattttaaacttgcctaagaagaaggctatattacaaatttattgttacttctggggatgagatgggcttatgacaactttcatttctgctttattaattttaatgatgtttgaggttctttttcagtgagcctgtattacatttataatgagaaaaacaaatattggtcaaacaaggctgctgtgtgcatgatgcacaggaaagaactttgttactctgaggcagggagggaggctgtgcaggacggtagccctgatgtcctcaatgcctgtaaaataccacagaaggtcctcactgattattctgcccccaaggtgatgaagttgatgtttaattaatggaccgtgtgtgtattgtcctcattggagtccttagcacagccaaaatagagcatggaggggaaaaaatcctgtaggttctggcattgctcagtaaacccaactgcactctgtcactttcccaggttatggaaaccccattgaagccagttcgtatgggctggacctggactgcggagctcctggcaccccagaggctcatgtctgttttgacccctgtcagaattacaccctcctggatgaacccttccgaagcacagagaactcagcagggtcccaggggtgcgataaaaacatgagcggctggtaccgctttgtaggggaaggaggagtaaggatgtcggagacctgtgtccaggtgcaccgatgccagacagacgctcccatgtggctgaatgggacccaccctgcccttggggatggcatcaccaaccacac

SEQ ID NO: 310971 - DNA, 619 bp, Homo Sapiens
  misc_feature (58)..(58): n is a, c, g, or t
  misc_feature (98)..(98): n is a, c, g, or t
ttattgaggtcctgtctgcagaaacagcccccaggtgctgttgagggcaaggcactcnttccctcggggcggcaggccttctccacacttgtcctccnccagtggatgggtctaggtgatggggcatggagagagaagatcaggatgcagtgcgggttggacttgagggcccccaaagtccacccctttcatttcaccggggcacaagaatcttgccaaggttgtgtgatacttagtggaagcatcaagcttgactcccagtccaatgggataagtgagagccttaaagctgccacctgaacacttactacaggcaagactctattctaaggacaaggaatgtattagcctattcaatcaaaatgagaaaggacagcatggtggttaaggccatggatgctggagctagaatgccaagttcaaatcccagctgtaccatgctccagctctgtgatactaggagagccccttaatctctctgtgcccctaattggggtaattaggtagcacttacctcgtggaactggggagaggatcaaatgagttaatacatttgaagtacttaggatagcaacaaggacattgtgagcattatgtattagctgttatttttgctgta

SEQ ID NO: 310972 - DNA, 743 bp, Homo Sapiens
aaactgtggacatcagaactattgaggtcctgtctgcagaaacagccccaggtgctgttgagggcaaggcactcctcctcggggcggcaggccttctcacacttgtcctccacagtggatgggtctgtgcagtatctcagattacaccagggagtgccttccaaccggtacacatggtacccgcctgggcaggccttcaccagcacctctgttttccagaaacagcagttgccactccaatgggcacaggcagtgtggttggtgatgccatccccaagggcagggtgggtcccattcagccacatgggagcgtctgtctggcatcggtgcacctggacacaggtctccgacatccttactcctccttcccctacaaagcggtaccagccgctcatgtttttatcgcacccctgggaccctgctgagttctctgtgcttcggaagggttcatccaggagggtgtaattctgacaggggtcaaaacagacatgagcctctggggtgccaggagctccgcagtccaggtccagcccatacgaactggcttcaatggggtttccataacctcgctgcactgcagatgcctgggtcagaatgcaggagaccaaggccagccacaggaggccagagcccaccatcctttccataaggtgaggcatgcaggtcactttgctgtatgcagacttcccatgcagctccgatgagaacacaaagcgttcctcctctggccagccatgggaatc

SEQ ID NO: 310973 - DNA, 683 bp, Homo Sapiens
acttgcgatggtacagcttattctccttcgcccagccccgatgcaggtacagtcccagatcatggagtctttaggacgctcataagtgtcacccactcggtaagtgttcccagtgtacttgtcaaagcaagtctcttcagcttcaggtttactctcgcagttaaaacctcggcttcctccataacaagtacaaaccaacgcattgcctaggtaggtccgctcccactgttgatttatctgatagtgttttccattgtcataacaaccgggcttgctttgactgacagccaccggggactggggctgaaccatttgctgagcctgcctcttgctcttcgaggctcccgtggagggcaccgctgtccccaggcactggacggccagcagcagcagcccgggccccggacccctaagcatgttgagacggtgggggagagacgcccgcaccgggaggcaagttgccaccaagtttgcttcccttcgcaacctgcgggaaaaatcccttctaatgcctcccgggggttgtcgcctccaagaaggtgggggccagagggtggggaaggggacgggtggagggacagaagggatgcagaggaccagagaagttgtggctgcaggtcccctcttcccgctcgcgcctggggttccctctcctccccctgtgcagcacagccggcgcgggc

SEQ ID NO: 310974 - DNA, 2087 bp, Homo Sapiens
aagaagaagtagctcaactttatttcagtaaaatcaccaacaaaacaataaaaagccaaaactaaaaagacagttttaattgtgagctgaagttttatatttctttacgaattccatttaaaaaagagaaatctctaaaatcatcaatacgcaggtctttaatccacttttaagtctttccccaccagcattgcagtcacgggatgcatgcttgctttgtgctcttggtaggttcggacagcttgatcatgggatttgtcaaaggcagcaagatccttgaataagggccgggtaaacttcattcttccttgttcagttgccatctttagcgccaaaggaattgcgtcctcccacttggattgaatgcagagccgcagccatctgaatcgtatttcagaattgttaatggcattgaagttgtacacctcttgcattcgctttatgtgccccaatggaagaggtgccctctggagcgtctgtgctaaaaactcattcaattgatgagaagagagatccttcaggtctgtggcattgaatgaatttaaatcatcttctttggcagtaatccatctttgacttaaggcaatacaagcatttgtcagagtcatatcataattgggctttatgggaggcagtccaggagagtagagccaggcattccaatcaacttgattgagaacatcaaccttatctttaaaataggaatacaggaaatccttccagtcatcagtagttatgctcttataggaaaacttctcaacataagcttttaagaatcctaggaaaatctctggtcctccaagcagttgttcaaggtaaaaaagtaaagcaaagcccttctcatagggaactgaagaataagctacatcagggtctatatctgtcagatcaaccacaagtttggtgaaaggatgtgtctccccaaatgtctttaccgaattctgtagttctccccatcctcccagagcattaaaatgtctgaacttttcaccaaacaatcgtccgcaaatgtggcgttccaagtacacagtatgtccctcatttaaccaaaagtgatcccaagttttgttggtcactagattccctgtccagctatgagatatttcatgtgcaatgacattggagagtgacttgtcgcctgccagtagagtaggagttacaaaagtaaggcaaggattctccatgccaccataagggaaggatggtggcaggaccaataggtcatactgtccccatacatacggtcctcccagatcttctgctattttaagcatagattcagtctcagaaaactcataagcagacttttccacctgctctttctcagaccacaccaaagttcttgggccaatttgcctgctttctaaagctccaacaactaaagcaatcaggtagcagggtattggaactttttggatgaatttgtatattttcctgcttgggtcttctgggtcaggtgtttctccatcacgaatagcactcataagtgccaccagttctttagggacagacacctctgcagtataggttaatttcacagaaggagtgtcctgacaaggaaggattgctctgcagtggatggcctggcactgactaaagagatatgggtgttccttcccagaagtctgttcaggagtgagccactggagagcagaagattttggagaggtctcaaaagaaatttctataacaatttcttgatttttgctcaaagcgataggaagagagatttccattggcgatcccttgtaactttgtctttctccaagagcatatttgacttcttgtccattgatcactactttttctattgtaaggtcctttgtatccaaaaccaggctgcgcagattgtcctcctgagactggaccgtgagagcagcagtcccggtcagcgtccggcgagtaaagtcgacgctgcagcgcaggtgcaggtgcttggtccggcagacggaagccggagaggccaacgaacaggtatccactatctcgggcatggctctgggggatcacacagcacagcgacctacagcccaacgctcagctaccagactcgtcgatagagaacctgaggtgccgaattcctgcag

SEQ ID NO: 310975 - DNA, 707 bp, Homo Sapiens
ggcccaggcagatcccagagaaccagtaggatgcctttgtcacactctctccctagctttaatcaatctttctctccccacccagccaggtttgagtcagtgccctaacccctgagccagtcccctccccccaccaccactcaggactctctaggtcaggacaaggtgtgtacatggtatgtgtggggggacaccatgggagcagacactcagctcaggacctcaaggagctgaggccaggccgctgcccaaccattccttagcaatacagaagcaagaacatgagtctagaatcctagaccaagggtagagacaactttggtttcagtgctgaagcgctccggccaagaaccttgggcaagtctcaacagcagtttcctcatcagtacactgggcctaaaaatctcatccctgagactctgtgaggatcaaatggtatcaagtattctcaaaggtacttcaaccgtagaatgctactcatggggaccgatagtgttgttcaggcaggacggagcaaggacaccctggcccattcctgggaacgtggagcccttgagcctccccagctatggtgaatgggggccagggcagggggaacatgtggaaggtgcaggggtcatgggaaaaaattgtatgatgcttccagctggagagactcacagctgctctgtagcttaccagagaccagaacctgagcccaagccccc

SEQ ID NO: 310976 - DNA, 1657 bp, Homo Sapiens
  misc_feature (368)..(384): n is a, c, g, or t
tcctctgggaatggttacagctttggtaaaaatttttgagggttatttttcccataattcattctgccacattttgaggcgtgtagcctgaccatggcttgctgcttcttccctgttcccaaaccccaagttcccaaaacacaccatggactggaaagggctatatatctgttgcatcacacaataaggcaaaacatttcttgtaactttgatagtgattaaagcagttcataattaaatatgagcattttgtacaaggacaattacactttacaaaaaaacaaaatcatacaacaaaaattgctggagtctgatttacaacacgaattatggtttgaaatcacgcttacataagtctcaaatttacnnnnnnnnnnnnnnnnntcagttctgggctagctgttgtactgctgaagttctctgatgtaatcattctcacccatgtcatatccccttccttaaagttgaggatggatgttaaaagtttcaacaaagttgagctgtactctcctttggaggtgaaggtaaactccatggctagatgagcagttttaccacatatcatctgttgatgtagagtcagtgtcgtcatttttgtaaggattcagtctattgtaaacggcttcaataacattcctcttgcttgccaattcaccccctggtgggaggctggggatgttctcactcgctaatgtgcgcatcacatggactaagtcggggacgccttccccctgcttctttatgatttcttctactctgcattccaggtacttgtccaactctgcctccttcttcactgcttctggcgatactttgggtgcatttggaaaacagatcaaaatcacactcatgttgtctcgacttcccttatacaaacaggtgtcgactacttcattgcaaactttctcaaggtcatcagtgacttcaagtctggatcttacaaaatcacagagctcttcatttcccataacatcccagataccatcacatgcaaggataatgaactgatcatcttcttcagatctttcaatatcatggacttcaggctctggtgagacaagctgctcagtaggaccttttccatggacacatttgtaatcaaaatccccaagggccctcgatacagccagagagccattcacacgctgaatcattacagagccacctgcattctgaattcgttctttctccagcggattacttggtttgtgatcttgtgtgaagaaatgaactttcctgttcctacaaagtaaacctcttgagtctccacagttaatgaaataagtatgttggggagaaattaagacacctacagctgttgacccacttctatctgcaccatgtttcttctctgacataactctcatgtgttcatcaatctccagaaaacctgttctgattccattctttacattttccacagaaggtgctcctgcagacactttaaaatcctggttattggtgatgtgatctaacaaatgctcacagcagtatttggcaacctgagaaccagcatgcccatcatacacagcaaagaatgaccacgattcaagtccacttggcaaaccgatcacagccgtatgtgcatcctccatttcaacacgccagccttgcatgctgcttagcccatatcgcaacccattaccctgcccctggg

SEQ ID NO: 310977 - DNA, 478 bp, Homo Sapiens
ccaaaacttaaacttccctttattgtggttggctcgacataagatgccgccatcagcagaattataaaactgtacaggaggcacaaaaataggctgtttaacttagataatgaccctcatgtcttcaagctttaaaaatgcacataaaagttgtacaatctggcagtttataaaatataaagctaaaaagaggattttgggttccacaaagaagactgtatcacacaattaacacgtactaattaaacaattaaccatccacacagaagacataatggcacagaattcttaaaaatcacctaaaaattaacattttaccccgaccaaattaatcaccctttaataataagactactgtaaagcatccatcccatggaaggatacagtatcacttttccagttttaaaatggtcaagggtgttgtccaaaacaaatctgatgtgctttaagcaagtacaattgtaactggatacatttc

SEQ ID NO: 310978 - DNA, 570 bp, Homo Sapiens
ctgcttgtggaagaaatgcctgtgtctgttctggaagggaggggtaaaatgttgctgagggcacatgacaatttccactctggtgcagacagtgaagcctagagccagaccggaagccaagtggccttaaggagtctttggagaatgccaggccaggctcaggagacaggctggctgcagaaatgacagggggggaaggcaggtgaggcctgtgcaggtaagagggactctttgtttatcctggacagcacatagtgacattgatgaagaaatccaaggagaagacgggggggaaatgaggggaggaagtggaggagagatgataggaaactcctccttaaggttgccgactgctaactttctgaaaatgactaaggaagagaaattccaagggagagaaacatgtttctttcttggtctctggttatcccacctgaggagagaggcctctgatgaccagacatggacaacagggaggtgctggtttctggaaatgtgtaaccaagttggagcaccagaagtgatggattacgacccacggccacctctcatttcagatgcccggccgta

SEQ ID NO: 310979 - DNA, 948 bp, Homo Sapiens
  misc_feature (477)..(487): n is a, c, g, or t
  misc_feature (815)..(815): n is a, c, g, or t
tcgggggtttcatcctggaaaataaaagattacatccaaaagagaattttggtcccttgttccaaagttattttatttcttattcccttcagtgggaggggtaaggaggtgtgacatattctcactgctatatatcaaagcgttaatggtggaattttgtctttgtaaagcatttggagttattttcgagaaaagcgctgtgtaaacaaggaatttattttaagaacaactccatgtttgttgagatacttgtttagttattatggcttggtctagtatctgaaaatagaatctttgtaataaccagaaaacccttagcacccatgtaaatacagactttttattttgcagaccgggaaactgaggcccatagaggataagagacttaaagattctaagctattaaaaactccaagtctctgtttctttgcttttcccagtgcttcaaaacattccccacttcagtttcttagttgnnnnnnnnnnnaattattactgattgttttgggggtgttttctctaagtgtccttcatttttcagttaaagtatttgtggcagataaactattttagtgacaagaatcagaattcctgtgttcaagtcacttgatcgaaaagaccttatttaatgagttttagatattcatgcagaaagagggctgggtttttttggttttaaattttctttaacagtcctgaacacagtgtatgtttgtttttcacatggcctggaaaaaaatttttaacttagatattacgtgagaatgctacaaaaactttaccattacctcagtttctattattaggtgattttnagtttttacaactgcttttttgggcttatttattggcaaagtatttcccttatatttctgttttagtatcttctgttataagcactacttaatatacatgtgaagttcagttttccagatcaattaaaggtaa

SEQ ID NO: 310980 - DNA, 340 bp, Homo Sapiens
ccacacaagattgtccgggtgctcaggacctcaatttgtgtgcttaagctttaagttctgggtaatatctccaaatccgaaaaatctttggaataatcacaagtgagtatcttgcccaaataacccctgtagccatcaaaacaccagattgagctgtgtctaagtttttctccaggtctggccatatcagccaatccagcacacaccaacccccttttcataattggagcccagaagaaacctgttctggcactttctgtatggtgtgcaccgcggcctcaatttctcggacagcatcagctccactttatcgaagaccctgtggtatgtggcccacacg

SEQ ID NO: 310981 - DNA, 1125 bp, Homo Sapiens
gtcgcataatcgtacgagatcgtatttaaaatcgtagctgtaaaagaattgtaacaacattaagacaaaatcatcaagatcttcatggcaagttaaaatgtttttaaatagtttgaggtcatcttgatagtcattccactacccatttctcagtctcttcagcaaaatttcctttcacttatagctagctacctgaccatcctacactaaataagcagataatttaatcttccacttcttgaatttgtgtgttcttttatgtacatatgttggctgactggaacagaaggaggcagggggtatatacgagcaagtatggtttattacggacaaatggtagaaaaatgttactaatatccatagataagttccttaagtcatgtagagagactgttattaaaagtttgctgcatttttctattgaatcaagaactagctaccagttacagtgccttctaaacacacagttagctttgctttatcaataaccaaataataaactaggtcccaatggttttgtccacatctagattgttcaggtgatcaggaactcttttatttgtgtgctttagcttttagttcttggttatatctccaaatacgaaaaagctgagaggctcctgctgcccccacaaagaaattaacagcaaacagactccaattttttggaataattacaagtgagtatcttgaccaaataaaccctgtagccatcaaaacagcagattgagctgtgctaagtttttctgcaggtctggccatatcagccaatccagcacacaccaacccccatttcataattggagcccagaaaaaaactgttctgggacctgctggatggttgtacaacggcctcaatttctcgggcagcatcagctccactttatcgaggagccggtggtaggtggcccgcaggcctcgggcaccggcggccgacatcgccgccgagggatcgttggcagccgggtgggagcgtggctgtgttctcgtccctggctgacaacgaaggggagctagtcacttttcctgccacgacgactcgcgtccgcctctcgcctggagtacccttcccgcggctttccctgcccgctgtgaaccgaaaagctgcggcccgcgccccgcccc

SEQ ID NO: 310982 - DNA, 821 bp, Homo Sapiens
  misc_feature (410)..(420): n is a, c, g, or t
  misc_feature (778)..(778): n is a, c, g, or t
atggcaaatatgtattgatttctttattttaaaaagctttattgagaaccaattcacatatgacacaatttacccattttaagtacacagtttaaaggttttttagtgtattcacagacttgtgtaaccacagccacaatctaattttagcacatttttactacccccagaaagaaaccctgtgccagctcacagtgcctcccattctctcccactctcccctgccccaggcaaccacgaatctcctttctgcctctgtgatagatttgcctgttgtggctttttcatattgtgtagatagaatcatacactatctggtcctttgtgactggattctttcacttagcataatgttttcagggttcattgatgtagcacgtatcagtgctttgttccttttttatggcagnnnnnnnnnnntcttccattgaatggatataccacattttatgcattcatcagttggtatttttttgggttgcttctacgttgtgactcttgtgaataatgccattatgaatatttgcgtgcaagtttttgtgtgggtgtatgttttcatttctcttgtacatattcctaagagtagaattaccgtatcctatggtaactccccggttaacattttgaggaactgccaggttgttttccacagcggctgtaccgttttacattcccaccagcagtgtatgagggttctagtggttctgcctcctcacccacacttttgttattgtatgtctttttattatagccatcctattggatatgaagtgatatntcacagtgggttttgattttcacttccctaataaccagtgatg

SEQ ID NO: 310983 - DNA, 119 bp, Homo Sapiens
atgggctttggtgaggggggtaggtggtagtttgtgtttaatatttttagttgggtgatgaggaatagtgtaaggaatatgggggtaattatggtgggccatacggtagtactcgtgca

SEQ ID NO: 310984 - DNA, 1337 bp, Homo Sapiens
atgagcactgcacccagcctaataactgatataattttttaagtgaaatgaaatgttcctttatttacatatgaattaaatagaaaattcaaagtaattcttttaataaaaacccatatactaatatattttaaggttgggatacttaacagcattttcacaagatccaaagtgtggatgacgaactaggcaataagggacatgtgtgccacataactaaagggtaactaaaggaagatgagtacctcacaaccaaaagcagttaactatgcctggcataccaccctgtcatgtgggcagatcactgttcccatgctgggtaagagtctccaagaagggaagcccttatgcagtaattctgtaactatattaaatttggtaatctaacattaaactttttcgtgagcagtgaatatacacatggtcatatgaaaactgcccttggagaccgggttaattattaaataaactaaaaggggagaaatgctgatagataaaattatgtcaattccagggtgttcaatggaataaagaaacagcagcagctgcttcaaaagtagactatgatcagaaacctcagatggtaacctttaaaaattgtggaatccagagtctcaacctaaacctacataggagctacagcccagggagttctttctaagttcctcaagtgattctgatgattggccaagctggaaacttctgaactgggggagaaagccaacctaggtaaatgtagagacttttagaattcaacatttgattatcatttactccacattttcccccagctgtctcaccttctctatttttctaacagtgaacaataaaagggcttggcaagtgaaggaaaaagtcagtagagtacctaaaatggatttgactatattcaagccactttcatatattaactagataaaaggataccatactgctatttgaaattcaatcacaaagcaaaaatgtcataattttaatgtattttaagggaagacggggttcttaacatgaatatgtaatacaaaaacaattctaaataataatatttaatagaagaaaaaatctgtataattatttagaagtaactctgtttttaaaatttcaatgttaggaagaaaatcccttaaatttgaaatagcggaatattctctcatatgaaaaaactgtgtcccagtgttattcttcaacttagaaattaggcaaagtattttagtactatttctgcttacatattgttttgtatgaatgttttaagtatgaataatattttggtttttagtgtgcatgctaatataaaaatatggatttttttctcctacactgactttgtacacttt

SEQ ID NO: 310985 - DNA, 242 bp, Homo Sapiens
caagctcaggatccatctgtagaaaaggaaaaaaagtaataagttatctaagtctgtttgttagactcaattttcaattttaagttatagaagagatggctgaaatactatagccaaatacaaacacatggcaaaatctccaccatttactctgatcacataatgataactaatgtactactgccagcattattcaactaaataagagttaatgtctactgattacttgttatgtgagaggc

SEQ ID NO: 310986 - DNA, 1049 bp, Homo Sapiens
  misc_feature (286)..(616): n is a, c, g, or t
  misc_feature (622)..(622): n is a, c, g, or t
  misc_feature (634)..(634): n is a, c, g, or t
  misc_feature (668)..(668): n is a, c, g, or t
  misc_feature (674)..(674): n is a, c, g, or t
  misc_feature (691)..(691): n is a, c, g, or t
  misc_feature (694)..(694): n is a, c, g, or t
  misc_feature (698)..(698): n is a, c, g, or t
  misc_feature (719)..(719): n is a, c, g, or t
  misc_feature (722)..(722): n is a, c, g, or t
  misc_feature (726)..(726): n is a, c, g, or t
  misc_feature (741)..(741): n is a, c, g, or t
  misc_feature (751)..(751): n is a, c, g, or t
  misc_feature (776)..(776): n is a, c, g, or t
  misc_feature (778)..(855): n is a, c, g, or t
  misc_feature (858)..(858): n is a, c, g, or t
  misc_feature (879)..(879): n is a, c, g, or t
  misc_feature (883)..(883): n is a, c, g, or t
  misc_feature (903)..(911): n is a, c, g, or t
  misc_feature (915)..(915): n is a, c, g, or t
  misc_feature (919)..(920): n is a, c, g, or t
  misc_feature (928)..(928): n is a, c, g, or t
  misc_feature (930)..(930): n is a, c, g, or t
  misc_feature (935)..(935): n is a, c, g, or t
  misc_feature (946)..(946): n is a, c, g, or t
  misc_feature (954)..(954): n is a, c, g, or t
  misc_feature (960)..(961): n is a, c, g, or t
  misc_feature (965)..(966): n is a, c, g, or t
  misc_feature (969)..(970): n is a, c, g, or t
  misc_feature (974)..(975): n is a, c, g, or t
  misc_feature (977)..(977): n is a, c, g, or t
  misc_feature (981)..(981): n is a, c, g, or t
  misc_feature (988)..(988): n is a, c, g, or t
  misc_feature (992)..(992): n is a, c, g, or t
  misc_feature (998)..(998): n is a, c, g, or t
  misc_feature (1002)..(1002): n is a, c, g, or t
  misc_feature (1004)..(1004): n is a, c, g, or t
  misc_feature (1010)..(1010): n is a, c, g, or t
  misc_feature (1018)..(1019): n is a, c, g, or t
  misc_feature (1021)..(1021): n is a, c, g, or t
  misc_feature (1026)..(1026): n is a, c, g, or t
  misc_feature (1035)..(1036): n is a, c, g, or t
cgggagagtgagggggtttgtaatttattaattgcgtattttctaagagttttcaacatagtttggcttcacacacaacttcaggcccctcatttgagagccattatcctcaactccatctaaactgaatcttggggagaacccagatctgaccaattggggtaggagacagcaggctctccaagaacatgggcaaatttatttttttataaaacaaaaagataaaaagagttgaaagacgtgaaagtggtgagagatggaggaaacagaatcaggaagtggtagnnnnnnnnnnnnnnnnnnnnnnnnnnnnnnnnnnnnnnnnnnnnnnnnnnnnnnnnnnnnnnnnnnnnnnnnnnnnnnnnnnnnnnnnnnnnnnnnnnnnnnnnnnnnnnnnnnnnnnnnnnnnnnnnnnnnnnnnnnnnnnnnnnnnnnnnnnnnnnnnnnnnnnnnnnnnnnnnnnnnnnnnnnnnnnnnnnnnnnnnnnnnnnnnnnnnnnnnnnnnnnnnnnnnnnnnnnnnnnnnnnnnnnnnnnnnnnnnnnnnnnnnnnnnnnnnnnnnnnnnnnnnnnnnnnnnnnnnnnnnnnnnnnnnnnnnnnnnnnnnnnnnnnnnnnncggaangaaacatcaccnttgtgggtccacatcctcaacttgtttttttagnggggtnccaccccaacataaagnaanattntttttccctcccaggctaccncantccntgggaggctctcctntccctaaaanctgaaacccacctttcaccacttcncnnnnnnnnnnnnnnnnnnnnnnnnnnnnnnnnnnnnnnnnnnnnnnnnnnnnnnnnnnnnnnnnnnnnnnnnnnnnnnaanggggaaattcaagaaaaggcnttgnttggtgaagagcccaactcnnnnnnnnncggntggnntctccttntnttaantggatttcctntttccccncccttnncctnnaanntggnnangaanttaaaanaaanttttcntttntnaccccntcccttgnncntgganaggtttgcnntaacgtttttttg

SEQ ID NO: 310987 - DNA, 947 bp, Homo Sapiens
  misc_feature (511)..(569): n is a, c, g, or t
tttccaacacagatacgtttattggcaaaacctattcccaggcatcaaggggaagggtgctagcagagtgaataatttttgtttttcactttccttggccatgttcaaggagcaaggggagggggagacagggacatcccagtcaagataaggaggatcccagcagctcccctccgaggttgggctcttcaccaaccaaggccttttcttgcactgtctcctttaatccttataacaacactgcaaggtaggtaccattatcatccccattttacagacgaggaaactgaactgtagcatgggcgaagtggtgaaaggtgggtgtcagctttcagggacaggagagcctcccatggactgagctagcctgggaggtacaaataatgttactctatgttgggctggaaccccaccacacacacatgttgagtctgtggcccccaaggctgatgtttccttccgttttatatggagttgaggataattggttctattttgagacaggttctcnnnnnnnnnnnnnnnnnnnnnnnnnnnnnnnnnnnnnnnnnnnnnnnnnnnnnnnnnnntatgggttaagggggactgtcttgcccttacccttcctaagcacactgggatacccggatgccctgccacaaggaataccccagttactcttttgatcttttaaggacaaccggtgggtccaaccaagtttggccaggctcgttttaaaaccgtctgcccctaaaatggtccgccgaaacttggccctttcaatggtgcttggaaattaccaacggggagcctattgcccccccattccgttggcctctttttcttaccaactcaccgagtgtggttcccttgcactgttccaacacattttacagtggttcaccctctttttttagcctctaggacaaacaaacacaaataaacgtcggcccatattcctcggggcc

SEQ ID NO: 310988 - DNA, 1108 bp, Homo Sapiens
gctccgacttctagagtagcttcttgatcgataagatgatgtggaacttctcgatcgacttcttgagtgactataggagacagaccttgttctgtgtcttgatttggtttcagatttacttcgagatctacttggactcctggactggctatcatcatcccgactaggcgtctgctcatcacttgaactctcctgatttcttggtctacggtttaagcgtgctgtctttcttacttcatcaaagagagacccaggccgaactttatttttgcttttaatttctattctcaagccttgtggtttcatttcaggcacagtggtcaacaccttaacttccacagcactggatgtggcagcattaggtgctgccaggttccccacaccttgcaggggcttccatttcttatcaatgaggttgatctggctcttctcagccacctccttcttcccggtactttctccagcactagccaagctagcagagctgctgtcctgtttccccacttcacccaacactttactttcggacatgctgctttcctgttttactacctctgcttgaggatgttccgttgccatatcctgcttcaaaacaatgtttatatctggggtatcaagccgtgcatttcctagaggggaagtctcctctacttttgctggggaactcctatcaggagtgcagatctccatgttgtcatctgtttgaagcacatcttccactccattgggaacactttcttcaacgtgctgaatgttttgtaaacaggccacattttcctcagtatttaaagctgtgggagaaatactgagtttactatcatctttagtaaactgatcaagatctgatgaaacagtcactgtatcatgtttacctgaaaggtcctcttcactggatttctcagtttttagaatattatcttttatggtttcattgttttcagaaacttttttctcttttgattcctgagtaacttgcttgtcatcaatctcctcctcctcctcttcaccaaattctagtggaggctgccagtgaaatgcttgctttcgttttggagccttatgctatttgtcttttttcgctttcaatttctctttcacttttttggtg

SEQ ID NO: 310989 - DNA, 1191 bp, Homo Sapiens
  misc_feature (303)..(303): n is a, c, g, or t
  misc_feature (590)..(590): n is a, c, g, or t
  misc_feature (711)..(739): n is a, c, g, or t
cgccgtgacgaccgtcttggagattaggctctctctctacgctgtgggccgagtgtactcatgctaaagtgagtgccggggttatagaagccaggcgtcgctatcgcctaccattcgtgaagtgccgagaatcgtccagttgagtccctaccatttgtgtttatgaggattcgctctacggggggggccggtctttgtgcgcacactccctgtgcgttgtctggtgacgatagggtctcgcgcggctattaggagtgatctcgccaccctctaagggataatttatacgaacatatatgatgnaggagggaattcggtgtcgtcatccttcgcgcccactcactccgccccacgccacgtagagtaatggccaccgaggggccggagaggcgagcagtgggagcgtacccaggagatagtgtgggggagatacttatatgctacgccagagcgggcactttatgattggggagccaagcgacatcaacccccgtaggggacgcgtgcggctcccctgtcgcgcgggaagcacctcccacctctgctactgtccctcgcctcgacaggtgcccgtgatttaggctcgctantcggtgggcgcccgcgcccgcgcctccacaaaatccccattgtggttgtttgtaacaaatgttttttcccgtagggggcgcgcagacaggtccctgcccccaagcatgcggtgttgtggtnnnnnnnnnnnnnnnnnnnnnnnnnnnnntcaagcaaggtagtgcgcccgcccgggggggcgttcggcgcggcaggcgccgcatcggaacgacggcgatgccgcggcgtgttgagggggccattttacatttttattggtctcagaacgattttataaaattgtaatttcacataagcaaattgtttgcccataaacatattttctgctgacatggactctcccgtgataatcaaaaacactaactggtaatagtcctgagataaaagcaagaaacaaatattacactacttatattctgcttttatttctttacaattctgttaggactgtccacataatcacaatgaaacaaaagtagtcacgcaataaaaatttcaagagttaacaaaatggtaagatattcaatgacatcaattttaagggtggggaagttatcaaagagctaaaaattagcataagtcattatgctgatgaccacc

SEQ ID NO: 310990 - DNA, 924 bp, Homo Sapiens
ttcgagcaaaaagggtttaaacccaaagcccgatcccccgcggagtatcacggtccctaggaatctggtttttgtgggtgctggcttcaaaaaccttcccgcaaccggtttaaagcatctttggggaccttccgtattttttggtttcaaggagttggcccaactcgcaaacatcggatcctctgtcccgcaaaagaaccccttcacgaatgatggcgctatattctgtgttttcagctaatctctcgggagttagactgggagacgtcgtgtcttgatttcaaagttttaaaaccccgagactgtatgaaaactggccagtactgaagatctgaacaaatgctttgaagagctcttgaatgatgtcgatacaagcaagaggaacgtaatgtactaaatatatctaagttaccatatttattttcaaagaaggattgtgcagagacatgggatgtatgccaatgggaagaaatgtttttgcctttacaaaatccaggaagtagattttctaccagctgatcaatctgtccaatttttagttcagataatccaaggtcccttaagttaagtgaaggctcactgctgggagcctcatgctcaggaactacatctcgatgctggttttgagaaactgacactccactgagagaaacagaagtgttttttggtgtatggaaggcattgatgagatgactcagaggaactgtaacctggggttgcaccgtgctcgacaaggaaaacatctccggcgggccctcagcgacctcacccgcctgccgaaactgtgcccctctgtccacggcccggcggggaggcgctgagcccttcttttttcctttttctccgacccgttgcccctcactcctcccagaaacggaaaatggcctccccttcctacagctactgcaacgacccccggccgta

SEQ ID NO: 310991 - DNA, 1378 bp, Homo Sapiens
  misc_feature (236)..(236): n is a, c, g, or t
  misc_feature (294)..(294): n is a, c, g, or t
  misc_feature (300)..(300): n is a, c, g, or t
  misc_feature (393)..(393): n is a, c, g, or t
  misc_feature (477)..(477): n is a, c, g, or t
  misc_feature (1236)..(1236): n is a, c, g, or t
  misc_feature (1308)..(1308): n is a, c, g, or t
  misc_feature (1365)..(1365): n is a, c, g, or t
ggatggggaggccattttccgtttctgggaggagtgaggggcaacgggtcggagaaaaaggaaaaaagaagggctcagcgcctccccgccgggccgtggacagaggggcacagtttcggcaggcgggtgaggtcgctgagggcccgccggagatgttttccttgtcgagcacggtgcaaccccaggttacggttcctctgagtcatctcatcaatgccttccatacaccaaaaaanacttctgtttctctcagtggagtgtcagtttctcaaaaccagcatcgagatgtagttnctgagnatgaggctcccagcagtgagccttcacttaacttaagggaccttggattatctgaattaaaaattggacagattgatcagctggtagaaaatntacttcctggattttgtaaaggcaaaaacatttcttcccattggcatacatcccatgtctctgcacaatccttctttgaaaatnaatatgttttcatacagtctcggggttttaaaactttgaaatcaaggacacgacgtctccagtctacctccgagagattagctgaaacacagaatatagcgccatcattcgtgaaggggtttcttttgcgggacagaggatcagatgttgagagtttggacaaactcatgaaaaccaaaaatatacctgaagctcaccaagatgcatttgagactggttttgcggaaggttttctgaaagctcaagcactcacacaaaaaaccaatgattccctaaggcgaacccgtctgattctcttcgttctgctgctattcggcatttatggacttctaaaaaacccatttttatctgtccgcttccggacaacaacagggcttgattctgcagtagatcctgtccagatgaaaaatgtcacctttgaacatgttaaaggggtggaggaagctaaacaagaattacaggaagttgttgaattcttgaaaaatgcacaataatttactattcttggaggtaaacttccgctgtggcgggagaagctgatggtgccttttattatgcttctggatcccaatgtgatgagactgttgtaggtgagggagccaaacggatcagacatccttataaggaagcacatgcgaatgctcattgagcaatatttaatgatgaattagatactgatgcagggaagagaattgaatctacaatgcatgcatattctaggcacaccattcatcaactgcttgctgaaatggatggacnttaacccaatgtatggctatcataataggagccacaaactctccagaggcattagataatgagctatacgtnctgatcgcttgacatgcaagttacagatccaaggacagatatgtaaggtcgacaganatattgtgggatt

SEQ ID NO: 310992 - DNA, 657 bp, Homo Sapiens
gcaacagcaatgcctgacaggactccagcaacaacttgatgagggaaatgagcagcaaggtagattcgtgacagacagacattcagctgcacagcccagaatcccaaccacaaaatgacattcaagcaccgaaatctgtaggtcggctttatctttccctgaaagatggaaagagtagatgtgaccatcacgtagtatacacctgctgtgcccatggcatggccagaggggctccctggtccagtctcacaggttacagggaactgctttatcaggggcacggaagtgttgctgtagtagtcagtatccaaaacccaccagtatggacgctgtccaaagagaatccacttaaagacgaggttgagccagtctccaatcacagctacccaaaggagtttaatgcccacagcttcctgaagatggaaccagatggggaagaggacgtagaaggcattcctgaggtctgcgatcacggacaccaagatgaaccagtcctgggagtcttggtaattcacctggaggtaatgtgttgactggatcccaaagtcatggagaacattcattccttcctccatcctcatttccttggcacctcaggaagatgtcagcagagcccttgcagttattccaggcttgggtggtgattgctctgctgcc

SEQ ID NO: 310993 - DNA, 642 bp, Homo Sapiens
caggttctttaaattctttatattgaagatttgaagatacaaaatatagcagttttacttttacagatctatagactctcgttccttttatggctggatggctaccagctactcttacttggaaaatcctaactctgttgaaacactaattggcattcttttgtaaacccttcccttgtgttaggcaattttctcatttaataccaaaatagtctcatctcgactcattaatttttaaatcacaaaccatctagtcttttgccattgaggtatgtggccatttgatgctactgacagtcctccctatactgggctgtatttgttgcttaagcatgtccaactgttaaagtggcaatggcagaaagaacattttccttctcctcaagacaagaaacttcaaatgtcaaggtgctgagctagcagttgagagctctagctgcaattagccaacctttgagccaaaccataggactggacatatagtggataccatataccatagctacttctagcatacaagctacaaggattcctgagaagctgaggttaatgaatgagattgatcaggagtgaggtatcaaagggatattgtcattctatggagggccaatcgggtgcttagcatctacaaagtataccttg

SEQ ID NO: 310994 - DNA, 1288 bp, Homo Sapiens
  misc_feature (385)..(394): n is a, c, g, or t
  misc_feature (987)..(987): n is a, c, g, or t
tacagcattttatatatcacatctttacagaataacatgatggcaatatacaagtggtattgttaggtggtttaacttagaataaaatgagaattcttcagttatattttgtactatggtttagggctatgactaatatttcaggccatttccggtgaaagaaacttagttttacaagaaaaaccatttgctactgaatgcttaaactaattttagtgtttaatgttacatgcttaaatttttttcagttttaacagtggcatatttaggcatggaaatattattatgaaatttattttcaggatctgctataaggttgaaatttagcccagctctaggcattttacaaattatttttcaagcagtcattcttgattgtttgacnnnnnnnnnnaaattaaagattgggaatgtatgtgagagtatgcatatgtatgggtgtgtgtgtgtgcgcgcaatcaaactgtggtgtaaatagattctcagtgaattctggtattcagactctattccactagtgaaagaaccattttttaaacttcccttgccttttttatttatttaattttcttggtttggagatgtcagtcccaaacaccagagtctgtacttttctataacacagctcagattaaggtagggcatatgccaaggaggttctcacctccctaaagaagggacttgaattttagggactttaattcacccctccttcaatacaactttcccccttcttgtttgcacatgccaagataactgcttttatgcaggctgtacccccttgaaaaatcctttctacagtgctgctcacaaaagagcccaagttcgcctcctacctgcattgctgacttgaattcacagtcgccgagtctacctagctttcttggaagcagtctagcaaaatttctatttgtacgttcactaattatctacaaggacaaaatcagttgtatttacaaaactctacttcagtgtttgttttagctnttttttttactgaaacttgtttttgtgaatactctgtgcttagaattaaatatcactttcttatgaacaacataacttcttcagattgtgtatatgaaaacattagcaagtcttgttttttctatgaagcaaacacaattggtgacaaaggttgtcaatcatttcttcaaaattataatgcagttctaatggtcagcatattttgatattaaatttaaagatcacctctctgcatttgtttttaaattatgctaatacaccacacattatgttggtatgttttgttctgtactttctttaa

SEQ ID NO: 310995 - DNA, 449 bp, Homo Sapiens
  misc_feature (141)..(150): n is a, c, g, or t
  misc_feature (328)..(328): n is a, c, g, or t
  misc_feature (387)..(387): n is a, c, g, or t
  misc_feature (404)..(404): n is a, c, g, or t
  misc_feature (419)..(419): n is a, c, g, or t
  misc_feature (425)..(425): n is a, c, g, or t
tcagttttaacagtggcatatttaggcatggaaatattattatgaaatttattttcaggatctgctataaggttgaaatttagcccagctctaggcattttacaaattatttttcaagcagtcattcttgattgtttgacnnnnnnnnnnaaattaaagattgggaatgtatgtgagagtatgcatatgtatgggtgtgtgtgtgtgcgcgcaatcaaactgtgggtgtaaataggattctcagtggaattctgggtattcagactctattccactagtggaaaggaaccctttttttaaacttccccttgccttttttatttatttnaattttcttgggtttgggagatgtccagtcccccaacaccaggagtctggtacctttcntataacacagctccagnttagggtaggggccntagccnagggagggttctcacctcccctaa

SEQ ID NO: 310996 - DNA, 661 bp, Homo Sapiens
  misc_feature (121)..(121): n is a, c, g, or t
  misc_feature (149)..(149): n is a, c, g, or t
tttccacagtatcttgatatttcttctttgacacaattaaccttggcaactgaaattccatagtcctgcagaggtctaacagcctcattcagttcttcaagacctggttgcaatgtactanaatatttctgaggactcagttctggtanagagtttactgttggcatgtaaaaaatgcacattatgacaaaagagatcccaactctaaagacattgaagccggaaaacattatcagctgcagttgtatctgagcggattttgtctgttttttcactgctgtgttctgtttcctaagacaacacttccatgctgtcctctgtatctgctgttaattctttattttctattttgctactttcaaatttttcttgaacaacttcaagaagttttctactgatgatctatgttatctgcccgggacctgcgggcggggacctgggccgttcccgaggccgcgcggccaacagttcccgccgccacgcgacggaggaggaggcagaagacggggccgtgccagactagccgggtagcctggaaccacttcgccaacctgcaaaggcgtagcacttctccctcccagcctgcagccgccaccgactcggcggagtcggcctacctgggaaaaaacgaccctgcgaagctcctccttctcctcccccg

SEQ ID NO: 310997 - DNA, 880 bp, Homo Sapiens
gattggttaagggcgttgccctcctaggaattggggtttcgggaaaaccaccaacgggtgtccccccctttcttcccccctgggagggagttttcggacaagttagttttacccggttaggttctttaccccccgataagcttggaaggccaaaaaaaggcgttgtttcgggggggtatccatggaactccaagggctggacatgtgatgccactcttaggtgatagatactgttcccttgtagctgggtcctttacccaatgatgcagtttctaaggtagtcttggttttcatagagggtcaaattcatggccaaattcttttttcgctccacttgaccatgctatggaaggggaaccagagggcattgttttcttgctttatcaaaaacaaaagccttgcaagtgaatggaagtcctttattcctagtacatctattagcacattggtctgcagtattcacttttttggtttttatcttcagtgctggatctattttgattagggtagtctttgctgattttttgaattcatgaattgtatttcttcttttcctttgtccctctgcataggggatggcgatggggagcaggaggagatgcaggaggacatgctgcagcagcagggctggcaggagtttggtcacccacatggtgctgctggacgggctggcggatccctctggaggagatgcctgggtgaaagaatcctgttcggagtcagtgcctaaaagagccagtcggctctgagctgctttttattgcgatgagctaagtttgttgtgtgattaactggaaagatctaggtctgaactccctcttacggtaagaaactgtttaacaacagccctttactctcttccagccccctcctttcctcc

SEQ ID NO: 310998 - DNA, 911 bp, Homo Sapiens
atagaaattgcttattgtttatttttaaagagaatgagcttaaacatatgatttaatattataaaacaatatcctattaagttaaaaagaaaccagttataatatggcagttggcttaattttatataaaagttatttaaattagcacatattcactggctacatcatcaaaatgttataagcaatatagaggggtaggttatgcatatttatttttagcaatgaaagtataattatttttctaccaaaaatatttaaaacccagttatagaaaaatagaaaaatatagtgaaatatgcatacatacatcattatatacgaatcaaataatctatagcaatctcaatggctatcaagctaaaataatacatatctgaaatgcaaaaatagcagaaaaaccatgaacacctcccaacaagataatacattcataagaaaatgcttgagtactgaccgtaggatagtttctgtcagttgtctgacctgctgtgtgacagtatctgtatatacacttttgtgcattcttgcaaaattacaaaccttgtacagggaccaggcatcttataagtagaatcctaagcaaactctaataaaacactgattttcatttgtggaaacaaattttagtggtcctttgtaattcacttattagtaagtaataacattactagtaagtacttgtaagtaatgctgattggtccaaaagtaaaaatccacagaactgtgcattgtttactaaaggaaacaaaaaataattaatttttggatctgcccatgccaaatctgaaggcaatgaatacattaatagcttctgtgtcccctgattatggctaccttctccacttaagccaagtacacatacacacttcctgcccacttgttttatattacgtacttacttcttatggtta

SEQ ID NO: 310999 - DNA, 543 bp, Homo Sapiens
gatcttgtaggcggggacacgccgaggtaacttccagggtgcgccttcgttgtcttctccaagctgtagttctacgtcccgacctccctatcataccacactcttcagcgaccacgcaggcactttcccggtccccagtataccataattgaagaaaaatgatggaagagagtggaatagagacaacaccacctgggactcctccaccaaatcctgcagggctggctgctactgctatgtcttctacccctgttccattagcggcaaccagttctttttcttctccaaatgtatcctccatggagtccttcccaccactcgcatactctactcctcagccgccccttcctcctgtgaggccttcagcaccattaccttttgtgcctcctcctgcagttccttctgtcccaccacttgttacttctatgccacctcctgtttctccatcaactgctgctgccttcggtaatcctcctgtatctcacttcccaccttcaacttctgccccaaacactcttttacctgcacccccttcgggtcctc

SEQ ID NO: 311000 - DNA, 522 bp, Homo Sapiens
gtagtcagttcatgcacagacagcacaagcatgtagttgtgttgttgctttgcctctcagaggtaaacctatatgacgttttcaaaaagtggataattgaaaaagtgaatgaactgatgaagaatgaaagtaaagaaaagaaaggaggtaataatgctggaagtgaaattgaagtcaaagtaaatggagttatggaagaaacagctaaccgtgggaatgctaacactgtcatggtgcaatagactccagatatgaagccagaggagtctagtgaagctgaattttttgacataaatgaggagagtggttgtgagaaaaagaatgaagatattccagagggagtgacactgtcacaaaacttcctcttggagacatttcataatgttgaaggtgcaaagcttatgtgaaaacattggaaactgatctaaacttagaaaggaatatggaatatgacaattctccaaggcacagaaaatattctcactctgtattgtgagttatgtgatagatgagaagaaggta

SEQ ID NO: 311001 - DNA, 475 bp, Homo Sapiens
gtaagcaggagccgtagttccaaagagctgacttccttaggaccttcccagacgaaggtgttccactcattttcaccactccgttttatcgtccgtctaaactctggtttttgcagacctgtctcctgcgtccccttacacgtgttcctttccggagcttccaggggacccggagcataagaattcaaaccgagaccctcagtcccagcccccgcccccgcccgttcctccctacactcaaccgctgggactagaagctcccggcagtccttccagcaagaggcaccgagtctgggcgtgaccgagccagtcccgccgaggtctcaggccacaaatccacacgcgtcctcccaccctccccgggcccgggtgtggtcgcggaccgctaatggcgcggagcccacctcgtaaagcgcctgtaccatctccaccagaacccactgctccgtggcggtcgccatagttagccgcttcc

SEQ ID NO: 311002 - DNA, 628 bp, Homo Sapiens
tttcaggagcaaagaatatacacttaataaaaacaaccataaaatgccggtcttctttgatgactcccagggaattcactgtatttgaaatcatacattcatcaaatatttagttggcctgttcccggattatccatacacaaggaaatcaatgatccttcatcttcattcaaatgtgccataaaatcctctgggtccacaagtccccacgccatacttctttagagatgctaaagctgctgccttaaccctagggttatccaacaatccaagaaaattaaatgaggcgaagtttatacattcttttccattcaccacagttttgtggcttggagggcctgaaacgatgttgtagttgagagcaggatggtcttttgggacaggaggaacaagaggttctggttgccactcttcaatcagttcttctttttccttgactgtaagatcagatcgttcttgtaatttgtaagtcttagagaaaagaagtctgattatccagaggatcagaatcccttccaaaataagatggtaagcaggagcctcgtaaagcgcctgtaccatctccaccagaagcccagctgctccgtggcggtcgccagtagttaggccgcttccttccccccggccg

SEQ ID NO: 311003 - DNA, 2451 bp, Homo Sapiens
ctttccggacagcatctttgtaggaatcggcgcccgacaaaccatatgcgctgcctttggctcctaggccagctccctttagccgaacttgagcctcaatgggagccgtaatgccttgacactttcgtcccaagccagagccttcccgccagcccatggcctgcagcatcttgttgccaatgttactgtggtcaatgccatctttggtgggttgctcgtaattcacagtgccggcatcaaactgcttcttgcgcttgggctctggaggttctggaatgccgtacttctcccgtctttctgcagctcggtctcggtatttcatctctctctcccttagctccaaggcttccagctcctgctcgctcagcctggatcgtcggtagatgtccatgttttgcttgtgaaggtctgagagttgctggtgcctgactagggcatctttgttcgggaactggcgccggcagagcagacaggccatcttcttccagtcagctagcttctcttcctcactctcaagtctctccaccagctcctcctcattgtcactgtcaccactgtaagcagcaaccagaccccttttgaggggattctcctcatctccatttcgcaccaattctgggatgagctgctgcctttcagctaaggctcccttcttctcaaagagagcaaagccagcgtctgctgcagcagattctctcctttcttcttccctcaaggaattgacaggctgaaagctatttttaaagttttctttctgcttattcaaacttcttagcccagcgttccatgtctttggcaatctgctgggctgttttgctcttgggtttctccttcttctctttcccctcttttgcaggaggcaggcccgactgctggtgggagctagactctgcagctggcacgtaggtctctttttccccatcccagtaaaggtactgctgggtcaaggaattatagtagtattgcgagttggggtcataatagagccctgttgtcggatcatagtaatatcctgaagattcatcatactggtaagtggacgtgtcaggtactgcatatttggtaccaggaactacaccagtaggggaagcggctggggcctgtgtacttgtgctagtgctaggctgtgcttcctcagtcggagagccaggtggattggaggtttgattatacagctgaggactctgggacactacagccgctgaggtggtggtcactgctgtgcctgatgcagatgatgcatcagattccaatcctccagcttgttgttgataaaactgctgataatcctgtgaatactgagcatattgggcatagccatcttgacctggttgcagataactgtagtcaacactgcctccttcaccactttgagactgggtggatgaccactgagcagcagcaatagccgtactagctacagagaaggcgctgacgcggttaccatctgagaggaccaagtcttttctggcactttttgcaaaatcaaccccaatagttttgccatcaattttcaaaggaggatggagactctgtaatatctgaagcagctgagaagcatccattgcagaggacagctgcacaaatgcgaagctctgttctgctgggtctgtttgtcttttatgaggcggatgttattgacagctaaagacgcgtaaggagacagtgctgtcatgatggaatccaccacagtgtgcggagctatgttccgaagaatgatcgtatcacagtagtaatccacagactgaaccgactctgtggttccaggaggcacttcctgttcagagtcttgttacaaagccaatcttcaaacttaggtctgggattgctataatgcattgcaatgtgctttccttgaatcaccaactttttctgtaagaaaagaagtaattagttattcccattgtgaggaacatgtgtccattttcccagggcagagcacacttcggaaaaatcagtgctctggaattaaatggacaacatacggggaggaccaaccaccgccacctatactctgcccatccaatccttcagataggcagtaagagaatgggatgcggagtaaaggtaaacggagtcagggagtgctgagaaagctgtcaaacactaaacgctgacttgcaccaggccgtgtctccagcggagacagaagtcctaacattcagcattgacaggctgcctgagtgtgacagtctacttcaaaaagcagaagacacaattctctcagttctgagactgtctcttacttttgcccttagcatggtgtccttgggcttcgcttcacctttttccccagtcccccatccttatgcaaagtaaaagcctttacatttctccttccccccacaccttctgcttcaggatgagtcctttggggggaaagggaggggaactcatttttaaagggaatctggttacaattctttctcaagagggactattctgaatgcc

SEQ ID NO: 311004 - DNA, 495 bp, Homo Sapiens
  misc_feature (73)..(81): n is a, c, g, or t
  misc_feature (196)..(305): n is a, c, g, or t
  misc_feature (319)..(319): n is a, c, g, or t
  misc_feature (332)..(332): n is a, c, g, or t
  misc_feature (454)..(454): n is a, c, g, or t
  misc_feature (485)..(485): n is a, c, g, or t
acctacccgtggccccactgttattgttactagaaagcctggcctaatgtgagaaataattacagataaaacnnnnnnnnncagtgctgccttaacaatttcaggaaaagactaaaatgcttccgatgtggagcagacaagtttggtaagactggattcagctgtttgcaatatgcattaaaacctactaactggnnnnnnnnnnnnnnnnnnnnnnnnnnnnnnnnnnnnnnnnnnnnnnnnnnnnnnnnnnnnnnnnnnnnnnnnnnnnnnnnnnnnnnnnnnnnnnnnnnnnnnnnnnnnnncctgtataaaaaanagaaattttaaanttatctgggtgtgggtggcacacacctgtaagtcctagctactccaggagggtttaggtgagaggatttgctttggagtcccaggagtttggaagggctgcagttgaagctatgggtcatanccacttggcacttccaagccctgggggcaancaaaacaagg

SEQ ID NO: 311005 - DNA, 592 bp, Homo Sapiens
tctcgaagctgcgagtaggcaatgcatgtccattccccacgaccattcccaacacacgtgcacctcatcatgtgacccatgtcatgctgcttatcccactgatctccaatgcggtacatgaccccttcattggttgtgcagatttcctcgtgggcagccatggggcagaacccaaacttctggtcggcatcatagttctgtgtggtcccacaccacttcatgttgtctcttctgccctcagaagtgcaatcagtgtaattgtggttgttgtataggaaggggaagtggcacaaggcaccattggaatttcctcctcgagtctgaaccaaaacagtgtggtctgtgcagaaagagtatttctggtcctgctcataattcgaagttgtgctgcaccaaagatgtccgtcctgtcgcccttctgtggtgcaggagtagaacgtcctgccattgtaggtgaatggtaagacacatggctctccatttgagttgccaccgtaagtctgggttacagctgtctcttggcagctgactccgttgcccaggcacgtgcaaagcatttgcttatttccttgtgtcttcagccactgcatcc

SEQ ID NO: 311006 - DNA, 551 bp, Homo Sapiens
gacgtgaagtctgtcttccttttggaggacaaagtgtttcggtcaaggaactgaacttttttactggaattttgatagacctaagggcaaaaaagtcttgatcactgatgagattgttaactctcttgatatctgctaccgtacaacagtactgaagggctattgcatttaatgtatctccttcttgtatatcttttgttaatactataatgtcgtcaagtctatctcttgatgtacttcttcggactttctcttttcctctggatcgaagttcatacacttcagcatcctcctccaaaatatcactgtctgaacaatttccaaatgcatgtacttgaccacttgactgaactcctggaagaggaaaactacgattctgatgcctccctgccataatgttaaaatctgtccccgttagcagggagcactctgcgagaagatggccaaaaggtccgccgccgccgctgtcccgggtaagttcatggccgagcctctgctttgggctgaccccgtccgcctccgcctctgccgccaacgtctccccccggccg

SEQ ID NO: 311007 - DNA, 497 bp, Homo Sapiens
catcaacactttttgcaatcatcgcttacagtgtacctttgaaatcccttaatttagaccatacgcagtcactaaaatcagctaatttttactttcacaaccttgcaatcactccttaactcctgtccccatcattagcccaaaggctgcaggtactttacaaattagaagtttcctaataagaacataccccctaggtgaatatttatcaagtaactaaaatatcttagctataagggatgttcataatctaaacacttcagagaagtataaattaaattatgtcaagtctctttcaagtaggtaaagttaatttccactttaccaaaaagaagagtttggtaagagtaattttcctaaaaatgacactgtgggctgcgaggagaattcactctccttagccacacaaggtgacatgagaggccctcagcccggtgtttggcctctatcagcaacataaacacacattctgtgggtaaggagagtagctgttctcc

SEQ ID NO: 311008 - DNA, 1184 bp, Homo Sapiens
  misc_feature (737)..(871): n is a, c, g, or t
  misc_feature (884)..(1003): n is a, c, g, or t
  misc_feature (1101)..(1126): n is a, c, g, or t
ttttgtttcaaccacaagtatttattgatggatcgaagatacaattttaatggaacaataaggcacaaccgtggattaaaacactttgctatacagccaaaaggggggaaaatctataaccttaggaactttatgccaatcaagaagcctctaaagtacctctctaatagatcagtatcagacattcttcccttttacataattcctatattacatcacttaatcataaaatctgactgatacttcataaagaattcctcattcatttatatttgagccatccagcctggctactcccctgttctccacccttttccatcactttgcagtggtattttttagcaatcttcaatagttttccaaagcaaggaaacaagcaagcaagcaatgagtcagaaagtcaaccaagggcagatgtgtggctaaatacactcatagagacatacattaggatagcaatagcctgattcactgaagtctaaactaagctgacttggcagaaaagttgctgtggctcgctcaaagatctgtaatgccaccttaggttgtgctactagtgccagacctcttgtttttaagggattagcagtggtctaaacaagaagccagggagctaatgtaaccaggcagctaatgacacaacagtcaatgctttggacatgtattaggagcagactatggcttccgtcattaacatttgccaagtgtaaaattcataaagaattttgcggctgatnnnnnnnnnnnnnnnnnnnnnnnnnnnnnnnnnnnnnnnnnnnnnnnnnnnnnnnnnnnnnnnnnnnnnnnnnnnnnnnnnnnnnnnnnnnnnnnnnnnnnnnnnnnnnnnnnnnnnnnnnnnnnnnnnnnnnnntatggtggcacannnnnnnnnnnnnnnnnnnnnnnnnnnnnnnnnnnnnnnnnnnnnnnnnnnnnnnnnnnnnnnnnnnnnnnnnnnnnnnnnnnnnnnnnnnnnnnnnnnnnnnnnnnnnnnnnnnnnnnntccatctcaaaaaaaagaattttgtgcaaaacttcaagacactaaggaaacaatctttaaatattttggactggggccaggcgtggtggctccacacnnnnnnnnnnnnnnnnnnnnnnnnnnctcgtgccgaattcgccacccaggcctcgctaccttataacccttatagttactgccg

SEQ ID NO: 311009 - DNA, 428 bp, Homo Sapiens
tgcctatttttatctagatttttaaatgtagcttgtcataacaaaattttaattacaattggcttgtatgagaagaaaaagtatttttattgttttgagtgatgacgcagagactcaatgaacttgaaaatagcattgcttcgtgcactttgaataccaatcaggtgttttctgtgctactagttgtcacgttgcattcatgttcacctcctgatttaagtatctcgggtgtgcccagccactaaagcactctggactaatcgctaaagagaagcaacgtggggggtggggttgcgagggatgtgttcacatgtacccatcatttgatcatagcactgtgattgcttttgatgtgtgtctctagtggtgtgttgtctgttggcatgcttaaagcacatgtccattaaccttcattttgttccttttaa

SEQ ID NO: 311010 - DNA, 613 bp, Homo Sapiens
attaactatatgatatttagttccttaggaatagaccactgccacaccatacaaatttcttacatcacaagtttttgcagtaaggttcagcaattaagaagacatgatttctacactgagaaatgttgtgttaaagttggatggatttatttttttaaaggcccagtacaaaaaaatggttgaggaaagtgactcttcaacaaaatatacacctgtagaaaaaaatccctaatatactgatatttaattgaacggaaagtactaaagagaacatactttaatatctaggcacaattggtcaggtactaattataatttctgttctcatttaaaagtttaaaccaattcttcaactggactgatgtgtgtgagtctaatacagagaaggcacctctctcatctctcactctccttaaggaccttttgagagaaactctttgtaacactttaagggacacagacaatgcactatatctaagtatagatatagttatttaacatacccattgtaggaggaacttaaatattaaactatgatttctctttttacatcttatgatggacacaacaccagaagataatcctccacataaactctcacatagaacacaag

SEQ ID NO: 311011 - DNA, 1146 bp, Homo Sapiens
  misc_feature (20)..(20): n is a, c, g, or t
cccagcctatggatacaagncaataatatgattcctcagattatgcccagtatatccagcagggatgttcagcctgttgcctatgaagagcctaaacattggtgttcaatagtctactatgaattaaacaatcgtgttggagaagcttttcatgcatcttctactagtgtgttagtagatgggattcacagatccttcaaataacaaaagtagattctgcttgggtttgttgtcaaatgttaatcgtaattcgacaattgaaaacactaggcgacatatttggaaaaggttgttcatctgtactatgttgggtgggagagggtgttatgcggaatgcctcagtgacagcagcatattttgtacagagtaggaactgcaactttcatcatggctttcatcccaccactgtctgtaagattcccagcagctgcagcctcaaaatttttaacaatcaggagtttgctcagcttctggctcaatctgtcaaccatgggtttgaggcagtatatgagctcaccaaaatgtgtaccattcggatgagttttgtcaagggttggggagcagaatatcaccggcaggatgtaaccagcaccccatgttggattgagattcatcttcatgggcctcttcagtggctggataaagtccttactcagatgggctcccctctgaaccccatatcttctgtttcataatgcagaagtattcttttcaattatattgttagtggacttgttttaattttagagaaactttggagtacagatactgtgagccttacattggaaaacagatattacagccttatcttttttctacataattgtgacccaatacatttgtattttgtgatgaatcctacatttgtttgtattcatgttcatgtgattaactcttagaagtgttgtaaaagatgcagagtaagtattatgccccagttcagaaatttggcattgatcttaaactggaacatgcttttactttattgccctaacaattttttattaaatttatttgaaaatgcatcacatgatgaaaaattatagtagcttataagagggcatatacagtgaagagtaagttttccctcctactctcgatcttccagaagctgtacttttaccagtttctttgtcccaccaactt

SEQ ID NO: 311012 - DNA, 1060 bp, Homo Sapiens
gcattacggacgggcacttgtatatttgtcacctaacgtggaatgtgacttgacgtatcacaatgtatactctcgagatcctaattatctgaatttgttcattatcgtaatggagaatagaaatctccacagtcctgaatatctggaaatggctttgccattattttgcaaagcgatgagcaagctaccccttgcagcccaaggaaaactgatcagactgtggtctaaatacaatgcagaccagattcggagaatgatggagacatttcagcaacttattacttataaagtcataagcaatgaatttaacagtcgaaatctagtgaatgatgatgatgccattgttgctgcttcgaagtgcttgaaaatggtttactatgcaaatgtagtgggaggggaagtggacacaaatcacaatgaagaagatgatgaagagcccatccctgagtccagcgagctgacacttcaggaacttttgggagaagaaagaagaaacaagaaaggtcctcgagtggaccccctggaaactgaacttggtgttaaaaccctggattgtcgaaaaccacttatcccttttgaagagtttattaatgaaccactgaatgaggttctagaaatggataaagattatacttttttcaaagtagaaacagagaacaaattctcttttatgacatgtccctttatattgaatgctgtcacaaagaatttgggattatattatgacaatagaattcgcatgtacagtgaacgaagaatcactgttctctacagcttagttcaaggacagcagttgaatccatatttgagactcaaagttagacgtgaccatatcatagatgatgcacttgtccgggtaagttgggctgctagattaaaacctaataatggggatatcatgatacagttcagtgaattcattttaaaagtgactgaaaaaaatgataccatatagcataggaacacatggacatttctgatcttatataagtattatacttttgttgttcctgtgcaagtttatagatgtgttctacaaagtatcggttgtattatataa

SEQ ID NO: 311013 - DNA, 536 bp, Homo Sapiens
ttatgaattttcattcagcagcttgatggtgctggtgaagtctgtgctgtccagtttctccgacaactttctcttcaggtcatcccaatataagcgacgtgctgcagggaagtcctctcctggctcctccctcactggagactcggttcctgccagtctctcacactcagtttttggttctacccctttacaatagcccaagtagccaatcataaatccaatcaagaaaaagacgatcacagcaatagtcccatagcagatacttccactacacctttttggttttgtgacattggcctttgtgttattgtcagcattttcttcttcatctacagcaagtttcatctccacatgactgttatcgccatctacttgccgagccaggctgaaccgggtatatgacaatggttctccaccaaacaagttagagaatgctgatctagcttgatccatcattctgaactgccacacagaagaacactagcgcgtcctccgtcccgagccgccacccgatatcccgacgctctccccggccg

SEQ ID NO: 311014 - DNA, 509 bp, Homo Sapiens
tgtccagctttgccaaccttcaggaggtaaatagcgcgtccctcaaatgtggttccgataacactgcgagagatgagggctggattctcagtggcgacttgttgagtccaagcctctatcgtttcccacttgttgtacttctcataactgtgtcctgttgcacgaacccggctatcaaactgagcctccaccacatttctcaggttgcttatcagtaccttgtattgtagttcattctgctttagaacattctccacagtgacagtatcttctgctttaacacggaagtcaactgtactgtgaggtttgatttgtgtgacagaatctggcttccagaagtcaatctgggtcgtgctggccaactcgcggattatgttaatgtgattttcatcttcaacgttaacacggaacaccttctcgccttcaaagtgctcaccaccatgatgagcagatgccagggccacagtcaccagaaccaagagtgccaacattgtgtctgacccccggcc

SEQ ID NO: 311015 - DNA, 496 bp, Homo Sapiens
  misc_feature (418)..(418): n is a, c, g, or t
tccccatcatcaccactctcccccgctgcccggggccacaggcagggacagggtagagaactcacgagatgcagtggccggcagtcacaacccagtcgggggcgatgaggctaccgccacacgtgtggtagaagcttccacttttctcatactgcagggaaacctggtggcccaggaggaaagggcctcagtgggctgggccccaccatgagagttgccaccaatggttgtataggttgtgcactgtgcaactctagagggcgccattcacatggaaaacgagagcacccactgaaatatgcagcatacaacctgggacctgggcagctgcccgtggtggccctatcacttttccatgggggtcacattttgattctccaaagcctccccacaccagcactatgacctccctgggganccccaacattctctaccttctgtctcttaacagcccttgaaggccctctgttctatcatacacccctcgccctgtgag

SEQ ID NO: 311016 - DNA, 655 bp, Homo Sapiens
aagtggccttggcagagttccttgcccctccctgaacactgccatcccctctgtagggagacaggttttgtggtgatggtccttaaaggctctgctggcttcaatcctcagtgtgtgggacctgggcacaggctgctggactcagctcccctgtccctatgtccctatgtccctacgtccctactcagagttggagcctactcagacttggctgtgggtcatggagggacaagtagaggagcccctgggttccagaccggagcattcactcacccacaggccacacacgagcggttccagagtggatgcacaaacagctcctcagagttgatggggatcacctgctcggggccctccttcacagcaaggttgtactcacccaacaccacctggtaggtcagatccctcgagatgcagtggccggcagtcacaacccaatcgggggcgatgaggctaccgccacacgtgtggtagaagcttccacttttctcatactgcagggaaacctgccagggccagctgtaggggaccgcatctctcaccattgacaacgcggctggaagggtgagaggaaggtgggccatagcctgaggcaacggccacaaggaggagggaactgagcagccggagcatcatgagttttgtgatgatagga

SEQ ID NO: 311017 - DNA, 798 bp, Homo Sapiens
  misc_feature (746)..(746): n is a, c, g, or t
  misc_feature (762)..(762): n is a, c, g, or t
ccatcctctgtggggcagtgaggggtcctccagagtcaccgttgcagccggagcggatgtaccctccagcacacaccatggttttctccacggtggaaccccaccagttccacctggagcagtgttcatagtccaccacgggcagcagggcctcctgcagcttgtctgggagtggcccgttggtatagagacggccccagccggtgatgtagcagggtgtctcgttgggaaggatgtcaccagcgggagggagtgaggcgagctggacggcgtctcccagctgggcgctgcgtgagagcttgatgagggcgatgtcattgccacaggccacacacgagcggttccagagtggatgcacaaagaggtcctcagagttgatggggatcacctgctcggggccctccttcacagcaaggttgtactcgcccaacaccacctggtaggtccagatcgctcgagatgcagtggccggcagtcacaacccaatcgggggcgatgaggctaccgccacacgtgtggtagaagcttccacttttctcatactgcagggaaacctgccagggccagctgtaggggaccgcatcctcaccatggacaacgcggctggaagagtgagaggaaggtgggccatagcctgaggcaacggccacaaggaggagggaactgagcagccggagcatcatgagttttgtgatgataggaaaagggcacagaacctggggctctaatatagggcagaaggtaancaaagggggctggggnaaccccactcccagaacaggtggtggaaatgcaggt

SEQ ID NO: 311018 - DNA, 802 bp, Homo Sapiens
gggcctcgaaatacattcaattttggaagcaaaaatgtgtctggaatttcactcttacagaaaacatggggtcgagtcagcaaaagaattctggttttcggcgaagtgatgatatgtttactttccatggtccagggaaatcagtatttggaacacccactttagagacagcaaacaagaatcatgagacagatggaggaagtgcccatggggatgatgatgatgacggtcctcactttgagcctgtagtacctcttcctgataagattgaagtaaaaactggtgaggaagatgaagaagaattcttttgcaaccgcgcgaaattgtttcgtttcgatgtagaatccaaagaatggaaagaacgtgggattggcaatgtaaaaatactgaggcataaaacatctggtaaaattcgccttctaatgagacgagagcaagtattgaaaatctgtgcaaatcattacatcagtccagatatgaaattgacaccaaatgctggatcagacagatcttttgtatggcatgcccttgattatgcagatgagttgccaaaaccagaacaacttgctattaggttcaaaactcctgaggaagcagcaccttttaaatgcaagtttgaagaagcccagagcattttaaaagccccaggaacaaatgtagccatggcgtcaaatcaggctgtcagaattgtaaaagaacccacaagtcatgataacaaggatatttgcaaatctgatgctggaaacctgaattttgaatttcaggttgcaaagaaagaagggtcttggtggcattgtaacag

SEQ ID NO: 311019 - DNA, 921 bp, Homo Sapiens
  misc_feature (310)..(321): n is a, c, g, or t
ttcggccgggtgcagattttttttaattctaaaaattagaaattaggtctgttattataaggtatttaccttttgttttcttttaaaacatttttaagttgtttaaaaccatgtcccttattgtaactccctgagatacatctacttagttaatttaatgttaagttttatgaaaaagccctgaaggtaaatgattcactccatgtatgcttacagagccttcaaataaatgcatgatgttatttctgttttaaataaatgagtaggttgattttattttcttaaagcttcctcacattgataatctggnnnnnnnnnnnncacattgaatttcagtataccaagggttgcagtgattttggttttcgtgaaagttcaagatttcctgtagcttaggtgccaaatgggcactgggtgttttattttatgccagattttcttgttcattcttgctatatttctagaatatctctaaataataaattcttctctctgttatttgtgtgtgtgatttttatagtggagaaggcaaatgcaaaacccttccagatgcctgaaaaacagtgggtcctctgcagctacaggggattctagacattaactaaaggccagcaagcactcaagtgccccaagtgttttcctggtgtaaccatttgttaactacattttctctctttttacattttaggctgttaaagtaatttgacagaaaaaaatgagcaggttttttggatctaaaaagccactgtgacaagaaattttaataccattttgtaaaattttctaaggcgtattttataattagtttgttcccaatgtactgctacttgattcgcattttggtaactataaattttactcgaatcactgaaatatgataaaactgctggatttaagttaataatttaatatgctgaccag

SEQ ID NO: 311020 - DNA, 794 bp, Homo Sapiens
  misc_feature (232)..(232): n is a, c, g, or t
atgccattagtcacagggtgagcttcatagtaaccactgttagcattttcttgcacaggttcaggagatggttgtctttcttcttgttcctcttctacttcatcttctgattcttcatcaagttcaggctcagaatcaccaaacacttcatcttcataacgaaacatatcattgtgaacataaaatttatttggaacagatccttcaggagccagaacaaaggtttgcatanaactttctttctggttgtccactgttagacagcaaacccatgacctggacaactactccatcactcaaggttgcatgagcatccacatgacgaattttagtatgacattcactgaagttcagagataatactttgtggtgtatatcattttggccataaacagcttcctggggctttccactagcatctactccaccatgaacataggaagaattcctgccataaaacctgtgtaaatattccggagctttattcagcaaagtataatattgcctcacaaactcccgccctacaagcagcggactgggcttctccataaccatttctttgctgcacaatgtcaaatgctccagccaacggcggcggcgggtacgtcgcgcggaggtcagaagagtcgctgaggaccgggtgcggcgggttcttattgctcgccgcccccttcctccgacaactcggaagcctcggaagccggagagccgcgagttcgtctgcctcacaaccacctcttcccgggcgccaggcgctgcgacgtgcgacaaggaccacggacgtcccccggccg

SEQ ID NO: 311021 - DNA, 531 bp, Homo Sapiens
taaaatactagagtacatataagaataagcgtgtgcatatatagatatgaatgtgttatgtaccagaatatgacataaaatgtttttattactgtgagttgcagttaaaaacactttttgccatcaaatgaataaaatattgaatacagtttagacatgtttacaaagatactgtcagataatgaggagacaggaaatgcaaaatatatatagtcatacccaagaaaaaaagtagataaaaataccaaattatttgtttaaaatttacctgtgtaaatattccggagctttattcagcaaagtataatattgcctcacaaactcccggcctacaagcagcggactgggcttctccataaccatttctttgctgcacaatgtcaaatgctgagggagcaaacacaagaataactattaaaaagtcatctttgtcatcaaccaccatgaaataaattttctttttagccaaatttagcagtggggagttgtataccaattttagtgacactaatgttaataagttctgataac

SEQ ID NO: 311022 - DNA, 1386 bp, Homo Sapiens
tgttgttttaactttccagctaggtgctggatgtctatattctgtatgtgtctcttaagctgctgcagtttttcttgtatctggattctgatttggtacttagtatccacattttaaatccaggatgcagtactacttccacttttgttaaaatcaatattttcaataaacaaatgtagatcatggattgtttttactaaatttacacggatatgatagtgctcatcaagactttttaatttttcaatgatttcatcaataatattagcaatagctattttcaaatcatgtaaatcataactatctttaatatactgatcaaattgtatcatatatgtctgcagttgagatagtttttcattaaagttgattttggcatcatctaatgcaatttgtatatcattttctgtaattctatacttttttgtgagagcagtcagtttctccttggcatgtgaaacttgtctctcccaattgaatgaattcagataatcattagcttgctgtggggagttttcccaggggctgctctgtattttcttacaaattgatcaatattgatggtgcttcagggtttctctggtacgttttcccggtacaactataagtggtttgtcgattccctctcaaaatattcttgcaaggtctcaaaaaatgggaggttaatggagtgaacatcttggtttttatcatactttacaaaagcaacaattgtaaattcttggggcttctcaacggcatctctcatctctaaagcatcaatgatattgatgggctcactgagtaaaagtggcactttaattggggagtctagtagagttaggtcagccagagttcgtccagtaagctccacgccaattttatctttagtgttgtaagcatccaagtcctggctgtattcattgttgttaaattgggtcttgagtttccaggtgcctgtctgctcagctggagtaagcagggcactgactttgtgttcaagagctgcactgatgcttttcctagacacgagatgatgacttgtggagcctttgtaatcatgagagaaagtaaatgccagaggttctgctttcaacaggaatttgctatacagctgcccagtatgttctccccagagagcgagtttcccattgccatttgtatgtgcatcgatggtcatggtaaacggggccattacagaacggaagacattgctgaaatgcagtgagtctgaattatagtttgtgctcatgtcaatggctgaagccagcccagcgatgtctgtgttgagccgatggctaaactccacaccctgaaccttagcaacagtgtctgctttatagcttgctgataaggcagcagaagagatggcatagatgtgttttatttcattattttgctcgtgcc

SEQ ID NO: 311023 - DNA, 1538 bp, Homo Sapiens
ccacaggggcccaaagtaaagtgacatctccttcatagtatctccattaattattctccaaaattcaggtcctctcataggaacttttatatccatgacaactgtgtaggctggattgctccaattactccaatatcccagtccatctagcctcttacagcgcacctgaacagcatagactgcacacaagtctggaactgggagactgacagattttgattttgcatcataaacctcatacatcttccattgtacttcttttccacttaaaccatagcgaatctggaattgaaggttattctctggaaagactggcttttcccaagatattttcaataatccaatgtttatagtaatttctgctttcacactggatggaggcagtggcttcaccacagaatcaggaaggacacatgttggtggagagtcaagtgaacctagagagtgattgatcctaatccacattgtgtagccagataataggaagattggctggaaaatgcattcataaaaaccatcactctgcaaatagcaatctttgggctcagatatgggatgaatagatggaatatcagaacagtaaaggctgctcctatgatacctcaattgcaaagtgctttccgcaagtgactggattgtactggttgaccatctgcaagtcattttagttaagtacccatcagtttcacatgagatattgatattgacatcaatcacatataattcagcatagcgatgatggcattcatgttcattgcagcagtacactgcatcataggtaaactttcctcgaggtttggtttcattcagattgaaaaaagtaactttgctaacatgatcactcacaacatcatactggctttgaggaattttctcagctaaattcatccaccaaacaatctcttttgagggaacaatcttgttttccttcttatagatgcagtgaaaagaaacattagacccaacacttgtcagaattttaggtggaaagtatatgacatcttgtgtggtaaagacacgaggagtactccagtcactccagattcctgggccatccagtctcttgcccctcacctgaacctcatacgaagacccaggaagtatactgtctactagcagggatgtagctgagacaatcttgtcagcttctctgataactgttgtagaattctctgaatatttcacttgatattgaagtggaaatggtaccaatggtgggctggaccaagaaatctttaaattaccatcatctgtgatttccatatgcaaacctaatggtggatcaggcttcaccatatttatgggctgaactgacattagaggtgaccggaaaattactccaccagatgtgattttcaaacacataaggagagtgtcgttgagtttggctgttggcacaggcacaagacattcacaacattcatgaacactgcaattgcagtgaaccatctgaaaactgcctttttgggggaaccagaggtgaatcttctaacacttcaggcagaacatataaaagatggaccttatagttataattc

SEQ ID NO: 311024 - DNA, 865 bp, Homo Sapiens
  misc_feature (244)..(310): n is a, c, g, or t
  misc_feature (674)..(674): n is a, c, g, or t
  misc_feature (677)..(677): n is a, c, g, or t
  misc_feature (754)..(754): n is a, c, g, or t
  misc_feature (801)..(801): n is a, c, g, or t
  misc_feature (818)..(818): n is a, c, g, or t
ctttttaggacattgaaatatgcaaaaaggattttcagttggctgattcacaatctaattataactaagacataatttacctccaattgcaagggattcagattgtttcaattatttattattataactatcattattaaacacccttctttatatataattctttgtatgcatctctgatatggttttaaagagaaattgctagatgtagagttcccagcacaaagtacgtccgtatttttannnnnnnnnnnnnnnnnnnnnnnnnnnnnnnnnnnnnnnnnnnnnnnnnnnnnnnnnnnnnnnnnnnaataaccaaagagtcccatttcttcctcacattctttggcagtataggaaagtagagattaccctccaccctttattgttgcaaatttaatagggggagaagagaatggtgggttttttttcccccttaaaatgtaatattttttcccacatgtttactagtcatttgcttttcttctgtattttgaagttgtctaaatcattcaggagtctctaatacacacaatgtcttgtctttcttacaacatactctttgataggcaagggcatgaaagctgcatgtctttcccatatttttttcaagttaagcaggaattcccaaaatgactggaattagaatgtcttcttttctcctgggcagccangcnactttaatgccttggtaataaaacagaagctctgggccatattctgaaaggaagaaaggaggcagatgatattgcgncatgtatggcagtagattcactgcagcatgtttgtgtaaaaaaaagncagattatgtgattttntagatcaaagtgaggatcgcaggaaacatacgctttaaataaattct

SEQ ID NO: 311025 - DNA, 738 bp, Homo Sapiens
cccagcccggcggtaaaacgccgggccagtaatgtaacacgactccactaatagggcgaaatgggtacccggggcccccccctcgaagctttatttttcatttatttgatctttttgctgattttattatactatatagatttgtatttcttgtgatctgagaaacatcaaaattctattttaaatttgttcttaaaaatatacaatattgcactttaatttttggcagcttaacaggaatgaatgagtacaaaaaatcatacaagaaactagaatttttattttgcttcataataagagctttgtgaaaaacaaaacttacagtagtgccaaataaaccaaatatttacagtatagatattaaagtcttacctctaaaggaagattcagtgtattggatgtaaatattattaatataagaaaagtcacccccactgcccaattctgctgaacattttaagccaaagagtattggtgagaaatgcttctgtgatttctttctcaagacatacatggaagggatgcttgttcttggagcatctaaagtgggtcattaaacttttacaaaaatgtttcctccataacttaaaaaaaacctctactctaagccaagaatccaaggtaagcttatattttattttttagagttcttcagtagtactctctctttgttctagaataaatataaatgaggtgtcactacattgcctaggctggtcatgcactcataggctcaag

SEQ ID NO: 311026 - DNA, 646 bp, Homo Sapiens
gaacttcaaagcaaaatgaagttctttctgttgcttttcaccacttgggttctgctgggctcagtattccccaaatacacaacaaggacggacatctattgttcatctgtttgaatggcgatgggttgatattgctcttgaatgtgagcgatatttagctccgaagggatttggaggggttcaggtctctccaccaaatgaaaatgttgcaatttacaaccctttcagaccttggtgggaaagataccaaccagttagctataaattatgcacaagatctggaaatgaagatgaatttagaaacatggtgactagatgtaacaatgttggggttcgtatttatgtggatgctgtaattaatcatatgtgtggtaacgctgtgagtgcaggaacaagcagtacctgtggaagttacttcaaccctggaagtagggactttccagcagtcccatattctggatgggatttcaatgatggtaaatgtaaaactggaagtggagatatcgagaactacaatgatgctactcaggtcagagattgtcgtctgactggtcttcttgatcttgcactggagaaggattacgtgcgttctaagattgccgaatatatgaaccatctcattgacattggtgttgcagggttcaga

SEQ ID NO: 311027 - DNA, 1080 bp, Homo Sapiens
ttggtacggcccgcgtatggatatgtgaccacgcgtcggtgccatccccacacatgggcaaggataggtggaatgtcgggaccacactgtgcggattctcggcacaaagcggagggaggctgtggtcgctgcgcgcctaggtgtcccaggtgccccgcctttctctgggacacagttgggggctggcttctgagggattcctttctcccctctttgtgtggccccagccagggcgttttgcagtcctggtgtagagcacaagcctctccaccctagagaaatgcctctgtaccacggctaccatgtggaaccttaacttgcagaaggcttgttaacaattgttttgagagagatggctggtcatgccacagctgctggggactccgcctactccagccctcttgggacacactgtgcggatttgtggcccttccccagaggaattgtggagactgtcccatggaacaaaccctcaggcaccagcacagggctctgggtgactcagtaaaactaacgtttgtctctgacaagatcagctgtaggctcaccggccagagaagaccactgtgagcattttgccgtatatcctgccctgccatttgttcactttttaaactaaacataggaacatccgacacacaccgtttgcatcgtcttctcccttgatattttaagcattttcccatgtcatgagtttctcagaaacatgtttttaacaattgtactatttagtcattgtccatttactataatttatctgaccatttccctactgtaaaatacttaagacggtttctgatttttccactatttaaataatgctgtgatgaatatctttaaaatcttctgatttcttacttttttcccccttagatgcctggaagtggtattttgaggtgaaagagtttgttcattttgaagatatttctgtctctctctcgacctgatgtgtagacgctcacttccagtagcagaaccaccttagttgtgtcttacagattctgaacaaatcggtttctgataagccatgtgttccaaagaatgtctgaataagaccgctctttatttaaatgctaagag

SEQ ID NO: 311028 - DNA, 527 bp, Homo Sapiens
  misc_feature (76)..(85): n is a, c, g, or t
gaatgcggggggagagggctgggatgacgatgtgaccaggttaaaagcagcccaggacataaaataaaaaattaannnnnnnnnnacagttgtaaacttctgaaaatagaaactgcctcaaatgtgttattcccagtaccccagaccctccttctgagttcaagattccctttgtgcctcgccacaggatgtgttaagatgatatacagtgtgtttaaataaaacaagaaaacaaaccaagaaaaatttagcattatgaagaatgagagtctactaaaaatactctaaaatgacttcaaacatgaaatcacatttaaaaaataactttttaatgacttaggcataagtgactcaggaacatatggattacatttccttcaaaatgcatatggctttaacaattgggggagatttgtttggtttgtaggacacagttctgaaacggaaagaagtctgtcaaacgggactcacgttttctggtgctttctttggtgacggagtcaattggccttaagggccgaattccc

SEQ ID NO: 311029 - DNA, 533 bp, Homo Sapiens
attcatcaatacaaaatattaaaaagcaccacatattatacttgcttaaaagtgtatttgcttatctacttcttagatgacaaagcaaaatcttataaaaattaactattgacaaaaatgaattcagcacatagaaaaaccacgtaccaagcatgtactaagtaatattaacacaaggacagaataacacaattattgctctcataaagctaacataatctatattatttacttattaaatagatctaagaaccaaatcaactcctatttttcatacaaaaaattaaaacataaagcaaccaaatattaccatataataatatccagttcttgacattaatttccacaagttatcaaacatgtttaaagatgtttttttaaaaagacgaaaagttagttatcgctatagaggcatagaactagatacagataccattttaaaggtagatgctatttggggagtaatttaaaagcaagttatcccccaagagaaatagttgtttagagaagaatgtcagttacttccccggccg

SEQ ID NO: 311030 - DNA, 1381 bp, Homo Sapiens
  misc_feature (21)..(21): n is a, c, g, or t
  misc_feature (30)..(30): n is a, c, g, or t
  misc_feature (60)..(60): n is a, c, g, or t
gaaggcttgggtaccggtccnggaattccncgggatcagaaccaatagcacagtgccccncatctgccccaccaccaactacagctgccactccccttccaacatcattccccacattgtcatttggtagcctcctgagttcagcaactaccccctccctgcctatgtccgctggcagaagcacagaagaggccacttcatcagctttgcctgagaagccaggtgacagtgaggtctcagcatcagcagcctcacttctagaggagcaacagtcagcccagcttccccaggctcctccgcaaacttctgactctgttaaaaaagaacctgttcttgcccagcctgcagtcagcaactctggcactgcagcatctagtactagtcttgtagcactttctgcagaggctaccccagccaccacgggggtccctgatgccaggacggaggcagtaccacctgcttcctccttttctgtgcctgggcagactgctgtcacagcagctgctatctcaagtgcaggccctgtggccgtcgaaacatcaagtacccccatagcctccagcaccacgtccattgttgctcccggcccatctgcagaggcagcagcatttggtaccgtcacttctggctcatccgtctttgctcagcctcctgctgccagttctagctcagctttcaaccagctcaccaacaacacagccactgccccctctgccacgcccgtgtttgggcaagtggcagccagcaccgcaccaagtctgtttgggcagcagactggtagcacagccagcacagcagctgccacaccacaggtcagcagctcagggtttagcagcccagcttttggtaccacagccccaggggtctttggacagacaaccttcgggcaggcctcagtctttgggcagtcggcgagcagtgctgcaagtgtcttttccttcagtcagcctgggttcagttccgtgcctgccttcggtcagcctgcttcctccactcccacatccaccagtggaagtgtctttggtgccgcctcaagtaccagtagctccagattccttctcatttggacagtcttctcccaacacacggaggggggctgtgttggccaaagcaacgcttctggttttgggcagagtcctggctttggacagggaggctctgtctttggtggtaccttagctggcaccacaacagcagcaacctttgggttcagcttttgccaagcttcaggttttgggtctagtaatactgggtctgtgtttggtcaagcagccagtactgtgggaatagtctttggccagcaatcattctctttcagaggtagcgtgtttgggtctggaaaccctggaagaaggggagaggttttcagaggccttggagg

SEQ ID NO: 311031 - DNA, 598 bp, Homo Sapiens
agcagccatattaaacagcgggcttccttcgatgatgttggctcaaagaaataatcaagttgctttccttctatagagtctagtttgtgaccatatttctcattccagaggaaagtcatgatgctaaaatcaagctgtttaagagatgcttcataccgagaaaagaaaggtcctgtggcatctaagccaaagctattaagttttcggatccaggcggctaatttgggctccacttctttaagctcactcaaaacatgcagaaatattcttgtctttactctgttcttttcttgaatcaagtggcgaataacatagtccactgcttcatttagaaaatttctgctagaaaaacaggttgtatagtcttctgtgctcaaaactttccaagaaagcaattctttgagaagcatggctgtattctgtatgccggatttaatcttgtcagcatactgctttatacactgtagaattctgtcatcaaggaactgacaacgctgaacattgtctacagtttctttctgctcttcatttttgggtggattactttctcttaagtcctcctccattctttcttgtgctaacttttttgcttcttttt

SEQ ID NO: 311032 - DNA, 838 bp, Homo Sapiens
  misc_feature (55)..(55): n is a, c, g, or t
tcctggaaatgcccattgtgttggcaaatgaatccagaaaagaagccgtaggggnaagccgaacctttgtaaagagcggtggctcccacagacgatgaagctcctgctgttaatgccccgggcactgacaaaatagtagaataccccccaaagcccaggtgtagaacttgcaggtaggaatcaaagtgatcccatacagggctcccaagtgtagcagagacataaggatgatgtttctccagacatattcaaccttggggcttgggccttccttatccttgtaggtggggtcatatatatcatcttttatatcagggcgaatgtcgtcttcccagtagaggggcatcgtctccaacttatctcctcccattctgcaggaccctggagggaggcgctgtaatggtggtggtggtggtataggagctagagatatcgtcctgcagcaagtgggccggcatcttggctttcggatgccgggatcactttccagggggctgaggctccggagcggagttcggggtcgccggaggactgcggtttcgaagcccgccggtacgcgctgagccgcggcgctcttgcacgctagctggttgtcggcgctagccgcggtgcgtggaggtccccgagccgggaatttaaaggctagagctggcaacgggtgaccgtgtccggtatttcctcagcccccttttatccgctgccaagcaggggcaaagtgcgaggagttgactggcgcgggcggtcccgcgtggaggtaagggcgggagggggaggagacagaggccgaggctcgcggcgaccgcagcagggcgccggggaactgccgacaccgacacca

SEQ ID NO: 311033 - DNA, 851 bp, Homo Sapiens
  misc_feature (15)..(15): n is a, c, g, or t
  misc_feature (32)..(32): n is a, c, g, or t
taatagagaattaantgacaatagatatactnccaaagtaatcagagctcacaatattgttacatttacacaaatcactgtatgtaaaacaggctttaataaaatacatatttctgtaagtaaagctagagaaaaagtgtgaagtatgatttactaaccacacaaatatctgcttgtttgcaagaacaggttgggctaattaataactccaactgagaccgaagtttctcatcatcgccgagaacctggttaaatttcttcacaaaatcttgtgctttcccggggtcaggcaaattctttgctatggtcatcagttttccaaacatggcagaacagttagcctctgatgtaggctgcttgtgcaaatccaatagttcgcgtacatggctccgaagcatgttctgacacttccacatttcgttgagagcttttacagcatttggatccaaactagcatataagtaatataagcatttcattctctcttctgtttccaggttgtgggggacaagatactgagcaaagattttctctaccaacagtttgtcgtcaatgctgttctgataataaatatgcagaagtttgtcctttatccagctgactttctctgcagcttcctttcctgcttcaccatgaagacagtatttcttataaagctgagccagacccatcatagcttcttttcttactcgccaccgtttatccagtgttctttcccttacaaagccaagcagctgatcatttactaaggccaggtccctcttggcagctgttattatagtaacaatgacatcatgacgaatagcttcttctggatcatgtgatctaacctttaaatattctgtgagatc

SEQ ID NO: 311034 - DNA, 624 bp, Homo Sapiens
  misc_feature (15)..(15): n is a, c, g, or t
  misc_feature (522)..(522): n is a, c, g, or t
  misc_feature (532)..(532): n is a, c, g, or t
  misc_feature (537)..(537): n is a, c, g, or t
  misc_feature (552)..(552): n is a, c, g, or t
  misc_feature (562)..(562): n is a, c, g, or t
  misc_feature (573)..(573): n is a, c, g, or t
  misc_feature (578)..(578): n is a, c, g, or t
  misc_feature (590)..(590): n is a, c, g, or t
gctgaaataaaggangccataagttttcccctccctgatagctttaagaatattggttttaaatgagttcaagagaagaatgaagacaaaagtcctagataggaatttactttatctgtaaatgaaaccagatatatggcaatgttactactactaatttattgacgattatttccattctaatacatgaaagaagaaaatgcacatgtacacaagcattcagaaaatacttatcattactcaatgaatgtctactaagttcaaagtactttatcttgtaaaattcctaagaccaatctccctggcttagttctttagttattttcctggaatgtggctgagagtgaatggtaaatagagaattaacttgacaatagatatactccaaagtaattcagagctcacaatattggttacatttacacaaatcactggtatggtaaaacaggctttaataaaatacatatttctggtaagtaaggctagaggaaaaagtgtgaagtatgatttactaacccaccncaaataatcnggctngtttggcaagaaccnggttggggcnaattaataacncccancggagacccgangtttcccatcatcgccgagaacccggttaaattt

SEQ ID NO: 311035 - DNA, 2381 bp, Homo Sapiens
  misc_feature (48)..(48): n is a, c, g, or t
  misc_feature (64)..(64): n is a, c, g, or t
  misc_feature (184)..(184): n is a, c, g, or t
  misc_feature (210)..(210): n is a, c, g, or t
  misc_feature (224)..(224): n is a, c, g, or t
  misc_feature (379)..(379): n is a, c, g, or t
  misc_feature (420)..(420): n is a, c, g, or t
  misc_feature (443)..(443): n is a, c, g, or t
  misc_feature (516)..(516): n is a, c, g, or t
  misc_feature (665)..(665): n is a, c, g, or t
  misc_feature (872)..(872): n is a, c, g, or t
  misc_feature (878)..(905): n is a, c, g, or t
ggcattgtgttttctcccacggccctgtttttcttcttctgctcttcnagcgggcaaggggganggcgttctgattcccagctattattattccctctctttgagggcggctgtttattttcgccccagaaagaaggggcgggtgttttttgtggtgcccacacacaccgcgatattttttctntcgtgggggagaggcgctctactccnccccgagaggtggnaccttttttcaccccgcccggggcggccaaatttttttggagaccgggtggtctccataatattgtgtccaccaattttctcgttccccgggccgcgcgcttatttttttctcttccggggcgggagggaacattataggggccactaaggcccncccccggggggtgtgttgataggcctttcccgcccccagtnccaaacgttcttaattgaatttnccccatttctgggaacggggatattcgcctttatcgcggcaggaaacgcccccttaaatgttaagaattcaanccagcccaagggcccaggggaggttttccttggagttggggggacgcttaactttgaggccctccccgcttggcctttgaggaccccctggtttgaataagaaaccccgttccacgttccgcgccgggggatttccaattctgggattngggttgccccaacccggcttcggtttttccccgcggggggttttttcataggtgggtgaaggcattgcccccacggtcattttcttgggtacaggggctcttggtccgcaaaccagattagggttcatggtccccttgccctcatcagaaacggggctcgcaaaagaattggtttgggccaagttgtccaggcccgacagtcgtccnacacannnnnnnnnnnnnnnnnnnnnnnnnnnntttcggagagaaatgcaggagctttattataaatcatttaatattcttgaagttaacaactgataaactcatttaggcaaacattttggatttaatgatctaaagctcacagatgcatgccacatctagctaaaagtacataaaaagcgcacctctggaaataacagccctccctctggctgaagactgagaagcattaaggatgcttctggatttctgcagcggcagggcaggggtctgcacaggcctgacctggtgttgctggagcgcggcatcccctcctgggtgctgctccgaaaggcaggctgggaggtgcttgctggggtgttccatggcagcgctgccaaccaagtctgggtctctaaaagccaccctcagtttataccaactgatcaggaaataggtggtgacagggccttgaagggtacatgccggcttcccttaagttgattagatgggaaaccaaacaccgtctttcaagtgtgaggctgtgccatgctccctcagggaggaggggcgctgggtctgaccaggtctgcctctgccctcaccagctggcagacgtgaactggagaacagcaccagaaaggctggtggttggcagctgctcacgacacagttgctgacctgcagcagatcggctgtgggtgagcaggacagtcaggccctccacaagcactgttctggagtttcgtctgactaggtgaaccctctggcttttcgaggacgcagggtaccctactgccaccagccagtgagcagactaggacatctctagacaggaaactcatctaaaaatcggaggacaacctgatgcacccaagtgacaatggacccaggcagctgtgcacaccaggtgggaggcgtttggaacagttagactcatcagtggataggtttttctagcacaaatggaatgtggtgtctcatgtccctagggagacaaagggcaggtttcttatctggtctttccaagctttcaactctctggctcaagtgtcccagaatgaactagaagtctattcctccaccctggtccgtggtcacttccagaactctgaagtggctcaggaggtgactcctgaaaggcagcccttgcttgatctcctggtggagcctgtctgggctgaggcgatgctgggcttgccgtgccgagatctcatgccagaagtcctccctcggagctacctgtctccagcctcattctttggcatgttgactcctggaattgaggggctatttctaagatgcatgctttttcggcttttctcatgggtgcctcatcagcctgcacaggatcccccatctcacgagagagggaaatttggcattgctgttccctgcctctaaggtcctttatgaggggccgcccaaactcattcccttagttcttactctcccacaggtgttgagattttattggcccatactaaaaagcatgcaatgactgaggttttctcctaaccttaatctcat

SEQ ID NO: 311036 - DNA, 1480 bp, Homo Sapiens
  misc_feature (1365)..(1365): n is a, c, g, or t
cgggcctccgggaaaattttccggggatatcgtcgacccacgcgtcgcgcgcgcgtgttctcccgcccgctcgctcgccggcgctcacacctgagctcactcgcgcacgccccgcccggcccgagaaccgcgccgccgcctcggccccgcggaagccccgccgcgccatgtcttcgcctcccgaagggaaactagagactaaagctggacacccgcccgccgtgaaagctggtggaatgcgaattgtgcagaaacacccacatacaggagacaccaaagaagagaaagacaaggatgaccaggaatgggaaagccccagtccacctaaacccactgtgttcatctctggggtcatcgcccggggtgacaaagatttccccccggcggctgcgcaggtggctcaccagaagccgcatgcctccatggacaagcatccttccccaagaacccagcacatccagcagccacgcaagtgagcctggagtccaccagcctgccccatggccccggctctgctgcacttggtatttccctgacagagagaaccagcagtttcgcccaaatcctactctgctgggaaatctaaggcaaaaccaagtgctctgtcctttgccttacatttccatatttaaaactagaaacagctccagcccaaaccttgtttatggggagtctggttggatgtcatttgaggatcattgtgcccctagaggtgccattagcagaatttgccaagatccgagaaaaattttagctttagttctatttcagcagtcacctgacgtccttgtctatggtcttaaaaacaagaaggcacacatttgagaagatgagattaaggttaggagaaaacctcagtcattgcatgctttttagtatgggccaataaaatctcaacacctgtgggagagtaagaactaagggaatgagtttgggcggcccctcataaaggaccttagaggcagggaacagcaatgccaaatttccctctctcgtgagatgggggatcctgtgcaggctgatgaggcacccatgagaaaagccgaaaaagcatgcatcttagaaatagcccctcaattccaggagtcaacatgccaaagaatgaggctggagacaggtagctccgagggaggacttctggcatgagatctcggcacggcaagcccagcatcgcctcagcccagacaggctccaccaggagatcaagcaaggggctgccttttcaggagtcaccctcctgaagccacttcagagttctgggaagttgaccaccgggaccagggtgggaggattagaacttcttagtttcattttggggacactttgaaccccaaagaagttgaaaagccttgggaaagaaccacnataaggaaaaccttgcccctttttcccggaatgaaccaatgtgtcggaaagcttgcctgggtggggcccccccaccgaaaaaattggtgtgggaaagtccactatttcggtgtgt

SEQ ID NO: 311037 - DNA, 420 bp, Homo Sapiens
aggagctttattataaatcatttaatattcttgaagttaacaactgataaactcatttaggcaaacattttggatttaatgatctaaagctcacagatgcatgccacatctagctaaaagtacataaaaagcgcacctctggaaataacagccctccctctggctgaagactgaggaagcattaaggatgcttctgggatttctgcagcggcggggcagggggtctgcacaggcctgacctggggtgttgctgggagcgcgggcatcccctcctggggtgctgctccgaaagggcagggctggggagggtgcttgctggggggtgtttccatgggcagcgcattgcccaaccaagtcttggggtcttcttaaaaggccaccctcaggttttattacccacttgattcagggaaatagggt

SEQ ID NO: 311038 - DNA, 508 bp, Homo Sapiens
ggagtcgggaaatggccgctgtgtggttgcaacggagataaattcccggaaccgcgattcggcgtgtcaggaattcgaatttagagtttaatttctcagagcattctctccaggaagaatttttacagtatctcaaagacttcacttgacttcttgatcctgcataaaaccaaggagaaaagaaatgggtcgctccaattctagatcacattcttcaaggtcaaagtctagatcacagtctagttctcgatcaagatcaagatctcattctagaaagaagcgatacagttctaggtctcgttccagaacatattcaaggtctcgtagtagagatcgtatgtattctagagattatcgtcgcgattacagaaataatagaggaatgagacgaccttatgggtacagaggaaggggtatagggtattatcaaggaggaggaggtagatatcatcgaggtggttatagacctgtctggaatagaaggcactctaggagtcctagacgaggt

SEQ ID NO: 311039 - DNA, 625 bp, Homo Sapiens
  misc_feature (403)..(518): n is a, c, g, or t
  misc_feature (558)..(558): n is a, c, g, or t
  misc_feature (578)..(578): n is a, c, g, or t
  misc_feature (603)..(603): n is a, c, g, or t
  misc_feature (612)..(612): n is a, c, g, or t
agtacaaattttgattcttttgaatattggtgcactgcatacagttctagatgttatactgtgctttgctcactttgcctgcattcctgtggttctcatgctagactctagttcttaaatacaaggcagattgtcttttgttgtagctgccttttcctttgaaacagctttccataaagtgtcttaactgtgctagaaatcaccagtttctttgagacagtggagttactgagccctagtgcttagtgtggtggatccagagtgataaggtggatcatagtccctaagcaatctatttgaaagcagtagcatacctctctactcatgtactgaggcctaacagctattgaaattttgttctgtttattcatttaattcattttttgagacagagtttcactcnnnnnnnnnnnnnnnnnnnnnnnnnnnnnnnnnnnnnnnnnnnnnnnnnnnnnnnnnnnnnnnnnnnnnnnnnnnnnnnnnnnnnnnnnnnnnnnnnnnnnnnnnnnnnnnnnnnncacccacaaccacacccgggccaatttttgtatttttaantaggaggacaggggtttcgncatgttgggccagggttagttttcnggacctcangtggatttaaccc

SEQ ID NO: 311040 - DNA, 591 bp, Homo Sapiens
ctttatatcacatatattagctattcagggataaatctgacaaactatacatgattcaagtacactgaaacctatacaataaaaaaataaatttttaatcagtcaaattatgccttttatactgaataactggaagccatttatctattttatgcaatcccatgagaatttaaaatttgtaatttggccttacacatttacagaatgagaagtatacttaaagttaaaatatttttacccttttttctctaccatatcccgacaaagggtcagccacatcaatagaggaaaaccattttatttctgggaatttcttactagtagaattgttttccttatagtaggttaaaaattcctcttaaaaaataattcttacctgttgattttatttcatctcattaggtcccccacatctctcgaagactagactacatcaaaagtctagaagataatgtgcttcacaaagcaacaggtcaaaacagttttatttaaatttgaaaaatatgcaacacttaccagatagactcaacagggccaaggcactgagaagaaagatgcctgttaccttcagtggctgaagttctgcgtccc

SEQ ID NO: 311041 - DNA, 1028 bp, Homo Sapiens
ggctgcctgggatcttccccatttcacattcagtctgcggccatttacaatcaacttattaaaggacttctcagcagccacttctgcagcctgccgtgtggcaaactggatgaaagcacactgctgtctctgcacaacagtgatcgtccggatctctccgaactggtagaaatgatttcttaaatctgtctcagtaatggtatcacctagaccaccaacatatagtgtggtgatagttttatcctctggtgggtccagccgaggcattgttgaagcccgctttagaagcttgtcagctacaggatcattgattccgtaataacggtctttaatattctgatcagcaagggggtcatctgggatctgtagggcttctcatgtctgtatggacattcctctcctctcttacactctcctttcacccagaaggagcaaatgtggggtcgattccttttgtagtagggtgtggtccgggccagtttgagcagcatgtcactggtagatgtggctttccccagcatgccaactggccgtgttccatcagagttagaaatctctctctccatattctgtgtatagtactctttgttgacatctgactttggcatgtcatctttaaaagacaatcctgcgtcacgaacctggatgggcaggccatactctaggtctaagaggcaggtctgacagacattcttcaatttactgcaggtttggcacacttcagtcttcttgaaacgcatgcggactccagggcaccagcgaaacactgtgaatggcctggcacagattttgcattccttcccatacttttctttggtcattcggatatatgggttttctccaagacaatgtctggcacagaatggggaagtccgcatcctcccagttctgcctgttgtaggtgttggaacccagagaggtcgccatcttgagagcgtccggaggtagctgtagcttccgaattgggagagaggaccgccacaatcccgtcaagccccgaggctagcgccgcgccggtcccccggccg

SEQ ID NO: 311042 - DNA, 1684 bp, Homo Sapiens
cgggctcccccttaaagttttattccccaaggaggggtcccttttcccctttcttttaaaggcaaactttaaattttgggggtggctactttcccctccctttttgggaccagccaactaaattccatcactacccggaggaagacaaaagtgggtgctgcagaaggcaagactgtaggccagtggggatttgtctaataattgatgataagatgattgatagcacagagggcaacgtactgagagaggaaggcagccttaagaaatgatgcagaaatagccaagcaagatttttccaagcactggttaaatcaccagcaaaacaaagcatttatgtgagtacctcaggcctgggcacctctttgcttgaaatatggcaagacttggaaaaatgtttgcccttagaatctatctcactactttagttagttgtctcctttgggcctgggcacagttctggccctgatctggaacagactcccttttctaaaactgaacttgaccacatcaaaagtttgtaaaacaatctccatggtaattaaacttgcattcaacaccatatggtaacagaagatggcaaaggataagattcagatcttagatctttccaagtagggcatgttagatgatagaaggattagttgcaagctggatctgagctcaggcttgggcatgaaggaaactgtctcccatgtggtttggaagagttaggggctccctgagctctattgtgaactatacgggtttcatccaaggaatggtatgatgtgggcataaaaccattcttcagacaactgaagatggtccccttctgtagccagaaacactagctgtcctgcattgtccatttcctttagccccaggcggtcctgtgtgtacagggaggtctcctgtaagggaatggtttccttggcttggccacttctgtaaaatccaaaccactccgaatctacagggtccacaatggaatcattgaggaatttcaccatcacaaacttcttcagggccatcaggtttttcttgtaggactcattgataccccgctcctgatttatatctgccaagaagatgctgtggttgcgatacacatcctcctttatggggtcatgccagtattcggcttgcacgaggcgttcctgaacaactttggagtacgccccagcattcagtgtttttcggatgaagtcacagatgtgagagctctctcctgggcatcgagggagtccaaaaacaccttgatgttgtcccccaaccgagatcagattgatcatgggaggtgaagggcatctctgagccactgccctcagaaattggcctccctgggagaatcccatagcattgtagccttgctgcaatttaggatccttagcaagtgcctgacacactgttgttacttgggaattgacattcaagaagaagctgttctccacgtcctccatcagggtcttcccaatctctaaagataagacgtaaattccaggtattttcttctccaccatttttttaatagcacccatgcttaagggattgcaacagctgtctcccatcccatgccagatcaccaacggcagcggcgccggcgggtccagatgctgcagcgcccgagaagcgcaggtccatggcaggagagccacagccaagagccacaggcagccgggcgacgccatcttcgctgtgtcacccc

SEQ ID NO: 311043 - DNA, 1538 bp, Homo Sapiens
cgtgtcttaatgagaaactggcttttcttcagtctactctttcctccatcctgtcttacttgtagagatttatgtctaactctaggaaactttgggtggccactctgctttccaggcttgttggcaagaggggtgctttctccccaagcacgtgaggcattctgggggctgatcagccaattgttaacagctgtgtcttcatcagtatcttggattatttcatagctacctttctcagaagccaaatgccatctcccaaccaaaatcttagatgagttactttgttttaagagtaacagatcactaggagggtccttccagggcctcattctggaaggagaaccagtgtcttggctaggaaggtcctcccagggcctcattccggaagagaaccagtgtcttggcttaggtgtctcccaactttatgtgctagtaatttcatccaggagaacctgtgctttgctgcttgatctctttctaccttgggtcccttatgcttagcatgttcttgacttttgaattctccagcaccaagtgaaagtagacgtatccctgtgacatctggctgtagaggatcctctatagggtcttcagaatatgggctggaatgctctgctgtggaagaattgagaactgagttcttgccaatgaggtgtctcagtggggaaccagctgtggtggcttgttggtgagaaggggctttctgaggttctgcaaggttattgacagtgaacttactaatattacttggggaagaataatttgaaccaacaattatatctgtgtttgaagaaacgaattcagtgccattctccagagctagggcagtaagattgaactcttcttcttcctggttcaatgatgagtttcggaatgacctgattcctaatgctgcagccagtctgttctggtaatcatagtcaagcatcactctcttcatcttcaggttctaaacgatcatgcattttccgtgtagccatgactgtagattctggaggttcaaaaatctcatatgagtcttcatcatcatctgggatacatttaacatccctgaatttcagcctcagctttttgcttcttggactagaattcatggaagttaacatccaagttccaacattatccattgtgaccgtcacagattctccacgcatggggaagagggtcaaggtgtcctcatgcctctttccatagatgaatgagtgcccagtgaagtggatggtcaaaatttcattctgggtccccacactacagaagtgccactggacagtgtcatcaaagcagaatccaagagtagtgctctcaggcacatagccattgatagtgctcatgatgtttgattcataaaacttggggtcatcacgtttcacctcatcaggattttcacaaaacttgttgatgttgtcctcaaggtaccagcttttgttctcatcaaacacagcaaacacagcctgctgttcgatgtctgctgccctctgtattcctcgcccccggccctaatggccgaattcccgggcatatgtccggtaccgtcgact

SEQ ID NO: 311044 - DNA, 1724 bp, Homo Sapiens
gaagagagtgatttagaagaagcttgcattttgcctcatagtccaataaatgtggacaagagacccattgcaattaaatcacccaaggacaaatggcagccgctgttgagtactgttacagatgttcacaaatacaagtggttgaagcagaatgtgcagggtctttatccgcagtctccactcctcagtacaattgctgaatttgcccttaaagaagagccagtggatgtggaaaagagaaagtgcctactaaaacagttggagagagcagaggttcgcctggaagggatagatacaattttaaaattgtatctggtgagcaagaatttcttacttccatctgtgccgtatgcgatgttttgtggatggcaaagacttattcctgagggaatcgatataggggaacctcttactgattgtttaaaggatgttgatttgatcccgccttttaatcggatgctgctggaagtcacctttggcaagctgtacgcttgggctgttcagaacattcgaaatgttttggtggatgccagtgccaaatttaaagagcttggtatccagccggttcccctgcaaaccatcaccaatgagaacccatcgggaccgagcctggggaccatcccgcaagcccacttcctcctggtgatgctcagcatgctcaccctgcagcacagcgcaaacaaccttgacctcctgctcaattccggcacgctggccctcgctcagacggcactgcgcctgattggccccagttgtgacagcgttgaggaagatatgaatgcttctgctcaaggtgcttctgccacagttttggaagaaacaaggaaggaaacggctcctgtgcagctccctgtttcagggccagaactggctgccatgatgaagattggaacaagggtcatgagaggtgtggactggaaatggggcgatcaggatgggcctcctccaggcctaggccgagtgattggtgagctgggagaggacgggtggataagagtccagtgggacacaggcagcaccaactcctacaggatggggaaagaaggaaaatacgacctcaagctggcagagctgccagcccctgcacagccctcagcagaggattcggacacagaggacgactctgaagccgaacaaactgaaaggaacattcaccccactgcaatgatgtttaccagcactattaacttactgcagactctttgtctgtctgctggagttcatgctgagatcatgcagagtgaagccaccaagactttatgcggactgactgcaaatcttctccaaacaggctggtgtattgggagcaacaccggagctggtgcacgctggggtttgtgcagagcatcgctctcacgctgcaggtgtgcggcgccctcagctccctgcagtggatcacgctgctcatgaaggtcgtggaagggcacgcactcttcactgccacctcgctgcagaggcagatcttagctgtgcatttgttgcaagcagtccttccgtcatgggacaagaccgaaagggcgagggacatgaaatgcctcgtggagaagctgtttgacttcttggggagcttgctcactatgtgctcctctgacgtgccgttactcagagagtccatgctgaggtggcgcagggtgtgcccgcaggcctcgctgactgccacccacagcagcacactggtggaggaggtggtggcactgctgcacacgctgcactccctgactcag

SEQ ID NO: 311045 - DNA, 512 bp, Homo Sapiens
cagagacaatcaactttgtaacagaaagtcagagatactttattttttacttctaaatccaaaggctaagtagagcagagttgtaaaaatgaaatcccacttagtctgattcacacgaatactaacgtttaatcctgttttcaaagtccaagattgaaaacttgcaattaaacactgagcaagccacatgtttaagtaatatttcttaaaaagtcttaaagaaaaaagtatgatacaggacctaagttttcagtggcatatatactattaacacatgttctgaaatctggtaggtcacatcagtcctgaattaacttttaataataataataataaaaaaactaactgagctttatactttttctatgccactatagctttctttcacctcattttttaaatgtcgatcttcactttatgccgttctcagtattcttccaaaaatcttcgaacagtagtcctacaacgcaaaatttggggaaaaatgataattagacaacatgtaaaaggcc

SEQ ID NO: 311046 - DNA, 1079 bp, Homo Sapiens
  misc_feature (232)..(232): n is a, c, g, or t
taaaacttgcaattaacattgagccagccacatgtataatcagtggcatatatactattaacacatgttctgaaatctggtaggtcacatcagtcctgaattaacttttaataataataataataaaaacactacttgagctttatactttttctatgccactatagctttctttcacctcattttttaaatgtcgatcttcactatatgccgttctcagtattcttccaanaatcttcgaacagtagtcctacaacgcaaaatttggggaacaatgataattagacaacatgtaaaaggccaatttttatgagaaagtgttggcccagtcactaactgctaattaacatgtgtacatggaatgcttgtattctttttaattatcaaggcatcagtgtggttcttaaagccatgtgcctgtgtatgcttgcctaagtgtgaatgacatacacagacataaccttacattgctttcccaaaaggggaatgccaccaacaaatcaactaattggtacttcctttcattaggaatattttgtcccacaccactagcccacagaatgaagtttacaggttttaagaacacttacagtacctaacttttaatatttctttaaaaacccaaattcgttctatatagtgcatcagttctttgatttcacaaattgaaggtgtctgtccttgctattcacactgctgctttaaatgtatcagccagtgagtgactattcctacatacctatggctgactgcaaattctcctacacagtaggaaatattaagcacatacctcttatagacttgagaattgcattgagtgtaacaaggcgaataatatgaagtgtttattgtatttaaaattctttaaagatatctaattctggccaccactgcagccctacatacagttgaaaaaaaattccattctgttaacatttgttttataagttttcacgcaatacacaaaaaacccctctgcacttcttgtaaagaacaaaaaagatacacaacagttaagcgtaaagatcacaggcaatagcattcaaacatggatgtgggtagagaaaggagtacctggc

SEQ ID NO: 311047 - DNA, 1138 bp, Homo Sapiens
  misc_feature (8)..(8): n is a, c, g, or t
  misc_feature (13)..(13): n is a, c, g, or t
  misc_feature (15)..(15): n is a, c, g, or t
  misc_feature (23)..(23): n is a, c, g, or t
  misc_feature (28)..(28): n is a, c, g, or t
  misc_feature (44)..(44): n is a, c, g, or t
  misc_feature (50)..(51): n is a, c, g, or t
  misc_feature (81)..(81): n is a, c, g, or t
  misc_feature (89)..(89): n is a, c, g, or t
  misc_feature (161)..(161): n is a, c, g, or t
  misc_feature (167)..(302): n is a, c, g, or t
aagaaaanaatgnanttttaatnttggnccttttattattagantccccnncccggtagttgccatttgtgggaaacaacncatggctntcccaaattaaagctcctgtagagaattaaaagaaaagttaaggaaagaaccgaagaacctgatcgtgatgncgtctnnnnnnnnnnnnnnnnnnnnnnnnnnnnnnnnnnnnnnnnnnnnnnnnnnnnnnnnnnnnnnnnnnnnnnnnnnnnnnnnnnnnnnnnnnnnnnnnnnnnnnnnnnnnnnnnnnnnnnnnnnnnnnnnnnnnnnnnagtcgttcacgaagtagacactcaagccgaacatcagacagaagatgcagcaggtctcgggaccacaaaaggtcacgaagtagagaaagaaggcggagcagaagtagagatcgacgaagaagcagaagccatgatcgatcagaaagaaaacacagatctcgaagtcgggatcgaagaagatcaaaaagccgggatcgaaagtcatataagcacaggagcaaaagtcgggacagagaacaagatagaaaatccaaggagaaagaaaagaggggatctgatgataaaaaaagtagtgtgaagtccggtagtcgagaaaagcagagtgaagacacaaacactgaatcgaaggaaagtgatactaagaatgaggtcaatgggaccagtgaagacattaaatctgaaggtgacactcagtccaattaaaactgatctgataagacctcagatcagacagaggactactgttcgaagatttttggaagaatactgagaacggcataaagtgaagatcgacatttaaaaaatgaggtgaaagaaagctatagtggcatagaaaaagtataaagctcagttagtttttttattattattattattaaaagttaattcaggactgatgtgacctaccagatttcagaacatgtgttaatagtatatatgccactgaatacttaggtcctgtatcatacttttttctttaagactttttaagaaatattacttaaacatgtggcttgctcagtgtttaattgcaagttttcaatcttggactttgaaaacaggattaaacgttagtattcgtgtgaatcagactaagtgggatttcatttttacaa

SEQ ID NO: 311048 - DNA, 834 bp, Homo Sapiens; identical to SEQ ID NO: 150601

SEQ ID NO: 311049 - DNA, 1211 bp, Homo Sapiens
gacgagccgtgtgatgtattcttttggcattcggggcagctggtgggagaaaacgttctgtaggccaaccagccacatcaggatcttcttgtttggtttctggttgagggaattgccaaccacgtgaaattcaattacacccctgcgctcttccaaccttgccgcctcatccctggccgagtgtgctgacagaaaattggtctctggtccaagcattgctgcagggtccgtgatggtagacataacctcgttgattaattccatcggaatatcccccataactcggggtttcttggcctcctccagaacatgagaatcagtcattttcctcttttctcctggggtttgcctcaagtccagaagaggctttgcaggcaggactgcttgctccctgcgtttgggttgctcaaggggaagatgaggttgaattgtatgaaattgttcccagccacaggaggtggattgataactgtttggatgcctagctggctggttctggaagaggctgagagaaaatcctgatcccagatgggagagttttgactatatacttcttcttctagcatggacagaaattttgggaaatgagtgaggattagagttcgtttttcaagaggcagtttatctttttcctgtcttgcttgttccaggagttgtcgcctcataacagtgaagaccgagcgaagcaatgttctcccaaacacctgtgtggtttcgtaccgaggtagactgtcgcagaactgtggcacgttgcagtaacacagccaccttgtgtagttctctttgtatccagaaatatcatcattgggagatcgcagtcttcgttgagatggtgcctccagatgccaatagttgatgcggtttaggaacatttttgccaactcaactattgtttgcctttcttttgctggcaggtgactaaatttgtactgcacaaagttattcacaccctgttcaatgctaggtttttcaaatgggggtttcttttccaaagagccttcaaccacaggttttcctctttgtaaaatagactttctcaagagcttaaatagatagaaataaacttgtttggtatctgcatcttcttccttgtggacacaggtaaagagatattccacatccaatactattcccaggagtctgttcatttcttcctctgacacattctccaggtgggaaacatgagcagctagggcatggctacaactccc

SEQ ID NO: 311050 - DNA, 478 bp, Homo Sapiens
  misc_feature (168)..(168): n is a, c, g, or t
  misc_feature (321)..(321): n is a, c, g, or t
  misc_feature (454)..(454): n is a, c, g, or t
  misc_feature (463)..(463): n is a, c, g, or t
tgggatcaggattttctctcagcctcttccagaaccagccagctaggcttccaaacagttatcaatccacctcctgtggctgggacaatttcatacaattcaacctcatcttcccttgagcagccaaacgcagggagcagcagtcctgcctgcaaagcctcttctggnacttgaggcaaacccagggagtaaaagaggaaaatgactgattctcatgttctgggaggaggccaagaaaccccgagttatgggggatattccgatgggaatttaattcaacgaggttatgtcttaccatcacgggaccctggcaggcaatgntttgggaccaggaggaccaatttttctgttcaggcacattcgggccaggggattgagggcgggcaaggttgggaaggaggcgcagggggtgttattttgatttttcacgttgggtttgggcattttccctttnaaccagganacccaaacaggagtt

SEQ ID NO: 311051 - DNA, 1751 bp, Homo Sapiens
  misc_feature (121)..(130): n is a, c, g, or t
  misc_feature (193)..(291): n is a, c, g, or t
tcgcgtatacccgccaggggcccttgttttttcagtggcccctcgcgggtgcggctctctgcgagaggaataaatcagcatgggggaggccccactttggtcgcccccccgacccccgccnnnnnnnnnncctcccccgcgccctcccacagaggtaacaaatggttttctcaataaaaggccgtgcttttcnnnnnnnnnnnnnnnnnnnnnnnnnnnnnnnnnnnnnnnnnnnnnnnnnnnnnnnnnnnnnnnnnnnnnnnnnnnnnnnnnnnnnnnnnnnnnnnnnnngaaaaataaatagggggaggggttactatcactgtgcagacggtataacatatagggggctatcaggggctctcctacggggcgtaaacaggccggaggtgtgtgcctgttccggcccttgggggagggccttagatttccgggggcccttttttccgctctgtaatgagcccaaaaggcccagttttggttcccgaataagggccacaagggccaaccccccctaggcgatatggttaaaaaggtggcggagagcgcccctttaaaaatacaagggaggtggtgtggcctttttcccaagatcggaatttgcactgtaagttagggaatgtagttcatcctaaccggatagtcttttggcaagtatagacagaggccaatttctacaaggcgcgactcagcgttgaggctaaagtatggaacccgtcctcagattatttaggtggagatagtaaaagtagcatcatgtttagtattttttaatgagtcatgagctcatttctaaagcttcataaagcattacgcatatgttatcagggtaattctttatgaaggattctagaggccgaggcggccgacatgggagctgtagtgcggggtcattgtttttgctatttcctttaaaaattttaatggacaggaaatggtatagaataactgccaagtcacataagttaacttttttgttaatgtttgtgatcccggaaagaacacactatcagtcgatgcaaaccgcatgggcgttttcatcagtcgttgtctgagcacatgaccgagtgtgggccacggacccatctttacttggtccagaaataaaagcggctgccatgtgtggcaggctgcagatctccctcgatctcagggctgggatccggtcttggtcttgagtgatagggattctccggtaaaggtcgatctgttttcactttggtgacctttgacagttctcccaggtcaggccgcacccagcccagtttgtccagcacacactcgtcaaactttgcctgctgtttgcgacagtgacgaaataactgctggccagtataatcaatgcaagtccaatattctgtaaaaggctctgcacagtgacgttttatctgcctaaagaagtccaaagcacacttgttgaccagtttgccttcctctaaacaccgcctcggatctttctcttcccagcggcagagcataaactccttgttgggcttatcacattgagctccatagtgatgggccgcagctttaagcacagcagaactaattttcacctcatctactttcagctcctctagagtgggcagctccactatccccggcatgacggctgcagccccgaccccgacgagaagccctcagccgcgtcgcccccgtctccttgaactcccctttcgaccgccgagtgccacacggcgcctgcgcatgcgcatccggcaacacgcaggcgtattgccctgcccaacccc

SEQ ID NO: 311052 - DNA, 742 bp, Homo Sapiens
  misc_feature (486)..(486): n is a, c, g, or t
cggtaagcttttatatttaattaactgatacctttcactgtgcaatctcaagaggaagattttctaaattagacattgtctttaccttaaagaagaaaattgtctatttcagtgtcttttttagcaagattgaccaaaacaggtggtaggtgtgtaatttttaactgtcatgaaatactgtaatgcgcacctttgctaataaggaaatggtctccctttgaattatgggaagtttcttgtctgtgatatggggtgtctgtgtacatatatgtatatttccttttttaatacaggataataatatggggtcttgtccttcaccttttaagttcagggaacagtttgtcctgaccacacatatgttatcagtgtaatgctttatgaagctttagaaatgagctcatgactcattaaaaaataataaacatgatgctattttaatattttcaaataaataaatctgaggatgtgtttcatactttagcnatcaacgctgagttgtgccttgtagaattgcattgtctatacatgcaaaagactattaagttaggatgaactagattccctaattacagtgaaattctatcttgcaaatgctatagaataacttgcattttaaagtgtatttgcacattttacatatgctatgtggttgcctttgggttttctgtacagattgtttttgttattaaatggaaaaggcctgaattatgctcttatgtgaagtaaattgatataacct

SEQ ID NO: 311053 - DNA, 669 bp, Homo Sapiens
cccgctgcccacgccttgccataattcgttgtggtcacattccacttgcgcacgcggttgccatcataggcataggagttgtgtgtatctccaaccccctcctcctggttgaagcggcagctgatggtgcaccagccgatctgcatgagcccctgggaggagatgaggacctcgtagagccatttccctttgtacacgcatgtggtagagcggatggtgccaaagttgctgtgtccaatcacccccagcaggtcatcatccaccaggagaagcccctcaaagccgcctgtgtggtccaggaccacagtggatgggccaagccgcccttcaacctgtccctggctttcctcctcctcattgtccacctgtagcaactggtccaaatgttctggcaggttctggaagttcaggggtttcctgctggtggctgctgggggtgcatgttcagaagaggaaaagatgcggttcaggtagtcattcagcagcttctcctgcacaatgcctgtgaccctggatttctcagcatctgaggtcagcctatagctcttgcgggagaaagacatgccggcccccttggatgccatccttcatctctcatgggcagccagtggtcctgggggctgtgggacctgaggcctggcccctcatggctcctgtcaccaggtcccc

SEQ ID NO: 311054 - DNA, 530 bp, Homo Sapiens
gacacacaaaataaaacctttctccactgcagtttaactgtggcaatgagttgcatacgatcaccaacactgaaacttaatttagcttttttctctcctctccaatcataaaaagtctctttttggttcttcatgcaggagctattttctttcttttctggcctctaacaggaaaacagagtttctagccgagctgctcctgaggtattaaaagtgatgttcgtgtcatgcggatcaatcctgcccaaacattagtgtgcatgcaaatcacctggcagtcttattaaatgcagaatctgattccatgaggtccatgttgtccgtggaccaaacttgcagtagtagcgaggagtctagaagacgtccatgttatagaaattgaacccaggaaaggatttggggcttatgaagctaacaaaagcacgtaaaacccagcctgagaaacagtagctacacccagctcttgttgctattctggaaccaaataatgcaaaatatgctcgagacacatctcagttcttgcttgcttg

SEQ ID NO: 311055 - DNA, 838 bp, Homo Sapiens
aaatctaagtacagtttcatatcctacacccaaagctctatacatttggtttttattctgaatcaaaatgaatttccgatagtgaggagagtagagtgagggaatggatattccctcacaaacagattagtgcagctgccacactgtgaagaactagtcccactctgggcaccttgggacttgactaatcccaggtggttcacaggcagatcctctgtcacactctctctgcatccacactggagccaggatgtggtgagacacggccgatactccaaatccaacaacctgcagtcacctccaggacatgcggctctaacttttatctgagtgcttgtctgtgaagggctgatccagccagcctttggcaaagaatggtgtaactttcctccaccttctttaagtgttcaaggtcagcctctatcttatgaatgtactccatgatctggctctgtgaatctgcacaagaggagggactctggatctcaaaacaggaatactccatagctccccagcgctgctggaccagaaattcgggggtgaatggtgaaattgccccatcggagtgagtattctgaggagaatgttgctgctggtgggtggattccacagcagggatgcctgtcatgggctgcagggtaagtgaggaagcaacctcctcatctgtggaactctcctgcactgggtcatagccatcaaggatcaaatagtttcctgagatgcgtaaattaacatccttctcttccttgttaactgctccatcaccttctgatggattctcatcactatgtgcttcacgggcatcaaaaaagtgctctccactgtcatcaagaccccc

SEQ ID NO: 311056 - DNA, 654 bp, Homo Sapiens
aggaattcggcacgagaaaggttatgcagcgcgtgaacatgatcatggcagaatcaccaggcctcatcaccatctgccttttaggatatctactcagtgctgaatgtacagtttttcttgatcatgaaaacgccaacaaaattctgaatcggccaaagaggtataattcaggtaaattggaagagtttgttcaagggaaccttgagagagaatgtatggaagaaaagtgtagttttgaagaagcacgagaagtttttgaaaacactgaaagaacaactgaattttggaagcagtatgttgatggagatcagtgtgagtccaatccatgtttaaatggcggcagttgcaaggatgacattaattcctatgaatgttggtgtccctttggatttgaaggaaagaactgtgaattagatgtaacatgtaacattaagaatggcagatgcgagcagttttgtaaaaatagtgctgataacaaggtggtttgctcctgtactgagggatatcgacttgcagccagaagtcctgtgaaccagcagtgccatttccatgtggaaagagttctgtttcacattctactgaagctgaaaccatttttgataacatcactcaaagcacctcatttaatgacttcactccggttgtggggggagg

SEQ ID NO: 311057 - DNA, 630 bp, Homo Sapiens
ccaaccgaaggaagtcaaaatgattgggtgcgagtgatgtatcccaaaatggtttcagcttcagtagaatttacatagtccacatcaggaaaaacagtctcagcacgggtgagcttagaagtttgtgaaattgcaagtcgatatccttcagtacaggagcaaaccaccttgttatcagcactatacaaaactgctcgcatctgccattcttaatgttacatgttacatctaattcacagttctttccttcaaatccaaagggacaccaacattcataggaattaatgtcatccttgcaactgccgccatttaaacatggattggactcacactgatctccatcaacatactgcttccaaaattcagttgttctttcagtgttttcaaaaacttctcgtgcttcttcaaaactacacttttcttccatacattctctctcaaggttcccttgaacaaactcttccaatttacctgaattatacctctttggccgattcagaattttgttggcgttttcatgatcaagaaaaactgtacattcagcactgagtagatatcctaaaaggcagatggtgatgaggcctggtgattctgccatgatcatgttcacgcgctgcataacctttcacg

SEQ ID NO: 311058 - DNA, 934 bp, Homo Sapiens
  misc_feature (2)..(2): n is a, c, g, or t
  misc_feature (8)..(8): n is a, c, g, or t
  misc_feature (13)..(13): n is a, c, g, or t
  misc_feature (16)..(18): n is a, c, g, or t
  misc_feature (31)..(31): n is a, c, g, or t
  misc_feature (39)..(39): n is a, c, g, or t
  misc_feature (47)..(48): n is a, c, g, or t
  misc_feature (94)..(94): n is a, c, g, or t
  misc_feature (141)..(141): n is a, c, g, or t
  misc_feature (147)..(147): n is a, c, g, or t
  misc_feature (154)..(154): n is a, c, g, or t
  misc_feature (168)..(168): n is a, c, g, or t
  misc_feature (381)..(381): n is a, c, g, or t
  misc_feature (490)..(490): n is a, c, g, or t
cntttgtncctcnttnnntattgcttcatanttttcctnttctaatnntttcctccttccattggcctctcgctcgttcctgtccggaaccttntaaccttgcgcgactttagaagctggcccggcccgccagtgcctttngctttnggaggtngcaaacaggatggngccggcagcgccgttccggaaccatagggggctcctgggaagctaccatcgcgaacaaggcgcggctgcgttggcccttggctccagcctggcaagctgaggtgaaagccctggtttggcatcttctccaccaacaacccgagtgaagtcattaaatgattgggtgctttgagtgatgttatccaaaatggtttcagcttcagtagaatttancatagtccacatcaggaaaaacagtctcagcacgggtgagcttagaagtttgtgaaacagaaactcttccacatggaaatggcactgctggttcacaggacttctggtnttctgtacaaaactgctcgcatctgccattcttaatgttacatgttacatctaattcacagttctttccttcaaatccaaagggacaccaacattcataggaattaatgtcatccttgcaactgccgccatttaaacatggattggactcacactgatctccatcaacatactgcttccaaaattcagttgttctttcagtgcaaaaacttctcgtgcttcttcaaaactacacttttcttccatacattctctctcaaggttcccttgaacaaactcttccaatttacctgaattatacctctttggccgattcagaattttgttggcgttttcatgatcaagaaaaactgtacattcagcactgagtagatatcctaaaaggcagatggtgatgaggcctggtgattctgccatgatcatgttcacgcgctgcataaccttt

SEQ ID NO: 311059 - DNA, 373 bp, Homo Sapiens
cgctcgcatctgccacttaatgttacatgttacatctaattcacagttcccttcaaatccaaagggacaccaacattcataggcattaatgtcatccttgcaactgccgccatttaaacatggattggactcaccaaaaacttctcgtgcttcttcaaaactacaccttccatacattctctctcaaggttcccttgaacaaactcttccaatttacctgaattatacctctttggccgattcagaattttgttggcgttttcatgatcaagaaaaactgtacattcagcactgagtagatatcctaaaaggcagatggtgatgaggcctggtgattctgccatgatcatgttcacgcgctgcataacctttg

SEQ ID NO: 311060 - DNA, 731 bp, Homo Sapiens
caaaaatgacacttattataataagcaggaaccaaaattatctctgtaagcaatctcttctaatgggaaaaatccaggtaaaaagaattttgatatgcaaacttttatcttatatactatattgcagtttaatcatacttaatttaaaaaattcatttcaaagctataactgtttaatgacatatttaatacctctgtatgtgataaaattatcaatctaaattgcgtatcattaaaaattaaattattctcaaataatgaatatgccatttaaacacaagcttcattcccccaccacttctgcagtcaagaggtggaaagtttatgccagtttctcctcctgaactgaaatttattagctttggctggaaaaatccctaatcttaatcaggtttctctaattccatcttgtttttatatcctattttcagagttccttattttcaaagtgccactgatatattcagctttgtcagttctggatccttgttttgtatctttagattcccctaaaggttccattcaaactggcttttacttttcattcatgtaaagctgcaagaggagttaaaagaatatttacaactctaaatcacaaagaaccacatttaatgagaatacttatattagagactaaaatagtatttgggaatctttgtaatttccatgatctttatttatcacgtctttgcatgtaatcattgttttgtttgatgacttttctaagatgc

SEQ ID NO: 311061 - DNA, 1228 bp, Homo Sapiens
  misc_feature (102)..(102): n is a, c, g, or t
gtacactggcacctattaataaagtctatggcttgtgcttttcaaactggttctgccactggtgcaaaatctgcaaggacaagggtatctgcaacattctcntactggagaggttactacacaaagcttcttcgcacatgaccttcagccgttccagtgcatatttgtctgcagctgccaacaagttgtcagccattttgtcaaggtttggtgctctccctgtgtaaatgaatctcatcatttctttaaaaacttcagggtctaaatcatttatttccactcgattctttttgctttcttccatttcatgttcaaacatggcgttaaaaactggagatcgagctgcaagcacagatttatgagctttaaattcttgtcctctcacgaaaaaactgcagtctgtaaatcttgtgttttcccagagattacctaaatcttctgctagacgacactcaggcaccttcaaagtatttgtattagtatgtcctgatatgtttactgaatcttggaccacactcacctcacaaaataatgtaagcttgtcaatctggtaaaagaccattagcttcatcaagcaaaaagtcccttctaatgaattttttaaaaccccagtccttcccttgcacaaatcgatatgctctttggctttccattgcttttgtttcttcccttttagcattcagaagggaaaatttgaattttgctcgaacttcacttttggggcagctgactaaaagcaaatataaggacaagtagtctttactttcatcatctaatccctttgggtttaccctcaggcaccatttcattttgtcacttgggccagatgaaaatgtcgaactttttaacacttcacccatttcctctcgacaaaaactgaagttattaatggtccacatataggaaaattttactactttaacctgtgtgtaacaccagctttctgctatgggaccagtagacatatctccaggtagaggtggggtgggttcccgagacatcaccactttattgtagtctttcaggatttatgtagtaccccacacagttgagtaccttacctggacgtgctgggcggcagcggtcagtcctggtggagactcctctcccgctgaggcggtggccgtgtccgccctgggagcccgaggctgcggtggtggcagcaggggtgatggcggcaagtccctgtggcggccgcctccgccgaaccgcatccctcctccccgac

SEQ ID NO: 311062 - DNA, 2974 bp, Homo Sapiens
  misc_feature (850)..(850): n is a, c, g, or t
  misc_feature (879)..(880): n is a, c, g, or t
  misc_feature (882)..(883): n is a, c, g, or t
  misc_feature (885)..(886): n is a, c, g, or t
  misc_feature (893)..(969): n is a, c, g, or t
attgtttctgtatgtgtagtagtcatatagagcactcgcccagctgagcgaggcgtgttttttgccccgcgcgccgactattgttttgctctcaacacaaatagtgtggttgtttccagcaacccagatgttggcgagagggctgtgtgtttcaacggaggtgtaaaagaaacctctcctcgcccctcgtagggcttcccactaataataagcgaggtatgtcaagagggggggagcaacaagagtgggggtaatgcgttttattttaccagggcaaatatccgcccagtgggcgcatggagtatttggcccgcttgtctgttcccgaagttttataaggccccagtgccaccgccaaggtgcatattatcatttatttgggaatcccccccgtgtgttttccccttaggcaggccaaaaagtgtttttctcgcgtggagtgcccacttcaaaggggtctttaatgggccgcaattgtccctttttaagggcttccccgaaatgggcccattccccacaatgggtcttcgccgcggtggcacagcaagtaccacttaatggatttttctcctccagggtagcgccattgattttcttaagggtgctggcctttcatgtcaatttaatggcccccgcttgcacatcgggggggacagaatttccgaagagtctccatcaggcacccccgttgaggtttttacaagggaatttggcgctgatccccgcagcgcctttaatgtggtgcaggacccacagcgccttggtcgttcccgtttcttccggggcagtcgcctttggtcccggctcggttgcccttttgggtgggggcgcctggggggtgggttttggntgtgttcttgggggtcgggggcggtgggnntnntnntgtttgnnnnnnnnnnnnnnnnnnnnnnnnnnnnnnnnnnnnnnnnnnnnnnnnnnnnnnnnnnnnnnnnnnnnnnnnnnnnntaacattccaaaaccttattgaacagaactttcttcatgacacctctcggaatgtaaacagagcttggtgtgaagaagatcaatctgatggctaaagatcagtatgactgcgtaaggcagtttgacatctacccatccctaacagattttcctaaaactctgtggaacaaccaaggagaaggcatattcctccctttccaaaggtgggcaatgtgcctcttcctggaaggttattttacaagcacgggcccctgaaagcagcagcctccccatcagccattttggcgtgagcagttacagctgcacactttgcaacttgtcccgccttgagtctgatgtcagaagagcatgtcagtccacttccacttcagagagggttggtggtgtcaggcagccctgctgtccaagggttctatcctttgatcacagcaattggtctcagtttaatggctttcttgctgattccagcatcatggcaggtatttaccacatctgtcacattcttataggactcaggagcctcttccataaccagtttgggtgaggcaacacggatcgcaattcccatatctgccaatttgtctaagacatcctggaaatctaaattacgtcgagattttgctcgggacaatgcacggcccgctccatgacaggttgttccaaaggtctcagtcatgccctgttcagtgccagtaagaacataactacaggttcccatggtgccaccaatgagcactggctgtccagtgagttggtaatcaacagcaatgaggggatggtgaggagggaaagcgcgggtggatcccttcctgtgtactaacagtgtccgttcctttccgtccaccacatgctgctccactttggcaatgttgtgagaaacatcatagatcacatgtaggtccaagtcatcaggggttgtgttgaagaccttggcgaaagcctgacgggttaagaaggtcatggaagagcggttgacccaggcatagttcccagcagctgccattcccttcagatagtcttgaccctctggggaagcgattcgagcacaagccaactgccgatcattgactataatcttgtctctcttcatggccttctccatagctaccagcgcatctgtggctacttggtggcccaagcctctgcttccactgtggatcatcacacacacctgtcccttatggtcgatgcccatttttttagcagcatactcattgaaaatctcatccacaacctggatttctgcataatggttgcctgctcccagggtccccaactgaggaaggcctcttttcttcgcccttgcagaaactttattggggtcagcttgcagcatccttccgtactcctcgcagtgctccttgtcttcagcccaggcatacccttctcttaaggaccagtccacccccatctccaaggcctcctccaagtctttggcattcattgggatgacaccttttgaccccaccccaacaggaatgtggtcaaacatagcttgggcaagttgctccttcacaggctggacatcactttcatctaaattggttcttagcaagcggacaccacagttgatgtcaaacccgacaccacctggggatactactgcttcagggtcattcatatcaaaggctgccatgttcccaatagcaaacccatatcctgaatggacatcaggaagcccaatagatcgatgaacaattccaggcagggctgccacattgccaatctgtttcatggctggcaggaagccaccaacaccaccacctcgacaggcattccttaattcctcaaacatcaatttctccagagcatcattcacatagaaaacaccttcaacctgcatgttgggcacgaagcccttcttgatcctccagcagtttttattgatcttctccaagaactgcagctcatcattatagctgcgactcatggtggcgaaaactgtagcaaaaactcccggctccgctttcctcgtgccgaattcgccacccaggcctcgctcctt

SEQ ID NO: 311063 - DNA, 849 bp, Homo Sapiens
cgtttttttagccacccatcccccattgaaaaattttcattcccccaacccgggattttttgccttaattggttgcctgctccccagggtcccccaactgaggaaaggcttcttttcttcgccctttgcagaaactttattggggtcagcttgcagcatctttccgtactccctcgcagtgctccttgtcttcagcccagggcatacccttctcttaaggaccagtccacccccatctccaaggcctcctccaagtctttggcattcattgggatgacaccttttgaccccaccccaacaggaatgtggtcaaacatagcttgggcaagttgctccttcacaggctggacatcactttcatctaaattggttcttagcaagcggacaccacagttgatgtcaaacccgacaccacctggggatactactgcttcagggtcattcatatcaaaggctgccatgttcccaatagcaaacccatatcctgaatggacatcaggaagcccaatagatcgatgaacaattccaggcagggctgccacattgccaatctgtttcatggctggcaggaagccaccaacaccaccacctcgacaggcattccttaattcctcaaacatcaatttctccagagcatcattcacatagaaaacaccttcaacctgcatgttgggcacgaagcccttcttgatcctccagcagtttttattgatcttctccaagaactgcagctcatcattatagctgcgactcatggtggcgaaaactgtagcaaaaactcccggctccgctttgaagagccgctgccgcgtagtccggcttctcagagcaccgccttccaagaacccc

SEQ ID NO: 311064 - DNA, 555 bp, Homo Sapiens
  misc_feature (94)..(94): n is a, c, g, or t
  misc_feature (139)..(139): n is a, c, g, or t
tatatatggtgacattcgcatatccagtcctattgaatgtgggacttctgacaatacaggtataaataccagaatcagcaacttcagctggtangaaacttcagaagttggcctgaggcaaaacacatgatttcctttncctgagtgggaaatacttttgtttgtttgtgaagtaataccaatcccacggtgtaactaggttttccttgtctaggacatcttacaattaaagcctcattttcccaggccccatgattgtttactaaactttgctgctgtggaatacatgagaattgtgagaattgctaagatccaaaaccccattctgtttatcaatcaagagcaagtattggtaactcgttgttgagattactccagatgagtcactggcatatgacagtgaaggtcaccacgcatgaggcagttggtgatactcttcaagactgagttgggaagagtagcctatatctcaaccaaactgaaagacagaggggatgaacttggagtcagtgacggagctaagaatagtttccagtctttgtaggtccctcctcc

SEQ ID NO: 311065 - DNA, 819 bp, Homo Sapiens
attttttaccccttaatcacccattttaaaaaataaaaacccacctacataaaatatgggcaaaatccaactacagcagaaacatttcttagcaaatatgattaaacattccaataaatttcatgagacatgactcacaaaaccaaagtacacactgccaaacagttattaacacaattcagtagaggtgtataacccaaaccctcagtgaaggcagaagaggcaaatggactcatcttaattcatggttagttgaaaaaatgctttatcaaaaacaagagtatcagaaccttttctgaaattgtatttagccttttgattagacctgccataagttcattttaggtgatgtatattttctcccaggcaggaggttataactttcaccaacgtttagccaggaaaaataaaaatgcctgaaacttagaacactgacaatgccagccagtatctacttccttgacgttactgtctgtttcctaatttggctcaatacaaattgtcatatacacctactgtcagcaatccagactgtggagctgagaacaaaggtgaagacagggtcaaattttagttcaagaatctaatagtcacaccttatactcagttcgacttagggtaaatcttttcatagaaaaagttttgtgcgaggatgtagaggtctccatctttttctcgaacggcatgggctctgatgaattggaactgctctagtgcaaattcatagaactcattctccattttccaaatatcagattgctgtagttttgcaatggtttgtttagtggggagtttcttctctgtgttttcctaagatga

SEQ ID NO: 311066 - DNA, 530 bp, Homo Sapiens
  misc_feature (449)..(479): n is a, c, g, or t
tccctttttttctccagtgtagggcacatagtcttccctgtctttatgctccaatgcttctttctccagatatgaaaggagatgctctctatcaaatggccctgtggtggactttgatgtctggttcttctgccggaaccctgcaggcagaagggcattctcggggtcaagatcgtccaaaacagtttccagttgtttcagttctgtttctgacagattcccaaggagctcatcttcatcaaggtctttgtacttttctaagtccttacggaatggcagtgccatgatgtgcagggcagcaagtcacttaatttttgctgttcagtacagtcagaagtgatctctactttttcttaaagctgactggcgcccgcaggggccgccgacctcttcacagacccacggaaactgccggccgcaagccgaggctcggttcccagcacccgccnnnnnnnnnnnnnnnnnnnnnnnnnnnnnnnccagacccacccgccagcagctccctcactcgaccgccctgtccccggccg

SEQ ID NO: 311067 - DNA, 532 bp, Homo Sapiens
acgtcttgcaatacttcttctataccatgctcttggaaatgccagaatttcactgagtcggcgcatatcatatttaaaggaggcagaccctatatcacaaacagcagatatatttattaacgtagtatccattttgcttgcagacttgcttacagactgactttcaaaaaatgaggcacctcctgaacgcctgatccgtgacaaactcacttttacaaactcaaggtttatactgagtgaatcttttcgaccagtgactgaagtgggctcctcatccacattccctaatcctcctgatccaggtgtgaggccagaaacagcagttttttgtttccctgctccatatggatgaaatacataaagggaaaagtcagacatgcatgcagtgaagctcaagccagatgaactactgctggaactggtcaggtctgactgactactactatgtcgacttcggccaagagggctgcctaatcccgatgaacctggtattccagttttgctagcagaagtctttgttccaccccggccg

SEQ ID NO: 311068 - DNA, 1317 bp, Homo Sapiens
cgggatgtgatgttagggcttttggtgacctcagggagtgtaagtttccagcatgtggggctctgtggctttgacatacggccacagaggctgcccagccggctgccacaggctcaggaagatagtgcacactatttggagcaaattcccagtgctgtaggctggtcactgtgaagttggctatcaatcggatgacctcagggtagttttccacctttaccaattctcccagttgatagttactcttcaatcgggccagtagtctgcaaaactcatggtaattgtttgggtctgataaactctgtgggttttccagtattcgtttaacaccatcaacaagatgagagagaaacttggccctctctgcattgttaaacagggatcttctgactgaagagatctgtaccaagcaggataataccagaggtgaaaatgaaggagggatggaatgatacaggtcaaaaaacagctgcaaggttgaagaatctaagaaggctgatctccagctggtgggaatctgcactgtacacaggtcgtctgaggactcatcagtggaagtgccgatgaagtcaaagttgaggcagttatgagtgagcttgagcagttgcatgagcaagccatgctgactttcatcattcaagtttagattctttcctgaagcctgttttagtaaattgcaggaaagtgtgaagatatcaaataatgatgaatcgcgaaaagaagaggctatttttctgtgcttggttaaaggatgggtggtgtctgcttgattaatttcattggttagctgagataaaattgtgacaccaatgatgcagtattcaacactatcctgtaaaaaccttgtgacgtctgtgattgcatttctgaagacatagtcatccttctgacagtcaaaccagcccagttttgtgattctggcatataactgaataagtgcttgtgtcacgaaagtagccaacttcggccgagtggcaaggtagttgagcacatagttccgaatatctattcgctgttccaatggtagggggttgtttgtgcgtgatacaagcttggtaaggcatgtagctgccagtaactgggagtaagaggaacttcctctttcgaggagtagctggcacttgctcaggcaatcagggctgttggtaaattcaaccaaggctttctctgcctggagtcgagtggttgtgtctgtggtttcatacagctgtttgcacagattctctagttgggccaggctcttcctccctggatccctcatgtctaaagttcagcagactctcttctgttgcactttaaactcttactttggttccc

SEQ ID NO: 311069 - DNA, 930 bp, Homo Sapiens
accaatcaatttgtaacttccctgcaacacttaggtttgtgaggttttaaatgtagcagccaaagattcagaaaaattaaaaatgagaaatatacatgtagaacacagaaatctttattttacaaaatgtactttgcctctgcaatattcttattttaatccataacaactcaaacataattggcaagaaaaaagtatccaatcatacgtagctatattctgatttgaaaaatacagtatttcagagttgcatgtttgattctctgctgtggtcttttatttgctataggttgttgaaatcacagtgagaacatctcaatcatcacattagtccacaaacataatagaaaaagaaggtattacacatttccaggtattctgcactatcgtgacattccttaaaaataagtcaaatttcttcattcattcatttattcacttgttgctgtatatgcaacaggaattcataatatgataatgcagattctgttctgtcttctatcatgttttgaagggaagtttgctttcattgggactctcatcccttattacataaagtattgggaaaaatggtctctgctctctaagccaagagatgaaagctattattctggcagattctggtgtatcaagttctggaaggtctgtcataggctgtggaattgatgcatagttttgaactcctagaacttggctgagaaagttctgtgtacaattttttccaacccaaagcatcagtacagagcctgcatccatgaggaaagctccatctctgctcagcttctccactgaaagctgaagaatggggggctgaggtatggttctatcactgatgttgagtgctccctcatctgagagattgtcaactctatacaaactgggatgagttgtgagcataaggtaaaccaagggctggtttttccccggccg

SEQ ID NO: 311070 - DNA, 1016 bp, Homo Sapiens
ggtgcaccgctgggctgcccagtcctgcagggtcagagcctggcgggagccctccacatggatgcatgcttgattcatggaacccaagtccattaaaactggctgcccctcatctccaagcaatatattggtgggcttcaagtctctgtgggcataacccttggcatgaatggcctcaaggcctctgcagatccccagcagcagccaaaggatttgatcctcggtcaggaagttgcctttgtccttcagcctttctatctcattccacagcgtacctctcttgaagaatggtagcagcagccaggcctcatgcttagcaccccgttccctcagacagtaagccacgaggcgaaggatgttggggtgattgaagaggcgatgcatgtcggcttctcgctgggcctcctcccggtcctgctgctcgtgacacaggattcgcttcagggcgtagaagtgtccatcatgtaacccttccactaggtccacatagctgaacccaccctcccccagtttctggatgaagaggtagcgcttattgtcaatgatgacagttccccgagagcagacacacagcgcgtggcccataatgtctcagtcatcctcttcaaggacggtctgaggctaccgaagagctcgtccagggtgagtgggctcttccaggagatgcgctgggggcccagcggatcatgactatagtgtagagaaaacaggccctgctccgtcgccagcttcaggggtggggtcaggcgccttacggcctcaggacacacagcggctaccgggccacttcctccaaccccagcccatctttgggcagcccccgctcccacgcccatcgcgccgcaaaagcagagcatagcgtagtttcagaggacgtgcgaggctcaggcccactcctggcagggcccaccccggtctaggagcccagagcccgggatgggccatctgcactgccggactgacctggctcgggccagagagaagcgccaccgaccggaagcagtgctgacatcatc

SEQ ID NO: 311071 - DNA, 794 bp, Homo Sapiens
  misc_feature (83)..(83): n is a, c, g, or t
  misc_feature (157)..(158): n is a, c, g, or t
ccattttcactgaggcccccgcaaagggacgagggtaacgtcaggcaagtccatggcagaatctgagaggcactcggtgcgcntatctgcagctgcgcttcccacggactgtggggactgggagccagagagtgtgtcagactcgggccactgcctnngaaccgggctccgattcacttttagggaaataaagagctgcaacttcaggttctagaccctttaagtcatcaaggtaaatatcatcaggtccctggtgttggattcttttgtgaacacctttcttctttgacggcgagtctactttagctgccggttttggattctgagggccgcctccgctaaggctgcgttgggaaggtggtcagcatctaacatagatgaaatctgagtactctcaagaggaggttcgagaagctctgccacagatgttgggtcgctcatctgtgtacccagggctctgggtttgggcttcactatggtacagacagtgtcttccatggaagcatccttctcaacttcactgatgaggttgtcctcactgggaattacccgaaaatgagtattttctgatggtgtaattgtagctgtcctaggatgatggtcagatcgttctcttttgctgaccttggtggactctgggaatccgccccacgtccactccatgtgatactctgatctgagcaggctctccgcaggtttcacctccagctctgaatcactcttaggacacgctgtctggggataggtggtctctaaaggggaccaatctccatcagataaggggtaatgatccc

SEQ ID NO: 311072 - DNA, 1003 bp, Homo Sapiens
ggaatttgccagctctgttgaaagaaaccaactttgggggtgtttgtggctttgatcccagggggctttaaaattgaaccctctgtttacccggggggtgggactcgtggtggttgcgggggtgttttatttagagtggaccggcccccgaaaagggaccaaggaggggatggttggatcagggattcccgtcttcaagtcttcggcattttcccattgcaatggataagggccaccgccataggagttttgatgtccaagggcaatgctctgtgatatccactcgccggtgccttcttccaggtgaagaggaagtatcctgttcccggcccctgggggctactgcaatgcagaggtacccgttgtaggtcatgaagatgagcatgaggaagtagcttatgaccacctggatgatgtgcagcactgtttgcaggaggtgaggaaagctcagcatctgttgcccaacagttttgtgtgtctccataaggatggttccatttggtcctgggacaggcatggaattgtagcgaatgctgacttgtgacttacgcagcaggctctctcgggctatcttgagtccttcatagaacattgctagtaaaaacactgccacaaaagctccagccatttctccagctgtattgatcaccaaaccggaaaacagtagttccacattcttaaagccaaagtagaaggtcataggcatcatcatcatgctgctgtctcctccaccatgggagtgtgaggctgaagtggttgggtgatggtgagaaggttgcatggtactgttggagtccatatagctcatccccatatggtgggaatgatccattttttccaggaaaagttgagagtcagcagaagattctttccaggtcaagtccagccactagcacctctctctccgaatcttaacccgtcaccccctcacgactcttcgaacggcccctccacttctacccggctcgacgtgtccaccaccgccaccgaggccgaggatttt

SEQ ID NO: 311073 - DNA, 796 bp, Homo Sapiens
cggccggggttcatttctccctctttagtattcctgtatattctacttttgtgaatatttggttgtttttagtaactgtttcactcttctgattactattttctctgtgttttgatgtaattttgtctagaaaaccactctataatacctataaggtaatcctaaagaaatattctttaagtgtttcttgtaattgccacttttttcctgtcaagtactttcagagaaactggatgaatctatatctgcttacgttttgctggcattgtatgaaggatacctgtacatatgatttagttaggtttgacaatttcatgaaaatagtgggttaaatgtattctctgttaattcacactattttaaatttatagcattcttttaaaagattctatacttaatataaaaataattatagattggttttttcttctgctgaggtcttgatttgcaacatgtttttcaaattgttaaaactgagctttttcttacctaggctaattgtgtaggcgtagttgtctcatcattgagtggagatggaagtatgccagtaatttgtgtcatttggaaagtgttggcttgagttaaagttagtgtcctataaatgtcatatataggtgaaggatactcagtgttgtggaatagctcaggaacaaaggtacatcagatgtggtctttggctaggtttctgtagctaccttttgattttgcagaaaaagccaccacgtgagaatggccataagcagataagtagcagttcaactggatgtctctctcctccaaatgctacagtacaaag

SEQ ID NO: 311074 - DNA, 586 bp, Homo Sapiens
gttgtggacaagctgtgcccctcttaacattcggagacaccagtctgcagtctgtgagcttggtggttatttgtacataatcggaggtgcagaatcttggaattgtctgaacacagtagaacgatacaatcctgtaatacctggactttaattgcacccatgaatgtggctaggcgaggagctggagtggctgttcttaatggaatgtatgatccaactagaaatgaatggaagatgatgggaaatatgacttcaccaaggagcaatgctgggattgcaactgtagggaacaccatttatgcagtgggaggattcgatggcaatgaatttctgaatacggtggaagtctataaccttgagtcaaatgaatggagcccctatacaaagattttccagttttaacaaatttaagaccctctcaaactaacaggcttagtgatgtaattatggttagtagaggtacacttgtgaataaagagggtgggtgggtttggatgttggctaacaggaacacaaagcttttgcatattgcatactattaaacatgctggtcatacttttttggtttaatttggaaaggttggtg

SEQ ID NO: 311075 - DNA, 591 bp, Homo Sapiens
cacaaaccaaaagtaataattacatcttaaacatggaactcttgtgcttacagataacacttacttgtgcctggctgtgctggatggtatattctgtgtcatttttcttcatgggagaaacagcccacagagctcaccaacaagtactccaaaactaagtaagagtttaagctttgagatgcaacaagatgagctaatcgaaaagcccatgtctcctatgcagtacgcacgatctggtctgggaacagcagagatgaatggcaaactcatagctgcaggtggctataacagagaggaatgtcttcgaacagtcgaatgctataatccacatacagatcactggtcctttcttgctcccatgagaacaccaagagcccgatttcaaatggctgtactcatggtaagcgcattatgttgcaggagcaacccctatttagctttttcctcgtaacttcaggatgttagaaattctcatctctcacttttggcatagggccagctctatgtggtaggtggatcaaatggccactcagatgacctgagttgtggagagatgtatgattcaaacatagatgactggattcctgttcc

SEQ ID NO: 311076 - DNA, 1613 bp, Homo Sapiens
tcctcccactgcataaatggtgttccctacagttgcaatcccagcacttgctccttggtgaagtcatatttcccatcatcttccattcatttctagttggatcatacatttccacacaactgatggcatgagaaccatcaaagccaccacatacaaacagttttccattaagaacagccactccagctcctcgcctagccacattcatgggtgcaattaaagtccaggtattattttcaggattgtatcgttctactgtgttcagacaattccaagattctgcacctccgattactgtacaaataaccaccaagctcacagactgcagactggtgtctccgaatgcttaagaggggcacagcttttccacaactttgttccaggatcaaatacatcacaatttttcagtcctttgttgacccatattggatcagagccaccaacgatgtaataactttccattcagagcacacactcctgcattgacaacggttagttctcaaattctggaacaggaatccagtcatctatgtttgaatcatacatctctccacaactcaggtcatctgagtggccatttgatccacctaccacatagagctggcccatgagtacagccatcttgacatcgggctcttggtgttctcatgggagcaagaaaggaccagtgatctgtatgtggattatagcattcgactgttcgaagacattcctctctgttatagccacctgcagctatgagtttgccattcatctctgctgttcccagaccagatcgtgcgtactgcataggagacatgggtttttcgattaagctcatcttgttgcatctccaagctttaaactctttacttagttttggagtacttgttggtgagctctgtgggctgttttctcccatgaagaaaaatgacacagaatataccatccagcacagccaggcacaagtaagtgttatttgaagtcttttctgaagcaacgattttccactcatgcttagggctttgtactgtagcatttggagaagagagacatccagttgaactgctacttatctgcttatggccattctcacgtggtggctttttctgcacaaactgaatgtggtcatcatcactgccaaacacctcagcctgtccatctagtaggttcccatcaagcagcttgtgatcagctgagtagtacaaggtttgaacctcttccatcagctcttccagactgtctccattctcccagatgctacgctgcacccagttgattacctttgtatataatttgccattgctgggcaagcaaacattatcttcaagcattacctccaactttagccttggaagcttaagaaactcctcctcttcagaaatttgtaacaaatgctcctgaatataagcatcaaccttattcaacaaacgggagtctcccatacaacttgcaaaatttcggtaagagatgcagctggtaacatccattctagacagtaaataatcaccacaaacctgctttactcgatccatcttcagcttttttcggacgcgtgggtccgacgcgtgggtcgacgatatcccgggattccggaccgaccagcctgctttgtacgcaggttttatatttcc

SEQ ID NO: 311077 - DNA, 927 bp, Homo Sapiens
  misc_feature (447)..(455): n is a, c, g, or t
cttctgctattaccataatattatatatattagaaagctatacacaagcatgttaatttcacagatttttttaaaagattcttaatattttatataattagaaatacacatttcaaaaacaaaacttctacaaagagaaaacagttatcttggttagcaaagcatggagttcttcatggcttagggtagtgctttctatacaaaaagtcctttttggttttttacaggactgtttaaaatattagcgaagctatcaaggggaaaaaaacacattttggcttaagtaaactacaaaaagccacaaatgctttgcaaactctgtcttaccttttatatgaaaataagcaaaatgtaatgtacatatttttatatttttatttaataagagatgcagacccagatttatttatttatttaattaaatatgttagccctccaactccacannnnnnnnnaataggtagtggtcctcttttaatggtctctgatcctttttaatgagtgccatacgccaagtgatagtgcctgcaggtttgtgagcattcttgggatgtcaggtgacctggtgtgttcctaacatttaccaatggccacccattaccgggtctgtccaagcatctatacatttttctatatgttgcataacggctgctctctctttcagtaaagatctgccgcttttggcaaatgtttccttttgtctatttacatgtaaataacgttgaacctgcaacatgacactatctattgtaacatacattttgcaaaggagcacaacagtgaaaagaagttagccttaaaatctattttgtacaagtgttctgttgtacaactcaagtgctaagcttatctcagcatttctgtttatctttagtactgtatcactgaggcaatttaaaagtacttttacaaaacagagtacctgac

SEQ ID NO: 311078 - DNA, 1318 bp, Homo Sapiens
tttgtttgtcttcacttttattgaaatacaaaatgttaaatatgcaagctgtactaatgaaggtgctccttgaagttgattaaggagggctgggctgcttgtggcttccattttcaattgccaggaaagaggtagaaatatcttgtcatggacagtcgttctatggtgggcatttgagctttggcccttggagtttcaaatgattgctgtaccttccgaaatacttcctctaggtggcagcaccaagaatatttctggaagcatgtgatgagttgtgtgatgaagatagagcccattgtgctgtctctccaggacacgttgtgtggcgttgaagagcagaaagcaatgaagtccttctccacgtgggtcttgtaaacagcatcttcctccaggttctcagatgactgtgaagaggccacttccaaggatgctggagagtctctgacccacagttccccacggtttgcacctctgcaggcctggacaatgatgaccttgggtttgtccttcagactgaggcagttgcggttgttgaatatctggaagatggtgtcataaagcagcacatctggttttttctcatcatgcacagttccgcagattccctccaggatgccatgagacatgagtaccaagaatgtgctgtcagaggacttgtgctctggtctggtagcaaatgccctcagcgctgactccatatccctggctgtcagattctcttctacatctacactatagtccagaccctcaagtagctccttcatccctgtgatgtcaaagtcagctccattcctcggaggcagatggtcaaactctgtattgcatatgatgagagccaggcgtgtgcggttgtttctctcctttattggatagatctcttcagctctttctttacatagtctcaggaattcttcatgaggacaaagcttgagggcatctgtagattctcctgactcaggtggtccagcctccatattcggatgagcttttttattgggggatatttggtctatgttaaaaaaggtttgaagaagcatttgtcctgccatacgttgcttctcttgcatagagtctgccatgacccgaactttgtcttcagttttagcatcgtaatatttctttttttcctcttccttccagttcagtacattttgttccaccaagttatccaaaacaccagtgaggaaatctttgcccagggattccaacaccttaagtggcttttttctgtggttgccttctgccatagggaacagcctctgtccttttttacagcgttggaaagagcctcagagtcaaaaatgaaagtaaactatgt

SEQ ID NO: 311079 - DNA, 719 bp, Homo Sapiens
agtaaattgcctatagaggtattttctgtatttccctagagggggaaatgtgtaatttctcaaaaggaagaagtcctcatttatccttctgaaccacaatcatatgaatccattcaattaatattaatcttatcttctattctccatcactctctacatctttctataattgcatcattttcttgtccgtataatacatcaaatgcagaggtgattttaagggagccacaaatcaagaagtctcaattcaataatttcgttaaaatgtaagaaatatatacggattaagaatattcttatgtaattatgttctgtttcaaatatcagtgaaaattttcatagacatttaaggggtaaaagacatttaacagatagaaaaaaatatctaccttttaaaaaatgaccttctcttttgtcctacgtgatttgttgagcagactgggttttttaaaagtttctgttgaaatgagcatgttgtaacatgctcatatcccatttcaattgacaaatatcacttggataataattgtatatcttaaatatgaacatatgaagcaatcagcagcagcatcctttcactgagcaaggcttaaaaataccaaagaatcagtgccagaagaaattctttaacttaaaatatacgtaatcactacattaccatataaaacaatgatttctaaatgctggaaagtatatatcttaatcatgagacgaggcag

SEQ ID NO: 311080 - DNA, 1107 bp, Homo Sapiens
gggacgctggcggtggacgcaggcagcatggaccacggttgctgggcggatggggagcgtctatggtcagttgccttagaagtggtgagatgggaagctgcagttggaagaccctggaggatgcctgacaaggggatgtctgacacatgattggagctctttttgaaatgtttcttgcccttcctggagcagaggagccattatttatgcagtgattatgcctgtcatcgctggtggtatcctggcggccttgctcctgctgatagttgtcgtgctctgtctttacttcaaaatacacaacgcgctaaaagctgcaaaggaacctgaagctgtggctgtaaaaaatcacaacccagacaaggtgtggtgggccaagaacagccaggccaaaaccattgccacggagtcttgtcctgccctgcagtgctgtgaaggatatagaatgtgtgccagttttgattccctgccaccttgctgttgcgacataaatgagggcctctgagttaggaaaggtgggcacaaaaatcttcatgagcaatacttcttagtagattgttttgttattcaaatcaagttctagtgtttttatgtgagattatataatttacagtgttgttttatatacttttgaataaatgtacactattaaaaataatcctctttgctgccaatattttttgattgttgattataaacatcctttgtttaaatatatttattactcactttggaatgtggggggggattagcttgtagcattgcaatagaagaaagagaattggaataaaagtgtccagcacatctcccacccgagaaggaaaatgcacactgttcttaggacacttccaatttcagcccagctgatcttgtccagctggagtcgctcgtttagctctcgtgagggcttggatggttgacatccaccgcagaaaatggtgtcatgtcctgatacctgtcctgttgtcctgtccatttatccaagacagtgagaggagccaggcaggacctccctgtgttaaagttgtctgacctgtgtaagataggcctgagctcagtgacctcaaaaggaccttttgaaaaccagtttcttcctactgcaatccccaa

SEQ ID NO: 311081 - DNA, 1250 bp, Homo Sapiens
gacaggatacgccttagtgacaaattttgccacactctgcatgttaataaatcctttccaaatggtgctgagtcgagacaaaaagagggtcgtgtctccctctggaggggaacgtgattctgaagtgctgatatttggtgacggaggaactgacaggtatcttgggtcaggagatgaggatggcttagctagtatggacttgggcaccatcacagaagtcaagacaggcttcggcacatcctgtctggcttccaccatgtgggtgctgtctgggcgggatgctgcggaggccacggctgtgcatgaactgcttggagcggtcctggggtcccggccggacactgtgacggtggtgaccaccccgctcccacaggaggctgggcagggggacaggtcttccagcggggagggctcgggatggccatctcctggaggcccagggaaatacgttctgtccacatttggatgagaagcactttctaggcctggctcagaggcaacttcaggcacagcctccggcatcacctcatcagctgaatccggagctgggtcaggtgcagagctgtcatgctttgattttaagtcttctttcttaacagaagctgacaatttttgttttttcggagctggctcatcttctgcggagggaacctggcctgtgcaaattttacagttgagatcgaagaggtgtgcgcggtgctgactggtggtgtctttcaacatgctgctgaagacgtcgagaagcggcgctgtgctcttctcagggacagcacgtgctgactcttgctgttcctctgaatccgacactggcggagagtcctccagatcggggatggcctcctgcctgggggccgtcttcttgctttcattgtgcagtttagttctggactccatcacagatctcgctggcctctctttccacgtggaaagctctttagatacaagttcttctggcttcagtctcacaagtttcgccaaagagatttcctcacgcagaacacgatggaagagtccctgatttttagggtccttcaggttgaacatgatgctgcgatatttactcttgtaagccgattatctgtaacttgaaacaagttaaacatctccttctcaatatggagggcaatttttcctacttcgttttctgtcatgattaagtcatcgctgtcattgactcttttccacaaaatctcttttaaggagcgtctgatattttgccgaatttgtgaatttggctgcgatcccggccg

SEQ ID NO: 311082 - DNA, 670 bp, Homo Sapiens
  misc_feature (653)..(653): n is a, c, g, or t
cccctttggctaccccatcatagttcctcctaaggctataccagataagccatacggagcagatgaccagcaagaacctttccagaattattattctaactagaatcttagccaagagaatggaatcaccacaaatgttatcatgaaaatcatctcaagtaaatttcctattccattcataccgttaagttgaggctcgatgatatacgaaaactttaactgaattgacttcataaaggcttaatggtcttcaaaattatgctggttatatgaattcttaaattcaagctcttttccaaataataaatgataaaacaacattttaattagtattttacgtaaaaatatatattaaaaagtaaatcaaggagctgatatcaatgtttgaaaattcatatataatttgaggatctccatgtagactgttaataatatcttgtcaagttgaagcttttaaaccaataatatagattttggaatttaaatgtggttcaaacaatcgtaattaaggtaaaagataatggacagctaccactagtctattcagagtaaggaaaggaaacaagttcctagaggactggcaagttaacaagtgttagtgttgttttatacaaattgtaccaagattttaaaataatccagacagtagtatnactaatacccggccgaa

SEQ ID NO: 311083 - DNA, 1224 bp, Homo Sapiens
gttaaattaaaaaaatatacatataaattaataaaaacaagagcaaacatcacctatatgctacaaaagaaggcaaagtagtcagacaggcctgggttatcaggactcccactctagggccattcttactatccataaagcacagcgattttactttggaagaggaaacaatctgctacaactttttaaatggcaggatttacacaagattgttcaatcttgtataaataacaatgactaacatttcaagtggcttaggaatcacccaaacaattgcatctgcacattttatatccacaaaaagagctgaagatattaaatgtggccataaacagaacctgggaaagttatacagtcacatctgtgagagacaatgaatccagaggtgtacacagtgtccaccaaggtctctgagatcctcatttctcttccttgtttgaggtatccatgctatcattcattttctgcttttgcattcgtgttcgagtagaagtcatttctgccagtttctgcctgagatttggactctcctgggaggatgtttacttccattctgcttcatctgatccttcaatatcaaagcgtagttttttcagtgttttaggagggttgcttccttcagcacttcttttgagcacacggtcgctgttacataccatctgatttattttctggaacttctcagaagtcccgaatgattcaccaattgatactaagattcttgatcttggagtcatttttgttggtgttggcagaccttctgaaattttatatggactcttcaggggtgaaatatagatgttccctccaggaatccgtaagggtgaactaggaaacttgtaagggcttcgaggaatgtgaggtattggtgacaaggtagggggcctggtggaagcatactgcaaatatttgttttcagtctctgcatgaagaccgagttatagaatactataatagaatcatactcctcttctttgatcaaacacgtttgaatgtctcctgaacagcatgaggaagatccttgtatgctgttacatgattttgaatttaaggtctatattcttcactttgcatatgccatacatggaacacatcataatttggtccaatgcctgtctctcatgagttcatacctcattctgcagggtgtgctggaaaagggtccagatgatcggacgcgtggtcgacgatatcccgagcattccggaccggtaccagcctgct

SEQ ID NO: 311084 - DNA, 899 bp, Homo Sapiens
  misc_feature (80)..(80): n is a, c, g, or t
cactgaaaaaggggactggtgcttttggtggaagagacagttgcgccattgctggtgcctgaggcgtcccccacttccantgactgtcttttcagatggtcaccctgaggggaatgtccaccccggagttttcactttggacgtctggctcaaatcaggttttctgatgccatgcataaggctgatgtggctctccagaagggagggccgaggaaagctggggctgtcctctgtgcagtacccgcaggtgtagaacttctttactgtgtcatggttgttgcggatgtgtttgcgcaggctgttgggggtgtggaaggactgttcacactgccggcatgggtaccgcttcaatgtccgaccgtggctctttttcatgtgggacacgtagctctcccgatctggaacccactcctggcactcctggcaggtccagccagtgttcctcagccgcggcctggcttccaccctgcggtgggcttcaggcctaccccagcggccagaaggcagggagctgctccgagcagccacactagtggctggtggctcagtgggaactcgagagccagggcggcttgaggatgtgtccgctgaagactggaggcttgacagctcgtccacatttcggggaacaccgtgggtgctcttgacgtgttgcatcaactccggcttctgcacgaacaagagtgggcactcagggcacttgaagacgcccacctgcgtcttgctgacattctggtaaaaatgctgctgaatgtgcctcttcttgttgaagaccatttcacaggagcacttataaatgagctgggagggtctgtggggctgggtggggtgctgggtggcactgtggtctgcagtgctgctggcagtcttgaaggccatggggcagaatgcacatttgt

SEQ ID NO: 311085 - DNA, 752 bp, Homo Sapiens
gagatagtaaataatctcggaaaggcgagaaagaagctgtctccatcttgtctgtatccgctgctcttgtgacgttgtggagatggggagcgtcctggggctgtgctccatggcgagctggataccatgtttgtgtggaagtgccccgtgtttgctatgccgatgctgtcctagtggaaacaactccactgtaactagattgatctatgcacttttcttgcttgttggagtatgtgtagcttgtgtaatgttgataccaggaatggaagaacaactgaataagattcctggattttgtgagaatgagaaaggtgttgtcccttgtaacattttggttggctataaagctgtatatcgtttgtgctttggtttggctatgttctatcttcttctctctttactaatgatcaaagtgaagagtagcagtgatcctagagctgcagtgcacaatggattttggttctttaaatttgctgcagcaattgcaattattattggggcattcttcattccagaaggaacttttacaactgtgtggttttatgtaggcatggcaggtgccttttgtttcatcctcatacaactagtcttacttattgattttgcacattcatggaatgaatcgtgggttgaaaaaatggaagaagggaactcgagatgttggtatgcagccttgttatcagctacagctctgaattatctgctgtctttagttgctatcgtcctgttctttgtctactacactcatccag

SEQ ID NO: 311086 - DNA, 708 bp, Homo Sapiens
  misc_feature (33)..(33): n is a, c, g, or t
  misc_feature (434)..(460): n is a, c, g, or t
actgggacttcacaaggctcatgaagggtttgncactggaaagggtggaggttgaggcactggatgagaggatgggagacttagaaggagaggacaatggggaggaagaactggttttctgctcagaaagggatgacacactgggagagctagctaagggccccgacgaagacgaccctggggacacagccaatggcactgtacttaatacttgtgctgctggaacaggggactccaacagctttacagtgttcttggagacgggcaaaatggcaggggcctgggacacggacagtccatctgccaggacaggcgaggcagcagggccggcggggtcatggccaacttggggttcaagatagaggtcttccttggcttccagccctgttacaatgctttggtcatccagcccctcctcaaagtactccctgaannnnnnnnnnnnnnnnnnnnnnnnnnngccggatgccgagaagtgaatggcgatggtatctcgggacacggacctctgcacgtgcactttaggggctgatggttttggcatgtcagtggttttctcggcatggcgaccatacagacttgtcattgccggcttcacaagggctcaggctccaagatccgctggctgcctcattgtactatgccggcgcccgtgctcccggccgcgcgactccggcttcggctggggcaccggccgcggtcctgctc

SEQ ID NO: 311087 - DNA, 582 bp, Homo Sapiens
ttctcctaaataaacccagatttcagataggaaaggggtgagttcaggtccatctttgctttgtaatatctcatcgagagttcaaaacccttatcaggagttctttttcacctccaggatacaagaattgccaacacgtcatggtaccccattatagcttttgggggaatttataaactcatattctttctcaacaggttagtatattgcaggtctcagtcgataatctgacttttttctttaaagagttcctaccccagcctaatgatggaatacttccccctagctctaaccccaaaaatctgtaggcatattctggtgtttagattgaagtagcatgtagtataatgctaattttaattaccagtgatatagtttggatctgtgtccccaccaaatcacatgtcaaattggaatccccagtgtcagaggcagggactggtgggaggtgattggatcatgggagcagtttctcatggtttcacaccatcccccttggtgctgtcattgtgacagtgaattcttgtgagacctggttatttaaaagtgtgtagtaccttcactcatccctctcttcctccc

SEQ ID NO: 311088 - DNA, 683 bp, Homo Sapiens
  misc_feature (655)..(655): n is a, c, g, or t
ggtttttagaagtgattttcattcattcacccatccattcattcatgtgtttgttcaacacatttttattgagcgtccttgtggacgtggcacagttccgagtgcagtgaataaatgtctccccctccttgagcttatattctatttttatttttgatgtgtcatagttacttctgttaatcagttcagtagaagtgctgagatactctgtgacaaaacagatcccatcgacatcatttttacaaataagaccagatgtcctttagccttgtcaacaggcttgggccatggtgaacaatgtctgcctctgaagtgctcagcagaccgtgtgaaagaagaaggtccgggtgtttggaaacaatggctgagtggcggtagtggtgcattgtgacctcattattctgcttttggtttctcgccttgtaatatgaataaggcacatgaggatttagtgtgtgtcataagataagtgactgtcacgttaagcttaatgtctctgtttctgtaactttcttccctgtttttcgtaattctttcctttgtctttcctgcaaaagttaaactgtgattattggaaaataaaaataattatgcagatcaacttaacagttttctggatgaagaaaaacaacctgttgtcctttatgtactttantcctcccctgcccaagggaaccggcaag

SEQ ID NO: 311089 - DNA, 905 bp, Homo Sapiens
  misc_feature (14)..(14): n is a, c, g, or t
  misc_feature (568)..(700): n is a, c, g, or t
tcactgctcaccgnctgagggaggcatcagtttcccgtagacattccaccacagtgggccgatgccgctgcacagcactgtgatcagactgcaccagtcgaagcagtgatgtcagggctacatacctggtcaggatgggggaggttctatcataccatggccatcagcccccactccccgtcctgtcctaatgttcctgtcactgttgagtaggaggcgaccaagaatgttgacagctagaacctatgagaggcagaagttggggtcagtcggaaaggagcaacctgctcagccattgaggactgggaacacattggcgcaagatgatggggctaggagggagaaaccagcaagcaggacctgtgtgggtgaggtggtgggcggggccgtagtgggagaggcataaggggtgatacccgtaggccagctgcagagcggatatccatgatggtgagtactgtctcaaacaggaccgcatttccggcatttcggctggtgtccgtgttagtggccacctgagtggatgagagaggagatgtatctgctcaaggccctcctcaggtctccnnnnnnnnnnnnnnnnnnnnnnnnnnnnnnnnnnnnnnnnnnnnnnnnnnnnnnnnnnnnnnnnnnnnnnnnnnnnnnnnnnnnnnnnnnnnnnnnnnnnnnnnnnnnnnnnnnnnnnnnnnnnnnnnnnnnncctcaggattcttgaaggactccaacatgttattgtccatccttcaaccatccaacaaagttccctgaggctctactatgtgccagggccagcctgggcactggggcaatagcactaagacagactgtgtcccttcttcatggagttcaccgtctagaggagatggagaggcaattacacggccactgcacagtgacgagtcatg

SEQ ID NO: 311090 - DNA, 742 bp, Homo Sapiens
  misc_feature (174)..(209): n is a, c, g, or t
  misc_feature (415)..(447): n is a, c, g, or t
  misc_feature (619)..(619): n is a, c, g, or t
  misc_feature (682)..(682): n is a, c, g, or t
tcagtcttcaggagacatatgaagcaaaaaggaatgaattcctgggagaactgcagaagaaagaagaagaaatgagacaaatgtttgttatgagagtgaaggagaaagaagctgaacttaaggaggcagagaatttttttcacgagaagtttgaccttctaaagcggacacacnnnnnnnnnnnnnnnnnnnnnnnnnnnnnnnnnnnngagcttgaggaggaggtgaacaacttccagaagaagaaagcagcggctcagttactacagtcccaggcccagcaatctggggcccagcaaaccaagaaagacaaggataagaaaaatgcaagcttcacataaagcctggcaagccaaggatgttcccgcattcacctgcttttgcagtaatatcgtatctctgccatgtgtgttcnnnnnnnnnnnnnnnnnnnnnnnnnnnnnnnnnacccttcctcaaacaccagtaactattattaactcgttttgctgaatgttgttgggtggtaaaaaatgatagaacaagggaataaccgcgaatgctctgtgcagctggactctgtttccggaaagtaaatgatttgctttttatgcctgttctgaatggcagcacgaagcangcctgttacttgtatatcgctttggacagaggaaagtggggtaaaaagctacctgtacgtctnacatgaaacttctcaccgcctcagcagctgaactaaaaacctgaatagccatgacaagag

SEQ ID NO: 311091 - DNA, 865 bp, Homo Sapiens
gaaaccctgattattgttagagagttatttccacgaagtgtttgtcagtttgttggacatttgagaccccaggaaatcccctttctcgtaacgttctccgcttggatctgatctcaacagggtgtcgtagtcattcttcagcacaattcttaattggagaccaagaaccctgggcctttagaggtggtctagcaggagagttccaggtatcaatatgaattcacaactgaattgacattttctttgttttatgagaaaccttatgttgcgcatcagatggctggaaggattggtctgccgaaggctttctagtcccaaattcaatttagttacatagctggatttttaaatcaaattttcctcctctttcacagtaatttctgaaggagatgctgccaatcccccccgcgcctgcgaagcgcagcggctctaggtatacacttcacattgtttctttgcaggtcgcacagcattttaatctgcgcccgcaatgcacaatgcgcgcatgcttgtctgccagtggaagctccatgaacgatagtaattatgccaataaatggtgaaagagcttttggatatttatccaattattttataaatataatgtgcttgaaagaattgtccattgctgaaaatatgaacaaaataggaagtttttttgctgctggaatttgttcatggactttctaggtgctctacttttctccccccaacaggtgctctgctgcgcacagcaaactgaagcgcattgctttggggataaagcgtctcctggacagataaccctcttcagaccaaacctctcctcctgacattctgttctgccatcttatcgtagggagatggtctatctaagataggtttt

SEQ ID NO: 311092 - DNA, 1161 bp, Homo Sapiens
  misc_feature (17)..(17): n is a, c, g, or t
  misc_feature (592)..(655): n is a, c, g, or t
ttttgcccccgtttcgnttttcaggggtttgaaaagggtgtaagcccaagcttggatggccaaaatttcccagggggaaggccaaggattgccccaaaagttccgggtttatccaattcttaggggaggaaattccagcccagcccatgggtgaaaaaaaatgagtcccttgcccggcttatgtgcccagtttcatggctcagggaccccttaaaaaccaccggattgtaaattaaaaaatacaggaaggcttgcacaatcccgttgaaaggaaaaagggtaagctgtaaattacggggttaaagtgtgctcattcgttcagaaattagatacaaacatgcaagaattaaagactctgatttaataaaatcagtagtaacaggtcttgagattaaacaactgacctgagggcaaatgggaccaatcagtccctgaaccctacctgacatgtcaaatccaacatttcacatggtgacctaatattgaggttaatttccagaagtagctgcacttttcaacagattaagtcctacaaaattaggctctcgtaccccaaatggtcatggcctacgcctaggtgggaggcactttnnnnnnnnnnnnnnnnnnnnnnnnnnnnnnnnnnnnnnnnnnnnnnnnnnnnnnnnnnnnnnnntccacttttcactggtttacattattcaaagtgccattctgaaccaacaccctttcatttatagaggaaaaaaatttacaaaaacagtaaacacagaggatagtcaggttacagctagtttatatacaaagaaatttacaagtttgtcaattgtaggcttttgccacaaacaaatgcacatttgtccctacaaagtacaacatgcctgaaccaacagtcattacaggagacaattggccgcggctttacaaaaagcagaataactgccccaaattgaaattatttattcagcttaaactaatgccacaaccatcccacttggaatcactccaccctgacacttctgaaacccactctctctctctttcatctctgccatgtcccctaagactgagaggcatttcactcatataacacaaggaagatgacagatgttatcttgattactctcaggtgagaaacgcaaccactctggatctcgtgccgtattcggcacgagctcgtgc

SEQ ID NO: 311093 - DNA, 1404 bp, Homo Sapiens
cgctgccatgtccccgaagagtgagaggcatttcattcaataaaccaaggaagatgacagatgttatcttgattactctcaggtgagaaacgcaaccacactggatgcagaaaatagtgctgactacatttattgaagactctctccctgtataagcccatgtaaaaggtctcagcacctaacacaagactcaaaaaggaagcccacatctctctttcatacaggatttgctgcaatactatattcttccaaccagtgagtagtctcaaagtgtgatgggtgagttttacatagtcttctttgtttcgaatccaattggctgatttgttaccattctagaggctgaactgtatgaagacctcaactaccattcacaaggtgcagttaagagacttttggacagttcacagtgtcaacaaatgtcacaggctccgaccaagtataaccacatcctttggaaatccttcccatttttgccaatttcaaaacatcctaacttgctgtaaaattccagaattcttttatcatctgggtctcacttcacagaaaagtccccgggagccattagccttcagtgaagacaggaggcaagccatcatgcttttggccacacttgggtcagttacttttttgtgaatgtccatctttatcagagaagggaaattagcaaggaaagtttctggcagtacttcctgttcttcatggaaactcaacattattttctcagcctcagagagttccttgtcaccatttggcttggtatacttctcctgcatgaaggggatccaggaaattttacattttttaataaagggggtcacatctacagtgcccaaggcataaccacatatgccatcttcatcttctaggacaaagcagtaatccaggctgagggaaagcagccctcctactaacttgtctccaataagatcaggctgactttgaaagggtaaacccactccatcgtcatacatttctctgcaaatcttgtacacggatgcctcatccttaggaaaataaggtctgatagtataaactttggaggtaggagtcagtggaggtggctgaaaaaagagatcatttgccccatcaattggcagcaaacgctggaactctcctgctagaccacctctaaaggcccagggttcttggtctccaattaagaattgtgctgaagaatgactacgacaccctaaccactgtacaaaagacttcaccatagacattatactcttgatatcccaaacataggagtacatgtcataaagaattgtcctgttggcacaattggagagccgagtgaacattcccatcactagtccacacatctcttcaaacttggctgctcgtgaccgccattcttcaattttttcagagcctcgtgccgaattcgccacccaggcc

SEQ ID NO: 311094 - DNA, 1679 bp, Homo Sapiens
  misc_feature (1220)..(1220): n is a, c, g, or t
  misc_feature (1290)..(1290): n is a, c, g, or t
  misc_feature (1402)..(1458): n is a, c, g, or t
gagggacacataggcggaagtggcctgcgggcgccggagttgagagtgctttccggggaggcgaccgccgcggtggaaagtgcaggagtgggcgaggaggaggaggaagaggaggtgatggcgacggaccaggggagggggagatgctccgtctagctcagacgccacgcaggctgccgtcacccttccgggtgacataccggccttggggccatgattgattccggagcgcagttaatcaaggcataatggcatggacttgacacagcaagcaaaagacatacagaacataacagtccaggaaaccaacaaaaataactctgaaagcattgaatgcagcaaaataacaatggatctcaagttcaacaattccaggaaatatatttctatcactgtgccatccaaaacccaaacaatgtcaccacacatcaagtcagttgacgacgttgtggtacttggcatgaatctcagcaagtttaacaaacttactcagtttttcatatgtgttgctggagtttttgtattttacctaatttatgggtatttaccggaattaatattttcagtggagggttttaagtcctgtggctggtaccttaccttagtgcagtttgccttttactccatatttggcctaatagaacttcagcttattcaggacaaaaggaggagaataccaggaaaaacctacatgataatagcttttctaactgtgggtactatggggttatcaaacacttccttgggctacctgaattaccctacccaagtcatcttcaagtgctgcaaattgattcctgttatgctaggaggagtttttattcaaggaaagcgttataatgttgcagatgtgtctgctgccatatgtatgagccttggcctgatatggtttaccctcgctgacagcacaactgcaccaaatttcaacctgacgggtgtggtgcttatttccctggcactatgtgcagatgccgtcattggaaatgttcaagagaaagctatgaaacttcataatgcttctaattctgaaatggtattgtattcgtattcaattggttttgtatacattttacttgggattgacatgcactagtggattaggccctgcagtaacattttgtgcaaagaatccagttcggacctatggttatgcgttccttttttccctcactggatattttggaatctcctttgttctggctttgattaaaatttttggntgcacttattgctgtaacagtggacaacaggaaagaaaagcaatggccattggtactttcgtttatattnctttgcttaaccattcaccgtttcagtaagtacttcttaattaaacaatttttctcagtttttagatactgtgtttcacatttcctcttaatcttaatttcaacttttctannnnnnnnnnnnnnnnnnnnnnnnnnnnnnnnnnnnnnnnnnnnnnnnnnnnnnnnncctgttatgctttataaagaaaccttttcatcttgatctcttaactatcagtgtgtcttctgctattttggaaatgttggtaatttattattttgaatttatcattttgtatacttaaattgcctaaccagagtccagtgcaaatgtgacctgtttccattatgagtgaatatgagtgatgtgtacgttgttgagattaagggattccctttgccctactg

SEQ ID NO: 311095 - DNA, 943 bp, Homo Sapiens
cagggaagccgaaacgaacttccctcgtaggaaaaaaacatcccaactggatcaaaaaatcgaactgtgcttggcccagatatttgtctttgtacttcttcttccttcccaaagggactgcagctcggggttcgctaggagctgactgagccatacttgccactcgccattcctgcagctcaggggaagggatcaatcctgctgactccttggaggagccttccacccgtccctgccaccaattgctgtcatccttgttgataatctggataatgtccccagtagcaaacttcagtcccgcctccttgcaagggatcagattgtcctttttgggatcatagtcaaactgcgctctcatgaacatctgtagtgcaggaagacggctttgctggttgggaattacttttaatgagatcattcctttggtttctttcatcgccttctgcagctgatccactgaatgatttgtcacatttgtgccattgatttctaggatctcatcccccacgtgaagggagccttgtctatggatcatgccaccatgaagaattctggccaccgtacaggactgtttttcattcagcttcagagtgattcccatgggctcttctgtgaccttctcaaactgtatgagtcgcactttccgcacctcctgtcccttgacctgggcagggctacctggggcaggagacccgttggtgtacatgtcctcggtcacagtattcaatggatgcgatacagcctctggccgactacgcttctgcagcaaatgctccaggtagaggtcggagagcgccgtgtgcatgctgcccccactctcgccctcgctcgccttgagggtcatctcgcagaagctggaacactggaacgcaagacagggcagcgctgggaatgacagggcccggggctgcggggctgcggagaaggcgggagacgcggtgcg

SEQ ID NO: 311096 - DNA, 1501 bp, Homo Sapiens
  misc_feature (1458)..(1458): n is a, c, g, or t
  misc_feature (1472)..(1472): n is a, c, g, or t
ttttttttggcatttcaacacagcatttttattgcttttgaaggtttccctagagcagacatcattctattgcacagatgtgtcattttggcattatagaaagttgcagttaaaaacgctttctccaaaataaaaagacaaatgaaatacccagcatatacagttgaaggcaaaggagggcaggctttagagggatggggtccattgcttttgctgtgcatcacccttgattagcagttacattttggtagtacttcttacccccaatttctagaaatccttttcaaatccagatcagtggggccccatctatcaggagaatcaacccttcaggagcctgagcaagaagactgaaccttactggctgaattaggatagctgcagagagctggaagctgacacaaaactagttggagcagccctgtttgtcttaaagcaaggcgggtggaattccaaatgctggagaggggcatacagtgggttcccccattctacaagcttagtaaacccaggagacaggcacccactgtggagaactgcacgcttggtcgaaggcttcttgtaatttcttaagggtttcatcaacaccattattgaccagtgagaggtcaaagtagtgagcgtactggctgcggatggcctcagagtccttctgcagctgctgcagggcttctgtctgagtgccctggtcagtaggtgcaatgaacacaatgaaaggcgaaagttctgctgtccgaacaattttcagggtctggggctcaatgtcaaggatggcaatcttgttctgcttatggatctggtgcactgtttcaaatttggtgccaaacatgttgccttggtagctgccaaactccaagaactcattggcagagatgttcctcgtcatctcctccgttgagataaagtggtactccttcccatcttcctcactcttccttggcggccgtgttgtatatgggacagggtacacaaacttctcccggattctggctgagcagggcattcttaatgtggctgcgacccaccccactggctccgatcagcaccagggtcttcctcttgaatgcagggagccgaacgacttcctcgtaggaaacaacatccaactgatcaaaaatcgagctgtgcttggccagatatttgtctttgtacttcttcttcttcccaaagggactgcagctcggggcttcgctaggagctgactgagccatacttgccactcgccattcctgcagctcaggggaagggatcaatcctgctgactccttggaggagccttccacccgtccctgccaccaattgctgtcatccttgttgataatctggataatgtccccagtagcaaacttcagtcccgcctccttgcaagggatcagattgtcctttttgggatcatagtcaaactgcgctctcatgaacatctgtagtgcaggaagacggctttgctgctcgtgccgnctcgtgccgaattncttggcctcgagggccaaattccctatag

SEQ ID NO: 311097 - DNA, 1118 bp, Homo Sapiens
tgtgttggtgcctatattctataggaacattggtgagcaggaggagcaccagctcagtgtgctggtccttcatcagccaggtggctgggatggtccttacctagggaggtgggacagagctgggtggtcagaaagagactgtggctggtacctggggccattttgcctgaagagagtcctgggcgccataagtgggttctgactcgtttcctccacagtgaacttgctgactgagaaggcaccttggaactctctggcctggactgttaccagttacgtcttcctcaagttcctccaggggggtggcactggcagtacaggcttcgtgagcaacctgcgcaccttcctgtggatccgggttcagcagttcacgtctcggcgggtggagctgcttatctttttcccacctgcacgagctctcactgcgctggcacctggggcgccgcacaggggagttgttgcggatcgcggatcggggcacatccagtgtcacagggctgttcagctacctggtgttcaatgtcatccccacgctggccgacatcatcattggcatcatctacttcagcatgttcttcaacgcctggtttggcctcattgtgttcctgtgcatgagtctttacctcaccctgaccattgtggtcactgagtggagaaccaagtttcgtcgtgctatgaacacacaggagaacgctacccgggcacgagcagtggactctctgctaaacttcgagacggtgaagtattacaacgccgagagttacgaagtggaacgctatcgagaggccatcatcaaatatcagggtttggagtggaagtcgagcgcttcactggttttactaaatcagacccagaacctggtgattgggctcgggctcctcgccggctccctgctttgcgcatactttgtcactgagcagaagctacaggttggggactatgtgctctttggcacctacattatccagctgtacatgcccctcaattggtttggcacctactacaggatgatccagaccaacttcattgacatggagaacatgtttgacttgctgaaagaggagacagaagtgaaggaccttcctgagcagcccccttcgcttcagaagggccgtatt

SEQ ID NO: 311098 - DNA, 490 bp, Homo Sapiens
  misc_feature (17)..(17): n is a, c, g, or t
  misc_feature (476)..(476): n is a, c, g, or t
aatgaacaattggtccnctgcctttggggaatgaatgtccctaatcctgcctccccccaccctgttcactctcccagccctgacccattgtggtccactgagtggaagaacccaagtttcgtcgtgcctatgaacacacaggagaacgctacccgggcacgaagcagtggactctctgcctaaacttcgagacggtaacagagggcccggtggcagtggtgtgaggcgtggagatgtggaggagtgtaaccaggaccactggggctgacagagagctggggttgtgatgtttgtgtgtgatgtttgaactcaggaaggaggattgagagttggggggaatgacccgagtgccatgtgctgtgcccatgccaaataaatttggtttgaattcatcaggtgaagtattaccacgccgagagttacgaagtggaacgctatcgagaggccatcatcaaatatcagggtattgaagctcnatggctgtgccgaa

SEQ ID NO: 311099 - DNA, 3010 bp, Homo Sapiens
aaaaggcaatttatttatgaaatttattttcttatataaattacttatttctctgggcagacagccttcaccttattgcactaatagcacatctgtaatatcaagctacaggacaagtcttaacaagaggtttgtgttcttcaatgtagcacttgtctaccaggcactgtagaggggagtgatgaggaaaagccaggactgcttaggaggtgaaggatgggaggggagggggtcatcatacatccttctgacaattggtttcctcccaggaaggggaacatgcagagcttacttctggattctgggagtgggaagagttgggaggccaagaagcccaatgcaacgctgcagctgagctccttttatttctgagggaagcaaggactcatcttttgctcatttgtaacaaatcactccagcctagctgatgctttggggtaaacaatggagtaggagtcatcatcagaattagaattagcagcaattaacaggcaatacactgccacagtgaggcgggtgtcatccaggtcctggggacctgcaggctgtgtatcctagggagaggtgccattcaagacctggcgctggctctggaagagtctcttaacctaatgcagctgggactcattaggctcagacggctcttgaccacactaattattagcaaagctctggtgttgggttccaaccattggtcaaagctgtaataagactgagtctgtaggcagagtgaagggggtgcctgagtaggaagggggaggcccgctgggagagggtcagtgggcagtgattgtaacatgattaggccttccttgcagatggcggctgtgctgaacggggagtggggttggaaggagccacaagccccctcactctgcctttgtactacactgaagacaggttgctcacatactctaaagcacattcttgatacaggaagaagggcttgtggggaaagcggcgatttggtattgggcaagagccacgttaagccttcatgagggcagccaccacagccttggcattgaggctgcgtaggtcacagtaggtctggccggtgcccacaaagacgatgggtttgcttgtgatgtacgtcatagaaatagcagctcccaccttgtcatcaatggtatcaaatttggtaagaacaatgccatcaatgagccgaggtgtctgagccatagaatggtcagccaaggctctgttgaacttgaccagctggtccacggcttcattgcctactaaggcttctcctacaaacagcaccaaatcaggtgtattgacagtaatgagtttggccagggcagtcatcagaggggcattgtcttgcatgcggcctgccgtgtccaccagcaccacgtcaaagccttggttacgtgcaaaagcaatggcttccatggcaatgccagcagcatccttgccatagcccttttcaaacaactgcaccatggtgcggccaccatgcttctctggagggtgtagggcactcaaacgccgggtgtgtgtacgcagctgctccacggccccagcacgaaatgtatcacaggcagcaatgaggacactgaagccattctctaacaaccagaaggaaatcttggcaagattagtagatttccccactccattaacgccgcagaaggtgacgacataagggcgctggcgacgctgggcatccatgatgtcccggagcatgtctacacgacgctgtggctgcagaatctgcaccagggactcctgtagggcttgctttactgtggaagtcaccgtgctgaacgtccccatcaccttcccttccaacttgttggcaacagattcacagagctggacggcaatgtctgcagccacgttcttagcaatgagatgatcacgcatcttgtccagcacagattccatgtcttcacgactcaagctctttgaacccacaaggcccttcagcataccaaacatgccacccagtgttcccttggtcgcactaggtttggtagagttttgagcagccccttcgtcatcagagctgctgcagtccagatcctgaagctgccccccagacccagtccctcgaatcaggttgatgtcctcagacaaggcagcctcaggggttccattggtggtgggagtactgtaatccaacacttctttgttagcacagccacccagttcccacacccggggtgcttttttgcccttctcctttggagcatctgacttcgtggacttgttggacttctccatacccctcccatgcttctgaatgaactcctcgcgcttcctgcggatcagctcctctttggaaagttctactccgttctcaggacccactggaagacctgacttttctgcagggactggtttgctggtagccaaaggaccatcagaaccttccttcttggcccccttttttttgctattctttgctttttccttgggcttttccccccgtgtctcaatcatggacctcacaggtttcttggccttttcagaatcttcaaatttcttcatggtagtgggagcacggatcttactgctctcctctgcttcacgaaggagccgcaggaagtcattttggaaatcaaaagtgccatttaataaacttaaagcactttgctgttggatctctgtgcggtacttgtcccgaaacagccgatgcacgtcatctatcaatttgtctacatatgtcagtgtcaggatcttctgaaaaccaaccacaaacaccagctcaaactggttgtccagtttatacttgagtgtgagtgcctcatgggtgaaggagttgttacctccccgttcctgcagcagcacggaacgaatcaacgcgttaacgggtccggtgcatgagtcgctaacgccctggaagcaccagagcacaagcccgcccttggagaaaatggtgaagaagtcgagcatggcggcagcggcagaggagctggggccggcgccgggaattcaggccgcgttcgccgccgcttcctgctgcgccaagcgcgggacacgtcacaccagtggccccccc

SEQ ID NO: 311100 - DNA, 1016 bp, Homo Sapiens
  misc_feature (633)..(633): n is a, c, g, or t
gtagtgaatacagaccatggatcaccagaacaactgcagatcccggtgactgactctgggaggcatattttagaagactcatgtgctgagctgggggagtccaaagagcacatggaaagcaggatggttacagaaacagaagagacccaggagaagaaggcagagagtaaagaacccatagaagaggagcccactggggctggactgaataaggataaagagacagaagaaaggactgatggggaaagagttgctgaggtagcacctgaagaaagggaaaacgttgccgttgccaaactgcaggaaagccagccaggaaacgcagttattgataaggaaactatagatttattggcgttcacctctgttgcagaactggagttgctgggtttggagaagctcaaatgtgaactgatggcccttggactgaaatgtgggggcactctgcaggagcgggcagcaagactcttctctgtcagaggactggcaaaggagcaaattgacccggctttatttgccaagcctttgaaagggaagaaaaaatgagtatcatcagagctgattcctatttgtttatagtgtctaccatctacaacctgcataatgtggactcttgaccagtattcctgttgnatattaaagctaactttttagtaacccaattctaactatcccctttttccttgtccgggctggtagaattaatgtctgaaaccatctgggcctttaattttctttgtctggttttctatagtgtatttaataaatatagggctattcacattttttggtttgatcttggtgtcatttaggtaatgaatctatccaagaaatctatcctttgacccaggttatcaaatttgtagacataaggttatttataatggtcccttcttacccttttaatgtctttaggagctgtgttgataatttccttttcattatgatactggtaatttctgttctcactttcctaatcaggttgggtaggggtttatcagttttactgatctgac

SEQ ID NO: 311101 - DNA, 1059 bp, Homo Sapiens
  misc_feature (37)..(37): n is a, c, g, or t
aacaacaacactcccatggtgtcccaagcccaacccnaatggaaaatgccaggatgtaaccgtttccatgccgtaatggactcgaacccactcaaaagacggttcgatacgggatcccatctgagccactcaggctgggcaggcgaagagtcaccctggggtcaaagttggcaatggtccgcagggagtgggggttggcaagcagttgctccagatgtgcctgaagcttctggaagtgtggccggcgggcacggtcatatgcccagcagttcttcatgagctcatacagaggggcagggcagtccacaggagggggcaaccggtacccatcctcaatgctcttcataacctcctgattgctcatctccccataaggcttgtcccccaaagctcagcacctcccacatcacaatcccaaagctcccacacatcgctggctgtggtgaagatccgatgggcaatggcttcaggggctgtccagcggatagggatctttcctccctgggtttcgtatgtgccatcaaagtcatccaggaggcgagtcaggccaaagtcagacaccttgcagcacaggttttgattcaccgaagatgtttctggcagccaggtcccggtggacataattgtgattactgaggtagttcatgccagatgctatgccctgcagcatggccactagctgcccagggaccagctggtcctcccgctccctcaggaaggcatccagggctccattctccataaattctgtgatgatcatgatcggctttcgctttgtgacgacgccttccagatgcagaatatgcgggtggctaaactggcccatgatagttgcctctcgaaggaagttccaccactggccacctggggatgtgtcttttaaggtcttaatggccacagtcttgcagtcctggctggggagcctcagggtccctcgatacacttccccaaactctcctgggtagaaagaaaacaggctgtggcccgatgcactgcagggctcctccaggggaccaggcagcaacccctccagtcctccggcccttttcttttctcccc

SEQ ID NO: 311102 - DNA, 711 bp, Homo Sapiens
acaaggtgtttttcgtcttgttttttattgttgtttgagttggtcagtttgatttcattttaaggtaaaggaggatacaaagttcactacttgaaaataattgattaagaaggcaatatgacattttcatgctagtttgtgtagtaattttactgcataagaaattacagagattgcataaatcattaggtcaacagcatacagagaagaacaaaacaaaacattgtttggatcaaataaaaaacagcaggaacaactcaattcttaaaaataccacgaattccccgaatgtggctccatttgatagaaaattttgcattttctggataatgtctgtagttacattaagcaaaatggaaaacggccttcagataaacacactaaaaagcagcttacacagatgtgttgccctcttcaccttggatgtaacaaaaataaagatgtgaggctgcctgctcttgcctaaagcatggcttgaactttcaattgatagtaaccgcttatgaaaaatattacattacataatctcctgtgtattgaaattgcacaagtcagagcatccaaaaactgcgagagtcaatttcttcctatggggaaaagcatatagatatactatgttaaaacttccattcctcattcgattatttgccctattcaaaacataaaaatacaaataaatatttccttacaaagttcacagtatgttgtttt

SEQ ID NO: 311103 - DNA, 831 bp, Homo Sapiens
cgaaaacatacaggtgaaaaaccttttgaatgtccaaattgtcatgaacgatttgctagaaatagcactctgaaatgtcacctcactgcatgccaaactggagtaggggcaaaaaaaggaaggaagaagctctacgaatgccaggtctgcaacagtgtgtttaacagctgggaccagttcaaagatcacttggtaatacacactggagataaacccaaccattgtactttatgtgatttgtggtttatgcaaggaaatgaattaaggaggcatctcagtgatgctcacaatatttcagagcgtctagtaacggaagaagttctttcagtagaaacacgtgtgcaaactgaacctgtaacatcaatgactattatagaacaagttgggaaggtgcatgtgctaccattgcttcaggttcaggtggattcagcacaagtgactgtggaacaagtccatccagatctgctccaggacagccaggtgcacgattcacacatgagtgagcttccagagcaggtccaagtgagttatctagaagtgggccgaattcagactgaagaaggtactgaagtacatgtagaggagctgcatgttgaacgggtcaatcaaatgccagtggaagtacaaactgaacttctagaagcagatttggaccacgtgaccccagaaatcatgaaccaagaggagagagagtctagccaagcagatgctgctgaggctgccagggaagatcacgaagatgctgaggatttagagaccaagccaacagtggattctgaagcagaaaaggcagagaatgaggacagaacagctctgccagttttagaatga

SEQ ID NO: 311104 - DNA, 714 bp, Homo Sapiens
acaatatcttgttctttggctgatgtaatgagtgaacagctggccaaagaattgcagttagaagaagaagctgccgtttttcctgaagttgctgttgctgaaggaccatttattactggagaaaacattgatacttccagtgaccttatgctggctcagatgctacagatgtaatatgacagagaatatgatgcacagcttaggcgtgaagaaaaaaaattcaatggagatagcaaaggtattataaccttattgtgacaacttcattgagtggtagaaaacactcataatgtgcttctaagtaaatcttcaactatttttgcttcttaagtttccatttcctttgaaaattatcgaaaagtgcatccttatgaagacagcgatagctctgaagatgaggttgactggcaggatactcgtgatgatccctacagaccagcaaaaccggttcccactcctaaaaagggctttattggaaaaggaaaagatatcaccaccaaacatgatgaagtagtatgtgggagaaagaacacagcaagaatggaaaattttgcacctgagtttcaggtaggagatggaattggaatggatttaaaactatcaaaccatgttttcaatgctttaaaacaacatgcctactcagaagacggtcgaagtgcccgcctacatgagaaaaaggagcattctacagcagaaaaagcagttgatcctaag

SEQ ID NO: 311105 - DNA, 1007 bp, Homo Sapiens
ggcaacgcctggacccagggaggcgtgtccgcaccttaggacacggtagcacggttcccgagggcggaagctagtcacctgaacgcggataacccaagagcgcgcgaaaggttcttataagcggtcctcccggtcaggacaacttggaccacgttactttgataaatctcccctacccccgtgtggcacaggtgcaagcgccgaattttgaggcacgacatagtcgcaggagtctggatctcgctcagatcccgtgcccaccgcatcacaagtgtggattcagcaggcccacgtggctggtttattacatcttgatttaaagccatttcatgaacatatccaacatgaggttttttctttacccaagttctctaatatgatccttctagtcacaacgacccaaagacatctataaatccttactgctgtagaatgctcctttttctcatgtaggcgggcacttcgacgttcttctgagtaggcatgttgttttaaagcattgaaaacatggtttgatagttttaaatccattccaattccatctcctacctgaaactcaggtgcaaactgccaaaaggaagaattagcatctaaatattttaaaatagggacagttaaaaacaaaaacaaacacaaccaaatgagattagtctttcttactcaatagatgatcacactagaaaaccagaaatcatagctactacagagaaaaaaattaaataactcacagaaagaggagcaatactatttaagtaattacaacccaaaggaaggcatttattccaggcatagaaaacatttcatcacatccaaaactaaggtctttcggcatgtgcattgtaccttgcttttagccaaaggacacaatattgaactgtgaaggctacaccaaatcttaccaaagaaatacaattttgtaattatttgtggagagtgggttgttatagcagactatgttcacaccatgacaattatgttctagaactgtgcaattcagttaggtagcc

SEQ ID NO: 311106 - DNA, 668 bp, Homo Sapiens
  misc_feature (42)..(42): n is a, c, g, or t
cagcatgacacgacgcagaagggtcaacacgtccacatagcncgattcattggtcacctcctccaacctgtccagatgtgttttgaggggattcagcacagactgtgaccatacgaacaaggccggggcttgacagagctttcataaagaagggtcgagttgttttccagagctctggattgttgttaaatatgatgcctttctcatgcataccgatgcaccgcagcccaagtttgctgccgaatcgagagctgtaatgattgtgcttcattatgtggaacatacttgaggacttgctgataatgagtgtttcctctccagagatccagactcgcatgaattctccatacacccggttgtagtagttgcaggcactgccgatccccatccacaggaatctgccgtgggagatgaggggtccaattcccatgcagtagccaggacctggtattgaggatgtgccctcataattccacaccaagagaaaaaggccagtgaggagcaggactggcatggtggcagcaggcatggcttcaggcacgatgctggtgatgttataatgtatcgggttcagcatttccaaaaccatcttgtgttccttgacctcagagggggcagtttagagtcaagtggctgaggaggggaggctctctgatgttccactcttc

SEQ ID NO: 311107 - DNA, 460 bp, Homo Sapiens
cttcttcttcttcttctttcaacccaacaggcttgtctttggcagagccacggggatcacttctgcctaactgcctgtgagcacgtgagaacaggcgaggactgctgagaagggagggagtggatggaacacgggatgtgtccctccctccagcttgccacagcttgctcctgagcgactcctatatatggaaaagcgaaagtgcctgaaaaatcatgtgagaaaattggaggagtccatttcctaagaggggggtcttcttacctggaggaatttcaattcttatccctgactttccaaactctaagcacctggtcgaggtaaggtaaagaaggctgtatagttctgcagaattgaagctcctttgggactctccttcagctcttagccaatcttggtagtgctccagagttcacaacccccttggagagcagggtctgtgatcaccagagatacagca

SEQ ID NO: 311108 - DNA, 1872 bp, Homo Sapiens
  misc_feature (11)..(11): n is a, c, g, or t
  misc_feature (28)..(28): n is a, c, g, or t
  misc_feature (90)..(90): n is a, c, g, or t
caatgttgcanccactaagctctagaancggaatagactgctgacttgattccagccattgagctatttggcctatattaataattattnctaaagatccccgctgccctccagtttgctcagagatggccccactggagttggtgttgactgggccagcaggaacctggggcagcctcctttaacctgacaaccaggctttctgcactggggatgcactgtgctgtaccaagagctcacagaccctcccacttctgagaggcagaaacatcctcctttctgcctccctttcaggtgaggtgagcatctgggcaaggaaggagcaaggtcctgtgtaatagcagcacatggcactttacctgacaatgacgcccggccggaggtcgaagttcttatgcaccacatccagcagctctcgctctgtcttctgagaggttccgtaggtgaagatggaaatggacagcggctcggccacaccaatggcataggaaaccttccagcaaggtgcagcgtcagggattgaagctctctgtgtgggccctgcccctttcagaagctttgcccttcttctgaagggaccagcggggaccacatgcctcttgccccacatgctcccctgcaattttcctgctatcttcaccgagggcagttcttctacacgcctctctccctgaagattctggttttccctcccctaggttttcagagccctggccacagtgcccaacacaatcacacaatcacaacctttggcaaagcgtgcagctttcccaccgggccaacatcccctcactcagggcagaactgggcaggggtcctccactgcaacaggacggtggtgggtggagggggtttcctggacaagcactctccggcagagccctgctttcaccagagacttggccacccagcgggcagcatatgcggctgagcgttccaccttggtgtagtccttcccagagaaggccccaccaccatgagccccccagccgccataggtgtccacaataatcttacggccagtgacacccgcatcccactggggacctccgatgacaaaccgcccactgggctgcaggtggtagacggtgtcttcgtccaggtacttggccggcaccacggccctgatgacttgctccttcagggccctgcgcatctcctccagcgtgatgtcttcgttgtgctgcacagagatgacgatggtgtggatgcgcacagggatgactgcgccattgtcctgcatgtactgaactgtcacctgagtcttagagtcaggccgcagccaggggaggaggccggagcgcctgaggtctgccatccgggcgttgagcctgtgagcaaggatgatggtgaggggcatgcactcctctgtctcgtcggtggcatagccgaacatcaaaccctgatctcctgcccccacatcctcctcatttctgtccagatggacgcactgggcaatatctggggattgctgctccaaagccaccagcacgttgcaagtcttgaagtcaaagcccttggctgagtcatcgtagccgatgtgcttgatggtgtccctcaccacccgctggtagtccaccatggccattgaggtgatctcaccacacagcagcaccatgccggtcttgcacactgtctcacaggccaccttggcattggggtcttgcttgagatgggcatccagcactgcatcactgatctggtcacagatcttatccgggtgtccctctcccacagactccgatgtgaacatgaagactccttcacttagagagtggtcacacaagccatccaccggtccattcatcttctcacacttctccactgacgcttctttcagtgaacaattttgaggctgtgactttgcctgag

SEQ ID NO: 311109 - DNA, 450 bp, Homo Sapiens
gacagtgaaataatgggttttttttaatgttcattactttaaaagcttacatttaggaaactcaagctttgcttttctataatggttaacttttccatattatcataagaatcaactttctgattaatatttctcccttttttcttaagaagtcaatagttcttcatatccacagtcatgagtcatttttgaggacatgccagaattaccaatgtaactgtgaggcaggaaaagtacactcccggggaagtcagagtaagcctgtttccaccgcagcacagcagtgaggcacagctagggcaggaattcaggcagaggtgccaaatcaggcatcagtggagaggagttccagccagactgggcttttgggctggtataggcaggtccgtggggtattaaaggtggaatcatggataaaggtaagggaacctaacttcttgttggggtttt

SEQ ID NO: 311110 - DNA, 1129 bp, Homo Sapiens
  misc_feature (607)..(615): n is a, c, g, or t
  misc_feature (1063)..(1063): n is a, c, g, or t
  misc_feature (1082)..(1082): n is a, c, g, or t
  misc_feature (1101)..(1101): n is a, c, g, or t
tgacagtgaaataatggttttttttaatgttcattactttaaaagcttacatttaggaaactcaagctttgcttttctataatggttaacttttccatattatcataagaatcaactttctgattaatatttctcccttttttcttaagaagtcaatagttcttcatatccacagtcatgagtcatttttgaggacatgccagaattaccaatgtaactgtgaggcaggaaaagtacactcccagggaagtcagagtaagcctgtttccaccgcagcacagcagtgagcacagctaggcagaattccagcagagtgcaaatcagcatcagagagagagttccagccagactggctttggctgtatagcagtccgtggtataaagtgaatcatgataaaagtaagaaacataacttcttgttggtatattatttttgtccaactcacactgcagtgaggcaggatttaaggtggcctgtttgacagacaggataatgaaacccaccagggcagacagagcactcagaatgcttccaaccaggctgctatgcaccaaaagcttggttaaccttttctctgtggcgattgatagagagccagagatgatnnnnnnnnngggtcctatgaatgggtaagcagagttcaacagtgtagaagtcacttgggtaaaatttggagagaaggaagcagatgccaaaatgatccccaagctcaataccatcatgccacacaagatctggatagtcccaataactttgatttctgcgtgtagatgtttcttcaggctatcctgcccctggttggtgggttcgggtttctctgcttgggagaagttgatgacatttgatgggagcactatgatggtctcattgggaacaggttgtgatgtcatgatggtgttgccaactgtgcccgttggttccagctgagtcctcagaagctccaaagaggttttaactctggtttctcagtcccatcaacggtttctacttaccttcatcttctgaaagtcatcagcccttccttattccagtgtttacagctatacaggatgtgatactcgnagattgtagatttgtgagntgttcctgcacttccttgnctgtaaacttctagcaaggtcagtaaaa

SEQ ID NO: 311111 - DNA, 929 bp, Homo Sapiens
cttattctcctggtccatccctgtagatcaagatttcttttgccgatagcctgaattagaatcaaaattgatctttgccatcccatacacaatacagctcccatctgaatcttccacccattggatttatttctatcatggttgcatcgtatttcagaaaaaggcctgtaaagcttgaccatgttttctgctgctgattccacaatattaggtggaaatcccatcttctgtgcaagcctggagagcttgttcctttttgatgccttcttcaatatcaataggttctttaattattgcttcaggagtctcagcagcaacatcttcaatgttgacaccaccatgtgaacttcctattaatacaggaccttgaaatgacctttccattgttattgcaaagtagtattctctcctgggatattttcgctcacagaccaatacttgattgcatattctgcccttttctcccgtttgcttggtaaacaattttttcccaatcatttgtgaagaaacagcttttgcttcttctggagagaaaactatcttcactcctcctttgaggccactttcaaatgttccttttcctctaccaccagctaaaacctgtgcctttatcacgacatcttttgaacctaattttttggcaattgcataagcttcatctggtgactttgccacatatcctttgggaacggagacaccagcttcttgcaataattccatactcatgtattcatgtagtgagagattcctttgctgttgctgctgtacttggagtccatggttattaaacaatccagaacttcccagaacctgagcagcagcccgctgggccgtccgaggccggtggttccgaagggtggccacggccactagcctgccgtagaacatggaggccgccatttctgagtcggacccgtcccctgggcccc

SEQ ID NO: 311112 - DNA, 828 bp, Homo Sapiens
  misc_feature (137)..(137): n is a, c, g, or t
  misc_feature (169)..(169): n is a, c, g, or t
  misc_feature (422)..(462): n is a, c, g, or t
  misc_feature (794)..(794): n is a, c, g, or t
  misc_feature (802)..(802): n is a, c, g, or t
ttcatattaagagcttttgtatagcaaaaaaatagccttggcttaatattgtctgttccaggagacatttcttgcccgttttaacccatttttttctgtgtcactgggatttaaatgcgcagcaaatcaactcaaanctgcaaatgatttttccatgtcaccttgtccntcatatatcatggctagagtagagaatggctcataagccagaggagcttgtcttatgatttccatgcacatcaatatcgcctcttcacgttctcctcgagcaaaacgaatgttggcttcacccatgagacctctcagagctctgggaagtttactccgaggccttttctctttcatcattttcttggtttcacgattgagaaccatctccaatacaaatacatcgcccgcagtgggttgctcaggtgtttctnnnnnnnnnnnnnnnnnnnnnnnnnnnnnnnnnnnnnnnnnatcatcttcattctctccaagcatggaagcaaagaccttgtgaactgacttcctcactccatctgatgtttctccttcattgacatctttgtcttgggatttggtagagttaattcctgatgatgatggaacttcagagtcatcgggattttcttcagctgataacttgcctttttcctgaagacttttcttctcgcgggtttttctctcttctctccgccgttcgaactcctcaaaggagattttcccttccaagtagtcgatgagttccggactgaaccctgacatgtttacagggtctgtctgtgcaacccccaggaacctgggacagnagaaccgngaagagcagcgccttccagaagcccc

SEQ ID NO: 311113 - DNA, 853 bp, Homo Sapiens
ggctcacaggtttggagatgtcccagaaagtaaggcacaatgtcaatagcaggagttgctgctcaggagatcagagtcccattaaaaactggatttctacataatggccgagccatggggaatatgaggaagacctactggagcagtcgcagtgagtttaaaaacaactttttaaatattgacccgataaccatggcctacagtctgaactcttctgctcaggagcgcctaataccacttgggcatgcttccaaatctgctccgatgaatggccactgctttgcagaaaatggtccatctcaaaagtccagcttgccccctcttcttattcccccaagtgaaaacttgggaccacatgaagaggatcaagttgtatgtggttttaagaaactcacagtgaatggggtttgtgcttccacccctccactgacacccataaaaaactccccttcccttttcccctgtgcccctctttgtgaacggggttctaggcctcttccaccgttgccaatctctgaagccctctctctggatgacacagactgtgaggtggaattcctaactagctcagatacagacttccttttagaagactctacactttctgatttcaaatatgatgttcctggcaggcgaagcttccgtgggtgtggacaaatcaactatgcatattttgataccccagctgtttctgcagcagatctcagctatgtgtctgacctaagaaggtctcattcgggaccagctggctcctttaacaagccagccataaggatatccaactgttgtatacacagagcttctcctaactccgatgaagacaaacctgaggttccccccagagttcccataa

SEQ ID NO: 311114 - DNA, 607 bp, Homo Sapiens
gaattttacacacgtcacaaaacttgcctgtgatgtgtgggtgtgcgctgtgcacatgtccaagggagatagaggagatagtttgttctttgaaccacaccactgtgcgttaagaatcttctgctctctaattacacctgtggtggttgcatgggtgttctcggggtgacagcagtcaagtgtttcactcaggaagaaagctgtggaagcataggtagctggggtgctctctccctcacacaggtggagagaggattgttgatcttttattaatatctctcgttcattccagggcatgcttccaaatctgctccgatgaatggccactgctttgcagaaaatggtccatctcaaaagtccagcttgccccctcttcttattcccccaagtgaaaacttgggaccacatgaagaggatcaagttgtatgtggttttaagaaactcacagtgaatggggtttgtgcttccacccctccactgacacccataaaaaactccccttcccttttcccctgtgcccctctttgtgaacggggttctaggcctcttccaccgttgccaatctctgaagccctctctctggatgacacagactgtgaggtggaat

SEQ ID NO: 311115 - DNA, 1561 bp, Homo Sapiens
cgaggcagagtgctagcgggagcgcgagccagcaagaggcgcctgcgcgatgtccgggcccctgagcccgcggcgctgagccagccgggacggacatgcgcgggagggcgccgcggggcagccgccgctcctccgggggaatgaaagctactggttgattttaaagtgcctgggcctcacaggtttggagatgtcccagaataaggcacaatgtcaatagcaggagttgctgctcaggagatcagagtcccattaaaaactggatttctacataatggccgagccatggggaatatgaggaagacctactggagcagtcgcagtgagtttaaaaacaactttttaaatattgacccgataaccatggcctacagtctgaactcttctgctcaggagcgcctaataccacttgggcatgcttccaaatctgctccgatgaatggccactgctttgcagaaaatggtccatctcaaaagtccagcttgccccctcttcttattcccccaagtgaaaacttgggaccacatgaagaggatcaagttgtatgtggttttaagaaactcacagtgaatggggtttgtgctttcaccccttcactgacacccataactcttccaccgttgccaatctctgaagccctctctctggatgacacagactgtgaggtggaattcctaactagctcagatacagacttccttttagaagactctacactttctgatttcaaatatgatgttcctggcaggcgaagcttccgtgggtgtggacaaatcaactatgcatattttgataccccagctgtttctgcagcagatctcagctatgtgtctgaccaaaatggaggtgtcccagatccaaatcctcctccacctcagacccaccgaagattaagagggtctcattcgggaccagctggctcctttaacaagccagccattaaggatatccaactgtggtatacacagagcttctcctaactccgatgaagacaaacctgaggttccccccagagttcccataccttctagaccagtaaagccagattatagaagatggtcagcagaagttacttcgagcacctatagtgatgaagacaggcctcccaaagtaccgccaagagaacctttgtcaccgagtaactcgcgcacaccgagtcccaaaagccttccgtcttacctcaatggggtcatgcccccgacacagagctttgcccctgatcccaagtatgtcagcagcaaagcactgcaaagacagaacagcgaaggatctgccagtaaggttccttgcattctgcccattattgaaaatgggaagaaggttagttcaacacattattacctactacctgaacgaccaccatacctggacaaatatgaaaaattttttagggaagcagaagaaacacatggaggcgcccaaattcagccattacctgctgactgcggtatatcttcagccacagaaaagccagactcaaaaacaccttagaccttggggtcatggttcagcagaggttacataggagcaaatggttctcaattttccagtttgattgaa

SEQ ID NO: 311116 - DNA, 1346 bp, Homo Sapiens
  misc_feature (413)..(441): n is a, c, g, or t
  misc_feature (567)..(567): n is a, c, g, or t
  misc_feature (1299)..(1299): n is a, c, g, or t
cagatgaatatctcttagcaaggttcaaaggcgatggtgtaaaatataaggccaagctgattggcattgatgatgtgctagatgcaagaggggataaaatgagccaagactctatgatgaaactaaagggaatggcggcagctggtcggtctcagggacaacacaaacaaaggatctgggtcaacatttccctttctgggataaaaataattgatgagaaaactggggtaatagagcatgaacatccagtagataagatttctttcattgcccgtgatgtgacagacaaccgggcatttggttacgtgtgtggaggagagggccagcatcagttttttgccataaaaaccgggcaacaggctgaaccattagttgttgatcttaaagacctttttcaagttatctataatgtnnnnnnnnnnnnnnnnnnnnnnnnnnnnntagaggaagccagcaaagcagttgagaatgggagtgaggccctaatgattctagatgaccaaactaacaaactgaaatcgggtgttgaccagatggatttgtttggggacatgtctacacctcctngacctaaatagtccaacagaaagccaagatatcctgttagtggatctaaactctgaaatcgacaccaatcagaattctttaagagaaaatccattcttaacaaacggcatcacctcctgttctcttcctcgaccaacgcctcaggcatccttcttgcctgaaaatgtcttttctgccaatctcaacttctttcccacccctaatcctgatcctttccgtgacgatcctttcacacagccagaccaatcgacaccttcttcgtttgattctctcaaatctccagatcagaagaaagagaattcgagtagctcgtctactccgctgagtaatgggcccctgaatggtgatgttgactactttggtcagcaatttgaccagatctctaaccggactggcaaacaggaagctcaggcaggcccatggcccttttcaagttcgcaaacccagccagcagtgagaactcacccttttgtgggaagccctcccaaaggactgtccatacagaatggcgtagcaggacttgggctctgtccagtcctcaccacatgactccatagccattatcccacctccacaaagtaccccaggaagaggcagaaggactgctaagtcttcagccaatgactggcttgcatcagacatctttgctcctcccgtctcagaaccttcaggccaggcgtcacccacaggacaacctacagccctgcagcccaaccctctggatctcttcanaacaagtgctcctgccccagtggggcccctggtgggtctagtggtgt

SEQ ID NO: 311117 - DNA, 526 bp, Homo Sapiens
cctctgtggacattggagtgtctgtcactcaactaaaagatttactggaaataattggatgtaagagggctaattaataattccgagaatgactatttttttggcctatggaatcttttaaaaatgtccattgatagctatgcactgctgtgtgcccacaggattgtgagaatggaccttcttataaagtgaatactgacttcacaacagtggtgaattattctcaggaaccttaaaggacttcaaatatgatcatgatacctcttgttttgtctaaatacttattaaccctgctgtcttttatatacctaagggtgaggattgggttggtggtgatcccctataagccagcagagggtagtaaggcgttttaagattaaaaaaaatcccagtatgaattataattgatagcagacaaaggaaataaaatactaaaattaaaatactgataacagtgctttcccttactgcaggctgaaccattagttgttgatcttaaagacctttttcaagttatctataatgt

SEQ ID NO: 311118 - DNA, 639 bp, Homo Sapiens
gaatgcttccctttaactccagaaaaaaataacttgaattatgatacagcatcttgatctgaacagtttacactcactctgcctaatatttttgcatactctgaaactcacagatttaacatctgattgaggcttaatttaaagtggcattgccacctagcatcatgcaagcgtggacatcttcaagacacacagcatggtattcaactaaagacaatgacatgaagcctcagaattgtatttagcaggtactataattttataattaattttacaattcatgtagcaaatggaaaatcatacagagaggccaatgtatataaataagagtttatacagaaactgccaattcacaaaacagcactgcatggtttctatattgcaagcacaagacatggtcacatggttccactgtacaggtagaaacaagcccacagacaatacatagagtaccacctgaaacgaggcccttggagctgctcagcttcttagaaaatagagaactttcaatggtcataatacattttgattcaaaatgtcttctaaaatgttttcattgtgggagaaaattaagaaggggcaaaaatccatctatggaacttctgaattcatttttggttctttttcaattattttata

SEQ ID NO: 311119 - DNA, 765 bp, Homo Sapiens
gttcggcacagcagaatggtagataattcctgttccactttctttgatgaaacaagtaaagaagaaacaacacaatcatattaatagaagagtcttcgttccagacgcagtccaggaatcatgctggagaagttctgcaactctactttttggaattcctcattcctggacagtccggagcagacctgccactttgttttgagcaaactgttctggtgtggattcccttgggcttcctatggctcctggccccctggcagcttctccacgtgtataaatccagggaccaagagatcctctaccaccaaactctatcttgctaagcaggtattcgttggttttccttcttattctagcagccatagagctggcccttgtactcacagaagactctggacaagccacagtccctgctgttcgatataccaatccaagcctctacctaggcacatggctcctggttttgctgatccaatacagcagacaatggtgtgtacagaaaaactcctggttcctgtccctattctggattctctcgatactctgtggcactttccaatttcagactctgatccggacactcttacagggtgacaattctaatctagcctactcctgcctgttcttcatctcctacggattccagatcctgatcctgatcttttcagcattttcagaaaataatgagtcatcaaatgtgagattctaaatatgcccatctcatatattacttaattggatgatatcttactgaatataacttta

SEQ ID NO: 311120 - DNA, 616 bp, Homo Sapiens
  misc_feature (534)..(534): n is a, c, g, or t
  misc_feature (583)..(583): n is a, c, g, or t
  misc_feature (588)..(588): n is a, c, g, or t
tcttttcaacatcttccaggacaagggcatcttggctttgactctgattcttgttcaagccaggcagcctggatccagagttctgctgggagctcttctcctgccgtctctggagtgcccgcctggctttctgcagctctctcttcatgtgcgtttcaaacttgctcactaatgtcttggttttcatctcttcatcaacttcccagacatcctcgagtgtcagaggacgcttgtagcctttcagaatgatgctgtcataccagctgtaggtaatgctactcaggaatgaagctatggatgatggattatttgatgactcattattttctgaaaatgctgaaaagatcaggatcaggatctggaatccgtaggagatgaagaacaggcaggagtaggctagattagaattgtcaccctgtaagagtgtccggatcagagtctgaaattggaaagtgccacagagtatcgagagaatccagaatagggacaggaaccaggagtttttctgtacacaccattgtctgctgtattggntcagcaaaaccaggagccatgtgcctaggtagaggcttggattggtatntcgancagcagggactgtggcttgtccagagtc

SEQ ID NO: 311121 - DNA, 580 bp, Homo Sapiens
gaaatgtggttcaaatgaagttgaagtttgcagattggagtcagtatttttctcaatattgtcactattcacaattccagattcaacagatgaacttgaacatgcttctgtatatttcacttcactattcctctttcttgagtatgtctgcttgatgatgaaagagactggctgatctgctagactgttgacttgtataagaacatcttgaagtggtgggaatttatcttagattttcattcctggatcatttttatggtctgatccagtgaggagccaatgaggttttccatggctaggtcaaatatcaggttggagttgatggtatatttttatagaactttcctggaatgcatccttgaccttccctcaattcatacggggggcaaaaccagactgtatttcccgcaacgaaccctggaatgcttcgctttagcggactccggtccactcccatcagaggatgcccttctttcgcctcacctccagcccagccgcagcgacccggccgggcccagcgctgcaagcctcaggtctctccagcagggctgcgcctctgctctccccacacttccctccc

SEQ ID NO: 311122 - DNA, 512 bp, Homo Sapiens
tcggtattttacattttattttgttttttagacaaatgttcattgtgactcacagaattgatttcatgcctcactaatgggtctcacatataccatgaaaaatactgatatagagacattttgtgcctttgctgtgttggtaccttgagtatgtctgcttgatgatgaaagagactggctgatctgctagactgttgacttgtataagaacatcttgaagtggtgggaatttatcttagattttcattcctggatcatttttatggtctgatccagtgaggagccaatgaggttttccatggctaggtcaaatatcaggttggagttgatggtatatttttatagaactttcctggaatgcatccttgaccttccctcaattcatacggggggcaaaaccagactgtatttcccgcaacgaaccctggaatgcttcgctttagcggactccggtccactcccatcagaggatgcccttctttcgcctcacctccagcccagccgcagcgacc

SEQ ID NO: 311123 - DNA, 1236 bp, Homo Sapiens
catttatgaaactgggaccagaagctttcagatttgatggtggtgttgaagccatcgctacaagacaaaatgaaaaatactacatcttacggccagaagttatggagacttacatgtatatgtggagactgactcatgatccaaagtacaggaaatgggcctgggaagccgtagaggccttggaaaaccattgcagagtgaatggaggctattcaggcctaagggatgtttaccttcttcatgagagttatgatgatgtgcagcagagtttcttcctggcagagacattgaaatatttgtacctaatattttctgacgacgatcttcttccactggagcattggatcttcaatagcgaggcacatcttctccctatcctccctaaagataaaaaggaagttgaaatcagagaggaataaaaagacattttatattttattctgctccattcccttcactgtataccttaataattccttttctggtgatcaggcacatgatgaactttgattagtaggtctgtgattaagttcttaaattgttttgcagtcttttatgtttattatcataggtataggtggacctaaattccttatcatatcctttattaattcagccagtgtatccaccagttttttggttatgtttttaagtaacctattatctctggatttcatgaaggtgtaatatcgtttttgttaaactgaatagaattgtatagcgatgacctcttaattataatttgatttgactgcaaaactttttcctcctctaagaggagatgatgtctgctttaagctgtaatgttttgccatgttgcaaaaagccataataataagtataaaaaagctttttcctttacaatttcatgttaatctggtttgtctgtccaccagagacagatcttctgtgacagcctccttatgcaggtctatcattatttgatagaatgtcttctaaaatacttcactcacattgtaattcaaattagaaagtcattccaaaaggatcatgtcatgttgacctcatttcatcggaactgcagtatatttttgttggttaattatattagtgttttctattttgtaaatgtgtcctttaattttactttaaatgccctgtgtcatttctggattatatactagttaatttcttccattccctactacacagagaggtgagctttcaaatttttcagagctctgctatcactgaattacatttatctgaagaaaa

SEQ ID NO: 311124 - DNA, 911 bp, Homo Sapiens
  misc_feature (111)..(174): n is a, c, g, or t
ttgtgctccacttgaattcacactcggaagcaagcgagtgataccaagtcagagtgtatttatattggctgagcagcagaccgctgaaccaggaaccagggtgcagtgaannnnnnnnnnnnnnnnnnnnnnnnnnnnnnnnnnnnnnnnnnnnnnnnnnnnnnnnnnnnnnnncttgaccacctttgacacctccctgaagagtatggagtgaagggatccagggccacagcttaggaacttgctgaagttgattacgtagctattgattatgtagctctcactacactttccagattgagaagttaacacattattgggcaatgctgtttttttctttagtatacaaagtgaatccttctttccctcaaaagcttgaattccagactgctaaaatttcaatttgagacatttaatagtatccatagaaaaataaactctaaattgacaagtttagttatgcttatccatatatcaacattctaagaagaaatggagaccaatttaaagcgtacatctgcctttaaatattaaaaatacaagattgcttcacttgggtgtctccagccaaaatgcagttaatcaatattccatagaacggagcattgtcggaggtgactgctgtcctttctttccctggtatgtacatcattcctgggccacacttaaggaacagcgtctttttctgcatagccttgtgatacactcagaatcatcccggcaggaggctccaataggcctgagggaaacccctctccaaaatggggtcattctccgtggccttctctttgccgaactcacttctggtattggggagccatctatctggcccaacagcaacaggaagatcatgaggactgcacaaagtttgaggtgccacatcttgacagggggaggatgttggagcctcc

SEQ ID NO: 311125 - DNA, 884 bp, Homo Sapiens
  misc_feature (781)..(782): n is a, c, g, or t
aggcgaaagggtccatgccagcaacacaatcactcaaagtccagatgagggatcagtaaatacaacgtgcctgaaaggtggcccttgagcacattcctccggtagacattaacttattaaattgattctgattacaaatataaactttgcccccatctcacccagtaacaatgcaagagttgatgtcagtctataaaaggaagtaggaactgtccctgggctttcaggctccaacatcctccccctgtcaagatgtgggcaccttcaaactttgtggcagtcctcatggatcttcctgttgctgttggggccagggtaagggagggaagggatacttatgtgtgtgtgtggagtgtggagatgatagtggtggtggaacttgaaagctagattcagtcctgaggaatggttcctctgttctgagtctacagcatctgcggaatggaatgatcactcttccaaggtgtgcagcagggtgtcaacactttcatatctgaatgtctttgcccttacagatagatggctccccaataccagaagtgagttcggcaaagagaaggcccacggagaatgacccccattttggagaggggtttccctcaggcctattggagcctcctgccgggatgattctgagtgtatcacaaggctatgcaggtactccctgaacctgggagcagggttgggccagagagccctgggaagctgggcagaggagtgacaaggggacacatgaacctaagaataaagctgggatggaggagttctagactgagactgnngagctcatggaaaatcccttaggagttaggagccaagaacagctctatgtgggtactatgtaagtaggaaggaaatgcagcataggttgtcccttgtcattc

SEQ ID NO: 311126 - DNA, 663 bp, Homo Sapiens
  misc_feature (75)..(75): n is a, c, g, or t
tgtccaagcaggggtgtcaaaaccttttcatatctgaatgcctttgccccttacagatagatggctcccccaaanacccagaagtgagttcgggcaaagagaaggcccacggagaatgacccccattttggagaggggttttccctcaggcctattggagcctcctgccgggatgattccttagtgtatcacaaggctatgcagaaaaagacgctgttccttaagtgtggccccaggaatgatgtacatacccagggaaagaaaggacagcagtcacctccgacaatgctccgttctatggaatattgattaactgcattttggctggagacacccaagtgaagcaatcttgtatttttaatatttaaaggcagatgtacgctttaaattggtctccatttcttcttagaatgttgatatatggataagcataactaaacttgtcaatttagagtttatttttctatggatactattaaatgtctcaaattgaaattttagcagtctggaattcaagcttttgagggaaagaaggattcactttgtatactaaagaaaagctacataatcaatagctacgtaatcaacttcagcaagttcctaagctgtggccctggatcccttcactccatactcttcagggaggtgtcaaaggtggtcaag

SEQ ID NO: 311127 - DNA, 222 bp, Homo Sapiens
aaatctcaaggtgtgatattattttaattttttaaacagtaaaatcaaagattataagaacatatcttacatagttatttttcagtagcaaaactgctttttgaaaccataccaataataaaataaagaaaacgtacatttatcttgcattttttaccacctgctgctctgaatattagctaagttgtacttaccttgtagtaagttttcatcagcacgcag

SEQ ID NO: 311128 - DNA, 1600 bp, Homo Sapiens
  misc_feature (61)..(61): n is a, c, g, or t
ggaacaaagtatgtttaatggttgctttggaaaggggaagtgggcacctcatgccaggganatttaaaaatgagacttttcaagcaagcactgcctatagcatagtctcatattttgaaaatttaaacctaattttaattatatataaagaactattttaaaaaatcacacccacaagtaaaaaactggtaatctgtttacaaagtgcagcgtcagtacagcaaactcatctcaacaaaagattatgtgtggttctcgggctttaaactcccctggtttccatttaaatgctttaacattgagtcatcctgcatacatgaaaagcctgtgtaatgaagcctgggtcctttaacacctgctattaattaattccaacataagtgagtatgagacctgggaagtaaattgtcatcatctgattgatgagttacagattatctgaattaaatttctgacctggttatgagtcagtaatcccaacacaaactactgctttgtaatgaattctgtatgctttgcatgtccttcaataactgaagattttttctccttttttctccaggtctcagtttcataaaatctttcttatttgtggtccctgtgattccagaacggctgctgctgtttctttcttcatcaagagtctttttggtagcttttaattccttcttctgcttctctaacttctgtttctccagctgggcttggtattttcgaactttagttatttggttggcttttgcttccatccttcccactaatgcctccattcacactccaacttgtctttcagttcaacggttggcgactcctggataagttttgcaagctgctggtgatcaagctcatttgcccaaattcatcctgtaaagtctgtaagacttctgacaactcctcattaataccgttggaggagggaggtgttactgacaacttcttacttttaccacctcgtgaagatacttgctttgccaaaggaatactgttgatgactcgatcattgcacaaagctttactgtgttgcttcattagatgcaagacaagctgaacattggctaccacggcatggctagggcttgtggactaaaggaagaaaaatgatgaaagaagtaattgaagttatattctctacaccactttctattccctaagcctaggtaaaaagaactctccaccccccaaagtagagtatataaatcctaaaattattctcatcatgatgttcttctatttgaaatcctttgatataaatccactaactatgtttcagaatggaaaataaggccctacatacacatcattgagctgcaacctacatttcctagcctcatgtcctatcatcctccccttctctccattttgtgaacaaaccatatttgcagatgacatttttttggtgtattagcaacatttatatcattctttaaaacccagttcaaatatattatttttaaaggcttccttaaaactgctaggtaatcaatcagtccattctcagatcacctataacactttttacatctctctcatagcatttatcatattttaattgcttttacgtatctatttcacctattaaacagtgtacatccaggtgtag

SEQ ID NO: 311129 - DNA, 637 bp, Homo Sapiens
cacaatgccaggttgaaaaagtgctgtaacaaaggtttatgtacagcacagaacggcacccaattcccagacacgggtcagagaagtctctccagaagtaccatctgtatgcaatctgttaagttagtgcacgagaggccaaatcggtgcagaccgagcagccggtgcaaaggccaggagggggaaagctccagacagcccgagagggcaccgtggcccggacaggcccggccagtgggcgcagcggagaaggtggacccgcccaggaggcggaagccgcgtcctagtaccctcatcaagaagaactgcattcctggcccgatcggccacgtgtgcccccgaggaagcgccttctgggcatcccggccccggcgtgggtagcgcggaagggggcactcacctgcaggcgggccacacagaagaacgccgccgaggggtttcgaaggtggatcctctctgtcagcaggttgctgccgtaggcaaagtacagaaaactctcctcatctggacccgtgacgtccttgcagcccgagttggccatatcccactacgcccctgcactggagcctgaagcaaagtgtaaggaacggccagagagcgcaactctggggcccactaccccggcgcagtgaccgcc

SEQ ID NO: 311130 - DNA, 1077 bp, Homo Sapiens
  misc_feature (270)..(326): n is a, c, g, or t
  misc_feature (373)..(411): n is a, c, g, or t
  misc_feature (420)..(437): n is a, c, g, or t
tgggcgcgtggcgcggcgcgcctacccgcgccgggtacaacaaggatctaggcgtgccggtcgttatcctaacagcggacaacatacaccccgccttgtgttaaccggccggttcttccttcgttccgcagcgggcgcggctttctcccgccacaaacaaaagggatcgcccaagaagcggtcctctgcggtcaccaaacacagaagccccgctcccttaggcgggggttaaatttcccggggtgccggcacccgatttctttaatcccnnnnnnnnnnnnnnnnnnnnnnnnnnnnnnnnnnnnnnnnnnnnnnnnnnnnnnnnncccactttgtacaagaaagctgggtcaggaaacagctatgaccatgnnnnnnnnnnnnnnnnnnnnnnnnnnnnnnnnnnnnnnngcctcgagnnnnnnnnnnnnnnnnnnaaaccacaaatacgtttattcctctaaaaacagtataccatctttccaattttcaaaatgttattatcaattgtctgcagattactctcattaagctgatttttaaaaatctcagacagagcagagcaattcaccagcaccatcatcaagtgagctacaaatctatcttttaccagagcaaggagacacttaagatcaattcaagagaatagctttcagtgttcacagaaggggtactcacattcatttgtcacatatttcaggccctcatacaccccttttaaattgtctaactcctatcccagtttctttttatagtctaaaaacaaggaatcacccaagtaagatactccttcagagcactgctgaaaatggatcaaacgtggagatcccccagatccctgttctcaagtgttaaaaatattttatattagcacatagaatacccttagatatattctgttatgttctaaagagtttgtgtttccccctttttgatgatgtcttcaatttcttctgagacctttcctgtatagtcatttggttctattgcttttaacttctcttgatactccagcggcaaaccattttcttttgcacccatgcaaataatctggaaatggttaaaacaaaacagaca

SEQ ID NO: 311131 - DNA, 809 bp, Homo Sapiens
tgaaaggggggttaattcaaccattccaatttggtccacattattttacaggccccttcaataacaccccctttttaaatttgtcttaacttcttatccccagtttcttttttatagtctaaaaactaaaggaatcacccaagttaagatactccttccagagcactgctgaaagcggatcaaacgtggagatcccccagatccctgttctcaagtgttaaaaatattttatattagcacatagaataccgttagatatattctgttatgttctaaagagtttgtgtttccccctttttgatgatgtcttcaatatcttctgagacctttcctgtatagtcatttggttctattgcttttaacttctcttgatactccagcggcaaaccattttcttttgcacccatgcaaataatctttttatgctgtgggggatgggggagcactttcgtaatttgtcatcagataacttcgacaggttatttcttttcgttcttgagttgcaactttaacttctattacaacatacattccacttttaaccccttcttgcctgcaggcgggccacacagaagaacgccgccgaggggtttcggaggtggatcctctctgtcagcaggttgctgccgtaggcaaagtacagaaaactctcctcatctggacccgtgacgtccttgcagcccgagttggccatatcccattacgcccctgcactggagcctgaagcaaagtgtaaggaacggccagagagcgcaacactggggcccactaccccggcgcagtgaccgccgcgcggcagcgtcagggtt

SEQ ID NO: 311132 - DNA, 1083 bp, Homo Sapiens
gcagattactctcattaagctgatttttaaaaatctcagacagagcagagcaattcaccagcaccatcatcaagtgagctacaaatctatcttttaccagagcaaggagacacttaagatcaattcaagagaatagctttcagtgttcacagaaggggtactcacattcatttgtcacatatttcaggccctcatacaccccttttaaattgtctaactcctattcccagtttctttttatagtctaaaaacaaggaatcacccaagtaagatactccttcagagcactgctgaaaatggatcaaacgtggagatcccccagatccctgttctcaagtgttaaaaatattttatattagcacatagaatacccttagatatattctgttatgttctaaagagtttgtgtttccccctttttgatgatgtcttcaatttcttctgagacctttcctgtatagtcatttggttctattgcttttaacttctcttgatactccagcggcaaaccattttcttttgcacccatgcaaataatctttttatactgtggggatgggggagcactttcgtaatttgtcatcagataacttcgacaggttatttcttttccttcttgagttgcaactttaacttctattacaacatacattccacttttaaccccttcttgctcatccagagaatttaaattgcttttgttcattttccatactactccccacacttcatcgccaggactctgaaaaatggtggctatccctccatgccaagtttgacttgttttgccttgggaattgccaaagtcaagcttaaaatcctgcaggcgggccacacagaagaacgccgccgaggggtttcggaggtggatcctctctgtcagcaggttgctgccgtaggcaaagtacagaaaactctcctcatctggacccgtgacgtccttgcagcccgagttggccatatcccactacgcccctgcactggagcctgaagcaaagtgtaaggaacggccagagagcgcaacactggggcccactaccccggcgcagtgaccgccgcgcggcagcctcagggttagggccc

SEQ ID NO: 311133 - DNA, 764 bp, Homo Sapiens
ggagatccccccaagatcccctgttcttccaagtgttaaaaaatatttttatattagccacatagaaatacccctttagatataattctgttaatgttctaaaagagtttgtgttttcccccttttttgatgatgtcttcaatttctttctgagactttttcctgtatagtcatttggttctattgcttttaacttctctttgatactccagcggcaaaccattttctttttgcacccatgcaaataatctttttatactgtggggatgggggagcactttcgtaatttgtcatcagataacttcgacaggttatttcttttccttcttgagttgcaactttaacttctattacaacatacattccacttttaaccccttcttgctcatccagagaatttaaattgcttttgttcattttccatactactccccacacttcatcgccaggactctgaaaaatggtggctatccctccatgccaagtttgacttgttttgccttgggaattgccaaagtcaagcttaaaatcctgcaggcgggccacacagaagaacgccgccgaggggtttcggaggtggatcctctctgtcagcaggttgctgccgtaggcaaagtacagaaaactctcctcatctggacccgtgacgtccttgcagcccgagttggccatatcccactacgcccctgcactggagcctgaagcagagtgtaaggaacggccagagagcgcaacactggggcccactaccccggcgcagtccc

SEQ ID NO: 311134 - DNA, 634 bp, Homo Sapiens
aaaattccaaatctttaattttttcccaacaaatagatgtcccttacgtatcatttgtcacacaggcttcagcttgaaaaaaaattccagtttttgtgtattgcagttcccgtatgctattgtcaaccaacagtttccgtgatccttgtagtctaatgagtttggatgcatctatgttcctactggatccactgtcccgtctcggcagctcttcctcactgctgctactcttttctggacactcctttttttccatttgtcaaatgtggtatttatgtctttactgtatcttttttaccattgaagatggcccagatgcttgcactaaccgcgtttaccgcccacagccatcatggcgaccggaagtcctgagagcttgtttccctcgaatctcagacagccctccttctcatgtgagtttcaggagccccagggtgcaggaaggaggagcggaggcttgttgcctggacactgccaggctgctctgtgttctgttcctcttggtcactggtaagcgctccagaaaagcagcaggtggtgaccttagggtaggacgggccaaatgggagaatccccttaggtcggtttctctggttctcaacttcttttgaaataacgctcgcagaggaggagc

SEQ ID NO: 311135 - DNA, 872 bp, Homo Sapiens
  misc_feature (21)..(21): n is a, c, g, or t
  misc_feature (58)..(58): n is a, c, g, or t
ggttcaaagtagttgggaggnccgagtcaatgatggaccatgaaaccagccacttatnagacaaacgtgacttttcttcagacagcacttcagacacctggtgaaaggacacaggagatacttcaaagaaaaccagttgtttccacgaagggataagagacttgacaatctgcttcggctgaaagtgttcatcaatgctgtacaggtccagggtaccacccatgctcctgtcccagggaggaaccaggtacaggatgaaggcaatccggcgcccttccagctcatcatcatggcacagcagggcatcagtgaattcatatttagcacaggacatgtcaatggttgattccaggtcaattttagaaatatcagaaagccaggaccggaaatcttcaaacagaattttccttaaagtggagatgtgaggctctcttctcttcttcaaatcatcagactgctggaacttatataaatcattatacttctcatggaagtccaagttcatcagttccttctgaagcccttctaagaagtcttggctttggatgaagtttgggatcacacagtgaagaaaagggtccatgtccatgacaatgacttcgtgactgaacggcgtcctgcggctccaggcctcagccacctgctttttcaaggtttcttccgtaacagcgtccgaaaactccgccatcacctccttctttcccttttttcccacccgggctgggccgggctccgctggccgcttcccattcatctcttcccaaggcacagaaccacgccacgcagatcaagacgctaccttcctgagggtactgcaactcccggcatgtcccctttatcgtgtttcccggccctacccaatgggaagcccc

SEQ ID NO: 311136 - DNA, 1358 bp, Homo Sapiens
  misc_feature (539)..(559): n is a, c, g, or t
  misc_feature (701)..(768): n is a, c, g, or t
catgttttatttttattttgtggggtttgtttgcattttaaaaaattatctttatttaggtttctgattcagcacatgtatcaaagactaatcaacataaaggagtaaataagacattaattgaaagtcttacatctctctaaactctgaccaagaatgtcaagattgccactattaccagaactccaacctagtcaagttgtagacaagctatcatgaacaacatacagtgtgcacagatatgcagaggcaaaaggcatgctagcgcttggctctcctcttttccttgttgacatctttctgttggacagtccactttcgctttccaggctaagttccaaatcaagtccaaagaaggctcagggtcaacctgaccagatactcttctggaggaatgcattcttaaactgttgtgcctgcaactttgtttttgccaggatgaagttcagaccgagatgtacaatacaatctagatgacggtgcagactaagtcaagaactaaagttgtgcagtaacccgagttaaggcatgaatgcagnnnnnnnnnnnnnnnnnnnnngcacccatgctatcaagacacaggattttttcagttgcctcatgagaggcaacctgggcttggcagttaatcagaactgctgagcattccagaaaatgccccccacgactttatgctaacagctgtgtgtatgttttaatcnnnnnnnnnnnnnnnnnnnnnnnnnnnnnnnnnnnnnnnnnnnnnnnnnnnnnnnnnnnnnnnnnnnnctagaaaccccttaatctcttacaatggctcttgaagcatggaactccatgtagcagcatcaatggctggctctttaacaatttggaaataaaaggttgttttactatgtatttctttggtagtcatcactacaaagttttcagtgttggttacctataagacaagtactagacagaagatcaagttacacagaaatatttcttctgtactgataagatacaaatattgagctctcaaagcacaagttactatgctttttcttgccttattgggcattctctaaaagcaaggctttgtgcaggaaaagttcatgtctacctaacaaagggtgatacatgttctattttcctacaagtgaacaattaacaaaaattcacattatcaattatttctggttgaatctgttagaagccaattacaaagggacagtagcacttggtgtcaaagccactttctggtcacacattcattccatggttgctagtcagtatctcaggagctcagaatttaaaactcctttcagtcaacgagggagtaagttcaattaaaggcttccactgtctgccaaatttctagaattctgtctaga

SEQ ID NO: 311137 - DNA, 684 bp, Homo Sapiens
  misc_feature (583)..(583): n is a, c, g, or t
gggagcttctttgaccgcggcgtgagcggttgcttgggccagaaggttctctggtggaggcgctcttcctggtgtcccgcccagtaggtgattgaattactcagatatgaagatcatcatctaggttttgtgtaaaaggccctggatattttaagtggccattttggatttacagtgtttttggataattttgccccagaagtttattaaaattggcaagaatcgtctgtgaagtgaattgatagtagtgaacaattcagcaagctacttaaaaagagacccaggcagcatttcttcagtattttggttcaaacggattatataactggttacagtatttcagctggtggtaatttttgcctccccttcccccaccccgttgttggggttcttcagccgaaactgagagacgttgatttgtgtactgagtagtttcagcagtttcaaatgactgagtattgctgaagtttcatggcagtttatttttacctttattgaaagttttaggaatttttgacttcagctctttcatgtcacaatgggacactttttctgaatgaagagattgaaagaatacagagtntttttccttttatcttttatttacgtggaaatttagatgttgcagttttccggcagcatggtagtattgagatagctatgtgtgtctctgtatatgctgat

SEQ ID NO: 311138 - DNA, 908 bp, Homo Sapiens
cgaatttagccaagtttctttagatttaagatcaaagttcttctttattatcccatgtacttgcccactgttgtactgttccactccagatgaaattccaatttacgagcccaaaagccaaaacaaaaagaaaatttcacatctgagagccattcctaaacatcagcatatacagagacacacatagctatctcaatactaccatgctgccggaaaactgcaacatcttaaatttccacgtaaataaaagataaaaggaaaaaaactctgtattctttcaatctcttcattcagaaaaagtgtcccattgtgacatgaaagagctgaagtcaaaaattcctaaaactttcaataaaggtaaaaataaactgccatgaaacttcagcaatactcagtcatttgaaactgctgaaactactcagtacacaaatcaacgtctctcagtttcggctgaagaaccccaacaacggggtgggggaaggggaggcaaaaattaccaccagctgaaatactgtaaccagttatataatccgtttgaaccaaaatactgaagaaatgctgcctgggtctctttttaagtagcttgctgaattgttcactactatcaattcacttcacagacgattcttgccaattttaataaacttctggggcaaaattatccaaaaacactgtaaatccaaaatggccacttaaaatatccagggccttttacacaaaacctagatgatgatcttcatatctgagtaattcaatcaccttctgccccaccagaggtgcccctggcctgggggtgccgccgcgcctgatcccgggagaaggttttcggtactttgaataatccccttttgccgcttttccctcccccacaaccagtctcagtcccaaaatggcgccgacccgatccc

SEQ ID NO: 311139 - DNA, 2438 bp, Homo Sapiens
  misc_feature (614)..(614): n is a, c, g, or t
  misc_feature (2385)..(2385): n is a, c, g, or t
  misc_feature (2404)..(2404): n is a, c, g, or t
taagaatagaaccctttacaacttatttcctaaatttgcaaggaggcaaatttgatcacgcagatcgaactttttcatcaatttccagagcttggcgaaacagtcggcgtgatacctctgatattaaggagttgatccctgaattttattatctccctgcagatgtatgtcaacttcaataattataatcttggagtgatggatgatgggacagtagtgtctgatgtcgaacttcctccttgggccaaaacctcagaagaatttgttcacataaacagattggccctggagagtgaatttgtttcctgccagcttcaccaatggattgatctcatttttggctataaacagcaaggaccagaagctgtccgagccctcaatgtgttctattacttgacctatgaaggagctgtcaatctgaattcaataactgatcctgtgttgagagaggctgttgaagctcaaatccgaagttttggacagactccttctcaactactcatagagccccatcctcccagaggttctgccatgcaagtgagtccattgatgttcacagactaagcccagcaggatgttatcatggtcctcgagtttccctccaactcccctgnttactcacgtggcagccaacacccagcctggtttggcaactcccgctgtgatcacagtcactgctaacaggttatttgcggtgaacaaatggcacaaccttcctgctcatcaaggtgctgtacaagaccagccataccagctgccagtggaaatcgatcctctcatagccagcaatacaggaatgcacaggaggcaaatcactgaccttttagaccaaagtattcaagtgcattcccagtgctttgtcatcacttcagacaaccgctatattctcgtctgtggcttctgggataaaagtttcagagtctattctacagacacaggaagattgatccaagtggtgtttggccattgggatgtcgtcacttgccttgctcgttctgagtcatatattgggggaaattgctacattctctcagggtcacgtgatgcaactcttttgctgtggtattggaatggaaaatgcagtgggattggagataacccaggcagtgagactgctgctcctcgggccattttgaccggccatgactatgaggtcacatgtgctgcggtgtgtgcggagctagggcctggtgttgagtggttcacaagaaggaccatgtctcatacattccatgaatggagacttgttgaggaccttggagggtcctgaaaactgcctgaaaccaaaactcattcaggcttcaagagagggtcattgtgtcatattctatgaaaacggcctcttctgtacattcagtgtgaatggaaaactccaggccacgatggaaacagatgataacataagagccatccagctgagccgagatgggcagtacctgctcacaggaggagacagaggaattggtcgtggtccggcaggtgtcggacctcaagcagctctttgcctatccaggatgtgacgctggaatccgggccatggcgctgtcttacgaccagaggtgcatcatttctggcatggcttcaggaagcattgtgctattttacaacgactttaaccggtggcatcatgaataccaaacccgctactgatggtgacagctgtacatcaactctgcccctaggatgagcagaagtacctggagcatcattctcttctaccacatctgaatgtaacttaaatttgctcaaagaagcaaaatattttttaaagttattaataattgctatttttgtagtctttgcttgacttttttgggggggattagcaaagcagaaaactggctgctgggttctgtagttttaaaaaatctatatttttagtcataatgagaagtctattttcaccaattatggaaacatacagtggagcaagtaaaccacttatttccagctataatattatgaagaacatttcccatgcatctacaagcttgagaaataggattttcacagtggggaagtgggttacaatattggaataggaaaatttgatgctgtaatttgggtcctgtatttttccaaacaactgtgcttcttcagcactaatatttctgggatttaaatagtaatgtttaaattatggtaaatgtaatttaaaacatctcaattaagtctgtctatcaatattgttcttcaagcatgttttagacctagaaaagtatggtttgggggaggctattttattgtgtggttagcacaagggaatctaatttataggcaagtgtgaaatagttaccattttttcctgatctgttcatcttcataggcacaacaaaacggaaatggatgggaaatgctcttggagctccaccaccatttgttttncttttaaaggtaaaatgcnaagtacccaaaggctcactactggcgggtttgcc

SEQ ID NO: 311140 - DNA, 692 bp, Homo Sapiens
attattttattaatgatgtttaaaatttaggagcaaaaaaggcatttccaacaattcaattacagatgccattttattcagctttttctgtcaaactgaattgttcattccaaatccttgcttttagagaagagctgagtgtgtaggaaaaaaagagggaccacttgaagtctgttgcaagagaaatagagatcaaagttcacaacatacaaagaatttatttatgcaatacaggccttttctcaaatatttttcacagaattccacacagtaatctactagaaaagtagaattatacaccaccaaataacattgtttcgtttcttagtacaaattgctaatcaaaaggaaggtggagatgatagtttaataacaaatagtaaaacaggtgttgctgaatacagcacccggtagcctctatttgcaaacccggggagggaagggggtgccccaacagtgggctccgcctccattgtcccgggcacaggcaaaccgcagtaggtgagctttgggtacttgcatttactttaaaaggaaaaacaaatgttgtgagctcaagagcatttccatcatttcgttttgttgtgctatgaagatgacagatcaggaaaaaatggtaactatttcacacttgctataaattagattccttgtgctaaccacacaataaattagtctcccccaaccatact

SEQ ID NO: 311141 - DNA, 1813 bp, Homo Sapiens
  misc_feature (100)..(208): n is a, c, g, or t
  misc_feature (595)..(642): n is a, c, g, or t
ttggggctgcatgggtgtgggttgctgtgcgttgcttggccggtggggcgcctgtggtgtggttgcgctgttgtgctgcgttgggtcgtttggggctgannnnnnnnnnnnnnnnnnnnnnnnnnnnnnnnnnnnnnnnnnnnnnnnnnnnnnnnnnnnnnnnnnnnnnnnnnnnnnnnnnnnnnnnnnnnnnnnnnnnnnnnnnnnncgagtagcgtgggcgcggttgtgcgggtgagtttgtgtgtggtgtgacgtgtgtggactggcagtggctgctggggggttttttgggctgtgtgtgtcagatttcggttcggggtgcccggtgcgttgctgggaggtggaggggtgggcaggcggagggcgtgcgagcgggccccttgcgccggctccttgtgtggtgttgtatatacggtatgagcggcagggagcgggctgttcggtctgtgcagtcagttcgcgagtgggggcggacgtggttgcatagaggaggatagcagcgccagcttggtttcgttggttgggttattagttggcgtcaggctaggagcgtatacgtggccttggacgtgcatgcactgatggacagtannnnnnnnnnnnnnnnnnnnnnnnnnnnnnnnnnnnnnnnnnnnnnnngcagcagtgaaaatgttgtagataagagaagctgcttcttaatttataggtaagttttggcatttttaaatccaacgccccctcccaccccctaaagttccaaccaaagtgagagggtcacagggtgacccggccaggtgttctgcactccctcacaggctgctgtcagaggcagcttgtgggtttaattcttttgtatgtgttttacatttttcactttctttaaataattgcttcttgactcttagacgttccggttcacgggggtgacataattgcggggaaacatgccggtctgcccgtggcaagctcctttccaccagttggggtctgagttatccatgacatggataaaatctccccggcggaagcccagctctccatcctcctggggatcaaagtcaaagagggcctggacgtatgtcggctgctgtggcacctgttctatgtcccgcaggaatatctgctggtttctggagacagatgtagatctgtgataatccaccagctcattcaaagaattgaacttcaccacccagaggaagtacttcccggcaccatctcggagcaccttgaagtgctgcacatcgtttccaaacttgacagagagggagaagtccccaggagcgctctcactctctcggataagaaaggccccatcgtgccgctgtttgctaagcatttcttctgccttggctctggggattttgccaaaaaaccacggatgtggtttcatttctatgtagttcttgggaatgaagccgtcttttccattaagctctgccttgtaccagttctgatcacattcttcgttcaaaaccttgaggatgtccccccttttgaagctcagctcgtcgtctgcagtagctttgaagtcatatttggcgatggcttccattctgagcgctgctcagtgctcagcagcctgaagcagggggaagggagtcttccctgctgaagcaacccagcgctctgggcttagcctcgcctctcttctgggactcgctccggcactctgggacacacaatgccacccgtggcgcagctgctccgctcagcgtccggcccgcccctccacaacgctgcgagcggccggcgaccccaaggctgctctgcgagggcagcgcttgctcccgccgccgtcaccgccacaggcacagactctgccaca

SEQ ID NO: 311142 - DNA, 772 bp, Homo Sapiens
  misc_feature (475)..(553): n is a, c, g, or t
atagacagcacatgtattcctttgggatataaatgattgtggaattaaaggagcttgctggatttatgataacatcaagatggcccatatgctagtagccataagtgttacttgtaaagttatcaccatgttcttcaatggatttgcaatctttttgtataaaccacctccatcagccacagatgtgtcatttcataaagagaatgcagttgtgactaatgttttagcagaacaggatctcaacaaaatagtaaaagaagggtgaaatgggaaaagagaagactgttttacacctggaaaatttacctcgatttttaagaacacacattgccatggcaggattatctatccaatatggacaatcatatttacaaaattgatgtttttataatcaaatgtatttttttacttatgtagtttttgttttatgcaagaaacagacctgtgccttcaaagcccacgtaaagcctcaaannnnnnnnnnnnnnnnnnnnnnnnnnnnnnnnnnnnnnnnnnnnnnnnnnnnnnnnnnnnnnnnnnnnnnnnnnnnnnnttatttcctattcccattgtctaggtatgaaatcctcaagcaataacaagaaaaaatgcccacaattagaaaaatttacatttaaaaaaatgttgtttctatccccattacaacttgtttaattttaattttcattgtcaatattttgagcttagaacatttatggtataaaaatttaaactaatcaaagttgtgtgatgatttccgggaattattatt

SEQ ID NO: 311143 - DNA, 1132 bp, Homo Sapiens
aacagcggcctctgacaccagcacagcaaacccgccgggatcaaagtgtaccagtcggcagcatggctacgaaatgtgggaattgtggacccggctactccacccctctggaggccatgaaaggacccagggaagagatcgtctacctgccctgcatttaccgaaacacaggcactgaggccccagattatctggccactgtggatgttgaccccaagtctccccagtattgccaggttaggcggggcttgggcgccagctactttgagaccatagctgccctcatccctggccctgggcccccccttcccagctccatccttcttggccctccctggggatgcttgtgcacgctcaacctgggacaaggggagtgctgaaatccagcctgtgccgtgcttccaaaccaaaatgagtccacagggcgcctcttccaaaagtggacagaggcgtggcctgggggagcaccacctctccccgcatcctaggtcatccaccggctgcccatgcccaacctgaaggacgagctgcatcactcaggatggaacacctgcagcagctgcttcggtgatagcaccaagtcgcgcaccaagctggtgctgcccagtctcatctcctctcgcatctatgtggtggacgtgggctctgagccccgggccccaaagctgcacaaggtcattgagcccaaggacatccatgccaagtgcgaactggcctttctccacaccagccactgcctggccagcggggaagtgatgatcagctccctgggagacgtcaagggcaatggcaaagggggttttgtgctgctggatggggagacgttcgaggtgaaggggacatgggagagacctgggggtgctgcaccgttgggctatgacttctggtaccagcctcgacacaatgtcatgatcagcactgagtgggcagctcccaatgtcttacgagatggcttcaaccccgctgatgtggaagctggactgtacgggagccacttatatgtatgggactggcagcgccatgagattgtgcagaccctgtctctccaaggctttgtgggctgcgcactcagctccaccatccagcgcttctacaagaacgagggaggtacatggtcagtggagggtgatcc

SEQ ID NO: 311144 - DNA, 616 bp, Homo Sapiens
  misc_feature (563)..(563): n is a, c, g, or t
  misc_feature (590)..(590): n is a, c, g, or t
  misc_feature (592)..(592): n is a, c, g, or t
agcaaacccgccgggatcaaagtgtaccagtcggcagcatggctacgaaatgtgggaattgtggacccggctactccacccctctggaggccatgaaaggacccagggaagagatcgtctacctgccctgcatttaccgaaacacaggcactgaggccccagattatctggccactgtggatgttgaccccaagtctccccagtattgccaggtcattgagcccaaggacatccatgccaagtgcgaactggcctttctccacaccagccactgcctggccagcggggaagtgatgatcagctccctgggagacgtcaagggcaatggcgggggttttgtgctgctggatggggagacgttcgaggtgaaggggacatgggagagacctgtgggtgctgcaccgttgggctatgacttctggtaccagcctcgacacaatgtcatgatcagcactgagtgggcagctcccaatgtcttacgagatggcttcaaccccgctgatgtggaggctggactgtacgggagccacttatatgtatgggactggcagcgccatgagatngtgcagaccctgtctctccaaggcttngngggctgcgcactcagcttcaccat

SEQ ID NO: 311145 - DNA, 1401 bp, Homo Sapiens
tatgtcagagctacattcgcccacagggtagcggagctcatgggcaaggtctgggccaaggactgtgtctacatcaacttgcagcatcacagagccttccctgatgagatcagggtaaacctgcttgtcccaggcactgtacagcgacgtggtgatgtagaggcgcttcccatccagtttgagctggatcatctgagggcctccagccacccgttttcccttgaccactaggggctctgtctgggactttagttcctcgtcctccagcacttgcacagggcctcccttaacaatgctgcctccgaggaagagctgtcctgtgaggcggggtctctgtgggtcagagatgtcatactgcctcaggtccccatgcagccagttgctgaagtagaggaagcggtcgtccagggagagcaggatgtcggtgatcaggcctggcatttcgggcagcagccagcccttcactttcttggggggcacctggatcaccttctccactgaccatgtacctccctcgttcttgtagaagcgctggatggtggagctgagtgcgcagcccacaaagccttgggcagcgtctgggttgtgcaggaagcggatctccaagggaataagcccatcttttagagacagggtctgcacaatctcatggcgctgccagtcccatacatataagtggctcccgtacagtccagcctccacatcagcggggttgaagccatctcgtaagacattgggagctgcccactcagtgctgatcatgacattgtgtcgaggctggtaccagaagtcatagcccaacggtgcagcacccccaggtctctcccatgtccccttcacctcgaacgtctccccatccagcagcacaaaaccccctttgccattgcccttgacgtctcccagggagctgatcatcacttccccgctggccaggcagtggctggtgtggagaaaggccagttcgcacttggcatggatgtccttgggctcaatgaccttgtgcagctttggggcccggggctcagagcccacgtccaccacatagatgcgagaggagatgagactgggcagcaccagcttggtgcgcgacttggtgctatcaccgaagcagctgctgcaggtgttccatcctgagtgatgcagctcgtccttcaggttgggcatgggcagccggtggatgacctggcaatactggggagacttggggtcaacatccacagtggccagataatctggggcctcagtgcctgtgtttcggtaaatgcagggcaggtagacgatctcttccctgggtcctttcatggcctccagaggggtggagtagccgggtccacaattcccacatttcgtagccatgctgccgactggtacactttgatcccggcgggtttgctatcccgg

SEQ ID NO: 311146 - DNA, 1142 bp, Homo Sapiens
  misc_feature (1034)..(1035): n is a, c, g, or t
  misc_feature (1047)..(1047): n is a, c, g, or t
  misc_feature (1056)..(1056): n is a, c, g, or t
  misc_feature (1066)..(1066): n is a, c, g, or t
  misc_feature (1086)..(1086): n is a, c, g, or t
  misc_feature (1092)..(1092): n is a, c, g, or t
  misc_feature (1100)..(1100): n is a, c, g, or t
  misc_feature (1103)..(1103): n is a, c, g, or t
  misc_feature (1123)..(1123): n is a, c, g, or t
  misc_feature (1136)..(1136): n is a, c, g, or t
ttgaaggacagggttacgagtttatttcttggtgcctccaagagctcatggaaaagcagcacagtgagcaacaagcaacagtggtcagtaaatgtatatgactcaacacattgccacagtctcagcttggctgtgtggtacatgctgccaagggtcgggtgccaagagagagcagaatgaagccaggtccccaaggaagtgagggcccaaaatagggagtgtgggtgatgagggtggagttcaaatccagatgtcagagctacaatcgcccccagggtagcggactcatgggcaagggctgggccaaggggctccttcccgaagtccaccaggaagttggggttcaacttcagccctccttttactgtgtctacatcaacctgcagcatcacagagccttccctgatgagatcagggtaaaactgcttgtcccaggcactgtacagcgacgtggtgatgtagaggcgcttcccatccaggctgagctggatcatctgagggcctccagccacccgttttcccttgaccactaggggctctggctgggactttagttcctcgtcctccagcacttgcacagggcctcccttaacaatgctgcctccgaggaagagctgtcctgtgaggcggggtctctgtgggtcagagatgtcatactgcctcaggtccccatgcagccagttgctgaagtagaggaagcggtcgtccagggagagcaggatgtcggtgatcaggcctggcatttcgggcagcagccagcccttcactttcttggggggcacctggatcaccttctccactgaccatgtacctccctcgttcttgtagaagcgctggatggtggagctgagtgcgcagcccacaaagccttgggcagcgtctgggttgtgcaggaagcggatctccaagggaataagcccatcttttagagacagggtctgcacaatctcatggcgctgcagtcccatacatataagtggctccgtacagtccagctccacatcagcggggttaagcatctcgtagacattggnncgccactcagtntgatatganatgtgtgagntggaacagagtatagccaangtgcanaccccagnctntccatgtccttcactcgacnttccatcagaganaaaccc

SEQ ID NO: 311147 - DNA, 1094 bp, Homo Sapiens
  misc_feature (8)..(8): n is a, c, g, or t
  misc_feature (10)..(11): n is a, c, g, or t
  misc_feature (30)..(31): n is a, c, g, or t
  misc_feature (40)..(40): n is a, c, g, or t
  misc_feature (48)..(48): n is a, c, g, or t
  misc_feature (53)..(53): n is a, c, g, or t
ggtcagantnnaaactcctcagtcccatgnnccagtgctnaatagagnagcgncgtccaggagagcagatgtcgtgatcaggcttgcatttcggcagcagccagcccttcactttcttgggggcacctggatcaccttctccactgaccatgtacctccctcgttcttgtagaagcgctggatggtggagctgagtgcgcagcccacaaagccttgggcagcgtctgggttgtgcaggaagcggatctccaagggaataagcccatcttttagagacagggtctgcacaatctccatgcgctgccagtcccatacatataagtggctcccgtacagtccagcctccacatcagcggggttgaagccatctcgtaagacattgggagctgcccactcagtgctgatcatgacattgtgtcgaggctggtaccagaagtcatagcccaacggtgcagcacccccaggtctctcccatgtccccttcacctcgaacgtctccccatccagcagcacaaaaccccctttgccattgcccttgacgtctcccagggagctgatcatcacttccccgctggccaggcagtggctggtgtggagaaaggccagttcgcacttggcatggatgtccttgggctcaatgaccttgtgcagctttggggcccggggctcagagcccacgtccaccacatagatgcgagaggagatgagactgggcagcaccagcttggtgcgcgacttggtgctatcaccgaagcagctgctgcaggtgttccatcctgagtgatgcagctcgtccttcaggttgggcatgggcagccggtggatgacctggcaatactggggagacttggggtcaacatccacagtggccagataatctggggcctcagtgcctgtgtttcggtaaatgcagggcaggtagacgatctcttccctgggtcctttcatggcctccagaggggtggagtagccgggtccacaattcccacatttcgtagccatgctgccgactggtacactttgatcccggcgggtttgctgtgctggtgtcagaggccgctgttccggggaaggagggaagggagggaatttat

SEQ ID NO: 311148 - DNA, 931 bp, Homo Sapiens
  misc_feature (40)..(40): n is a, c, g, or t
  misc_feature (43)..(43): n is a, c, g, or t
  misc_feature (48)..(48): n is a, c, g, or t
  misc_feature (52)..(52): n is a, c, g, or t
  misc_feature (72)..(72): n is a, c, g, or t
  misc_feature (82)..(82): n is a, c, g, or t
  misc_feature (85)..(85): n is a, c, g, or t
  misc_feature (94)..(94): n is a, c, g, or t
  misc_feature (102)..(102): n is a, c, g, or t
  misc_feature (714)..(714): n is a, c, g, or t
  misc_feature (913)..(913): n is a, c, g, or t
gactgtacggaccattatatgtatggattgcaccccatanatntgcancctntctctaaaagatggcttatnccttggaganctnttcctgcanacccaganctgcccaagctttgtggcgcgcactcactccaccatccagcgcttctacaagaacgaggaggtacatgttcagtggagaaggtgatccagtgccccccaagaaagtgaagggctgctgctgcccgaaatgccaggcctgatcaccgacatcctgctctccctggacgaccgcttcctctacttcagcaactggctgcatggggacctgaggcagtatgacatctctgacccacagagaccccgcctcacaggacagctcttcctcggaggcagcattgttaagggaggccctgtgcaagtgctggaggacgaggaactaaagtcccagccagagcccctagtggtcaagggaaaacgggtggctggaggccctcagatgatccagctcagcctggatgggaagcgcctctacatcaccacgtcgctgtacagtgcctgggacaagcagttttaccctgatctcatcagggaaggctctgtgatgctgcaggttgatgtagacacagtaaaaggagggctgaagttgaaccccaacttcctggtggacttcgggaaggagccccttggcccagcccttgcccatgactccgctaccctgggggcgattgtagntctgacatctggatttgaactccaccctcatcacccacactccctattttgggccctcacttccttggggtcctggcttcattctgctctctcttggcacccgacccttggcagcatgtaccacacagccaagctgagactgtggcaatgtgttgagtcatatacatttactgaccactgttgcttgttgctcactgtnctgcttttccatgagctc

SEQ ID NO: 311149 - DNA, 2313 bp, Homo Sapiens
ttcgggttttaacttctagacataaattttattacatttatagttgtatccctttgtgtgatatagttaggatttctctattaagtaattaatcctaactatatccttgggctgatttgatttctgcccccacccgacagactgacccttgtcccccttccccattccagctcaaggcacttaatattacaaagaaggcagtggctggctggagagatgggcctcaagtcagaaatcccccagtgcaacttaagacaaacagagagaagtcaccttcctcttaggaccctccctgggttagcagaaggaaagaacccagaagtcttcagtaccacagtaggcttcggtatctccctagccaggtgagggacccccaggcattctccctgcccgcaccgagtctctcttcaccctggctacttcctggccacacgtatgactctgccccttactttctgctctgagctgcctgaatacaggaagcaagagttcactctgaccagagatccagaagcctgcaaggaggccccagcagctttcaagaatggggagcagatggccacatgtggcctgctctgtcttatagcgtcacaagccaggagcaagcccaggggagatgctgttccatgctggcctgtataggttactttgctcgttctattatctgtcccccatccctaacccagataaacaatacatatgtcactgaaacaagaagggattgaagcaaggagacccatgggcacagatctcttctaccttcctgagctaaaagatgccaagccaaaggaatacaggataatggcctatgtgtccaggaggccggggacaaagctctctggctttgctgggggaagaaatagctccaactacgtagtcaagaagcctgtgacagaggtgggaggggaacctcgtgaccttgaagtcacttctacctttcatattcccttctagctatcgaataggctcttttcatattcctcacaaccccagctgttaggaagaatgtggtgtcatacagtaggtggcggggagaagacacatcttcagcctagtccctgccaagcccaccaagagcaacagttagtccctagctcctccgtccccaccaagtacccacacatccatagccagagaggccacctgtctccaggacagaaaggaaactgggcatgttactcaaggggaaggaaaggggcctaaagcccagaccacagtcatagggcccagccctctagcttggaagggagagcccaggatcgggtgaaaatgggggcttgctccttaattgcgatcccccatcagctgcagcacaaaggtgaagatgtagatgatgtctgtgtaaatctgcagggcgccagtgatgtagtcctccgggctgatggtgtgcttccggttccccaggaccagctgtgtgtcgtaagccaggaacagggtgaaacaaatggcccccagagcagcatagagcatgtggagccagtaaacgtattggaagtagagcacaatgctagtgacaatcccagtcaccaggagcacaattcccaggacacagaagaggcctgtgcacgaggtgaagtccaccttggtctgaaagcagaagatggtgactgaaatggataccaccgcagtgatgatcattgcaatgatgacggctttggtttggtacatactggaaatggtgcccgtcatgaagcccatggcaaaagtaaaaagggtcagcagaatgatgttccatgggaaacggcgtctgggtccctggcagcaggcaaggatcaggtaggtgacaacgaagacagcataggacacgtagtagacagccacatttctcctcacaaaggcgctgacaggttccacaaaggtgaagatagcaatgatggccacagtgatgagcagctgcacggagatgatggagtaaacctttcggataaaagtgtgtcgcactttccggtcatcccactctccaggcccgaagctatcactcaccgctctctcctccccatcatagccatggcctgggccgtagttcatgggcatcgggtgggtggggggcatgggctgtgggtagccagcagggtgaccgtagccaggctgcgggtagccagggtaggcaggataccctcctggcaggacagatggctgcccatagcccccagggggcggagggcctgggtacagggggttgcggtcttcatatggtggtggggcgctggggttggacatggctgctcacgggctgagggggaaccccagctgctgggacctgcgccgttccagacggagcgttcctggcctcggagtgttgcaagtcctccc

SEQ ID NO: 311150 - DNA, 630 bp, Homo Sapiens
gctctatctcactgttactttcttcactggcagcttcactggggttacagtccggttcaggatgaggagatccattcttcagtttggggcttttctctctagtttctccattcatttccttttctttcttcatcttcttgggcttaggagcatctatttcttcctcagaaggctcctcattttttgtcacttttttggttttagaagaaaccactttcttttcaatgggctcctttttctttctcaaacttttggttttaggagaaatgtcattttgagatggctcctctttcttttttgcctttttggatttaggagaattcatgtcaacttcagaaggctctgctttctttttaacttgtttagctttggggaaaacagtttcttcctcttctgctatctcttcagtcttatcagattttggcttctcttttttctctttctcctcggtttgctttcgcagtgtctccccttttttcattgcggtgtctgattccaaaccagcgtcactacggagttttcccggcatcttcagcgcaggttgcccaggccgaccggtcttctcaaccgcgtggagaggaagaggtagttccccaccctgggtccacccggctctcgtcacttcccccc

SEQ ID NO: 311151 - DNA, 627 bp, Homo Sapiens
taaattgttgatatgtcttgaatctgtgctccatgatttctcccagtaatttaataaacttttttaaagtcctcactttactatccagatcaagataggtctctcttgcttcttggtactgcctcattatttcctctcgatctccatgactagcatgttctgcctgtatcttctgccttaatcgattaatttctttgtccagtattgatgcagatttttctacttctatacgctctgggcagatttgtcttgcttgtgacattttctcctctagttctttctctttcatatccagttctcgtttctttttatttaaggtatccaagtgttctttttgtttttcttcataatgtcgtttccctcgtttttggttatccacttcagaatcagcaaggtttaattcatccttaagtgggtctgctagctccgatagttgattaattttgaatttaattgcatcatacttattttctgcttctattttcagacttttaagatgctccatattttctttttgttgctccatatgttcctcaaccattttcattttgcttttattttcctgagcttcatcttccaaagttgcaatatctacagactggtgttcttctatgttctcaagttccc

SEQ ID NO: 311152 - DNA, 674 bp, Homo Sapiens
gtataactgagagtcctttgagccctttttaggcagggaggcatgtctgtcatctagcgtgtggcccagtaagtgattattacattggaatcagtttttcagtcttttaaagtaaattctgtgccataagaataaaagataaagagcaaaattaatgttaactatttttagcttattataactatgtcaacaagtgtttattaatatctattatgggaaagtcactgtggttggcattgaaaattacatcatctttaaagcagtatttgtccccagatggactcatcactagcaaaggctaggttcattggaaggcatagggtgagagaatgggaagatggagtggaggcgggttgttaaagtgctgtcagtgagtgattttgtctacttgaataatggtccatgtttgggggcatattgtgtttcataagaagtgaaaggtatttgcaaagtaagctacaaatgaccccataaatcctgttaacaaacagtccttaatttgcaaagaatgaaaaacaagcattactgctacccaaagggaactggtgcttggtgatgtgcagatggggctgttggttaagagagctattacaggttttctctcttaggtttcataggaggtagttactgagatgagattgttttatctttttgaatacagatctcttgtcttg

SEQ ID NO: 311153 - DNA, 716 bp, Homo Sapiens
atagtattgagcaaaataatcagtacacacaaaattccactaatacaaagctcaaaaacaaaattaagcaatatttttagaaatgcagttataaatgatgactgacccactatcaaggaaagtatttaacattgctctgaaagttctggaaattcttgattttcctttctcaatttatacacccatcaccacgcccagttttccccaactcactaaacagcaccgtcatccatttagcatttcaagccagtgagaagtcatccttaattctgctttttcattaatttccctacttctaatctattacgtgtcttattagatctaagatcaatatatttcctgaatatgtctatttatgtccatttccaacactaccactgaagtctaagccattgtcacctttctttctggattactgcaatagcctcacagcttccacttttgaccacatacactccattttgcactcagcccttatagtgatcattataaaggataaaatggtgtggccagttagctcagttggttagatcatggtactaataaaatgcaaaacatgtcacatcactcttcttcatgggttcatgtcctctgtgggtcaggtcttccacatgtagagtagaggtagggtatgttcacaccttcaatgacaactacacatttctgctccaacaggtccaaaattgttcctaggtttcaaagttgttgtttgtttg

SEQ ID NO: 311154 - DNA, 313 bp, Homo Sapiens
gtttaaaaaaagggagagtttcttcattttatctttatgatggattaatagctgcaaacaatctaattaatactatctacaacaggtaatttttagctaagatttaagttcctcgtagctctgaaattttaactgaattttagttgaactcttaagaaatgttaaccatgactcttaaaataactgctctattgtaaaatttagaagtcacattcctaatattcctctcgcctagactaaaaattgttgaaggtctcctttcactatcaaagttcaaagatacttgtgccacagtatacaaatcagcagattt

SEQ ID NO: 311155 - DNA, 432 bp, Homo Sapiens
ggagcccacgaggtaatattttgtggtggtgatcctagctcctaagtggagcttctgttctggccttggaagagctgttaatagtctgcatgttaggaatacatttatcctttccagacttgttgttagggattaaatgaaatgctctgtttctaaaacttaatcttggacccaaatttttatttttgaatgatttaattttccctgttactatataaactgtcttgaaaactagaacatattctcttctcagaaaaagtgtttttccaactgaaaattatttttcaggtcctaaaacctgctaaatgtttttaggaagtacttactgaaacatttttgtaagacatttttggaatgagattgaacatttatataaatttattattcctctttcatttttttgaaacatgcctattatattttagggccaga

SEQ ID NO: 311156 - DNA, 870 bp, Homo Sapiens
agagccaaaggtccgccctttttcgcgggcctctcagagggcaggccaaaggcacccccagttgtgaatgacctggcccccggaagttcccccgggcccgagaaaaggggttggccctcccttccaggtccctcaacccccttaggtggccccacatggcaccccgatgggggaggcagagttcagagccaagttcagattttcctgaatggggaaaggggttagcttcctttggtggatggtctttcatcaattgggtctggcactgacaggttgatcatgttacaaaggacaatcccatctccgacagcattaaagagatccattcgtgtttggggttcattgggatgccatgccgacaatcaggatcattttccagggctttgtttatccagttgacaaaggcatacttttcttcctctgaataggagtgttgggtgccaacgctagactgctctgaagtaccaccgattgcacaaatcccttccttcttattgattgcttttctaaaggtcttggcaacatctgtgctttttaggccatggaaaatcttgataaactcatcaaagctgatccttccatcttggtccagatcacctgtagccatcaggttttctgtaatttctcgtactctatacccaggcaaaggcaagcaagcagccttgaacaagtcattcaactcattgaagctgatgtatccattgccatcagtgtcaactttggcaaaagcttctctgagctccatcatttcctcatcggacactgatcctctggccattttttattgctttaggtaacagatcttgcaggaaaaaagctgtccttggtagtactggtgtatgaccaggaacccctcctttctgatctgcc

SEQ ID NO: 311157 - DNA, 1632 bp, Homo Sapiens
tttttgactacttcaaacatatttattatttttacagactcaaaatacactaataatcctgcaatgcatgctggtgtcatgtgacaccaggcctggaatcacacctctgtccagcaggcacttgtctcaggtgaggcagttttctgagggggctcccaggagcagcatctcaggacacctgagagggagggggctgcaaggaacacctctgtgtgcacacgcctgtgctgtgctggagatgagctgtcaccttgaggtggcgtcagaccttgactctggcttgggagccccaaggttaagggaaggttaagacatgatcaaggtgcccatgagattgtgacagggacatgctgggtttctgtggcttgactgcttggatgaacatctcatttttcaatcacacagttgcagtgcagaaaggcatcaggaggcttggtctggtattaggaactgaagaagcagcccaatccctgaccagaacggtagcatcaaatgccttgtggtttccaggtggctgtggtagtgactcaggagtcctttagtgtgttctcgtgaacaccaggttatgtggatggcaccttatacttttcaaagctctttcaatctgtccgctcattctcttctaggcattgtagcttataccccttcctctcaccgacgctggtttagacctgtcaagttcttgagcgtcactgctgcacccatgagtccttgcaccagtgcctctcctgtggactttacctgcttggcagtgtggcccatgttcattgcatcattaacccggttttccaggaagcgccaagtgtcctcaaagtctggagaggagtcctgcatcatcaccagcttctgttgtgttgtagatggcagccagcatggctcggcgggtgtaccagttaaaatcagtggactggtccccagcgtaatgccacatgtcatccaccatgctggtgagcaggctcaggctggacgggatgttgtgagggagcatgaggatgctgagggcccggggccagtgctcaatgtatgggatcagcattctcagtctggtttccactgcatccctcaggaactggtctgtcttcctcttctccgcctggcccaactgtaccagcttctgctcctcttctagcacacgtgtgagccgggtattgcactgggtcacaaaatgcagtattagctcactgccatccttcccgaacatgctggctgctgcactggagagacccagagactgggctccttctgcaatcgcctctgctgtccacccgtgggcgggcacaaactcaagggctgccgtcaggatgcggtgctgcaactgctcctcactttcatagtcctcctcctcctcgccgccctggtctgtatacctggggggtgaatgagaagactctggatcaggtttttctgccccctgtgtctcagaatgctgctgagaaaatgagttgggaggctgctgcttctgctcatctgaagaccttagccccacagctgaagcatggaaggcacgcggcaccagggcttgtcggcaacgggccacgggcaggcatcgcagctgcaggagcctccagcccgcccggccaagcgcaccagataccgccgccgccgccattttggaagcgggcacgtcgccca

SEQ ID NO: 311158 - DNA, 524 bp, Homo Sapiens
  misc_feature (363)..(363): n is a, c, g, or t
  misc_feature (456)..(456): n is a, c, g, or t
  misc_feature (466)..(466): n is a, c, g, or t
  misc_feature (484)..(484): n is a, c, g, or t
  misc_feature (498)..(498): n is a, c, g, or t
ttaacttcttcaaacatatttattatttttacagactcaaaatacactaataatcctgcaatgcatgctggtgtcatgtgacacaggcctggaatcacacctctgtccagcaggcacttgtctcaggtgaggcagttttctgagggggctcccaggagcagcatctcaggacacctgagagggagggggctgcaaggaacacctctgtgtgcacacgcctgtgctgtgctggagatgagctgtcaccttgaggtggccgtcagaccttgactctggcttggggagcccaaggttaagggaaggttaagacatgatcaaggtgcccatgagatttttgacaggggacatgcttgggtttctgtnggctttgacttcttttggatgaacatcttcattttttccaattcacacagtttgcagttcaggaaaggcattcagggaggctttggtcttggntattttaggnacctttaaaggaagcagnccccaattcccttnacccagaccggttagccttccaattt

SEQ ID NO: 311159 - DNA, 977 bp, Homo Sapiens
  misc_feature (753)..(753): n is a, c, g, or t
  misc_feature (812)..(812): n is a, c, g, or t
agtatttttctcctacgcaatcataggactagagacgatcatgctcttcattgatggtgaccgcatagacgcccccagtgtgaaggagcacctgcttcttgacttgggtctggaagccgaatacaggatccaggtgcatccctacaagtccatcctgagcgagctcaaggccctgtgtgctgacctctccccaagggagaaggtgtgggtcagtgacaaggccagctatgctgtgagcgagaccatccccaaggaccaccgctgctgtatgccttacacccccatctgcatcgccaaagctgtgaagaattcagctgagtcagaaggcatgaggcgggctcacattaaagatgctgttgctctctgtgaactctttaactggctggagaaagaggttcccaaaggtggtgtgacagagatctcagctgctgacaaagctgaggagtttcgcaggcaacaggcagactttgtggacctgagcttcccaacaatttccagtacgggacccaacggcgccatcattcactacgcgccagtccctgagacgaataggaccttgtccctggatgaggtgtaccttattgactcgggtgctcaatacaaggatggcaccacagatgtgacgcggacaatgcattttggggacccctacagcctacgagaaggaatgcttcacatatgtccctcagggccacatagctgtgagtgcagccgttttcccgactgggaaccaaggtcaccttcttgactccnttgcccgttcagctttatgggattcaagcctagattacttgcacgggactggacatggngttgggccttttttgaatgtcccatgaggttcccttgcggcatcagttacaaaacattctctgatgagccccttggagggaggcatgattgtcactgatgagcccggggaacaataaaaagggggcttttgaattcgccattgaaagggttgcccttgggggtca

SEQ ID NO: 311160 - DNA, 755 bp, Homo Sapiens
agggactgcaatttgttactgtataaataaagttctgttaattgagtcaactctttgattgatgatggcaatatgtgtatagatctcttggataagtccaaacgcattgaattctcttcccggcatttgttgagctctttaatcacctctgcattgctggatttttttctagtcccaggtgctgggtttggccgtttgatcgtattgtcaactgaaaatgccacccctggttgggcagcactggagtccttctttccatctttggcatctttccctttggtcttaggttctttttctttgctctctttcccaaaacctccagaggcttttgcctccttttctctttccttggctgatggtactttgggatctttttctttagagtctttttcttttcctaaactactactcatggtgactcaagcctggacaaaaactacatgaactccttttattttccagtaattgaattcaaagatgaagagacaaagatcctacacaatcaaaaaagtactggcttgaagaagtaatcagcatggagtaacatccatctgttacatgttggatctaaaagcactatgcccatttctgatcattcattccaactggtaaaatagtgctggtcaatcaatgattcattagagttccgtcaggagccccgactccgccatcctcctcgctcgccctccttcctcctcttcctggcccagggccgtttgctgggtgaaggggcatccccaccatcctcggccccc

SEQ ID NO: 311161 - DNA, 2490 bp, Homo Sapiens
  misc_feature (149)..(163): n is a, c, g, or t
  misc_feature (1084)..(1084): n is a, c, g, or t
acaggcacctcggcttgttctgcggcggcaggttgtttttcttggggaggggagacgggtggtatacgcccgggtctggcgcgacgtgcggcggaaagggaaggcgccggggcaacaacggggaaaggatgttggaaaaggatttgttnnnnnnnnnnnnnnntcgcccgcccaaaaaagggaatttacgaggtggggaagagggggtgggaagtaggaaaaggggggcgggcgcgcaggggtaacaagacgtggacgagagaaggcaggggggagggaatggaaaggatgtaagtggcgaaagcggagtacggaatggctgtatctggagaaaggggaggcggggagggggaggggataggatgggtgtgtggtttttgtgcagctctgaggtaaacttttatttcttggctgacaggacttccacacccatgctcctcctggcaccttttactctgcccaagcagtggcagcccagtccaaaaggtgcctgccatggccaaaggggttggggagtcacttcacattccaggctggaggagtgagaggacttgggggtactcctcccaccccattgccagcaagaggccatgactcacctcaaccccaagtcctgcatcctggtgggaagtgacaatgcctcctcccagctctccatacctaatggggtcatgaccagacagggtaggacccaggcccccagcttcagttggtaacggtggcctccacggctgccccctgtccaggtgacaaccccagcccccatgatggggcagcaaaggtctcttctcctccttggtcctcagcaacagacagagccctccacaccaggcaggacagaggcaaagtcagaagcagcagcggtggcagggaaggagcagccagcacaggcccagggctctcctgaagtcatttaagctgtcttccatgcggctctgggactggccactaggtgggcgtaggcggctgtgatacaggtacttggacacctttctgtcctgatgctagctgatacttgtctttggctgctgcccgctccttggcatcaaaataccagacagtgatggcgtacctggtggcatangctggcttcacctcgtggggtttccgccggttcagaccaggaaaatgagcaaccggtcaaaagagtggctcgatgttggctaccacgggcccggccctcaggggaagatctgcagcaggccgccatgcaccttaacgtccccagttctgattcaggtaatagatacaggtgatgcagcgcccatcgccgtggggattgtcaacgtgccttacgtacccgagcccgttgcctgggtaacacgccaccatggccttggtgcgcccgttgatgacatagctgcccagccgccctgcgcagtggcggatgacggcgtccacatgggccatgagggcaccaatgcttcgacagcctggttcatggccttccacccaggcaatctggtccccacggatgctgcgcggcgggatcgccctctggctcactagctgcccgtctcgcaggcgcccaccccgtttgagggcctccacctcggccagcacgcgaccgcccagtgctgcccccaggaagctgtccttgacgcagatgccgtagtaccgcatgcagggcacgatatagtccagggccaggcgctcgggcgcagagggcagcgcctcctccatcagcccagcactggcctcaccactgccactgctgcagctgcaggctcatgccaccctcccggtttgcctcctgtttttcttgcctggcccagggccgtttgctgggtgaaggggcatccccaccatcctcggcccatttccgtttgggggcttcaggccgtgcgccctgggctgccaatcgctggcaccccttggtgaccagcgctgcagcgccttcactctgcagcggccgcagctcaccaccatcctgcccgccaaaaccgtcccgaagagggctggcagtggtagaggtggctgtggctctgggggtcccactccctgccgaggcctcactaggcactcctggacagtggtaggaggggagcaggggacagggcaggtaactctccactcccatcctggcccggccaggctcaggctccaagggctctgacgaagaccctggtaactgagggagagcctgacttaggggctgcggctggcacgggctgtccatggcagcagtgtcttcatcccccgggcatggagggcaccgcccgggcccatggtgccaccctcctccgcctcctcctccgcctccacttgatgcagctgggggccaccgggcctggcgtggggcagggtgaggcagggcagacagcaagagctcttctcgtgccctgggggttgcttgctggtccccaagtcctctgcggtccctaagggcttgggaagggacccttcagggtggcgagctttttcctccggccccggcgccgccgtttgtgccagccgccctgcgccgcacagcgcgccataccccgcccc

SEQ ID NO: 311162 - DNA, 1166 bp, Homo Sapiens
tttttcctcaccgtattccacatacctgtggctggggaaggtaatgttacctctgcaaacagatgctctggtaagagaagaaagacacagggaaggcagagagagcaagacagagggctcaatcacaaagctgggacaaggagagcagctgtttttcacacattcctgctcctctctcagctgggctcatgttcactccgtttcattccaatcatcagggtggagatttcagaggtgactatccctaatccagtagagaacatgagccctgggagcacagctgcctggagtcctcccaagggtctcctccccttttccagactcagcatcattgaagccctaacgggtccttgtaaattaatgtttcatattatcgaaggactgtcagtttagtttggtacagtttattgtagcctaagaggtccagcaagatttcaagagaggagagatgattgcattacttgattacaatgaatacaatctttaggatactctttactttttgtacaataacgatatgaaaggaattttttattctacctatacacagctcaaaataaaggtataacttctggaactgagaaactgatggtatggagagagggacgttttcataagaaaatagctttgataagtgtatacacaaaggcatatatatatacacacaaacacccctctctcttatatactatacaggctggcacacgccttataaagaatataatatcaaggctttaggatttcaatgaattttggaattttaatttgacaggtgcttaggccatttaggtcctgacatatcggaatcccttgtatttctaaagtatataattatgtttttaaaaaggcccagatcaactttccttaaacagtaacccaacataaagccatagttaccaagtggaaaataagattgttattctgtattaaatcagtaaagggtattttaagagaaaggacaacttggaaaatagagacttcagagtccattattccaagctgagaacattttagttattagcagtggttaccaaataagctgaaggtaaatctcttcaaggagctgctcataatttgcgttgttgggaagaggcgaggagctgtttctctattccactataagatgatgcaagtttttttatccttgaaagggttttctgaagttg

SEQ ID NO: 311163 - DNA, 430 bp, Homo Sapiens
aaatcctgcccacagtttttgttttggtatggcctgaaagctaagaataattaagaattcacgtttttaaatggtatttttaatccaaaataacattttatgacacatgaaatttatatcaatagctgataacacagaaagacagacattatctcctgacagaaaaacacatcaccacctatgcaacagtactgcccaaaacaagcaaacaaaaacaatatcaaacctgaatctaatcaaccacctagatccaaatgtcaatgtataggaaacattatgaatagcgagacatgtgaaataccaccacaagaatgtaatcagcaaaacacaggctgtgaaaaacacttggggagaaaagcctaggaaaatgtaaaaaagaaagagcatgaagcagagggagagtggcaaacattaaaagacttaaacgacc

SEQ ID NO: 311164 - DNA, 1335 bp, Homo Sapiens
  misc_feature (738)..(738): n is a, c, g, or t
cgggggatgtgtggggttggtcggtgtgggcgtgtccgtggtgtggccgggtgcgtggatgggggccgggtcgacagctgcgctccggtggtgggaggtcgacgaatgtgcttgccaggggatcgtgagtggggtcggggagccgggggagcgtggtcgtgctggcagtgacggctttcccttgcagctgtgaattcggttgcatggattcccacccgagacctgagaacacggatcgtcgacggacgtgtactgttgttcagtgaaaccccataccgaggttcagaatcaagggaccagtcccctcaggcccactgatccggccctgacgaagcctgtgacgtgcaaactgtccaggaagccctgtgacatcagcagacaggaaggctgagaccagaatgttatatctgggcacacaactgctcacctgtgcactgggggcactacaggatctgggcgcacatcctggtgtgtttagagatcaacaggcactgcatgtcccgcaggctgtgcagctcctcctgcgccagggctgtcagagccttgctccaggtaatacactttaaaaaaaggattcctaaattatccacttgtgggtttttaaatgctaggatcttcaagggggaattaaaacttttgtctgattgtttctacttttttctacttagcttactcctcgaagccacaggaccagtctatgttattgtcctggccactttcagactctcatgtttgcangctactggaattcccggaggtgagcgctggagctgctgatcaggcccattcccaggttctccgggaagggagcaaagcgggaggcggcacgctcctttgtcttccactggctgaatgccaaaatccttcacgctaccagtctctgcgaactccaggtagaagtagccacacttgactgcccggtgcacctcaaagcagaatcccaaacaagaatcctctatcaggtctacgtaaatctcctgagcgatggcctctagcttgttagtatccaggttggccaacgaaatttcctccattttaatttgtaaacgagtgcggagagggcgctcgttttactcacggcagcaacacgtctggctccgcgggccgcgcctaggcctagaggcctttcagtgcccagtcctccggcggcggggtcggtggcgtccgcaactgcaggagcagcgataggggcgactgctccggaatcccaagtccttctgtttgttttgacgtttcccgggttgcgggcctttcagctgcgcctggcccaggactcaccgccaaaccgtctcagcgcctcacccagcctcctgggcctcttccgctcccctgtcg

SEQ ID NO: 311165 - DNA, 982 bp, Homo Sapiens
  misc_feature (926)..(926): n is a, c, g, or t
  misc_feature (958)..(958): n is a, c, g, or t
ggggctacacccggaagtgtcttcagggagaggaagccggcggcctcactgctatgggccgcaacaagaagaagaagcgagatggtgacgaccggcggccgaggctcgttcttagcttcgacgaggagaagaggcgggagtacctgacaggcttccacaagcggaaggtcgagcgaaagaaggcagccattgaggagattaagcagcggctgaaagaggagcagaggaagcttcgggaggagcgccaccaggaatacttgaagatgctggcagagagagaagaggctctggaggaggcagatgagctggaccggttggtgacagcaaagacggagtcggtgcagtatgaccaccccaaccacacagtcaccgtgaccaccatcagtgacctggacctctcgggggcccggctgctcgggctgaccccacctgagggaggggctggagacaggtctgaggaggaggcgtcatccacggagaaaccaaccaaagccttgcccaggaagtccagagaccccctgctctctcagcggatctcctccctcacagcatcactacatgcacacagccgcaaaaaggtcaagaggaaacatccccgacgggcccaggactccaaaaagcccccaagggcccctcgtaccagcaaggcccagcgccgccgtctcacaggcaaagcacggcacagcggggagtgagaccgagaacgaagcggtgccccagtctaggctgcggggacctgtccttgctcagcttggctgtccctgtagcccagcctgcacctaggtaatgactgcacagctcaaggttgggaagccaggacctctctggcctggggccagctgcctttgcctggggtcagctgctttttgcctggggtttgaattccccgaaaggagcaggcagctgagagcagccctccccccagnaagagcttccagagccaccgtggggggcatcnttccccaaatggtgcacccccacc

SEQ ID NO: 311166 - DNA, 458 bp, Homo Sapiens
  misc_feature (129)..(129): n is a, c, g, or t
cgtcatccacggagaaaccaaccaaagccttgcccagtaagtccagagaccccctgctctctcagcggatctcctccctcacagcatcactacatgcacacagccgcaaaaaggtcaagaggaaacatncccgacgggcccaggactccaaaaagcgctcaagggcccctcgtaccagcaaggcccagcgccgccgtctcacaggcaaagcacggcacagcggggagtgagaccgagaacgaagcggtgccccagtctaggctgcggggacctgtccttgctcagcttggctgtccctgtagcccagcctgcacctaggtgtgcctaccgcatgttgccgctgctgtttctgctgggacgtctgactccagttccttctcccctctccagtgacaaggtcatttacaacttacatttacaatttatagtgtttaccagtattaaattctcagccactc

SEQ ID NO: 311167 - DNA, 338 bp, Homo Sapiens
gcaagctctcttagcttgtgcattcagaccagacatcacatgtaaatatttatacacagggaggtgggaggggagggccacacgatgcgttgctgcgccccccgccttcctctcactcctcttctaagaagcgcggagtgttctgccttttcacctacgcagccccagcccggcccccctggggaccctagagagggtgtcctttctgtttatccttctctttgctccagatggctgcgctctctaggggcgcgatgtgtgtgtggtggagccgggtcccctccagcaaggagggcggcccactgctctgctggtgctggaaggaggaccccgggtag

SEQ ID NO: 311168 - DNA, 1001 bp, Homo Sapiens
ttttcctccaactttgatattttattgaaaaaagtacacaaaaaccactgaggtacacaagcccaggtaagcataccaagcaagccccctcacaccttttgtctgaaaaaagcttgacttctttgcagcaatgtctcgcccattccagcagcagtatctcagttaacttggttccttttcctccaggctcaaaacaaaatcaaactcttcctgggtcaggggctggattgataatctctggcgagtgaagagaaccatattttttaaggggccaccagtagctttgtgagcttgatgataggatttgagctcagccaggggaatgaaacgtttcatcatccgaacaaactgtacatccaccatggaccacttagggttgtcctctttgctagatgggtcataatggggattgtttttctcaaactgtgtgtggtctgggtaagcctctttcacgatcttcatgagtcctgcgatgcctggctctttgcagttgctatggtagaagaaggcttcttctcccagcttcatggctctaaggaagttccgagcctggtagttacgaacaccatcccagcatgttgtctgtttgggctgtgctttgagatcctcaatgctgaacttcacatctacacctttctctaggcggctctctggctctgacttcatcagccagtggctgcttagattcttcaaacagtttttagtggctgaagtcttctgagggttggagtcctccactttagctaatgcctcacctgagttctcagttttggtgcgttttcctgatagtcccttgtctgaaccagaagtcccagccagcctcttccggggtctcgacatggtcacgctgcaggggactttagtgcggacgattcttgttatccttgctaattaggatcaactgaatggataatctagatgatgaagtaatttgctggctacagacccaacactctgcagactcgactgcggtccgcctccgctgcgccgcaggctgtccc

SEQ ID NO: 311169 - DNA, 870 bp, Homo Sapiens
ggcctcaaaaaaacccaaaattctccaaactcttctttcccgtggggtcccaggggggctgggaaatgaataaattcttcttgggcgaatttgaaaggaggacccaattatttttttaaagggggccccaccaggtaggctttggtgagcctttgaatgataaggattttgagcttccagcccagggggaaatgaaaaccgtttccttcatccggaaccaaaactgtacctcccaccatggacccacttaggggttgtcttctttgctagatgggtcataatgggggattgtttttctcaaaactgtgtgtggtctgggtaagcctctttccacgatcttcatgagtcctgcgatgcctggctctttgcagttgctatggtagaagaaggcttcttctcccagcttcatggctctaaggaagttccgagcctggtagttacgaacaccatcccagcatgttgtctgtttgggctgtgctttgagatcctcaatgctgaacttcacatctacacctttctctaggcggctctctggctctgacttcatcagccagtggctgcttagattcttcaaacagtttttagtggctgaagtcttctgagggttggagtcctccactttagctaatgcctcacctgagttctcagttttggtgcgttttcctgatagtcccttgtctgaaccagaagtcccagccagcctcttccggggtctcgacatggtcacgctgcaggggactttagtgcggacgattcttgttatccttgctaattaggatcaactgaatggataatctagatgatgaagtaatttgctggctacagacccaacactctgcagactcgactgcggtccgcctccgctgcccc

SEQ ID NO: 311170 - DNA, 444 bp, Homo Sapiens
  misc_feature (176)..(176): n is a, c, g, or t
  misc_feature (349)..(349): n is a, c, g, or t
  misc_feature (418)..(418): n is a, c, g, or t
ttgatattttattgaaaaaagtacacaaaaaccactgaggtacacaagcccaggtaagcataccaagcaagccccctcacaccttttgtctgaaaaaagcttgacttctttgcagcaatgtctcgcccattccagcagcagtatctcagttaacttggttccttttcctccagggntcaaaacaaaatcaaactcttcctggggtcaggggctgggattgataatctctggcgagtgaagagaaccatattttttaagggggccaccagtagctttgtgagcttgatgataggggtttgaggctcagccaggggggaattgaaacgtttcatcatcccgaaccaaactnttaccatccacctatggggccacttaggggttgtcctctttgctaggatgggggtcataatgggggggnttgttttttctcaaactgtgtgtggg

SEQ ID NO: 311171 - DNA, 921 bp, Homo Sapiens
  misc_feature (444)..(454): n is a, c, g, or t
  misc_feature (673)..(687): n is a, c, g, or t
aataaatcctgggaacaaatgcttcaactttaggaaaagtatgtctgtgtctgtgatcgtagtacccccaaccagagttcgttttgttttctaatttctcccacttagtccatcctctggcttctggatcaaggctctgtatattcaaaacaaacaagcaaattacagagtaggtggggcaaactcgcgttagtgcaaggagtcagttcacaaggttttgcataagtatattccattccaaagaagtaaagctcacaaaaaactccttaacaaggcctttcattctttgaaggagaggagtatggtataccgtgtgacaatcaccaataagaaacctcccaaccctcccttttaaaataacaaatatgctgaatatgtctaattgcatgtggactggtaagagtttctcagttatcgcagttccaaaacattttcaagatagcnnnnnnnnnnnaacttaaaaggcaagttctattttcagactttcgaacacgtttaaacttgcaactgggttttcctttttacactgatcagtttttagtgtcgatgcacaataccttaaagatggttgacattaagaacttatgcacactgaaataatgaccaaaaggatccaagaaagatagctggatacagtagacattactctgagtgtctcacatatgtttccagnnnnnnnnnnnnnnngccactgaaagttgttattccatatggcactgaaacaaacattcagctcagtttaggtaagagttacttatccctgaaaataaaggcatcagattctaagcagctttaggaattcaatgcttccttgtgccgtgcctcttctgggaggtgaccactgatccaaggtcctaaatcaaatgcaagtgttcccagcagataacttccttcgctgtcactgatcaaggctggacccag

SEQ ID NO: 311172 - DNA, 696 bp, Homo Sapiens
tcacaacttaggtggcccatgaggggaacctcagtaattttcttgttctgaatgtccagggtgagtctgtaagacgttttgccctcagtagattcatcattaactctgaggattgttccgaggtcaacatcaaaatccggaatttggacttcactggacaaggtcatactctgccgattatatttgaatgtcatggtagcctcagtctgcttcgcaccttctgcttgagttacaaacttcagggtatccaccaaggctctgtcctctctctggagctcataggttgcgctgacagaatactgctcaatctctcctgtagggcctcagttccagctctaatctgggtgtccccggtcagcggatagtaggaggcggagtctgtggagctggcgttggagtaagcgcctgaggtgcagtaattcaggccaggaaagacttgcttgcaaactgaccaggactgcctgttctcaatgagaggtgggatcacctccgttttggtggtagagaccaaatgtaatgtgttgcctccactgagcagcttgactggtctctttggggaaggaatgataaactttcagcttcccagcttttagggcaacatgagcctccagacccgactcgtggaagaagttggtgttcatctggaccccactcctagcgaagtccggaatgatgatgcccatatttgtcaccaac

SEQ ID NO: 311173 - DNA, 501 bp, Homo Sapiens
gagtgtgttcacagagccaacttgttatctataacattttctaaagcttacatccacacttatacttactggtccctttggcagtggatatgagaaaggcgtatttgcagatggcataggcatgggcatgggcattggcaccgttccatcaggtccaccaactggtgctgtgaagccaccactccctcctcttccagggcctcctttcttcacatcatctgtgaatccaacatcaataagatctgtctctaccccaggaggagcttctgccatgaccacagagtcaggttcatagggtacgttgtgattctttgcaatttcaatcaggtatctctccaccaggattttgggtggggcttccacactcagcttgtgcattagctgtaagtaaaaagacccagggctaagatgcatgtataccaaccagcctaatccccacctcactatgcgaagttagctcctctcattttacaggttatattgagggaaaaaaaggttccg

SEQ ID NO: 311174 - DNA, 2374 bp, Homo Sapiens
caggatctttaactttattagcagctactgagctacagaatacaaaccaactgaaaacattaaagaaaggctgcctgaaacaagtatgtacaggtatactacacagaagcaaaagctgtatcatccaatcccaaagccacccctgtggggaaggatgaccttagctatgggccaaaggagtaacagaagttatgacataagagtcccatccatccaggaaagcagtgaacaactacagctgcatgggcaccaaaaatttttctgagattagttttaaaggttccatgaatcaaagttttcaaatgaaaacaggtacccctcttttcctgtaggctttccagctcactacccaaaagacttgagtacttctattaaggcagctggaagcccaccctaggacttgaatggcaccttgtcctttctctgccagtaatgcaatccaacacaatatgctacagggaaaacagaatttccacggtgccgccctctggtacaagggaaacagcacgcaaagcaaaaggccacagagggctccctgagaatccagtacaactaagcgaggccttcaactgtcaagacaaactttgcaactggatcccggtgggacagtgccctgcagcgaggagtactgtatatgccaatgagagggcccagcttccaggaaccgttacaatggcgtcccgagtcattttccctctcccacttgcattcgagagtgagaaaacacacaaggtggccttgattctcactcaccacaatccccctgtacagaggggtctgtttctaagtctggaacctcaacacgaggctgggatgcttcacaacgtgctctctcccactgtccagccatctttggtggtcttcccacagtgcttcccccatcctctcacactcctgtggagggaccatgggacgggccaggaggaaacctgggatcactctgacaggaaacggacaagcacagctgccaggagccagttgctctggcctcagtctccaattgttagtctcaggatcaacagagaactggaaagcagcagaatctggaggagcaggaagagagcccagagggagtgttgtgctgagtgacggttaacagatgaaacagaatttcatggagattctttgttacaaggagaaattgctcagtctcaactcccaaaacgtgaaagttgcctggtttaagagacctatgttttctttttcagctcttcaaacctccgggaaagatcatcaaagtcaatgtcttcagatgctgaggtgctggcaccagcagatgcagttggtagtgtgtctggcacagatggcaactctggtaggacaaagttgtcatagttatctgcaggtctggaaggaagctttgcagaggcttctggcttgggtccaggaccaacaatctgtgcagaagagatattcttatcagcattaatgtcatctacagattcatacgatgggggagttgctggtatctgaggtggatgaatattgggaaaggcctgataagtccccattggcagtccattgaaatctgatggtccctttggcagtggatatgagaaaggcgtatttgcagatggcataggcatgggcatgggcattggcaccgttccatcaggtccaccaactggtgctgtgaagccaccactccctcctcttccagggcctcctttcttcacatcatctgtgaatccaacatcaataagatctgtctctaccccaggaggagcttctgccatgaccacagagtcaggttcatagggtacgttgtaattctttgcaatttcaatcaggtatctctccaccaggattttgggtggggcttccacactcagcttgtgcattagcctgtcattcacagttccaatctggttggtcctacatagcttgccatattccttgctatacttggcacagagctgatcagcaactattttcaactcagccacttctgactggagtcgaggagcagcccagatcaatgtagacacagattcagccagaccagaatctagttccttcatagactggataaggccaaaccgagccagcagcaggtcacagtacagctccaggatctccatggcctccacgaggtagtcttcccggataatgtgctccacacggatccgagctcgttcatctttcccagcagccagatagtcagcaatctccttccttgctttctgggccagttccgttttctttttctccaatagtttaaggcgatttatgactaatctcaaattcactcttaagcgctcagctttaaatccagagcccagcatgctgtgctgttcctcctaaccgaatcctgccgtgaacgcagcagacaccgacttcagggttcaccatccaaaatggcgactccctcccc

SEQ ID NO: 311175 - DNA, 427 bp, Homo Sapiens
  misc_feature (34)..(34): n is a, c, g, or t
gccccagggtgggcctccccagctgcccctaaanagaaagtacctcaaagccctttggggtaagtgaagcctggaaaagcccctacaggaaaagagggggtaccctgttttccatttgaaaaaactttgattccatgggaaccctttaaaacctaatcctcagaaaaatttttggtgccccatgcagctgtagttgttcactgctttccctggatggatgggactcttatgtcataacttctgttactcctttggcccatagctaaggtcatcctttcccacaggggtggctttgggattggatgatacagcttttgcttctgtgtagtatacctgtacatacttgtttcaggcagcctttctttaatgttttcagttggtttgtattctgtagctcagtagctgctaataaagttaaagatcctgt

SEQ ID NO: 311176 - DNA, 637 bp, Homo Sapiens
ttgctgctccaactgcagtgcggtcttgttctcattgttcggctcctcgaagacgctctgtggcttggccagctgctgaaggctcttgtgctgctcctgaatcctctcctcctgcttctgaagcctctcttcctgctcgtgaatcctctctttttgtcgctggttcaggagacttatgcgctgattgtttttgacctgggcctggagctctcctgccactctctctagttccttcctcaggtgttgcagctccacctcagagggcactgctgggggctccgggggcagtggttcagccatctggtttttgagtttggacaagctcctctccagctcctctacccgatgcatatcttgctgcttctctttctttaatgtgcaaatctcctgcgacatttttctcatcctctgatgccaccgggccctctctccttttagatgttcagaacactcatctctttctaattggagttgttgaaatgactccttcaactgtgtcagctgcactttcagtagtgcctggtcccgcatggactgctctaacttccactccgtatgtgctttgctgcggctggacaactggtttgccttcttcttctgtgtggccatgacatcagagagaacactctctaactct

SEQ ID NO: 311177 - DNA, 960 bp, Homo Sapiens
  misc_feature (139)..(153): n is a, c, g, or t
  misc_feature (510)..(510): n is a, c, g, or t
gcattattttagaatatgagttagaagaaaggaaccagactaaaaaatgatgacaaatctatcaatcaatattatgcttaggtcaaaggaatataatttaagggaagtagaagaagtcattgattatatggccaaattnnnnnnnnnnnnnnncagtacctaatgacttttcaaatttagatatatgacccagttataatttagcttagtgacaaatattaagacttactattaaggtaatttttgagggggaaaaaaaacttactacttgcgcttattgttgatttttgcaaatgttcaaccaacatttcagagcactaaaaggaaaaagtccaaatgaatctaatcttcttaggatccacaaaattggtcacttaagtctaacctattcataactgccaggggaaaaatttcaaattactttgtactatagcaacatggattttcctggcatcccaacataccttactggtttccaccattgtgggcaagaggccacatattgagttncagggcgcggaggccgaatattgcttttccctcctattagcttgatattttctcgacaagggaaataaggtccaagagacattggtatattactgtgatggtaagtacaatggttgtgttgtagaaagggaaccagagtatgaagaaaatcatggggactcaaaagtacaagttccttgaggacatctatacaggcatttctaagttctggaggactataggaattaagaagagttaacagtttatgggcaaattcaattcgctcctgccactggattaatgcttgtttcacatcttttctctgaagataagggcgtgtagacttcaaaaccgaaagaaatattgacagaagttctactaaatctccagtcacatggcaagctgtagcttcgtgatacatcatgtgcaaagtgttgaaagactctgtcattagaatcaatcctcgattag

SEQ ID NO: 311178 - DNA, 926 bp, Homo Sapiens
ttgctttggcgcgagtttttaatgtcaatgtaagcctgcatcggggcttggaaatgttttggggtgggagaaggtatggtcgactttgcctctggggccacagtcatatttgcggtagtggatgtagcactgacgagggtgatggctgagaccttatgatggttctgctgcaggacctgggcgttgaaatgagatggagaataattctggccccgagctcattcccaggagatgccagctgatgtggtcatgggcagcaactgttatatcttgcattgtcccattcacatatccatttactgtgtagattagggatgatgactggctccagctcttgctttcatcaaacacagcaaatagtagcacgatttgcttgtcaaacgtcttctgtgtcccaccctcagttagggtcccttttttacagataagcaggggcccaatcagcccagagttgaaatcctcgatcagattttcatgggagtaatagatgtgtgtgaggcctggagggtcatcatgggtgggtccactgtcctcactgatactccattcataggtgtattctcggcctggagccacagcgtcgtccatcttctctgcagggaatgtgtggtcaaggtaagaagcaccttctgacaatttactgtacctaattccttgaggatggatgctcaagggcttatgtgccttatttttaaagtgaacttttatgatgtctccgacttcagcatataaagtaggcccaagaagtcctgaaatggtagattgtggttttcctttcttaaaatatggttcatactctctgtagacacttttcttaaaggaagttacagaaagattcaaacttgagtttgtgggctcaggtcggtagctccaactgatgccctgagcagccacgtagaactgccttagctgtgccgcttctgtcc

SEQ ID NO: 311179 - DNA, 1916 bp, Homo Sapiens
  misc_feature (1493)..(1493): n is a, c, g, or t
tggggtgaagaactacttacttccacatggtagaaagaaaagagtgataaaaaatgttttggaaaccttgaaacaatttattgaattgctttatacaagattaacaatctccacaccacccctaacaccaacatagtcgctgcacaaaagccacagcccctctcacacctaagaaacggtcacgcccggtaagtgctcagagactttcgctgcgccagggaaaacccctgcagcccccagaccccgaggctgctctgccccaccctctgctgcggcctcgcctgtaggtctgccttgccatggctgttcagtcattcgctctttcattaccacaaataaagcataaacaaggaaaagaaatctcaaactccccatcaaagaaacgtttccctgaggcaagaggcatcactagattcctaaaaatgagggtattctgctccagctgcacgcgcaatggtacatggggaggagggagcaccaaagggaaaggaaggagggcctgggacccgggtgtttatgggcagagaagcctggagagtccctgctcagcctccactgccggcctctgcttggctttgagctcagcaatacaaatctcttctttggctcttttgctactacctaagactactctgtaaacaaactggaaatccaagttgcaaaaaatatatataacaaagggataaggaatccacttagcccaatgtgaaacacagattggttcttatgtaaaaaaaggagtcagagcagaggccgggccaaagggcggacagaggtcttgctccttgggaaaccgggaaggccagcaaacctctgaatgaaggatgagttactgggcgctgtaccctgggagtcaggagccaagagcggtccgttttcccacaggtgtatgtgctgaggacaccgtatactctcaacgtgcctgatcacttagctggagcagtcagttcagactcaccttgtggcacagacctcacaagacaggcaagtgccctcaaatccttgtgaaacagccactggttgagtggtgacttaggagctctgcagtaactgtcctagtctctctgatccactctccaagctcttctgcacatcacccttcagtcgacacataaccccactgcctggagagccccaggacttcaaggcctactacccggcagacacttcacagaggcctgcttctgccgcactgcctaagaatgattcctaagaatacaaactggaatgtctatctgtgacttgggacccctggtatccttgaccctcagagagatgaagggctctgggctctgcagtccacctccacgaactctggaaaaacaaaatgggagccctggctatactgggacttggaatttgggggcccagacaaccttctagtcaggacggcacagataatgatgtgcaagtgtaaaaaactcaaaactggctttctcttcaatacagacatatctttaaaaaggtcttcgtctcagatccattcagagggntgaatggacatgtgttgtcgaattctgctccaccataaaggcactggaattatgtcttcctataatatgatgtgtgaagaacagtccccttctatccaatgcatttaatggtaatgatgaaaactgagcccaaaataggtgtctgtaaaaatcctatcataattgttgaatctacaaaggtcttttctctaaaagagcttcattgtcatgttccgaggagaaactggcccccacagtgagcacaccctaggtgttcttagtatttcgcagggacagtgcaggtctcccagctgtggctctggcctgagttttgtccgctttgagcacacagcctggggatggggcggcactgtgaccatccagggagcttactgcagccagaaggagcccctgagcagtggggtgctctgaggtactctgacc

SEQ ID NO: 311180 - DNA, 414 bp, Homo Sapiens
  misc_feature (375)..(375): n is a, c, g, or t
  misc_feature (388)..(388): n is a, c, g, or t
  misc_feature (396)..(396): n is a, c, g, or t
ggaaaccttgaaacaatttattgaattgctttatacaagattaacaatctccacaccacccctaacaccaacatagtcgctgcacaaaagccacagcccctctcacacctaagaaacggtcacgcccggtaagtgctcagagactttcgctgcgccagggaaacccctgcagcccccagaccccgaggctgctctgccccaccctctgctgcggcctcgcctgttaggtctgccttgccatgggctggttcagtcattcggctctttcattaccacaaataaaggcataaacaaggggaaaggaaatctcaaactccccatcaaaggaaacggttttcctgagggcaggggggcattcacttgggttcctaaaantgagggggttttntggttccnggttgcacggggcaatgg

SEQ ID NO: 311181 - DNA, 817 bp, Homo Sapiens
  misc_feature (18)..(18): n is a, c, g, or t
  misc_feature (38)..(38): n is a, c, g, or t
  misc_feature (44)..(44): n is a, c, g, or t
  misc_feature (130)..(154): n is a, c, g, or t
ccccaagtccggcccttncaggttccccatccctgtanaccccngctctgcccttcctagatagcagtagtaaattagtgaaagtactaaaagtctctgatatgcagaagtaatggcataagctgtcttnnnnnnnnnnnnnnnnnnnnnnnnncctcggctgccaggcagggaagggcaccctgtccagtggacacgtgatccacgtgaccttacctatcattggagatgactcacactctttaccctgccccttttgctttgtatccaataaataacagtgcagccagacattcggggccactaccggtctctgcgcattggtggtagtggtctcttgggcccagctgccttttcttttatctctttgtcttgtgtctttatttctacatgctctcatctctggacacagggagagacccaccaaccctgtggggctggtccctacagttagatttcttagaattacagaacttttgcctttgaggtctattataaataattcttctaacttctctcaatttaatggtgagaaaattatagctcagagaaggaagtcacttttttagtgtcatgtagcattttgctaggacttgcaacaggatgacatagaagagcatagagagtatatttgtgagatatttataaattctctactccatacgttttttctccatctcattttggaagtaggtgaatgaacaaaaaaggtacactcctgggaataataccttccacttccagatttactgttcagacatacccctcaaatttattctaaaagtttactataatgtcccccaagactttctgcccc

SEQ ID NO: 311182 - DNA, 1364 bp, Homo Sapiens
  misc_feature (73)..(73): n is a, c, g, or t
  misc_feature (205)..(205): n is a, c, g, or t
cccaagctttttggtggagcggcaattccgggccaagtggggttcaagaacctttcagaacccttgcggtttntgaggggtacaccagtaagggcttcacttaaaagtccccaagtggcactgcccccaagcaagcagcatcaagcgatctttggatgactaacccctgggctcagcatctcttcctcggaaataaacgttcctntgggcatctcttccaaatcaagtctgttttcatctacgttaaaagacacctgggggggtgtattcacctttttcggatgatgcttttcagcatttctgtgtacatgtccttgttgctgggagctgcgcttttcatcttgaagtggggcaaacagtggcactccttgaatctcacaagccacccttgacttgcatgaaacctctccgtttgagaaccttcgccatgttcacgctgtaagtcatcaaactcagccttctcctgaacgatggcggcgctcaaggtcgcatttggctggctctggtcttccagccacaagctcagcagctgctccatgctctccatcactgcacttcgatggcgagtcaaccgagaggctctcagaggagtagctatttgtgaactcgctttgattttttctttactatctcgaatggtcgccactgtagagatagcaagatctaaggcctttgcgatctgactgagcttctcacccgcttcaaatcgtcgtaacacttccaatttgaggtcaagggtaatcgctttccgttcccttttggcactagggatgacagttgcatctgtgggcctttccccaggcatttctgcctccaaaatgtcagaaaatcacagcggtctcaagcgcaagaacgctgtggttcctctacgtccccttgcagaactcggtcaacagaaaacgaggctgcgaagaggctcaggctgatgtcctggagacgtggacgggtccccatgggcaggcccagccccactgcctagcccagctgctgcttcactgtccactccgaggaggccgcgcgggtctcccggtaccgctcgaagtccgcgtgttggggccgtgcggccgcaggcacatacaagcggcctgggtcctggggctccagagaacaaccgaccaagcggacaaacgagaactccgtgagggggacactgcggcagaaacgtccaggggcggttttccagtgcagcggagggcggaccgggcgggtgttgtttcgggagctgctttccatggaggaccccagaaataagtgttgatgcagatgcccgatttaagataagtctaaaggcgctggctatccccttagggcccagctgtctgggcagggcgaggctgcgctggcgatcaaaccctcgaacggtc

SEQ ID NO: 311183 - DNA, 809 bp, Homo Sapiens
gttgtttgttttcccgtgagttcaaacccacctgcttttaatttaaacacaccttagaaagtttactggggagggagggcccattgatgctgggacccccctgttcaaaggtcaatctttttcccccaatgttcttggggttaattgctctcttcttggcctacagatgaagatctgccccgactcgtgggcactccagccgtatttgctcatccacacctttagctggctgtccgacagatccgccgagcatctcggccagcagccagcggtcaatgtgctggtaagtgatacccacaacatggcagataaactttcggacagagtcttcaaagccagttataccttccaagaggtccatgttttcatccagggcttgccagaaggcctggaaatggcaggtctccagcaggtccccgaggtacaaaatctgtcggattggccgttcttcttgatgtgcctggtcgatcatgcacttgcacagggtgaagtctgtgtgcggcaagttggtgagggccttcagcaggatctgggcggtgaccgtggtctgaaagaaggctgggttgaactggtacagcttcaggacagccaggttggcttccagatcataggcattttccttggcctgcgtctctacatagcgctccagggtggccaggttctcaggattgtacctgtcgatacccttgagcaacttgcccacgttggctctcatctgctcaaacatcgccatgacttctgtcgccttccacaaccagggctggaggctaacactgacccggcacggcgtcctcaaggacgggaacccc

SEQ ID NO: 311184 - DNA, 840 bp, Homo Sapiens
gcaagcgcatttgtcaactcagtatattgaggacggttatgtttttgccaagggggtgaggtcaaacccagtgttttattaaaacccctggaatttactggggaggaaggcccatgaatgctggaccacactttcaaaagtccaatcttctccgacaaggttcttggggtttaaatgctctcttcttgggctacagaggaagatctgccccgacttgtcggcactccagccgtatttgctcatccacacctttagctggctgtccgacagatccccgagcatctcggccagcagccagcggtcaatgtgctggtaagtgatacccacaacatggcagataaactttcggacagagtcttcaaagccagttataccttccaagaggtccatgttttcatccagggcttgccagaaggcctggaaatggcaggtctccagcaggtccccgaggtacaaaatctgtcggattggccgttcttcttgatgtgcctggtcgatcatgcacttgcacagggtgaagtctgtgtgcggcaagttggtgagggccttcagcaggatctgggcggtgaccgtggtctgaaagaaggctgggttgaactggtacagcttcaggacagccaggttggcttccagatcataggcattttccttggcctgcgtctctacatagcgctccagggtggccaggttctcaggattgtacctgtcgatacccttgagcaacttgcccacgttggctctcatctgctcaaacatcgccatgacttctgtcgccttccacaaccagggctggaggctaacactgacccggcacggcgtcctcaaggacgggaacagccc

SEQ ID NO: 311185 - DNA, 1153 bp, Homo Sapiens
tatgtggtgggacgtgaggttgggtatgtcttcagggactgcgtttgaggttggggtcgtgtgtcagcgtcctggggcgagtgtgtgctagctagtgatgccggcttcgtgtgtgtggccctgtccccgggagaggtctccaggttccgtacgttcccctccggtgtttaacccgtcctccttgtttatcgcccttaaggcccttgtcccagagctggtccgctgagcttggcccctcgcagtactttgtcggccccccttttgtttttgtgttcggagccaacacatctttattaaacacctgaagttactgggaggaggccatgatgctggacacactgtcaaagtcaatcttctccacaatgttcttgggtttaatgctctcttcttggctacagatgaagatctgccccgactcgtcggcactccagccgtatttgctcatccacacctttagctggctgtccgacagatccccgagcatctcggccagcagccagcggtcaatgtgctggtaagtgatacccacaacatggcagataaactttcggacagagtcttcaaagccagttataccttccaagaggtccatgttttcatccagggcttgccagaaggcctggaaatggcaggtctccagcaggtccccgaggtacaaaatctgtcggattggccgttcttcttgatgtgcctggtcgatcatgcacttgcacagggtgaagtctgtgtgcggcaagttggtgagggccttcagcaggatctgggcggtgaccgtggtctgaaagaaggctgggttgaactggtacagcttcaggacagccaggttggcttccagatcataggcattttccttggcctgcgtctctacatagcgctccagggtggccaggttctcaggattgtacctgtcgatacccttgagcaacttgcccacgttggctctcatctgctcaaacatcgccatgacttctgtcgccttccacaaccagggctggaggctaacactgacccggcacggcgtcctcaaggacgggaacaggaagaggtggtggaaacggaaacgacgtcgttgttgtcgctccagctccttgggtgcggtaaagggaaaggctctagcagcagccgccacgctttccggctgccacgtgactcc

SEQ ID NO: 311186 - DNA, 661 bp, Homo Sapiens
taatagacggagactggctccatcttaataaaaataataatagcaaagggacttattcctttacaacagtagtccctttttagcacctgggactggttttgtggaagacaatttttccgtgaatggagggtgcagggaaatggttttgagatggaactgttccactcagatcatcagtcattagattctcatagggagcatgcaacctagatccctcgtatgcacagttcacaatagggtttctgctcctatgagaatctaatgctgccactaatctgacaggaggtgggagctcaggcagtaatgcttggctgctcacctcctactgttctgcccatttcctaacaggccactggacagtatcagtctatggcccaggggttgaggacccctgctttaaaagatgcctcagaaatgggctcctttttaaaaaatcagcatccatccattcaaaaagtctctgccagtttgaaggcaactaagctatttatatcatctttcactaaaggataaggtgcatttcacagcttcaaaatttagttaatcagtaagtgcctgtgctgtggcttcctctctcctatcatcatgtataattctttcttgtaacaaggtcagtgaatccaatctgttaatatttattcaaatcttctagatactttac

SEQ ID NO: 311187 - DNA, 878 bp, Homo Sapiens
cagactgcatagggctcggcgtggcagactgtgtaggccatgtgcgggacatgtggtagggggtaaggctggaagttattctccttcaggaactcaaaggtgttcttgcccaggagctcaaaggcgatgcacatgtgaccgtggaagttgaaccagtcagacatcaagacacacaggaacttgttttctttgtccttctccttgatttttttgagcacgttgatttctagccgggcagcctcccggtacttgcccacgttgcggatgatcttcagggcaacctgagacttccctctggcatggtccaagcactccaccaccttgccaaaggtgccttcacccaggttccccacaatctcatatcgctcttggagccaatcgccgatccggcacaccaggtgaccctccttgtcatcttccacactccggctgctgcgcttactgctctgttggcttctcgaggaggcgctgctacaagacctggtgcggcgtttgtggcagtggtgggcatgcttgcgggtccggtatggccccctctcccgcgatcgccgacgatgacgagaacgtgaaggtccatagtagtcctctccaaaggatgggctccgctcttcacaccggtatgtatcgctgtcacggcgctcccggtacctcctctggtagggcaggcggtcatggcttctggaccgagatcttcgtgggggaggctcccttcgggacgggtatcgcagtctcccttcatgttcccgactgtaggacctcctcctcttccatcggtagctcaggtacgggtctggttcaggggagcggtatcgcttacagtgatgcatcgtgccgaattcgccacccaggcctcgctacctaaaccgtaggagtactgc

SEQ ID NO: 311188 - DNA, 990 bp, Homo Sapiens
gggagtggggcctagctgcagccggagcctgggagacgaggcatcactgtaagcgataccgctcccctgaaccagacccgtacctgagctaccgatggaagaggaggaggtcctacagtcgggaacatgaagggagactgcgatacccgtcccgaagggagcctcccccacgaagatctcggtccagaagccatgaccgcctgccctaccagaggaggtaccgggagcgccgtgacagcgatacataccggtgtgaagagcggagcccatcctttggagaggactactatggaccttcacgttctcgtcatcgtcggcgatcgcgggagagggggccataccggacccgcaagcatgcccaccactgccacaaacgccgcaccaggtcttgtagcagcgcctcctcgagaagccaacagagcagtaagcgcagcagccggagtgtggaagatgacaaggagggtcacctggtgtgccggatcggcgattggctccaagagcgatatgagattgtggggaacctgggtgaaggcacctttggcaaggtggtggagtgcttggaccatgccagagggaagtctcaggttgccctgaagatcatccgcaacgtgggcaagtaccgggaggctgcccggctagaaatcaacgtgctcaaaaaaatcaaggagaaggacaaagaaaacaagttcctgtgtgtcttgatgtctgactggttcaacttccacggtcacatgtgcatcgcctttgagctcctgggcaagaacacctttgagttcctgaaggagaataacttccagccttaccccctaccacatgtccggcacatggcctaccagctctgccaggcccttagatttctgcatgagaatcagctgacccctacagacttggaaaccagagacctccctggttgtgaattcctgaggtttgaaaaccctctaccatggagcaccagaagctgtggaggagaagtcaggtgaagacacacct

SEQ ID NO: 311189 - DNA, 936 bp, Homo Sapiens
tcaaagtcctgtatggggtccagctgaatttcttcaggcaggaaaatctaaaggggcggtggcagagctgggtaggcccatgtgccgggacatgtggtagggggtaaggctggaagttattctccttcaggaaactcaaaggtgttcttgcccaggagctcaaaggcgatgcccatgtgaccgtggaagttgaaccagtcagccatcaagacaccccaggaacttgttttctttgtccttctccttggtttttttgagcacgttgatttctagccgggcagcttcccggtacttgcccacgttgcggatgatcttcaggggcaacctgagacttccctctggcatgttccaagcactccaccacccttgccaaaggtgccttcacccaggttccccccacaatctcatatcgctcttggagccaatcgccgatccggcacaccaggtgaccctccttgtcatcttccacactccggctgctgcgcttactgctctgttggcttctcgaggaggcgctgctacaagacctggtgcggcgtttgtggcagtggtgggcatgcttgcgggtccggtatggccccctctcccgcgatcgccgacgatgacgagaacgtgaaggtccatagtagtcctctccaaaggatgggctccgctcttcacaccggtatgtatcgctgtcacggcgctcccggtacctcctctggtagggcaggcggtcatggcttctggaccgagatcttcgtgggggaggctcccttcgggacgggtatcgcagtctcccttcatgttcccgactgtaggacctcctcctcttccatcggtagctcaggtacgggtctggttcaggggagcggtatcgcttacagtgatgcatccccggccgccgccgccgctgtcgccgccctcgtgccgaattcgccacccaggcctcgctac

SEQ ID NO: 311190 - DNA, 622 bp, Homo Sapiens
ccaactgatatggcttctgtatactgccgcagatgataaagaatgactgcttgattatagtacaacatgctgttttcaacatcatctaatccatccatttcttcaacagctgagtggacctgattcttcagctggttaagtgtttgtctcaaattatctgttgttgtttggttacttttaaaaaactcagctactgctgtattcaaaattattttataatcatctttgtttatatcttgtagacaggcaaggtgttgtagacaggcatcataatttccagatgtgaaagcttggaaagcattggtggataactccttctcttgatcagtgatcccagaggactgacctgtgccttcatgtttctctgctccctgatctgcaggcttgtctgcagccatcttcccgcttcgactcgggttcttccctgcaggtggcgtggccctgactcccgccgccgggctggccgctgtcctggacctccgaggacaactctgtgcctaccccggctccgggcccccaggttccggctagaggagtgggcagacggcgggctgaggaagtgacgagagctagttcccgtcgtctagcaacagcaacagcttccccacacaagggaccgcca

SEQ ID NO: 311191 - DNA, 890 bp, Homo Sapiens
  misc_feature (83)..(83): n is a, c, g, or t
  misc_feature (151)..(151): n is a, c, g, or t
aaagtcttgaagctccccaacttcacccacccccttgaaagaaaggtcccccacgggaaacaaaagtcctcaacaagatgtgnatgaaatgtgggtaaaatgcttccacgaagaaagttcaaagccttatcccgcccataaaataatcccnacactggaagaaaagcccctatgaaatgtaagtgaagtgtgggaaagccttcaagtcttaactcccaaccttgtcctgcatcagaggatcccacacaggagagaaacctcatgaatgtaacgagtgtggcaaggccttcagccacagttccaatctcatcctccatcagcgcatccactctggagagaaaccttatgaatgtaatgagtgcgggaaggccttcagccagagctcggacctcaccaagcatcagagaattcacacgggggagaaaccctatgaatgtagtgaatgtggaaaagctttcaaccgaaactcatacctgattttgcatcggagaattcacactcgagaaaagccctacaagtgcactaagtgtggcaaggccttcacccgcagctccaccctcactctgcatcacagaatccatgccagagagagagcctctgagtacagcccagcctcccttgatgcatttggcgcgttcctgaaaagttgtgtgtaaaggaagaatttgccatcaagccatttcccccttttgtttctaaaattatttcagagatgtgtgctcctggagggaaaaagaaatacagcctcaacagattaaaaaacaaaagtcacacttaaggatccttctagtcacatcagcagtgttctgcctttatgtagtagttgggcatataatccttccacacagcccctgcagggaaaggctaatcttacggataatccacgtgag

SEQ ID NO: 311192 - DNA, 804 bp, Homo Sapiens
  misc_feature (723)..(723): n is a, c, g, or t
  misc_feature (738)..(738): n is a, c, g, or t
  misc_feature (750)..(750): n is a, c, g, or t
  misc_feature (765)..(765): n is a, c, g, or t
gtgttgacaaataaaaattctatatactgatggtgtccaacatgacatttcgatatgtgtgtcacagtggaatggctaagtcaagctattcacatgtgcgtgccttaccccacacgcctattatttgtgtgtggtaagagcacttaaaatctactctcttagcaattttcctatattaactacagtcaccatgtcatgcactggagctgttgaacttacttcttttgtggcctttgaccaacaatctccccacccaccagcccctggtagtcaccatcgcactctctgcttccacaagatcaccttttcaagattccacagacgaatcagaccatgcggtatttgtctttctctgcctggcttatttccctttaagatgttcatgtaggttcatccgtattgttgcaaatggcagaatttccttctttcctaaggctgcatagttctccactgtgtgtgcaccgcattttctctatccactcatccatcggtgcgcgctcaggctgattccacagctgtgcttttggggaatggcgctgtggtgaacgcgggctgcagatgtctcgtcggcagatgagttcatttcctgtcagttatacccggtaatggggttggctggatcgcagggtagttctatttttaatctttgggaggaatctctggcactgcctttccacaatgggctaacacttaatttggcttgagtgtgttttaggagttctnggcatggcacttccntttttgggctangggttctattttggntgggcattaacataaaactaaaaatttaggcagctggga

SEQ ID NO: 311193 - DNA, 1265 bp, Homo Sapiens
  misc_feature (288)..(314): n is a, c, g, or t
  misc_feature (1082)..(1082): n is a, c, g, or t
  misc_feature (1109)..(1109): n is a, c, g, or t
  misc_feature (1119)..(1119): n is a, c, g, or t
tcttgaatcagaacttcctgggtctctattccaatacttttttcttaagaaactattccctcacctttcttattgacagaatagaaaaagagagctcttctttgcttttcctcttctctcattctccttcctggatttctggttaagaagaataaattagaataagcaaaacagttttgaggtaggacatatattttaatgattaactcaatcaaggtctgtgcagctttattctagcgacttattcctcttctcaagtttttatattacagtaaaggtgaatggatnnnnnnnnnnnnnnnnnnnnnnnnnnntgtatttgtatatgtgtgcagaggatgttttcttaagaagaacctagatcatagagtgctttaaaatcagttaatcacttagtatgcttatgaatctgaagttagtgggatgttttcattgaatattctcaagttgatcaggtattctaaattaattttaacttctgagtctccaggaaagctttcagaatttatacttactacccaggtgagaagttgcagtaaaataaaagtgaatctttcccaaacttgtggaatattagagttggaacaggccttagaaattccagtgcttcatttgccacatgagaaggctgatatctgaaccaaacagataacttcagaacctctggataccaaacttgtgaagctaaaacagaaatgtcaacttgggatttaaaggaaaatagtaatgcatagaaatggttttgaaaagaaggttttagatatttttgtgctccatgttttcctgcatatgtctcccttttctctgccaaactgcttttcacacccggtccttggactctttgagcacttccctgccatataattgactttcagaaattgaatgaagctggaaatgttgaagcaggactggccataagaatctcttaatatctggatagtccagtcacaaagatctttactgtcattcagctgacttttggctcgctaaatatagctgaatatcacaaattctaattgtcaaaaccctccctcattttaatttgaactagaaaactagacaaaatttggtaagaataaatntcagcaaactgtagaattatgatctanaatatctcanaattttatcccattttactttgaataatgttagaaatatactatgctaggctgtcagttggatccttttagtactacataagtaagttataaatttacttaattgctctcagtactttcagagaaagctaacattaccataatttt

SEQ ID NO: 311194 - DNA, 741 bp, Homo Sapiens
  misc_feature (574)..(574): n is a, c, g, or t
  misc_feature (618)..(618): n is a, c, g, or t
  misc_feature (669)..(669): n is a, c, g, or t
ctccttaagatggatttcagatcatgaatatctctacaaacaagaaaataatatcttggtatcaatgctgaatatggaaacagctcagttttcttggagaacagtacatttgatgagtttggacattctatcaatgattattcaatatctcctgatgggcagtttattgtcttagaatacaactacgtgaagcaatggaggcattcctacacagcttcatatgacatttatgatttaaataaaaggcagctgattacagaagagaggattccaaacaacacacagtgggtcacatggtcaccagtgggtcataaattggcatatgtttggaacaatgacatttatgttaaaattgaaccaaatttaccaagttacagaatcacatggacggggaaagaagatataatatataatggaataactgactgggtttatgaagaggaagtcttcagtgcctactctgctctgtggtggtctccaaacggcacttttttagcatatgcccaatttaacgacacagaagtcccacttattgaatactccttctactctgatgagtcactgcagtacccanagaccgtacgggttccatatccaaaggcaggagctgtgaatccnactgtaaagttctttggttgtaatacagactctctcagctcagtcaccaantgcacttcccatacaatcactgctcctgcttctatgttggtaggggatcactacttgtgtgatgtgacatgg

SEQ ID NO: 311195 - DNA, 743 bp, Homo Sapiens
  misc_feature (65)..(106): n is a, c, g, or t
  misc_feature (110)..(110): n is a, c, g, or t
gtcctagctgctcggaaggctgagtggaaggacctctgagcacaggaggtttaggagttcagccnnnnnnnnnnnnnnnnnnnnnnnnnnnnnnnnnnnnnnnnnnatgnagccagtgcctgcttctctaatgacagttttgtctctttcttttctatctcacatttctttttctcgttttactgaattactaagaactctagtagattactgatggttgtggtgttgggtattttcttcctgttctgagcattaatgcaaatgcagccaatgcttcaccatcaagaatgatgtttgctgtagttttgtgggaattttccttatctttctagtttgcttggaactttaggaatgagtattgaattttattaaatgctttttggtactcactgagatgatataggtcttttctcttttaaatcagttaataaattacctatcagtctatctaaaatggtgattcatcattacattcttaaggtaaagccttcttggtgatgttaaattttatgtgaacgcactacctaattcagtttactaatacgatgcagtcatatttacacaaatttaggcacacaataaaaaagtcttactttatgtataaaattggacataagaggaaatctctccaattaaaaaagattatctacaattgtatattttcatggagggcaagcctggtaagtagaacaaactggaattatgctattgttacatggcagtgccacttccaagttaatccc

SEQ ID NO: 311196 - DNA, 964 bp, Homo Sapiens
  misc_feature (450)..(462): n is a, c, g, or t
  misc_feature (488)..(496): n is a, c, g, or t
accattgtctgccatgttaaagtccttagatagagtatatttaatttttggaacttagaatttggttatcacctaatttatccaataacatcagaaaacagaatgtttcatacatatatgttttcatgataaatgaagcttgttacctgaaggatcactattcgttttaattcttgttttatttctgagcttccattttcacatttgtcaagagagaatgagatgatagatgacaagggaagagtttaaaaactagcagtaggatgcactaccaaatactgaaatattaatacaaaacttgggaaaagtccattacttaaagcagtgtgtcgctggcagttatttttgcctgaacaatttcaatggtgccaatagggagaggggtccttatgtagtcaactaaagcatgaatgaggagtaagaaggtaacctgtttaaaccattcctttnnnnnnnnnnnnngacacccattaggatggatattattnnnnnnnnntagaaaatagcaaatgttggcaaggatgtagagaaattggaatccttgtgtaacgctggtggggatgtaaaatagtacaactgctgtggaaacagtctggcagttcgtccaaaaattaaacacagaattaccgttaagacccagcaattcctcttgtaggtttatgccaaaaagaatgaaaagcagggactttcagttccttgtccaccaatgttcacaacagcattattcacaatagtcaaatgtccgtaacagataaatggataatacatacaatgctactcagccttagaaaggaatgacattctgctacatcccacaacacaaatgaatcttgaaaatatgctgagtaaaataagccagacacaaaaggacaaataatgtacgattccacttctatgaggtatctagaatagacagattcacagagacagaaagtagaatagtggttaccagggctttggggtg

SEQ ID NO: 311197 - DNA, 537 bp, Homo Sapiens
aaaagagggaggcccgccgggtcaaaaaataattgtggcagcaagcgtggggctgtgtatcacaaactcctgggggggtgcgtcataggtggcttcagtctccaggccctgaagatatgtcccatgtcccaactctgtctgtgcatacgttgcgatgatctggatgtttttgcagagtgggtcccatttggcaatctgctcctctgagcccaggctcctgagggctctcacgaagactctgtgtatatttaaggccacgtctccagaaagggctctgtaagcgtagcctaattcacgaccatcttctaaccaacccaggcgccgagctatcaaccggatgtggaatgccctccgcatggcagccttataacgctcattctgggtcatgaaataattgtccttacagctaaactccgggtaactgtggatgatgctctcaactttcctgcggagtgcagtgttctgggcacctccatcaaggatgttggtgagccgttccacgtcaaaggactgcatatacctctcgctctctatgtc

SEQ ID NO: 311198 - DNA, 1232 bp, Homo Sapiens
  misc_feature (42)..(42): n is a, c, g, or t
  misc_feature (125)..(125): n is a, c, g, or t
  misc_feature (137)..(137): n is a, c, g, or t
  misc_feature (167)..(167): n is a, c, g, or t
ggcaggccactcaccttaagtagcatggtccgcacaaggccntgcgccacatctcagctccctgggtgcagaattctgacatcatggcttcaatgcccgtgctcagcgcgtggagctcaggcagnaagctgaagtcntggttcagaatgccagtgtaggagtgctgnaagaactccaagaggctgactgccaggaaatggaaggcataactgatggccagctgaggaaagagtttctgctgttgtgtctggtagtcccaggacctttgcctctgggtcactgggccggagccgggattggcggcggatgaccgagtagggcatggcgatgacacaggccttctgcagtatagggaggatctcccctgacagcagctccacccgcaccaccaccatgggaaggtagttgctctgtgctgtaccgagtttgacgtaggtgccatctggcaagacctgtgcaaagcgactcagcatgttctccctggggccctgcacatggttcagctgcaggaagccattgtctgtttgatcaaagtccatcttgggtccgatgtccccaatgatgattcctggcagtggggtgtggtcctgaagactccggattggcacaataaaagcgtgcatgccccgcctggctcctgagcagatcagctgggcctggaccagggcatgggtggctgaccgtcccaagtctccaggccaccatttggtgccagtcagcgtgggtctgtgtatcacaaactcctgggtggctgcgtcataggtggcttcagtctccaggccctgaagattgcagagtgggtcccatttggcaatctgctcctctgagcccaggctcctgagggctctcacgaagactctgtgtatatttaaggccatgtctccagaaagggctcttcaaatcttctcacccacttgcttcatggatcaactttcctgcggagtgcagtgttctgggcacttccatcaaggatgttggtgagccgttccacgtcaaaggactgcatatacctctcgctctctatgtcggggtgcatttgcctgctccaggtatcccccaatgacactcggtgcactgggctgcccatcctatcgtggatctgtctggtgactgtggagagacacttccaacccggctgctccgagggtctgctctcagcattggtcagtgcaaagaacctggctcccctctgtcctgtgtccgcactgtaggccgggctggcctctccccgg

SEQ ID NO: 311199 - DNA, 939 bp, Homo Sapiens
  misc_feature (18)..(18): n is a, c, g, or t
  misc_feature (25)..(25): n is a, c, g, or t
tccagagcttctgtaaancccttcncagtgacatagtagcagtgcaccttagcagcctggaggtgtatgacagtggtctggttccaagcctcgtgctggtcagctccggattgcgtcagggtctgtaaatgctgcactgagtcctttcatgagccttactgccacatgtgcccaggccgtggtgtagagctccggtcagaggaagtcgcgccccctctgggctggacacctggccaggtcaggtgcggtgagatatgcgacagatggagagagagatctctgtggcgtggagccaggggacatctgagtctgcaggtagctcttcaccaggaacctggccacctgcaggtagagcactgtgttctcaccctcgtaggtgcaggaggccgacaatttggtgaccagtgatggcaggccactcagctttgagtagccatgtccgccacaggccctgcggcacatctcagctccctgggtgcagaattctgacatcatggccttcatgcccgtgctcagcgcgtggagctcaggcaggaagctgaagtcttggttcagaatggcagtgtaggagtgctggaagaactccaagaggctgactgcccaggaaatggaaggcataactgatggccagctgaggaaagagtttctgctgttgtgtctggtagtccaggacctttgcctctgggtcactgaagggaaaagaaccagaagatttagatcactacctgttgtgtccaccttcccctatccccgacaccataaaaaccttaaaaacagacagttccttagaactcattgcaaaacttgaactgacatgaggccattgataatcctttaaaaatcccatctaacatgaacatccacacatttcactgcaggaatactgacacatttgttggtgggtactgccccttgttaagggaggcttatagaattcca

SEQ ID NO: 311200 - DNA, 1414 bp, Homo Sapiens
  misc_feature (66)..(108): n is a, c, g, or t
  misc_feature (134)..(171): n is a, c, g, or t
  misc_feature (177)..(177): n is a, c, g, or t
  misc_feature (179)..(179): n is a, c, g, or t
  misc_feature (184)..(185): n is a, c, g, or t
  misc_feature (187)..(265): n is a, c, g, or t
  misc_feature (277)..(277): n is a, c, g, or t
  misc_feature (281)..(349): n is a, c, g, or t
gtgggggaaaaaaaccaccccttctttttgtggccgcgttgttttttggagaaacgacaaagatgnnnnnnnnnnnnnnnnnnnnnnnnnnnnnnnnnnnnnnnnnnnagagaggggttaaaaaaagttttttnnnnnnnnnnnnnnnnnnnnnnnnnnnnnnnnnnnnnntttgtntntgggnntnnnnnnnnnnnnnnnnnnnnnnnnnnnnnnnnnnnnnnnnnnnnnnnnnnnnnnnnnnnnnnnnnnnnnnnnnnnnnnnttggtgttgttntttnnnnnnnnnnnnnnnnnnnnnnnnnnnnnnnnnnnnnnnnnnnnnnnnnnnnnnnnnnnnnnnnnnnnnctaatttaaaattttaatgttgcatatatgccatagtaccattatcacatgatggtgctggttgcttcttgaatactgttggttatttcatagcttggatctccaactttgtaaaagtggtcttatatattcctcataggcagggttctcctgagtattggttggtgacttctgagcccactggaacaggcgttcgtagacgtttccatcataacagccaagtgctgaatttaaacactgatcggtgaagtcaaaagcatcagttaacaggatggcatccttccggatcaggcggagcaggtccaggtaggctgttcttgccatgtccacttgggcaccagacaggaaggcgtcatggagaaagtcacccgagttagtcaagattccatgtatggcatggaggtcacagaggcgcttgagcacctgctgaatcgctggttcattttctagtttctccagagcttctgtaaaacccttcacagtgacatagtagcagtgcaccttagcagcctggaggtgtatgacagtggtctggttccaagcctcgtgctggtcagctccggattgcgtcagggtctgtaaatgctgcactgagtcctttatgagccttactgccacatgtgcccaggccgtggtgtagagctccgggcagaggaagtcggctgccctctgggctggacacctggccaggtcaggtgcggtgagatatgcgacagatggagagagagatctctgtggcgtggagccaggggacatctgagtctgcaggtagctcttcaccaggaacctggccacctgcaggtagagcactgtgttctcaccctcgtaggtacaggaggccgacaatttggtgaccagtgatggcaggccactcagctttgagtagccatgtccgccacaggccctgcggcacatctcagctccctgggtgcagaattctgacatcatggccttcatgcccgtgctcagtgcgtggagctgtgagaacatggaggggggttgggcggtgttagggggcctccaccatagggaccaaccctgtgcaccacttactgagcatctccc

SEQ ID NO: 311201 - DNA, 439 bp, Homo Sapiens
  misc_feature (427)..(427): n is a, c, g, or t
ttctaatttaaaattttaatgttgcatatatgccatagtaccattatcacatgatggtgctggttgcttcttgaatactgttggttatttcatagcttggatctccaactttgtaaaagtggtcttatatattcctcataggcagggttctcctgagtattggttggtgacttctgagcccactggaacaggcgttcgtagacgtttccatcataacagccaagtgctgaatttaaacactgatcggtgaagtcaaaaggcatcagttaacagggatgggcatccttccgggatcagggcggacagggttccagggtagggctgttcttgccatgtccacttgggggcaccagacagggaagggcgtcatggggaggaaagttcacccgagtttaggtcaaggttccatggtatgggcatgggaggntcacagagggcg

SEQ ID NO: 311202 - DNA, 1172 bp, Homo Sapiens
  misc_feature (14)..(14): n is a, c, g, or t
  misc_feature (767)..(775): n is a, c, g, or t
ggttttcttttttnatcaatgatgaaattatgatgaaaatagtcaatgaaagcagaacccaactttactactagcattaaaagtctcttagaccagataagcaaagaataaactataatgtagtactcaagtaaactgaggtagtagaaagtattgaaaactttatccacccacctttctatttacattacttacaagagtttggttccatattagcctttcttacaagcaacactctatagtatgtacaaaggcaacaattgagaagtgaaaatctttgaaaaaaatacacttttggaagggaggggctcttagaaaaaaagagaataattttaagagttatgaatagtgtaaattgaggattattaagcagtgaaacaaatattcagctcctatgggttcatgagggttgataccaaaagcaagggccttggctacctgagcacttttaaagaatatagtattgtttttgccgatgctttggtgcaatttttaatcctaattttcatttatgttaaattagtgaatatgtaaatattaatatttataagaacagttcttacttataaacaaatggtataaagtagtattctcattttgggaatctcagccttaaaaaaaaggttggctttacttatattttagagtgtgtgaaacagaaaaatcaccaataagtaatatttcagcattatagacaatactagttgaaaatatatatatttttaaaggcatgtttaccagtcttgtatttctatttctgctttttnnnnnnnnntaggtacatatgtacacttgggtggataacataacacatttacactcattattctgagtttcttataattaacaggctgtttaaaatacttactttgagaaataaccagacattagctgttttgaattgcaaaactaacaaataatcaaggttttatagatctctgtaccttagaaattaaaaattaaaaactaatgaataactatttctgagccattaaatcatgaaacactgttgctatttatgagctgtgacaacactgcagtgatcacatgaaactcttgataatattcattttgtagaaatttctaccgtacactttggctttttcaaatgcttcaaaattattgttgctttaatttcatttgtttaaaaatctaccaccacccaaaagtcc

SEQ ID NO: 311203 - DNA, 1369 bp, Homo Sapiens
  misc_feature (105)..(113): n is a, c, g, or t
  misc_feature (1174)..(1174): n is a, c, g, or t
  misc_feature (1241)..(1241): n is a, c, g, or t
  misc_feature (1290)..(1290): n is a, c, g, or t
  misc_feature (1329)..(1329): n is a, c, g, or t
  misc_feature (1342)..(1342): n is a, c, g, or t
  misc_feature (1347)..(1347): n is a, c, g, or t
  misc_feature (1350)..(1350): n is a, c, g, or t
  misc_feature (1358)..(1358): n is a, c, g, or t
  misc_feature (1361)..(1361): n is a, c, g, or t
gtaaatacgcacctctccgaggcgaactccccttgtggggcgggtttgtttctccgagaacacggcgtcgggtgttgcacacccccgggcggttattctttattnnnnnnnnnatttcccaggcccttagttccagggcccagggttctccttgtggagaacacgcctatggccgcaggttccactttacccgcctgggggccgccgccgcccaaacgaaatgtgtttaggaaaccttccgcgagggccggaggcggcccgacatagtgatagacgggtgccgctcggtgtttgccgaataagttcatccagctttattgaaacctattacagaagacaatccaaataaaaccactgtctcctgtagaaatctgagttatgttgttttactacaaaagaatataaaacacattaaattacagtgtgaaggaattttaaaaatgaacagtgtatcctcattaaatgtttgcaaagtttcttcctaagcacttacaactagttacagctcttttaaaaattcagatttctacactcagtttaacgggagagacattcacacttaggtacttcagccccaactttcacggactattggaaattagaaggtactttgttgctaagtgaaaaaaatgcacattttttcatatcagggaaaattatactggacttaacagttttaaatgagcaataactcagatatattagagagaaatcacctcttgccttacaaataccaaataaattccctagactcccctcccctgtagagaccatcagctcactgtgaaggcttgagcctcagtaggtaaaatttgaggaaaaaaatgagaaatggctaaaagaggcatctgctgcaggaaccttctgtgactgtcaaacattccctcttcaagctcccttttaaaacccagtccattcccaacatcactgaaaatgaaaagaataaacttgctggtcctcatgtcaaggcagtgttttcattgtctcttgatattttatcccatttcctattgacaacatctcccctacccctgaaattatttagaggttccctctatgacaaacccttgcttttttttagctttaggtataacactgacatcttttgaaaaacgtgttagtaaatactcaagttctggcctcatttcctgatgtatgaagcatggaagcagtnctgtcctgtggagatttgcttttgcacccactacacaggaaggtccttgacctctaaagcatgcctntagaagttagaattcacagaaaacaattccattgttcaacacatgtgcntattttgtgcaaagcattcatctagcccactcctttgtngttttcgttttgnttgtngtnacgggtcnganatgtgccc

SEQ ID NO: 311204 - DNA, 1157 bp, Homo Sapiens
agtgcagaagttgattcttttgtagaccctttaactataagacagaaatggctgtagtcattacctggtatagaaaatagtcacaaaggattagcaacttaaagaattaaagactgaaggagttagctataatgaaacagtataggaagaaataagtgaaatgattgtggcagaaggaattccccaacatcaataggacccataccaccaggccagtagagctggtacatgccaattgcacgtactgtccgttggctctctgtggctctctctggccatgctgtgtttcacgcgaaacagagcccacctggtgttgtgggtgaattctgaagctagatggtctggatcaaaaggcaggtcttctattcatttgctttatgactttgggagcaaactagttaaactttctgggcctcagtttctttatctgtaaattgaagatgatttttaaaaaaccactttctaagtgttagcgattcttatttttgcttccactggcgtgtcattatgaaggcaaatttcagagttttagaagtaaggtctggatatcaattctttgtccttctttaatccataactctcagctgcatctctaccaaacagagaccagcaggcactgcttccctcctcacataggccagccagctgactcaccaagaggatgtcgagcatctgggccacctgggcgcccaccactcgcacgttgttggcagcctgtgtgtaggtggcttgggagcccttcttccagtccacgcagatgcagttcacctcctccacctcgaacagtttcttgcacatgtctgtcacccagctctcatctcctttgtctatgaagccatggatgatgaaccgggtctttctgtccatttgaaaatttgatgcctcaattgttgatggatcagagaggaggagaatttgaaagttgtttgggttttcattggtgtacagcaggaagcgggtgccgatcttctcagggctccaggggagaattttcaggggcctgattgctgtcccgccccagggctcagtgtcagaaaagcacccgaggtcctcatagcaaacttcttttcctttggctgcttccagcaggaaaagtgtgattgtccagaagatcagcatcctgtctaatgttccagatgttccctcccaccggatcc

SEQ ID NO: 311205 - DNA, 554 bp, Homo Sapiens
ggatccggtgggagggaacatctggaacattagacaggatgctgatcttctggacaatcacacttttcctgctgggagcagccaaaggaaaagaagtttgctatgaggacctcgggtgcttttctgacactgagccctggggcgggacagcaatcaggcccctgaaaattctcccctggagccctgagaagatcggcacccgcttcctgctgtacaccaatgaaaacccaaacaactttcaaattctcctcctctctgatccatcaacaattgaggcatcaaattttcaaatggacagaaagacccggttcatcatccatggcttcatagacaaaggagatgagagctgggtgacagacatgtgcaagcagcctggggcatcgccaagagcctgaaaggaccccttacagtcaaatccacaaggtcatttagacactggccaccggagattgcacctaagacttttccttttcaaaacaggactcttttcatgatgcaattgtttttcccttactaaccaaccttactgaatttggttgaaggaaaccagagag

SEQ ID NO: 311206 - DNA, 725 bp, Homo Sapiens
ggcaccagtggattttattagtgtgaacgcagcagcctcgtcgccccgggaagcttatcagggcgtgagggtgagcagcgtgtcttcccgcactgtgtcttcgctacagaagttgtacactgtcttctcttctcccttttgcacagtgatcttggtggcacccactttggggagggttggatttatcacattgttattccaaagaaacttgactttctcaattgttccaacatccagctttgcatcaaactcataggaatgggttgagcctggtttgagaatccccctgaagatgctgtactggtgagtgtttcccttatttccaaacaaagcaactttgatctgaccagtggctgttcttccagacagtgtgatggaaaccccatatctccagcgagcgaaattgctagcctctcctgtgttcaagaagaatttctgctgctcttcacttgtcctgccagcaaatttatcagcatagtgacccatctgtgggcatccttgatctggacacgggaagcacttgtcagactcaaaggacttgtaggaagtgcagggatatgcagcaaacccatcgggattgaggatgctttccaagtaatacttgtagcttcttaggtgattgcaagccacaaagtcccgggttcccgcccagatgccatctagatccacgatctgagacagggcattcttcttgcatcccggcatgctctctcctccattgggga

SEQ ID NO: 311207 - DNA, 577 bp, Homo Sapiens
gtcattttgcattcttctgcttgggagcgacagacttgcatctgttattgttgggtcgaactccttctgccgctccagagcctcctgaaggcgtttttggcgtctttcctcacgccgagccaggcgctccaggaatgcggcctcatcatccccttccacttgagtgtttgtggtggttgtcttggcctcctcgtcaggcacactgttctgggcattcacctccacctggtcggtcacctgtcccaaggattcttcctcctgcttctgccgcagccgttcctgtcgggctcggcggcgccgttcccgggctgcctcctcttcatcatcgtcattcctctggtaggcgatttgggagagcgcggccaggctgcgtcttccatgcgatccggatccacccagcatgtccgcagttgggaaggggcggcggggcagagagatacggagacctggccaggccgggcggtcagggcgtgggctgggcccgcggaggggccatgtgatctgtggctgaaatgcacggtgcaggatgctcccgtgttctccctttgtgttaacacgttggtctgtccctgtgacc

SEQ ID NO: 311208 - DNA, 841 bp, Homo Sapiens
  misc_feature (14)..(14): n is a, c, g, or t
ccctcgctttggcntctcctcttcctcctcctccttttccttgtcttctttcttgttttcttcagcatccctccaatcaatcttctggtaggacttggtgactgtttctgtttcctctatctcgtatctttcttggcgactttcacttttttcttccttctcggtagtttcattttctgctgtgtcattttgcattcttctgcttgggagcgacagacttgcatctgttattgttgggtcgaactccttctgccgctccagagcctcctgaaggcgtttttggcgtctttcctcacgccgagccaggcgctctaggaatgcggcctcatcatccccttccacttgagtgtttgtggtggttgtcttggcctcctcgtcaggcacactgttctgggcattcacctccacctggtcggtcacctgtcccaaggattcttcctcctgcttctgccgcagccgttcctgtcgggctcggcggcgccgttcccgggctgcctcctcttcatcatcgtcattcctctggtaggcgattctttctgcttcgagtcgcatctcctccctcttttgccttctaagttctctgcgacgctcaaaatcatccatggtgtgatttcaggttcagggagaccagatgatgtctggacaggtcagcaatcagatgtctgagccttctggttggtcaccaatccctgtggaatttgatttgatgatcttgaaatgttccaatgataccttgtagtctgaaacttcttcccgaggactaagtcggaaaggaaggactgatttctttaagcaggagcacagccagagagcaagcaggcgggcaggcaggcagccgaat

SEQ ID NO: 311209 - DNA, 660 bp, Homo Sapiens
ctattgcctcaggtacctcatttctgatttgtccattataattttgtatttgaaagtgattggtgacaaattttttataatgcatcattgtgcgtccctgtatgcatactaccttgtactgaaaaatggagtgctggcatacattgggaattttcgcctgcttgcagagctttccagcccgtttgtgaatcagcggtggttctttgaagctctgaagtatcccaagttttctaaagctatcgttatcaatggaatactcatgacagtagtattcttcatcgtgcggattgcctcaatgcttcctcattatggcttcatgtattccgtgtatggaacagaaccctacataaggcttggagttttaatccagttatcctgggtcattagttgtgttgttttggatgtgatgaatgtcatgtggatgatcaaaatttcaaaaggttgcatcaaagtcatctctcacatcagacaagagaaagccaaaaatagtcttcagaatggaaaacttgattaaaagagtgctaccgataagcaaacttcattactacccagcatatctgctgataggatgaattcttggcatgttcttgtgtacctttcttaattataattgttattcaggatttcagtgtcattttttttaaaccttagaaaagagaa

SEQ ID NO: 311210 - DNA, 370 bp, Homo Sapiens
  misc_feature (30)..(30): n is a, c, g, or t
  misc_feature (194)..(194): n is a, c, g, or t
tataatcccgcatcccataaaatcccttcnagcttttgtgtgaattctgaaacacggtcccatctgtcttgattgttggccgggctctgcaggctgagtgtggagaggtggagagttagagatgaaaacaagtcccatgtttcccagtgactacagcctttggtcgctgattcacaaacgggctggaaagctcngcaagcaggcgaaaattcccaatgtatgccagcactccatttttcagtacaaggtagtatgcatacagggacgcacaatgatgcattataaaaaatttgtcaccaatcactttccaatacaaaattataatggacaagtcagaaatgaggtacctgaggcaattttcaatattcag

SEQ ID NO: 311211 - DNA, 507 bp, Homo Sapiens
atttcttgtaaaatatcataaattgactccttcaagtgttcagtagtacaataggtaatcgataattggcctcttgggactgactgtaacgttttggtgtttgtatgttttgagacagagcaatagatcgcctccatatcttttaaacattcaggtctcttgtataagaaaaataaccattgtggggtttttgtgcatcttatactaatatgaaacaaacaaaaccccctggatattttatccttagaaagatagaggaagacaggagaagggaatggtcattgtaaattagatagatatattgagtgttagaagattatttaaataattgttcttttgttatttgtactctttgcaaatttatttaaatgcatattcatgtatatcataagtatatattcacatgcatgtctaaatttagtggcatagatctatctcaggggtattaatctttcattcgtgtactgatttgtgttttattttcatttaaaaaattgtggaaccagt

SEQ ID NO: 311212 - DNA, 379 bp, Homo Sapiens
tgtctctggccttcactgaccccaagctggcattacacttattactgggaccctgcactccaatccactatcgtgtacagggccctggaaagtgggatggggctcgagttgaaaggagtagttctatgacttcaacaatgacaataggcaagtttatgctagctcttgccttctttgctataattatagcttacttctagttgtcctattgtcactggcctgtttttcattgggaagcttatctacagatgccttcagaatctgacgagattgactctcagtttcatattgcccagaaatctactttaatgtctctttcgaaagcattaattcactttcctttttcctacaatgaaacctgttttccatttgtattaac

SEQ ID NO: 311213 - DNA, 1142 bp, Homo Sapiens
  misc_feature (45)..(45): n is a, c, g, or t
cccaaatgttcaaggaactcctgctaaagggcatccaaagatggnctaaaaggagtacctgagctccccagtctagggatttcccacaagggaagagtgacggatcatgagtggaagggagatgagtttatacaaatggaaaacaggtttcatgtagggaaaaaggaaagtgaattaatgctttcgaaagagacattaaagtagatttctgggcaatatgaaactgagagtcaatctcgtcagattctgaaggcatctgtagataagcttcccaatgaaaaacagggcagtgacaataggacaattagaagtaagctataattatagcaaagaaggcaagagctagcataaacttgcctattgtcattgttgaagtcatagaactactcctttcaactactcttgtccatcagaggcttcctgatgcgatcatctgtggtgaggatagcttttcgagccccatcccactttccagggccctgtacacgatagtggattggagtgcagggtcccagtaataagtgtaatgccagcttggggtcagtgaaggccagagacagcagattgggcctgacccccaccaaatcagcaagctcttccatggtatctatgtagtctccctgaatggtatggcgttggctctccacataccttttgtcaatttcctcttgagctttagatatttctgccatcatttcactctgtgagggcaatgtctttagacctttaaatacctgagtggcccagcgtccttggagctctgaaatgggcataatggctcctaagggctgaatcaagcctatgattgcaagagttggcctttccaggttaggagggaagacctttttatacagggatatcttgtttttgaccactttgacggaatcttccagaaatggaaagtcaaagctatagcctgtggcaaagataacagcatcaatgtcatcctccctggagccatcctcaaatatggcagctgtctccgtgaattccttcacatttcctttcactttcaccaagccagaaatgatacgatttggcaggtcatcatttaaggttggatgctgactcagagctctgtgtttaggcttcaggccaaacatttcatggtcaaacctttggttatctttttttccaaatat

SEQ ID NO: 311214 - DNA, 1138 bp, Homo Sapiens
  misc_feature (995)..(1014): n is a, c, g, or t
tctgattttcaagtgttagtaacttgaccattaaaaaatagttttgaacaatttaaaaaggaaagacaaacatataactaaaaaagaatccaaagttggtaaaaatctgtattttcaaatgtaaatagaagctaggctgtgaaccatacacataaattgtagaccttgaagccataattcagcctaattataaggccaagttacaaacacctgaacgtaaggatttaaaatagtgttcctgtcaatgttaaatcataacagcacaaaagaaaaaccagtatcactgtgagacaactatttctaataattgatgatttattggttttaaaaaaatcattttactgatgcaaaatagtgatcaaaagaaattagtttacaaaaagacttctaaaaatattttgagaggtggggcctgtctattatataaaacccttaatttctttaatttccactagtttatcatttttttccagaacagtattattcacttggtatttcaaacacatgttaagaaggaaattacaggtttcctccacccacatttgggctgtcactgatatgcccaagggcagtcctggcagcaccacgcggctgttactgtcattgtaccatactgtattcagcactcactagaaacagggtataggtgatagtatcaacagcaatagcactacaggtaaatgataaacaaaacaaaacagaaacaaaaccaatcccacaatctccaagttcacctggactgtaacttctcttgcaactctttcaaaataaaggacaacagcaacaacaaacagacctctagggtgtttaaaaagatgaagtggcgctgcagagctgggctctgctcaaagatggcagtgccatcttgtacacaccaccatccattataaccgccttccatcactggaattgtatcttatgtaaccaactagcatgcagcattgtaatcttacaactgatcacgtggacagtgaacagcggtcaactttgtcttnnnnnnnnnnnnnnnnnnnnccccaaaagaccacacaatcctgaaaatttcccagcagcactctcagtcatcagtatctcaggaactgaacttttgagcaaaatagaaattcaaaatccactttcctactcccccggccataat

SEQ ID NO: 311215 - DNA, 1024 bp, Homo Sapiens
  misc_feature (112)..(127): n is a, c, g, or t
tttgggttaaacagtatttattgaatgtaaagtaccccagccccatggggaggaaaattccaagaacggggaataatacagattaaatacccacctgtgcattcacactctnnnnnnnnnnnnnnnntgccacgcacatatccaagctccaacggtgacaaatcaaacacctgttttcccccagcctgaggggacagctggtaggaggtggttcagaggtggggctcccaggatgggctctaatagcagcagccttgtctctccctgccccctgccctgccccaggggtcaaagggagctgggcggggcgcctaggaggttggcggcaactcttccccactctgccgcagacgcttcttggctctgatctcattcatagcctcttcaatggagcgtgtgtccctcttattggccacgggcacacagccgtaggtcttattggcctgtagcatgtgggctgcgtctttggctgctcccttgccgatgaggtggctgtacttgtccttgtagtcgctggcagggctcaccaccacaggcccctgctgggctgcctcctcctcttgcctctgggccagctccttcagcttccgcttctcctcagccttctgggggtcccattcctctccacgacggtaagagtctagctcttcatctgagggtgcaaactcctttttgaagatcatgacatagcgacagtcatcatcttccccaaaggagaaggatgtcaggccagccacttccaccacatcatgtagtatgctcctctcgatcttgttcattggctgaaactttttcttgatctgcccactgtcttgaatgaaatctgacacctccttctccatccttttacgaaactccactttctgttgtttctcttgctcttgtagtttcttcaggcgggcggcctgttctcgggccttgcgccgagtctcctggtcaccgaggctgggtggcttctccatggagctcaggatggagcccagtaggtccgcctcgtgccgaattcgccacccaggcctcgctc

SEQ ID NO: 311216 - DNA, 920 bp, Homo Sapiens
agtgccagtaaaaactcccaaagataaattgtgtttccctttccgtctttatttttattcttcacagatatatttggcgtagtggctggggaatctgctcgtggtggtttagtttttcttccttttttcctattaggctgttctggtgatgaggctcccggtgagtctgcatatttttcttgcacctgctgtgtttccatcacttcaggaatcccatctaatgtgacggacacatgggtgactggggcaacaaccatgtcatcttcaggtgaactaaatatattattatttattcgtttttcatccagcatagggccaggggaatccatattgaggagtgcctcagcagcctcaatagtttcaattgtttcatccccgtcatgacaagaagcttcaactgtaagggtgatgtcatcatcatcatcgtctatgatttcttcttcagcaacatccagtgaactctcagtaatcatgtcattgggctcttccacacaggctagaccggcataactattgagaatatcagcaccaggaacatgttccacaattacggcaggaaaaatagctggatcaccaagctgtcgttcatcctccatgacgttactagcaaattcaaatactaggtcgttctgttggacaacagcagccataataaagcattccccttagatccacatgagaaaaattccaagaagattcacgtatcaggcagcaaaatccagtgactgatttgggtaaaaaaccctcagctctgtctgtggagtaattgtatacccaagttttctttagggaaggtgcttcagttttcctggttcattgatattctagtcaaattgagacaatttttctgaaatttttcttctctcaagcttcttggccatgcttaagcctgtcttcagtggcttcttttttaatgcccc

SEQ ID NO: 311217 - DNA, 1107 bp, Homo Sapiens
ttcagggtcattcatagtaaaactttattgaacagaaaacccagcaaaggttttcacctccgcaaagttccccttagtttaaagtaaagcactgcattttaaaaagcaattatacataagtctttcctagaaaagtcctgctaaaacatgtctagcaatttcattgattatataaagtagtacacttagtgtaatttaaacattccaacaggaatcaaatcgtaccagcagaaccacttctgcatctatgacttctatgtacaaacacacatgcagacacacacatttggaaaagttcctcaagcatagacatgcaacacctaaggccttctacgtacagtgcttattaaactacatagagtatatattaaagctcttcagaataaagacatgagaagccttgggcattttttgttcaccaatttgtatcacggcttcacgtttctgcttttgcttgctcacaaaagcatatcatcatccacactgttttttaaaaactcatcattgccatgtccaggagaggcaatctagctggagtcaggtgatccagtccattcctgtcaaagcctccaacagctacagcacaaacaccatcagtttgcgatggctggggggccttcttggaagagagagaggcaaagaaagtcttgaagaacaggccatgctgtgctcataaaaggaggggctggtctgctcgccatctagtacatccttgtctggagggagggtggttggggtcttcagttttcggatcagtgccttcctgtaagttattgttggggtcctgatttacaacgtcaggaggaggaccatcatttgggaagttctgaaccggcctcggtctaaatggaaaccacccaacgtgatgcaggtacataacaacggtggcccccatgaccatgaggaatctgctcagggaggagtagaagtagaggatactgagaaaaacagaaaatgtagctgctgaataggtccaatccaaccaatctcgatttagattggctccaggattaacaaccacttgaggagcagcattctgattggcaggctggcagctggaaactggttgtgaataggggctggagcaggtgcagagaccacaggtat

SEQ ID NO: 311218 - DNA, 1666 bp, Homo Sapiens
  misc_feature (48)..(48): n is a, c, g, or t
  misc_feature (87)..(87): n is a, c, g, or t
  misc_feature (154)..(154): n is a, c, g, or t
gcagaaccacttctgcacctaggacttctagtacaaacacacatgccngacacaacacatttggaaaaagttccctccaagccatangacatggcaaacacctaaggccttcctacgttacagtgccttatttaaactacatagagtaatatanttaaagctccttccagaataaagacatgagaaagccttgggcattttttgttcaccaatttgtatcacggcttcacgtttctgcttttgcttgctcacaaaagcatatcatcatcccacactgttttttaaaaactcatcattgccatgtccaggagaggcaatctagctggagtcaggtgatccagtccattcctgtcaaagcctccaacagctacagcacaaacaccatcagtttgcgatggctggggggccttctggaagaagagaggcaaagaaagtcttgaagacaagccatgctgtgctcataaaggaggggctggtctgctcgccatctagtacatccctgtctggagggaggtggttggggtcttcagtttcaggatcagtgccttcctgtaagttattgttggggtcctgatttacaacgtcaggaggaggaccatcatttgggaagttctgaaccggcctcggtctaaatggaaaccacccaacgtgatgcaggtacataacaacggtggcccccatgaccatgaggaatctgctcagggaggagtagaagtagaggatactgagaaaaacagaaaatgtagctgctgaataggtccaatccaaccaatctcgatttatttcatcatcttcttccacaatagggccaccttgtgcattcatccgcaaattttgattggctccaggattaacaaccacttgaggagcagcattctgattggcaggctggttttcagctggaaactggttgtgaataggggctggagcaggtgcagagaccacaggtatctcttgtgcacttggtggtggaacaaaagcccctgatgcagcagtggctgctaaatattgcatgtagtactgtcgtgcatatatctgctggaaccaggaaagctgaagccacccatagggtgtgtaaccggagaaaccaggacccaggccttggaatgcctgctgggcagcttcaggccttgagatgttttcccatccaggggaagaaaggttccgaagaacttccctttgccttaaaccatcacttgaggaatcctcaggatactgtccccgattagaaccagcaggctcctctgtggattcagccaccttggcgttgatttctggcatttttgaaggactcttcacattgcacaccagatgcaaaacatgccgtttttcctgctttggaagcaagtccctgagacattggtgatccaacaacagcttcccagaataaattaacctctggtcctctggacgcggacgctcggggtagacgcggctcaggtgggccttgaggtggcccacactccagccgcggtcgccactcagctccaagtcgcggtggcgctggttggggctcttcaccaggagcgtgacgggctcgggttcggtctcggactccatggcggcggcggcggtgtcggggctccgctgcgctcctaggtgccaggcaggcggcgtctcagccgcccgcaatctctgcaacgacagttcacgtctctggggcccc

SEQ ID NO: 311219 - DNA, 549 bp, Homo Sapiens
  misc_feature (378)..(378): n is a, c, g, or t
  misc_feature (432)..(432): n is a, c, g, or t
  misc_feature (463)..(463): n is a, c, g, or t
  misc_feature (472)..(472): n is a, c, g, or t
  misc_feature (532)..(532): n is a, c, g, or t
attatttcagggtcattcatagtaaaactttattgaacagaaaacccagcaaaggttttcacctccgcaaagttccccttagtttaaagtaaagcactgcattttaaaaagcaattatacataagtctttcctagaaaagtcctgctaaaacatgtctagcaatttcattgattatataaagtagtacacttagtgtaatttaaacattccaacaggattcaaatcgtaccagcagaaccacttctgcatctatgacttctatgtacaaacacacatgcaggacacacacatttgggaaaagtttcctcaaggcttaggacatggcaacacctaagggccttctacggtacaggtggtttatttaaacctacataggnggtattatatttaaaggctctttcaggatttaagggcatgaggaggccttgggngattttttttggttcacccattttggtatcncgggcttcncggtttctgctttttgcttgcttcaccaaaggcatatcatcatccccactggtttttttnaaactcctccttggcct

SEQ ID NO: 311220 - DNA, 539 bp, Homo Sapiens
  misc_feature (34)..(34): n is a, c, g, or t
  misc_feature (43)..(43): n is a, c, g, or t
  misc_feature (112)..(112): n is a, c, g, or t
tccctaagcctggaattcagttgatcccaatccnatccctgtnccaaaccctcccaaacagctaacagccacaaaacacccatcaatttgccgaatggctggggggcccttnctggaaagaaagaagaggccaaagaaaagtccttgaaagacaaagccatgctgtgcctcaataaaaggaggggctggtctgctcgcccatcctagtaacatccctgtctggagggaggtggttggggtccttcagtttccaggatcagtgccttcctgtaagttattgttggggtcctgatttacaacgtcaggaggaggaccatcatttgggaagttctgaaccggcctcggtctaaatggaaaccacccaacgtgatgcaggtacataacaacggtggcccccatgaccatgaggaatctgctcagggaggagtagaagtagaggatactgagaaaaacagaaaatgtagctgctgaataggtccaatccaaccaatctcgatttatttcatcatcttcttccacaatagggccaccttgtgcat

SEQ ID NO: 311221 - DNA, 2387 bp, Homo Sapiens
gaaatattttctcattaccttcttcctgttcagcttcgccatcggattttatctgctgctcaagggactgggtgtagacctcctgtggactctggagaaagcccagaggtggtgcgagcagccagaatgggtccacattgacaccacaccctttgccagcctcctcaagaacctgggcacgctctttggcctggggctggctctcaactccagcatgtacagggagagctgcaaggggaaactcagcaagtggctcccattccgcctcagctctattgtagcctccctcgtcctcctgcacgtctttgactccttgaaacccccatcccaagtcgagctggtcttctacgtcttgtccttctgcaagagttgcggtagtgcccctggcatccgtcagtgtcatcccctactgcctcgcccaggtcctgggccagccgcacaagaagtcgttgtaagagatgtggagtcttcggtgtttaaagtcaacaaccatgccagggattgaggaggactagtatttgaagcaatgggcactggtatttggagcaagtgacatgccatccattctgccgtcgtggaattaaatcacggatggcagattggagggtcgcctggcttattcccatgtgtgactccagcctgccctcagcacatactctttcagatggaggtgccatatcacgtacaccatatgcaagtttcccgccaggaggtcctcctctctctacttgaatactctcacaagtagggagctcactcccactggaacagcccattttatctttgaatggtcttctgccagcccattttgaggccagaggtgctgtcagctcaggtggtcctcttttacaatcctaatcatattgggtaatgtttttggctaatgaagctattgagaaagactaatatgccttgggtgcgactgggcgtgctcggagctcgcagacgctcggaggcatggcggctgcggagccggcggtccttgcgctccccaacagcggcgccgggggcgcgggggcgccgtcgggcacagtcccggtgctcttctgtttctcagtcttcgcgcgaccctcgtcggtgccacacggggcgggctacgagctgctcatccagaagttcctcagcctgtacggcgaccagatcgacatgcaccgcaaattcgtggtgcagctgttcgccgaggagtggggccagtacgtggactttgcccaagggtttcgcggtgagcgagcgcttgcaaggtgcgcctcgtgccgttgcagatccagcttcactaccctggggaaatcttaacactttcaagcattgtgtttttctgctgtgatatgcaggaaaggttcagaccagccatcaagtattttggggatattattagcgtgggacagagattgttgcaaggggcccggattttaggaattcctgttattgtaacagaacaataccctaaaggtcttgggagcacggttcaagaaattgatttaacaggtgtaaaactggtacttccaaagaccaagttttcaatggtattaccagaagtagaagcggcattagcagagattcccggagtcaggagtgttgtattatttggagtagaaactcatgtgtgcatccaacaaactgccctggatgctagttggccgaggagtcgaggttcacattgttgctgatgccacctcatcaagaagcatgatggacaggatgtttgccctcgagcgtctcgctcgaaccgggatcatagtgaccacgagtgaggctgttctgcttcagctggtagctgataaggaccatccaaaattcaaggaaattcagaatctaattaaggcgagtgctccagagtcgggtctgctttccaaagtataggacatttgaagaactggtatgctactcactggtgaaggacagtcaggtgaaggactgtaagcccacacaagctcttcttatctctactagaattaaaatgttaagtcaaaaacggctccttttttgcgcctcctagtgaaacttaaccagctagaccatttgagtaccagcatttagttacaaacgtcaaaggcttccggtgctgcttaccttccttttttgttaatgtgcttttatttattaaaaaaaattacaatgaagatgcctgttttgtctctactgtgtactctgatcggatctttcccaagtgcagactccttgtggaggttttcttaaattgttccctttaaaagaaaatgaccgtcccaccaatggatttgggtttttaaatttactggaaaaaaggttaataatggtaaaggggggaagaaaccgccttttaacttttacagaaatggattgggaaataaaaataatttggataattgaattttacccccccgggggactcttggaattattggtta

SEQ ID NO: 311222 - DNA, 350 bp, Homo Sapiens
  misc_feature (37)..(37): n is a, c, g, or t
  misc_feature (190)..(190): n is a, c, g, or t
  misc_feature (228)..(228): n is a, c, g, or t
  misc_feature (335)..(335): n is a, c, g, or t
accccactaaccatctattaattatacttaagctggncccccattactgagagtgcattactatataattaaagccatttagacatggcttggcatagcacttgcatgatacgccacatactaaaaactcctccttagggcagccttcttttcctatcagattcagagctcctttctccttttctcgggnaaaaatgaacacagggagggaaaattctcagttggggntctccagcctgggggggcttgtgagctgggccctactgggggaggtcttgcttttgtatatggtgacgggaggaataaggtaaggtcttcaggggggggaaatcccngggaccaaccccaac

SEQ ID NO: 311223 - DNA, 1211 bp, Homo Sapiens
tctctgctttagggaattaatctacttctttaattattatctccacttgaatttttcatgactgcttcaaaatcattgtttagggtttatgccatcctctccctaaaactggttccccttcccaacttatctgttacttgatattagtattccacggaccttaaaaattcaccattatggatttttaccgtctatctcctttattacgcactacggtggggttcaactgtggtcctttaaaaagatgtccaagtcctaactcctgatacctgggaatgtgatgctatttggaaatagtttttgcagataaaattaaattagggatctcatgagatcatccctggatttagggtgggccctaaatccttattaagagaaagaagggaaagactggaggcacaaaaacacacagagaagaaggggccgccatgtgaatatggagacagacatcagagttttgctgccacaagccaaggaatgcttgagccaccagaaactagaagcggcaaggcaggacctttagagtgagcacagtctaccagatttctaacttctggattccaaaactgtgagaataaatttatgttgtttaaagccacgcagtttgtggcaatttgttatggcaaccacaggaaactaatacacttatattcaatctgtctcctagatttcgttgtttctttcattcaattttttggattcttgctttatccttattctacatttccctttcaactgttatcaaccaaattcagttactaattgataaattgactacacagcctccaaatgacagagctcacttgaagtagatcctaaaagaatgtcttataaaacctgctgttgtaacatcacttttctactaggaaaacctcaaaaatgttataggcaaaaacatggctttaataatcctcaaataagacttcagaaacatcccaaattgtattttctgctgctgaaaaagtgcatcttcaccttctttcctgctaataaatgcctgtagaccatgcatgataaaccctccatgaatgttccatccatcctcccctctcctcccaccaaaactagtttagttcaataactacttccttcatgatatcttgttctatttctccaggcaatttagtttctcctcctaagtccattttgctttaagaatcaatagcatagactacatttcattgtttcaatacataatagatctgcacccc

SEQ ID NO: 311224 - DNA, 468 bp, Homo Sapiens
  misc_feature (386)..(395): n is a, c, g, or t
tcttcctcctaaaaaaatggggaaaacaaagttaagaatgctgctcaattcaaatatataagacaaatatactgatgagcttttcagagcagctattttatattcaattataaaaattcattttaaagttgaaatccagaaagaaagtaatcaaaagcactagtttttaatttaaaggttgtttaaagcatacagaatatcccatttcatacaactgtattagtttatcagtgagtaacaaggccagagataaatacatttaatccagacaatgcaatgccaacatttcatcaggacaattaactattggagttttaatctccactgtgtcctctaatccatcctgttaagaattgctaaataacaacaacaacaaaagggtcagnnnnnnnnnngaaggcaaggaggtataaaagtacagatgatacaaaggacagagattatgccataaaccaaattttaatttta

SEQ ID NO: 311225 - DNA, 887 bp, Homo Sapiens
  misc_feature (390)..(509): n is a, c, g, or t
tccgtacattctctctatcaaaatttttaatcatcttagtctgttcattaatagcttcaagaggaacattggtggccccaatttgttgtgtgataccacctgcttcaccgtcttgtacatgtgtgtgacggagcttatctagaatttttgtcttccctgtgtccacatgcccaagtacgcagataataggggctcttagcttttcggtgtttacatttttactatgttcaagtcgccgtttctcaatcctccgttttgctttgtcataagccctttcttctttagtccgatcatcatcagagtcatattcagaatctgagctcatttctttacttggctttttatctaatgtcttccctgaatccttctcatctgacaccttttcatctnnnnnnnnnnnnnnnnnnnnnnnnnnnnnnnnnnnnnnnnnnnnnnnnnnnnnnnnnnnnnnnnnnnnnnnnnnnnnnnnnnnnnnnnnnnnnnnnnnnnnnnnnnnnnnnnnnnnnnnnatatgaactgtgtttccttctactttttctgtctcctcatcactggccatagcttcccaatcatccaatccagcatcctcagtatcttcttcttcttctggttcaacaggaggtggtgtctcttccttttctggtactccttgttccataacttctacagcagcacataattccattgattcagacacttctttactttctagctgctgtggtatttttttcctctttttatcttcataaattggcctcttctttggcaaagagtcttttgatggcacttcaacaccctgagcttgtagcagtttaagagtagcttcggctctggctctggcttctctctgggatttagttaaaagtttcccttcttttttcaagccc

SEQ ID NO: 311226 - DNA, 663 bp, Homo Sapiens
gagactgcatagggctcgggcataaaaaaaggatcactttggaggaggagcactgctaattcctctttgttcagtccagagagttcgtgatttttcaggactttgaagttctcttctgagagaacctcatgagaatatttgcataaattccgctcggactgcgaatagttgcaccggcccagcaagttgagtttgcagagatgcaggttatcgcagggtctctggcagtacttgcgacggcagacccgggctcgagtggtggccaccaccgatcgggtgatcccggcctcgccgccaggtctccaacaccacaaagcggtcgggcccggccacctgcagcacctcacagagctgcgggtcagacagcgcgatctcctggagcagcgcgtaccagggccatgcggcccccgtggggcgcacaggatttttggtgatgaagcagcacacctccgggtccgccatggcgcgctggctgtgctggctctgccgcggcgcgggactcggttccgcggaaatcggaaatcgaaacttactagtgtccaggggcgggcgcgggcggtgctactgctgggcgctgcccggagtcagcgagggcgctgctctccgtcgccgttagcccagcccagcgatccactctcggctctcaggtcaagaggctagatc

SEQ ID NO: 311227 - DNA, 1051 bp, Homo Sapiens
  misc_feature (634)..(727): n is a, c, g, or t
aaggaagttatgatagaggagaatgtagtagattcttcactagaatatacctcataaattaacatgtcacatgtattaatactacaggtataatgatgcagtacttgaaattatttaataaatgttagattatattgtgaaaatcacaaagatcatttgttttcctttgttaccaatagtgtttcgtaaaactatcctttcgtttcacatgaattgttagacttcattaaactgtacagatcctgtagtgtgtgttccatccagtttctttattggagacagtggaattcccttggaagtaatagcaggaagtgtttctgcagatgaacttgttacaagaattcacaaggtccgacagatgcatttgctaaaaagtgaaacatcagtagcaaatggcagtcagtcagaaagttcagtgtctactccatctgcgtcatttgaacctaacaacacttgtgaaaactctcagtccagaaatgcagagctttgtgagataccacccacttctgatacaaagtcagatactgcaacaggaggagaaagtgcaggccatgccacttcctctcaggagcctagtggatgctcagatcagagacctgcagaggacctcaacatccgagtggaaagactaacnnnnnnnnnnnnnnnnnnnnnnnnnnnnnnnnnnnnnnnnnnnnnnnnnnnnnnnnnnnnnnnnnnnnnnnnnnnnnnnnnnnnnnnnnnnnnnatgttggattataaaagaaaacaagaagaagaattaacaaaaagaatgctggaggaaagaaacagagagaaagcagaagatagggcagctcgagaacgtataaaacagcagattgcattggaccgtgcagagagagctgctcgttttgcaaagacagaggaagaagtagaggctgccaaagctgctgccttgctagcaaaacaggcagaaatggaagtcaagagggaatcttatgcaagagaaagaagcactgttgcaagaattcaattccgtcttcctgatggttcttcctttacaaatcagttcccttctgatgctcctcta

SEQ ID NO: 311228 - DNA, 749 bp, Homo Sapiens
ccagcactctctcactggccctttctgatgtgctagatgatgcagggtttgggggttctgacgatgttactctcactaaagtctgtgtggaaggcggattactaaacaagaaattgctaattaatctccagatggcaaggaatggataaagcactgttcccaacaaggtccaaatgtctccgctggaagatgtgtacaatggatgcagttggtcttcctgctggcaacagtaccaccgaagcgcttggggcaagttccaaatccagtaacttctttttataatcttctttggtaaattccctcctgggaaacatggttgctaacgaaaaattaccgtaagtgttgccaacagtctgtgcagcaaactgccttgcctcttctagaggagcatcagaagggaactgatttgtaaaggaagaaccatcaggaagacggaattgaattcttgcaacagtgcttctttctcttgcataagattccctcttgacttccatttctgcctgttttgctagcaaggcagcagctttggcagcctctacttcttcctttgtctttgcaaaacgagcagctctctctgcacggtccaatgcaatctgctgttttatacgttctcgagctgccctatcttctgctttctctctgtttctttcctccagcattctttttgttaattcttcttcttgttttcttttataatccaacatttcttttccagtttttctcctctcaatttccttcttaatttctct

SEQ ID NO: 311229 - DNA, 816 bp, Homo Sapiens
cttctaaattccctccgggtcctccccctttcctttcctcttccccccctttctccaagtttttttgtaggtctttccatcgggatgtgagggtcctctgcaggtctctgatctgagcatccactaggctcctgagaggaagtggcatggcctgcactttctcttcctgttgcagtatctgactttgtatcagaagtgggtggtatctcacaaagctctgcatttctggactgagagttttcaccgagtgttgttaggttcaaatgacgcagatggagtagacactgaactttctgactgactgccatttgctactgatgtttcactttttagcaaatgcatctgtcggaccttgtgaattcttgtaacaagttcatctgcagaaacacttcctgctattacttccaagggaattccactgtctccaataaagaaactggatggaacacacactacaggatagatttgtgaaaactgtaggcaggcttcacttttggtatcgattttaatagcaacaaaactgtttgaagatgcttctgtaactttatcatcttcccaacttgcagccatctgtgtagactgttcatcatcacctgccacgaacaccacgaagaccgcgccgctccttttggccgtcgcgatggcggccggaatggcgccctggaaccacagcatcgctcccttcgggcccaggcgctcgctcggtgtgtagtctccgcagtcccgaagccggctccgccctccgtcttcgtccggctctgcggcccccgcaaccttggctggttcggcccccacctccggctccgcacaagcccc

SEQ ID NO: 311230 - DNA, 864 bp, Homo Sapiens
  misc_feature (78)..(78): n is a, c, g, or t
aagccagaagtcacattttaccaatatgcatttatcataattggtgcttaggctgtatattcaagcctgttgtcttancattttgtataaaaaagaccaacagaaattatctgtcatttgagaagtggcttgacaatcatttgagctttgaaagcagtcactgtggtgtaatatgaatgctgtcctagtggtcatagtaccaagggcacgtgtctccccttggtataactgatttcctttttagtcctctactgctaaataagttaattttgcattttgcagaaagaaacattgattgctaaatctttttgctgctgtgttttggtgttttcatgtttacttgttttatattgatctgttttaagtatgagaggcttatagtgccctccattgtaaatccatagtcatctttttaagcttattgtgtttaagaaagtagctatgtgttaaacagaggtgatggcagcccttccctagcacactggtggaagagaccccttaagaacctgaccccagtgaatgaagctgatgcacagggagcaccaaaggaccttcgttaagtgataattgtcctggcctctcagccatgaccgttatgaggaaatatcccccattcgaacttaacagatgcctcctctccaaagagaattaaaatcgtagcttgtacagatcaagagaatatactgggcagaatgaagtatgtttgtttatttttctttaaaaataaaggattttggaactctggagagtaagaatatagtatagagtttgcctcaacacatgtgagggccaaataacctgctagctaggcagtaataaactctgttacagaagagaaaaagggccgggcacagtggcttattc

SEQ ID NO: 311231 - DNA, 1084 bp, Homo Sapiens
agggggctcccttttttagggtttggttccccccctccccaagagcccagcagaggattgcttttttggacatagtcatgcccatggatattgggggccaaggacttggccagggggtcaaagatatccctggatggggttttagtgaccttctggatcttgggctatatcctcagccagagaaagaggggtgagcatccttgctcatctgtttaccattccaggcaatcaggccagtcctggaggtcccagaggtgtagcctcccttctttccaggaaggcaacggtaggttccccccacctgaacccggtcaccaggcttcgctttatccaccaagtcatcatccagaatgacgtccacagagcgggggagctggccggctggggccttctccggcatctcctggatggtgatggtctggtgatccttgtagacagaaaggccatattctgtctcaaggggattgttctcctcatccttggtaggatagacagagctggagggaaaggccaccagggtggtgagatcagaataacgtcgctctatggtcttcttagtagcaggacagtagtggacactgcggacgactttgggacgaactagagaacatttagtgacaatgccctccacacagaccacacagctgaggaagcaggaggtaagagtccgcggggagacgtgcttggagccaaagctgccttccagtcctacgtagaactcctcatactgcttggcataggtagcatcaatggaggccacaaaatcctttaaggcccgctggaaggcaaccagctcctcaaaggcattgttcagaagccggttagccctcttctcgtttttcctgcgcaggtcattcacattgacaatcagccggtattggttgtcactgatcagctcccgaactttgctctgataaattccctggtcttcctcgtcgtccaggaagtccaggtaatctctctgagcctcccgcagctccacatcgtccagcaccacggtacccgccatgcccgctgccaaagaactacctccaccaaagtcgcgtggaggttcccaggatgactccaccccggcgcgaaaact

SEQ ID NO: 311232 - DNA, 1956 bp, Homo Sapiens
ttgcccagatttcgggctagatcttcttgctgctgctcataatggtgccgcagcaatttctcccagtagtcaggatccacactttcttcctgtttaatgatttcccgttctacctcctcttcctcccccatttcttcttcccgtaccacatactgggccactttgaatgagctcaaatattcattcatgccctgcaattctgtgtcttcagtctcatcctggttacggtctagcagccgttcaatggccttatcatcgtagtggataacactgctatcttctccctctttgttgtctcctcctccatcagtggcttcatccttgaatagttcctcagtgccaaatttgaggatatcatcaagctcctgtttggacatagatccagtcttggagcccagcccaggccgcaccactagatgcgtcagcatcattttcttctttgccacctgcgtgatgcgctcctccactgacgcacgggtcacaaaccggtagatcattacctttttattttgcccaatccggtgagctctgctaaaggcctgaatgtcattatgggggttccagtcagagtcatggataataactgtgtcagcagtggccagattgattccaaggcccccagctcgagtggaaagcaagaagcagaactgctgagcacccggtgcattgaagcggtcaatggcctcttgccgcatgttcccagtgattccaccatcgatgcgttcgtatttataaccttcatgttccaagaaatcctctagctggtctagcatcttggtcatctgggaaaagatgagtacacgatgcccaccctccttaaggttcttgagcattttctgcagcagcaataatttcccagatgctctgattagggcactgccatcatacatgccattaggcatcttaggagcttcctgagaacaaatgcaaagaaaaaagtattaaaagaaagcccacatggagaagacccaacccagggaggaacaggagatggcactacataccattgcagccacagggaagaggtatggatggttgcagcacttcttaagatccatcaccacattcagcagagacacctggttgccaccacctcgggcattgagtgcttcaaaatttcgagtgaggatgtacttgtagtatttcttctgcatagggctcagctccacacgcacaattagttctgtcttggagggcatgttcttgaaccacatcggcttttgagcccgccgcaaacatgtgcggcccccagcatgtcatgcagtttttttatctgggtcttccttggcaatgtcagcaaactcctccaaaaaaaccttccaaattgtggaacctctcgggggtgagaaagttgagcagatgaaacaactcttccagattgttttgtaatggtgtcccagtcagcaacagcttgtgctggagtgagtaaccattcaatacccggaagaacttagactgattgttcttcagccgatgggcttcatccacgatgaggcaggcccaatcaatagagcccaaaatagccatgtcaatggtgatcaattcataggatgtcagcagcacatggaatttcacagatgcctctttcttcatgcgggaggccttcttgccaccacgaatggcattgtcttcaaaggagaactcattctctcggatgatggcacggctgtccttgtcacccacataggttacgacatacatgtctggagcccacatttcaaactcccgctcccagttgatgatggtagaaagaggggcgctcactaggaaggggcctttggaatgaccctccttgtaaagggaatacaggaagactgctgtctgtacagttttcccaaggcccatctcatcagccaagatggtgtcagtgccctgagcccaggagaagcgcaaccaattcaggccctccatttgataggggtgcagggttccacctgtagcatccaggtactctcc

SEQ ID NO: 311233 - DNA, 993 bp, Homo Sapiens
tggttttgttgcttcccgagcatattttccatgcggggggagccggaaagaggagttctgccctttctaaagggctggtttcataaagggttgagaaattcttgggcgggattttctttaggaaggttcatgagcatcggggtggttcttgttgttgccggccatcgaagagacaggtggcggcgttgtgatgaggaggggttggactcgagccaatggtagaccccccgttccctgtgatttgcaacaaactggtaagaattgggttctgagacaccttgctgaagtcctccccatggcccaccgactcatgccgatctttgatgctcatgctcatattaaacaaggtggtaatgggaccccccggaaaggtgttggttggtgtagtggtaccactcattgggttgttgcctgtggtcatgccataccctgggctgctagccgggggcaggttctttttcaccatgtcttcaactgtctctgcaatgagggacagtgctggggtgtcggcttgaatggtttcagctttcctccgaatagccctcatcgtcacagggatggacatacatctttgaacaactttggcaatgaagtcatctgtgcagatcagtgcatccgacagccctttgtagagtttacagctcacatgtgttgagtcctgcacatccattaccacacacaccagggagtcattcacagggtgctgaaaagatacgctgaaacgagactctgagagaggacacacttcaaattggagaagcccaggagaatcttctttcagaatagttcttttgacacagcttccaatgagggtgttataggccacttggtgtctgatcagatttaggataagaggaactcggccagggtgctgaaaggtgattttgctaacaagggttccctgtagacttcggccatctggaagaggagcatccttgttgaggaaatagcagtgctgctgaccaggaagagcagcataaaatctcatgttcc

SEQ ID NO: 311234 - DNA, 1247 bp, Homo Sapiens
gtaagactatgcaaaacttttcccttcctattattttttgcattttccaaattttctaaatgatcagagagcatcctgatagttttattttaaataaaatcaattggaactctcatttctgtgtgagccgtttaaattttaaaacattaggaggttttgctgtcgtgctggccctggtatcagttccttgctcagtttgcatcctgaaatagtgaaacacaaaggctcggctgtgtaaggttccacggaaagtctcctatccacaccccagcagattagctggaatgtgttctctaaccttgtctacccatgaggcagcaggcgcttggcgccctggggagcagaagccccatgactctgtaggagccctctggctgatggctctttctgtaagcccctcccagtggaggcgggcaaataggctaagtctcccacatggcaaaatgagctcccttttatgtgcgtcctcggctttcaatggtgtgaccggcaacagctctttgtagatttaaaagacggctaaaattacctgaaataggttaaaaatagattataatttttataatgcctgaaattgcttgtagaattttacagtttcagcatgggagtggtgctttttaatatcaaaaggtttgttgtaaattttgtttccttttaaaatctaaccagagagaaaagatctaaaagataaaataagtaaagattggtatacttacgtaactggacaagtcttgattttcctgactctgaatggcagggctggatcagaggagcaaaagaagcagcaagaatctttttggtttcccaagctgaaggacctgtgcgtgttgtcttagtcaacttctcttccagtggcatgacaaggatccctcccactttgagaagattcttcatgtactcttcatgctctttctgcacgccagccccacagtatacacgatcatactgagaacaatccggagaaatctccaggcaattcccagtaacaaaggaaggttcacagaagtcaaacttgtcaaaactatcacttgttctgatgaagaagtccagtttctgctttgcatactctatcacatctgagtgaagttccaccccatggttcacaccaaaaggacctagaatgaggcccaccatggagctgagatacccagtgccactgcccaggttcagaaacgagagtccaggctgcagatctagggcttccatcacctccgagtagatgcacggggctgagaggtgaatgtttc

SEQ ID NO: 311235 - DNA, 2175 bp, Homo Sapiens
  misc_feature (4)..(4): n is a, c, g, or t
  misc_feature (48)..(48): n is a, c, g, or t
  misc_feature (82)..(82): n is a, c, g, or t
  misc_feature (132)..(132): n is a, c, g, or t
  misc_feature (219)..(219): n is a, c, g, or t
  misc_feature (234)..(234): n is a, c, g, or t
  misc_feature (265)..(265): n is a, c, g, or t
  misc_feature (267)..(268): n is a, c, g, or t
  misc_feature (270)..(271): n is a, c, g, or t
  misc_feature (286)..(286): n is a, c, g, or t
  misc_feature (341)..(341): n is a, c, g, or t
  misc_feature (368)..(368): n is a, c, g, or t
  misc_feature (383)..(383): n is a, c, g, or t
  misc_feature (386)..(386): n is a, c, g, or t
  misc_feature (407)..(407): n is a, c, g, or t
  misc_feature (410)..(410): n is a, c, g, or t
  misc_feature (417)..(417): n is a, c, g, or t
  misc_feature (424)..(425): n is a, c, g, or t
  misc_feature (428)..(428): n is a, c, g, or t
aganctcaggacagcaaagtcagcatgggatccactgctgtgaatttngaaatgtgcatcagtccttggcatcctggcacanaagcagccctcaccactggacaaggagagccagaatttatatagtttgancagcttgcattgcagtcttcattcttcttcactttcatttgtgcaggatctaaatcagaatctccatttaattctttttcacttgcngtatctctgtcctcnccattttcttcatcttttccttcggcatccncnngnnggtgcgtgtgcgaangtcctcatctttttcactttcactctcctcctcatcttcatcccaattatcttcngactccttatctgctatttcatcatcngactcctcttcagangantcttcttcatacaccaacttngcnttcggtncaggggnngtngctccctttgtcttctctgatgctgttacttgtgtaattagaagaataagctttccatgaaggtgtgaaagtttctgaaaagttttgacctctgctttccattaactggtagagtgtccccagctggggtaccaggtcaggcaacgtggacaggtatgatgcatgaactgttaacacacattttagccactgaaccattagcacagcactattaggatgtccttgtaacctctttgtaagctcttgtaacaacggaataatagtatgcaggggcatccttaatacagtcttctttataaggtttacattcctagtttgaagtactttatttagcatttcaaaatcgttactttctaagccctgggtaagaagaactggaaagctattcgtctggaggtcttcctttcctttttttgtgtgtgtctatatccattgctcccagacgttcctcaatgctaacctcatttccccctgacttcctcttgctctctacttgctcggtttgtggaggagcgggcttgatagctgcatgatgaccaggaatcccaggcaccagaacttttgcttcagaattcatcactggtgtcctcacctttgttatagctgtttctactttgggggcccagcagtttgaaatatctcttactaaacacatatgaggttctctggagtttaaagccactcgctcaatagtaggctgaaaccaactgccatatacaagcaacaatgacattttgtctgagcaaaaaccagcagctagaatagggatgggttttggtgttgacttcttgcctttcccaggtgttgctatctgaattgtgcagtttgaagtcaaaggctttttgcagtacccatttaatatgtgttcaaaaagatggacttgaccatctctgcaaacaacagccaacttgacaggctcttctttgttttctgacaaagttaagtcaatatagacaggttcatcggtaactgtaaatgacatcactgcactcttttctttgttttctgatcggacctgccagacattaagtaaccggtcatgtactgctccagataagaaataaagacctgtaattccatcaaagggctggctctcattaggaggtctgatggtagtgaacatcagtgacgaaactggcgttgcatgtcctgtgaaatgcctgtagacttctttggtctccaaaacccatagtttgattgttcgaccagctgaaagcaacatctttccatctgggctgatacatagggaactgacactgctattgtcccctttccatttgcactttactttgcatgtctgtacgttccattccacaatatgtttatcatctgaacaactatataaacagccactgtcttgatgccactgtatgcagttgactctgttgtcatgtccaccacttattaatttactgtgtaactctccttttactgtgctgtataataaaatgctaccaactgctgtgccaagagccaataagtcagtctggttactcattcctacagcttctgatttcctttttttcctctggggactttccttggcctgcagccgcgtggcgcccaggccagacaggtgcaggtaccactgaggtgcgcggaaggcacgtactcctggtgcagccggttgttggccgtctcccatactcgtaagtgaccgtcggtagaggccaaagcgaagtaggcctggctgtgcggggagaaggcgcaagggaccccagcaggggccagggggtcgcagatcccg

SEQ ID NO: 311236 - DNA, 1000 bp, Homo Sapiens
tctttatattatagaaagtgatctcactgacaccagccttgagcaacatttgttccctagttctccttttccataacagactgaacagtgttattagaatgcagacatagccatttaaagtttgacacctggaaataaaggataatagaataaaaccaaaaccaattctaaaaaaaatagaattttcattacatgaaaacatatgaaattaaacacaaaattagtataacttacatgttttaaaagtatatacttcatttataaatatctctagttgataataatctattaagaatcataaatattcaagtgagcatttaaattttctatttaatagttcagaattcttgaagtcagattagtgtctttctgatgaatgtccataattaaaaggctttccacagtcactttatgtctctagttagacacataaaagcctttattacctactctgttgtaataagactttaaaattctgtaagtctcttatacttgtagaaagccttccaaaagcatttaaaagagcaactatttcctgtcgggtgagttggaagcctttagatggactattctctgggagcttttggatttctttttcagagaataatatcttcagggcaagttcctaaaccactgagtctgtaattttccccataatctgcatttgtcacatccaacacagtccattatacgggagatattcttgaaatgtaatcggaattcctcctttagtgacttggccccttttttgtcacctgcaaacatggatttctcatcaaagtgcatgggaaaggactttgtatcttgaaagatattcagtagaagagtttttgtgtcagcatcttcttctgcatttccagtgtaaagatcgacaattgagcggtcaaaatatggagccacctttgactaaggtcgaagctcaatcaagtataaaaagtaaagattcttgagccttcttggaccttctcccttggtttccacagggtcaaagcggtgtttg

SEQ ID NO: 311237 - DNA, 2354 bp, Homo Sapiens
  misc_feature (190)..(210): n is a, c, g, or t
  misc_feature (472)..(539): n is a, c, g, or t
  misc_feature (564)..(581): n is a, c, g, or t
ttaactgtgggtgaaattccctttatataaacatggccttataatcagatgacctcagatgggtctctggtgtgtacaaagaaagcaaaaccaattttcccatgagtgcctctggacactcatgtaagagttacagatgttgactacatttaaacatttatcatgcttccaaaaacatatttgtaagagnnnnnnnnnnnnnnnnnnnnntgtacaaagttctttattaaaataatagcttaaataaatcctctgtcaacaccagacagagtcagtgactggatctagactctagagcttagagctttttacatagttacatgaaaacatttgaatccgtcttcacagacagtgccacgatgacaatctggttaaaaccaataagccatcttccagatgcagcttaagagttcaggcgagaaaaggaactgaggaaaatgactgtacataatatggttctcattctatttgnnnnnnnnnnnnnnnnnnnnnnnnnnnnnnnnnnnnnnnnnnnnnnnnnnnnnnnnnnnnnnnnnnnnctctctctgggcttccttgaccatnnnnnnnnnnnnnnnnnnatcaatgtcagggtccgtggtgtgtttcttggggcgggcatggtctccctgctcttcagagtctgtgtcagagcactcagagcttccaatatcttctgaatcagaacaagtcctttcctccacttgattttctaggagtgcagggaccttctgaactcctgacaaatctttcttcaatcctgtaacagtctggtatagaatattatcttgttgggcattcatggccatgtcctcttccttcaatttcataattatgtccatatccctctcataatttttcacttcattcaaggttctaggaatatatgctcgcttaaacacctcttcatccacatgatcttggctagaccgttcttccttggtcctttgagatgctatttccatggcctttgagagataagcatccatgttctcatgtgtaatggatggatctgtgacaaattcaaagagctcccgcacagtcatgacagcaacactgtgcctcataaagaaatcattgacgttggcgcaatcctttctcaagaactccaaggcatgtgggtggtcgtgctccacggactgagacacgtcaatgatatacacgcctccaccgtggtacagcatgttaaattcactgagatctgcatggacaagtctggcatcctgatacattcttctcatgtactgaatgacctgcaggtacaactcccgagccttggattctgataactggacatttttcaagagtggtgcaggcatgtcatctttaccgatgaaactcatgacaagaacatgacttcttagcattattggttctggacatggtatctctgctgtgtttagcctgattaagttcctcatttctttttctgcccaagttttcaccattttcctagggtttcctttacaatagccatgacgaaatctgaattctccacttacatatttatcccgatctttgaacaccaaaatagaagttttataaattttgattgctctgctctctccatttgctgtgctagcatggtatacattagcttcttttcctgtgctaatgcagccatttatctctgttatgattcctctagtcaacatcttgaataaaatcattcttgttctgggatccaacacctgttctacagttgctctgtctgccttatctttgatgcgatacatatctgcttccttttgtctagacttttcggtgactttatttatgacggaatcagtaacatttagcttatctaaattaattttattctcaaatttccgtaagaccttgtctgctggagtagacattttggctgaactgctgtcggaggtctgtcgatttgcctgtgggttgcttcctccattccagacataacccttggcgagttttccaactccttcatcccagtcccagtcatcatcatcatcgtcataaccctcctcctcctcatcttctatttcaccttcaccattctcattcacattgtcttgaaggtcttcaaacagaatttcatccttctcttttactgtcttcaagtctctgttttcactgtcagaggagtccgcgtcgtcgaattgcccggggaccacccggctcatgagaagccgccggtagtccatgactggagagcgccgccggaggccgccgctctgcgatggaaaggaacggctcagacggatgtacccacggccgatccaaaggccttggcgtggatatccgccttgcaaaccattcagaagccaacagtggccaccacgtgcgacgggaaaacgggaccaacagatccaccaccctgccatccc

SEQ ID NO: 311238 - DNA, 2182 bp, Homo Sapiens
  misc_feature (2010)..(2010): n is a, c, g, or t
agggcataaaaccagggggcctttataggctgcaaaatatcttagacttcagaacagaatacccatccaatactgagaattcccttgttccaaaccccaagatgttttgttcttaatgggaggttttcttaaattcttcttgttcttaaacaactagtcacaaagaaagttaaggacaaacggcaaactcacactgcctgacgcagggcctggtttctcttccttgaaggccttttacagatgtcagctttcactggcctccatgcacaacctcccactaccacccaatctgcctgccacagcaaagtgcaggcaccctgggccccctggaggatgcgggcaggggctacagggcatccaggatgtggtcgatcttggtgaccagctcctggcgctttcctgagatgagcttctcattctcaatgtacgtgtctttcttgagcttgccagccaccaggcgctcagcctccaccgccgacttcagcaccagctccttgacctgtgcatccagcttctgcatttcgctcactctgtcgcacagatcagagccctctgtcttcagcctggactgcagcagtgcaatctcactggtcaaggccttgtgttcagtctccaggctcttcttgccactgttgagggtggagatgtcccgggattgcttgtacctattgacggtctcgtcaaagtgacggtaaaggcctattctcttgttgaccagggtcaagacctgctctgtgatgcaggctaccttcatcctggcttctgcggctggatccttggtgatggagaagtccagccgaacatagatgataacggtgaagaacaggatgtagaaggccgccaccaccagcaggggctcctgcagcatgagcaccttgttgaacgtgtagtggaccacaatgtcctgaatgtgctgttctaccagatttttcttgtaggcaacaatcacagggcggccaaatgtgtccagataggtgtagtgcagctcatctggggcacggctgatttcatagggactatcaatttcaatgttcttggctccttcaggcaggatgatcttcacagtcagagaatctatcacttgttcatcaaacacatggtccacaaacctcatcttcagtgcatactggtcacccaaattatagaggtactcatagcttgggaggttgtagccaacgatgtaatgggtcttccacccgccaaagagagggaagcgaggccggatttccatctctacagagtcatccaaaataaggaggtggctggtagaaacattgccaatctcatcccggtaataaacatcctgggcagcagcaggaaggatggtcttaaaagaacggatggaggatattccactatctggctgtctctggtaatcatagcgtgagaaaggccccttaagcacagctcctgtgtgctttaagtccacattttcttccacagcaatattaccccagtgagagacttcaatgactcgggtcatgctggtgatggtcaggaaagggctgttgttctcataatgtactttaaaagtatcctgactataggcaggcacatctctgaaaggcccataatccagtaggtcctcagagcgcgtggggttccccagcttggtgtagctctccacatttcgagaggcaagcttcacacgcatggtttgtgtcttcgttggatagggagagtagaaataatggttcccctcaaacaccacaaactgtttctctgactgggtgatctgggttggatacggatgaagcacatgggtgtagactgtttccacaatgactgaaatcttggccccaggatcaagagcagctgggagcttgactgtgaagaatctcccacttttacccttaattttggtttcgcgtacttccaaattgttctcttcctcatcttctccctttacctgcacgcccaggtgcgccagccgggcctcgagctcaggctccaaagccagcaggaaagaggtagctcgggacgtggagccgccgcccaggtgcgccaggnaccacctcggccgtcaccttagccaggtggctgcttaggtccactgtgcgcttcacgtcctcattgatcagcggcggtgcctcggaggaggcgctgcccggcgccggggcccaagtcccaagcaacaggagcagaaacaagccggcggctggcgcctccatgaccgggaaga

SEQ ID NO: 311239 - DNA, 879 bp, Homo Sapiens
  misc_feature (84)..(145): n is a, c, g, or t
  misc_feature (162)..(334): n is a, c, g, or t
  misc_feature (338)..(367): n is a, c, g, or t
  misc_feature (410)..(424): n is a, c, g, or t
  misc_feature (456)..(669): n is a, c, g, or t
agtaaaagggtgggaaaagaaaaatatatacaggggcgggaaagagccgcggggggcataaatactgggcgggacgcccacatnnnnnnnnnnnnnnnnnnnnnnnnnnnnnnnnnnnnnnnnnnnnnnnnnnnnnnnnnnnnnnagaagtaacaaaggaannnnnnnnnnnnnnnnnnnnnnnnnnnnnnnnnnnnnnnnnnnnnnnnnnnnnnnnnnnnnnnnnnnnnnnnnnnnnnnnnnnnnnnnnnnnnnnnnnnnnnnnnnnnnnnnnnnnnnnnnnnnnnnnnnnnnnnnnnnnnnnnnnnnnnnnnnnnnnnnnnnnnnnnnnnnntgannnnnnnnnnnnnnnnnnnnnnnnnnnnnnaaaaacgtggaaaagggagcgggagggtggggggaccataacnnnnnnnnnnnnnnnaaggaacgggcgcggggcgggaaataactcannnnnnnnnnnnnnnnnnnnnnnnnnnnnnnnnnnnnnnnnnnnnnnnnnnnnnnnnnnnnnnnnnnnnnnnnnnnnnnnnnnnnnnnnnnnnnnnnnnnnnnnnnnnnnnnnnnnnnnnnnnnnnnnnnnnnnnnnnnnnnnnnnnnnnnnnnnnnnnnnnnnnnnnnnnnnnnnnnnnnnnnnnnnnnnnnnnnnnnnnnnnnnnnnnnnnnaatggttgcgcccccgggcgggggcgaagccccagttttttaacttcccctcccagctggtaagagcgtaggtgaatccctgtcagcccccactgccgtaagtcctgctcctgcacccgcgccgcctcggctcggcctctcagtatgaagccgcagtaagaagccaggggcttggcccccgcggctagtagcgcccgcgcgctccatccc

SEQ ID NO: 311240 - DNA, 811 bp, Homo Sapiens
  misc_feature (47)..(47): n is a, c, g, or t
  misc_feature (182)..(182): n is a, c, g, or t
cttcttcgtaaaggattccttttccacagcatgaccctgctttcctntgcttcatggcttctctgtggagcatcacccccattttccccaatgactggctgtactttgaaacattccattttctcatcccacgtccccagaagagcaaagtggacttttcctgatggatctgtcacttcccnccgtcacctttcttgctacatcccgagagaagtagctataaggaacaaatttaagattacacttgtctcctgtcttgtgattcacaatatcaatttcgccagactgatctatccacaacttgcccacaataatgttgtgtacagttgtggtaactttcttccaagtgtagtggtgcccagttgcatggaaaatacaatgaatggtaccgaggggcataatggagaggtatttgcctcgaaacttgctggtgattttgatttcctgacgcaatgtccagccatttttggactcagcatggtgcgcagcagcagggggatgatgactcacctgttcacagagggatcggtacccattctcctctaatcggtccagctcaaaggtctccccaagcagtgggttgaatggcttactggtgcggaagacagtagtggagtaggaggacacggtgaaagctgcaacataacagagctgttctagagaattctcacattttgcagctcggtctaacagctcatggtattccagatcttcagtaaggcgctgaagcatggacaagggctcattaaagtttaccggcatggggatcttagagagttcttttccaatgcagttcttcatgatgctcccc

SEQ ID NO: 311241 - DNA, 792 bp, Homo Sapiens
gtgtgagccaccacacccatcctcgcccagttattaaataccttccctcttcaagtcctaaccttgcaggctaattcctccctggaagaagaggattccaatgctcctgagcataaaaaattcaggtccttgaatgacgtggacccattctccagctctctggtggtagaggcctgaggcctaatttattcagcacctccatccttcagtcagaacagatgaggacaatacaggcagctgtgcctcaggctgccaggagcaaaagggccatcaccagctgggccacagcctggcggagcctccatgtgggcttcctgctaaagtcctagtggctgctcctcccgcagtcagggagaacagatccagggcctcccacccagtctcgctggctgtcagtttgagaacctcaacaaattacagagttgtttttgcaactacaacagatcggtgctttctggagcatggatggcttacagactttctaaatcctgagactgtagaaatcccctcctcagtcatgggtcgtcgggctggtggagtaaagggagggtaagagagctgggactcaaagaccagcaactcatcaactgtgagtatgtgtgtgcttgcttaggggggtggagtccccctgggtccccggtggcattcaggggaagactgtactgcaggacctaaggaaggatgacaggagctgggcgtccacagggcaagggaaatctcaaaagttgttggtttccagagtaaatagctatcttatgcaaatatgttctaattattattttttttcaagtt

SEQ ID NO: 311242 - DNA, 1445 bp, Homo Sapiens
  misc_feature (575)..(603): n is a, c, g, or t
catagatacaatcaagacaatagtgcaccgttccttaaaaacagcatctgaggaatcccccttttgttcttaaactttcagatgtgtcctttgataaccaaattctgtcgctcaagacacagacacccacagaccctgtcctttgcctctattaagcagaggatggaagtattaaggattttgtaacaccttttatgaaaatgttgaaggaacttaaaactttagctttggagctgtgcttactggcttgtctttgtctggtagaacaaaccttgacctccagacagagtcccttctcacttatagagctctccaggactggaaaaagtgctgctattttaacttgctcttgcttgtaaatcctaatcttagagttatcaaaagaagaaaaaactgaaggtactttactccctatagagaaaccattgccatcattgtagcaagtgctggaatgtcccttttttcctatgcaactttttttaaccctttaatgaacttatctgttgagtacattgaagaatatttttcttcctagattttgttgtttaaattatggggcctaacctgccacttannnnnnnnnnnnnnnnnnnnnnnnnnnnnaattactgtaaagaaaatgaattttttcctgcagcaggaaacatagttttgagtagttctacctcttatttgtagctgccaggctttctgtaaaaattgtattgtatataatgtgatttttacacatacatacacacacaaatacacaatctctagggtaagccagaaggcaagatcagattaaaaacaccatgtttctaagcatccatttttccctttctttaaaagaaacttaactgttctatgaaggagattgagggagaagagacaaactcctatgtcatgagaataaccgatgttctgataatagtagcatctaggtacagatgctggttgtattaccacgtcaatgtcctatgcagtattgttagacattttctcattttgaaatatttgtgtgtttgtgtatgtgctctgtgccatggctggtgtatatatgtgcaatgttagaaggcaaaagagtgatggtaggcagagggcaaagtcattgaatctcttatgccagttttcataaaacccaaaccacatatgaaaaaatccattaagggtccaagaagtctgtccatatgaaaatgagggtaaatatagtttatttcccaggtatcagtcattataattgatataatagctctaacatgcaatataaaattcataggagtattaatagcccatttacacatctataaaatgtaatgggattgcagagctgcagagtacagtgtaacagtactctcatgcaatttttttcaggatgcaaaggcaattattctttgtaagcgggacatttagaatatatttgtgtacatattatatgtatgtatatttcaaagtaccacactgaa

SEQ ID NO: 311243 - DNA, 1179 bp, Homo Sapiens
ctcttcctcttcaggccactgctggagatgaattccagaagcacccactttcgtcttgacgatgcttatttagtgcaatatcttccttctctcgttcccttttcacacgctggtagtgatcttcttccttcaggtaccacacagggggcccacggtgccgcttcgaagtattccctggttgtctgcagattttgatttgattttcttacggaacttggagcatacactgttgtagttggtgcagatgtggtgcaaacaccaggcggccaactggtgggcattgtgaaactgagccaattccaagtaagagagcacttctccgtcaatgcccacgccactcgtggcggctttggtcaactcctgaacggcatgctgttctgcaagtgcaaccaagtgtggcaggcaaaatctgttttccaaggcaattaattccagcgggtccagatccaagttaggagacaactgcttggtatagagataatccaatactgcttgcattgatatcttgtttatgttcgggagatacacctcgctgttggcactttccacaaatgaccccccgaacatggctgccatccactcacagctacagatcagcagcggcttgtgggcactgatggctccatcgtccaatttaaatgtcacgtccgagaacgttcccttgctgagacactcttttatccgattggctttccttacgtgaaaggctttcgtaatctcctggttcatgaaggcttccttgttcatgatgttttccaccatcatcctcaaatcgaacatctcgaggacctctgcgatctgagccaggcccaccaaatccttttccttttcatccagttgtcccgtataaagaaactggagcagggtccgaaaagggcctggctggactgaagcgtccatcctgaccacagtcatgggccccatccgctttgaaatggggttgacttgcatttccctgtgcatgccaatgaaccccttactccatccggtcaaagtctgtgtctcaggaactgcaccctcggcttccagccccagagcctccaccaggctcttgtttgaagacttccactggtcggcctgaggaatcctaggcgggccctcctccctttcttcctctgggtcgacactcaatatccgcccctggaaatctctgctctgcttctctttctcacaggctcc

SEQ ID NO: 311244 - DNA, 456 bp, Homo Sapiens
tttttcaattgttttagctcatgtttagcatatcaagccctgaaggattcagatcccggaattttctctatgtgaagaggaaatgccccagctagcctaaggcttactgtgaggctgatacctggagaagacatattcgtataggaaaataccccttatttctggaccaaggacttctgggaaaaagagatggagagggaggaaccaagttggcaggacaagtgtcccaattcccactgtgaggggcagggctactctacagtgaaggcaagtggtggactcctggctcaatggaccatattatgggcttatcacagtcccagggttggcattccacaaaatccaggtgttgcctaagccagccgggaagaaatggccaaagctctctgagggcattgctagagccagaagaatagacaagcccaagacgtcatctctaaatacagcagtgtgccc

SEQ ID NO: 311245 - DNA, 848 bp, Homo Sapiens
cctccatatcatagagtggatctccaactgtcgccggaaaaaggagctgtgggaacttttttctgtcaaaaggccccggaaggccacaggccttttccccaacgaatcggcaacttgttccaaactcttcggtaaagcctcccagagggcgaagtcctttggttcatatgtaaaccaacagacgagagagccctttcaaacacggagcgaactttctcaaggccacctttctgaccaatcccaccaactgagtactggccatactctagccaagtgttaggacaaatgtaatccttcacggctttctcaaagaggtcatacacgtgctctctgtccaggccatcctgggccatgctgatctcgtcatgcagccactccagccagagctcttcagtcaagggaaagatttcactcatcttctggcgggccatcctcaccttggtaagctccccttccagcctgagcagtctgatcaagtccacatggcagttgtagtcatagacgttgatagacaactgctcctccagtctctcaatctccagctggtttttctcctcctcttcgtcatattcccactcgtactccccgggggagctctccgcggaggaagccatggcgtactcatccccatcgctctcgctcacgccttcctcctgctgatcccacgctggccccatggtcttgtatgtcgcagcggccacagcccgcgataacacctttctccttgtcctagccgctcttaactctcatcctcctctccgtcagccttgggcccagccttggactcagcctcgggttctgaagccgaggtttcggccgcagtcgccatcttgcgcttctaatgactc

SEQ ID NO: 311246 - DNA, 893 bp, Homo Sapiens
cgagcagcttccacaatcgcactttcaaactctcggtaagcctcccagagggcgagtcctttggtcatatgtaaaccaacagacgagagagccctttcaaacacggagcgaactttctcaaggccacctttctgaccaatcccaccaactgagtactggccatactctagccaaatgttaggacaaatgtaatccttcacggctttatatctccttccagcccgagcagcttccttttggacctgtgtatcacagtaaataaatcttcagttgtgcgtgaagccacaaacacgtcatcatcatcctctgcaatccattcagctgttttatcactgattaaacttttttcttcggtgcctggttccacagaactccccagagggcttgcctccctttcactgtcagcctgaggagttgaagtcaccctttgaccaagtgattgcaggtcatcgccggtggcgggacacttggtgtcttcctccagggtgatgatggggctgagaggcagccttggttctgccacataggcctccatttgagctgtgggagaagtgagaggcaggtacagcacgctgggtttttttggtacgggaggtggaatcttgcctttctttttctcagcttcttcctggctctggaggctaattctttcaggcagaaccctcaccttgggggccctcgtatagtcatattcccactcgtactccccgggggagctctccgcggaggaagccatggcgtactcatccccatcgctctcgctcacgccttcctcctgctgatcccacgctggccccatggtcttgtatgtcgcagcggccacagcccgcgataacaccttttctccttgtcctagccgccttaacctcatcctcctctccctcaccttgggg

SEQ ID NO: 311247 - DNA, 442 bp, Homo Sapiens
gttggggagcttccaagccaggtgggccaggaccccaggggcctggtgaccaggacggacccccactgtcccatcacctttccctggccctgtcctctgctaaacttcccacaggccttctgcccgatcacacagagtgtgcccaaactctctcaggcctctggcggctgaaaaccactgctttaaatccctttaccatttactatgacataaggttattgtaaatgggaaatattctattgatgctacaaatggaaagccaatgcctttaccataaatagaaaaacaaccctaagaagcaagcaaaacaaaaacaaaacaggggctgggtgtggtggctcagtaaatacattttttattatcaaaaaagagtagtgtatggttggcgtattctgtgtagaatgtattttattgatgtctgctatttttataatttctgagt

SEQ ID NO: 311248 - DNA, 942 bp, Homo Sapiens
gctccctccctctctggggaagaaagttggctccacaaacggggctctgggcccccttctccccggaaaggctggggaaccggcttttgtgggggaatataccaagatggcgatgattttccagaaacccatagggaaatgacccgtacattcttttctctatatagctttatatttagtgtcccaccatagaaaacttcatcctcaatatagcaagtacatgaggtggaggggagtctggcccaggaagacacttgcgaatggaggagcagagagagggactattgacgtaaacctgccacgtgacacgactcggctttgtggaaaccatacgtgatttcgaagggattgaaaatggagatttcaagagttctcctcgctcccctggggcatgtgtgccccctcctcccgccctgtcctcagctcgcacgcatccgttcagttgcttctaccactccccagtcggttgtcgctgggtgtcactcagttgcggagccggcagaagtgaaagctggaaggaagaggggcgctccggcctggggaagggggcccggctgggctgcaccgagaggagggggagggcagttctcgcttcttgccgctgctgtgtctgcacagtcgtccgtgccttgccgaagtttgactttcagaccatgatggaatactgaggtatattagtttcgcggaaagtttaagaaacataatcaataatgtgatcaccagactccacccaatggtgcaggagacaggacggcagggcctcccggaccctcctactgctgcaggttgagcgtgaacttccactgctgcgaaagggccgggccacacactctccacgcttaggcccccgctcttggccgtgcgactgtccaggcacaggttgctgcccacgtgcctcagcttggagttgccctcgatctgttcccatttctgtctgctgtc

SEQ ID NO: 311249 - DNA, 631 bp, Homo Sapiens
  misc_feature (228)..(236): n is a, c, g, or t
  misc_feature (603)..(603): n is a, c, g, or t
accccaaaaaaggtatcaatacttttcattccactcttgtcaactttagccaaagccttctgagctgcagtcattttgctatttttcttttcagtcttcaaatctttagtattaaacttagtgtaatcttcttttgcttctacaggctcatctgataactttattttctgcaacattagagcagtgaagtggtgtcaaatgtcactttgatacaacatcaatccattnnnnnnnnncccaacatgtataatttagacctctacagaggcgaatgggacagcagacccagcaaagggcttactttttacaggctcctttacattttgccaatcatctagggaattgagccacacatcactcctaagaagcagccttggtgatggtggatatgattgggtaagtacatggctgagccccttagctggtccagcaaacacaggctttgtaggtgccaggtgtggtgggcatgaggggattgctaattaccacgcatgatatgcaagtgcacagaagtcaaaatgagaatagtactcttgaatgggggctcaggtgtctcagccagaatccctatttcatttacctcctgggccagtttaatgtccncttatgaatgaagggacaatatttatct

SEQ ID NO: 311250 - DNA, 749 bp, Homo Sapiens
  misc_feature (106)..(119): n is a, c, g, or t
  misc_feature (254)..(254): n is a, c, g, or t
ttaaaggttgtcaaaccaaaccttaataaaaatctgactataccctgtgaccaaatttcaattttaaaatacaggaaaagtttcaagcttcttgtttgggagtttnnnnnnnnnnnnnngtacaatacaggataagctatgcaggttaagaaactaaggattaaacagaaattaaacagattaaacaggattaaacagaattcccccatcaggatttggtttcaagtcttgcaattcttcttaaacatgatttnaaaaaaccgtattttccacaactactaaaattgctgggttttatcatagttttcttatgtaatcatattaaactaattgttatggtgaatataccaaatggctttcaaagggaaaaccaccatcactaacaaactaaaatggaaacatgctacattgtcagtcaaaatacaaggaaactcttgtgcctttaatagcaagaaaacttcagaatgtatctgtacatcttttgacctgttatctgaggaattgctgagtcaataaatgattacaattgtttagaaactggtaaaaggctaccctaacaatattcctggtagaatagagcagtcaaatccagctttaactcttcaaatgggtcaatggtatgacattccagccagggatcaacatttctccagtgaattgtcctaagatgttactgaagtatgtttaggaaaaaacctcaataggaatattcaacaggtattcaacagtcttgcagtactaagcattct

SEQ ID NO: 311251 - DNA, 958 bp, Homo Sapiens
gggctcccttgggcttggccccaaccaacaggctggcggcttttgccctcttttaaatgaccgttgagccccttgcctgtgttccccgaccaagtcttccttattttcaaactccatgcggatgggatcatacggtggcaaccccatggggtaaacaatcatcaccgcgcctcgaagctggtccaaggcatctttcaccatctccatggtaacacagacaccggcttccacttgtttcttagatattattgctttggcttcttctatagtcttctttaacacttgcttcatcttctcatttggagcttgcccattccttcgtccaatatcatcctttttaaacactgcacctccgctgggtacgcatttttcaccccattcatccttcaatttcaattcttcaatctgatcatcggtcagtccttgcatattaggagggagaaatatgccatgttcggctaattcttccatttctgagcagaggcgctgcaccttgagccgcccattatagacccgggccacctgcaccgtgagctcctccagctcggtactcccaggcgcctgcagcaggaactggctctcgtcgccccgcttcacgtgcagcagaaccatggcggtcccgccgaggtactgaggcgttgagaaggccccggctgcgtggcccgcgggtcctgccggccgagggtcgccggatcgccagcagctgcgacgcactaacagccgctcacagtccggaatcccacgctccctagcccgcggtgagcgggggaaacggcactcgctcccggaagtggatgttgccaagagcaacagtgaagcagagttaaagagcctgccagctcaagctctagaacccgagtgggggaggctggggtgcaccgaggcccagcaatccaagcccgtacggagctgcggccggggaaaccacccacacagtctgagaggacagctgattctg

SEQ ID NO: 311252 - DNA, 597 bp, Homo Sapiens
  misc_feature (457)..(465): n is a, c, g, or t
ctccataaaatataacctcatagtaaatgctttcctatagtttcctacagtttgtgcattttctctggcctcttgacttcacacagaatgattttccacattcattacacccatagggtttctgtcttatatgagttctgtggtgaacaattagagctgacttctgatgaaaggttttcccacattcattacacccaaaaggtttctccaagtgtgtcttctcaggtattctgtgaaactgtagtagtagcagaaaaatgcatcccttctcaacctagggatgctgacccaggtttcaccccgtgtgaattctctgatgtttaatgaagagcggcattgggcaaaatgtttcctatattcattcaccaataagttttttccacttttagttttgtaacatagtgtatggtccaaattccagaataatgttttcctgcattccctatcttcatattgnnnnnnnnnccctctttaagttctcttctatactgtgagaactgacttcagggcaaaggtgttctcagttatcattatattaacagatttctctcaccctttatgttctgtgttctacaaagttctgacttcacccagagt

SEQ ID NO: 311253 - DNA, 939 bp, Homo Sapiens
  misc_feature (536)..(536): n is a, c, g, or t
ctcttttctatctctaaaggtccaacctaattaagtcttaaattgctccaaacataggagatttgaagatgcagactcctgacccactgataatttggtatttacttatattctgtccccctgaatacctctcttctctccagctctgagaagaaaagacaaaactttctcctgtgtcattttcaagtagaaatcctctttctctgaaatcagatcagcatgttcctatgtatttatcaatatgtaaaataatgtagatttcccttctctatggaaataatttgaacaatttgatgaaaagtgtggtaaatgaagattaaatgctgtgtcacacctgattcccctgagctgtgagcactagagtcaatcagctgctctcattgccctctgacatttagatttttccccagagcctacatctgtgggaatgtttctttctatcattatccagaacaaacaccaggaaacactagttcttcaaagtttatcttttaaacagaggccattttacaatggggttgtataggtcttcacgntatgtgagaggccaggtaggtgatcctccttgtggtatgcttttggcaagggagtaatgggctgagaaatccgactatccaaaacataaattcccccatataccaagagatgcctaaaatctgctgttatggtattctttcttgggttaagactttgtgctattgaggagcatagaataaggtttacattatttctagtcatttatattttactgtgaacgtctaatagctttagggtatagggtcctgtaaggaaggcgggtaggggaccttgagcttgacaattacatctcccctctccctacagatccaaacaaaaagacagccctctggcatagtggtcattctcttgtggggaatatttgctgctcagatgtttttatcttagggacttgctatagga

SEQ ID NO: 311254 - DNA, 1696 bp, Homo Sapiens
aaaatgccagaagagatggacaagccactgatcagcctccacctggtggacagcgatagtagccttgccaaggtccccgatgaggcccccaaagtgggcatcctgggtagcggggactttgcccgctccctggccacacgcctggtgggctctggcttcaaagtggtggtggggagccgcaaccccaaacgcacagccaggctgtttccctcagcggcccaagtgactttccaagaggaggcagtgagctccccggaggtcatctttgtggctgtgttccgggagcactactcttcactgtgcagtctcagtgaccagctggcgggcaagatcctggtggatgtgagcaaccctacagagcaagagcaccttcagcatcgtgagtccaatgctgagtacctggcctccctcttccccacttgcacagtggtcaaggccttcaatgtcatctctgcctggaccctgcaggctggcccaagggatggtaacaggcaggtgcccatctgcggtgaccagccagaagccaagcgtgctgtctcggagatggcgctcgccatgggcttcatgcccgtggacatgggatccctggcgtcagcctgggaggtggaggccatgcccctgcgcctcctcccggcctggaaggtgcccaccctgctggccctggggctcttcgtctgcttctatgcctacaacttcgtccgggacgttctgcagccctatgtgcaggaaagccagaacaagttcttcaagctgcccgtgtccgtggtcaacaccacactgccgtgcgtggcctacgtgctgctgtcactcgtgtacttgcccggcgtgctggcggctgccctgcagctgcggcgcggcaccaagtaccagcgcttccccgactggctggaccactggctacagcaccgcaagcagatcgggctgctcagcttcttctgcgccgccctgcacgccctctacagcttctgcttgccgctgcgccgcgcccaccgctacgacctggtcaacctggcagtcaagcaggtcttggccaacaagagccacctctgggtgggaggaaggaggtctggccggatggagatctacctctcccctgggagtgctggccctcggcacgttgtccctgctgggcgtgacctcactgccgtccattgcaaactcgctcaactggagggagttcagccttcgttcagtcctcactgggctttgtggccctcgtgctgagcacactgcacacgctcacctacggctggacccgcgccttcgaggagagccgctacaagttctacctgcctcccaccttcacgctcacgctgctggtgccctgcgtcgtcatcctggccaaagccctgtttctcctgccctgcatcagccgcagactcgccaggatccggagaggctgggagagggagagcaccatcaagttcacgctgcccacagaccacgccctggccgagaagacgagccacgtatgaggtgcctgccctgggctctggaccccgggcacacgagggacggtgccctgagcccgttaggttttcttttcttggtggtgcaaagtggtataactgtgtgcaaataggaggtttgaggtccaaattcctgggactcaaatgtatgcagtactattcagaatgatatacacacatatgtgtatatgtatttacatatattccacataataacaggatttcaa

SEQ ID NO: 311255 - DNA, 979 bp, Homo Sapiens
caattctttcatttccgtcataaaagaaatgcttaatagattggagtctgaacataagactaaactggagcaacttcatataatgcaagaacagcagaaatctttggatataggaaatcaaatgaatgtttctgaggagatgaaagttacaaatattgggaatcagcaaattgacaaagtttttaacaacattggagcagaccttctgactggcagtgagtccgaaaataaagaggacgggttacagaataaacataaaagagcatcacttacacttgaagaaaaacaaaaattagcaaaagaacaagagcaggcacagaagctgaaaagccagcagcctcttaaaccccaagtgcacacacctgttgctactgttaaacagactaaggacttgacagacacactgatggataatatgtcatccttgaccagcctttctgttagtacccctaaatcttctgcttcaagtactttcacttctgttccttccatgggcattggtatgatgttttctacaccaactgataatacaaagagaaatttgacaaatggcctaaatgccaatatgggctttcagacttcaggattcaacatgcccgttaatacaaaccagaacttctacagtagtccaagcacagttggagtgaccaagatgactctgggaacacctcccactttgccaaacttcaatgctttgagtgttcctcctgctggtgcaaagcagacccaacaaagacccacagatatgtctgcccttaataatctctttggccctcagaaacccaaagttagcatgaaccagttatcacaacagaaaccaaatcagtggcttaatcagtttgtacctcctcaaggttctccaactatgggcagttcagtaatggggacacagatgaacgtgataggacaatctgcttttggtatgcagggtaatcctttctttacccacagaactttgcacagccaccaactactatga

SEQ ID NO: 311256 - DNA, 1017 bp, Homo Sapiens
ataggaggattcatactgggagagaaaccgtacaaatgtaaggtttgtgacaaggctttccggagggatcacacctggcacaacatcagagagttcatactggagagaaatcttacaagtgtaatgagtgtggcgggacctttcgtcggacgtcatcgcttatactccatcgtaggcttcatactggagagaaaccttataggtgtaatgattgtggcaagaccttcagtcagatgtcatcccttgtataccatcgtaggcttcatagtggagagaaaccttacaagtgtgatgaatgtggtgaggtttttagtttccaatcgcaccttgcacagacatcggagagttcatactggagagaaaccttacaagtgtaatgattgtggcaagaccttcagtcagatgtcatcccttgtataccatcgtagacttcatactggagagaaaccttacaagtgtgatgagtgtggtaaggctttcagattcagatgtcaaagcttgtatgtcatcgtagacttcatagtggagagaaaccttacaagtgtaatgagtgtggcaagaccttcgttcaaaattcatcccttgtaattcataaggccattcatactggagagaaactttacaagtgtaatgaatgtggcaaggtttttaatcgcaaagcaaaccttgcacgtcatcatagacttcatactggagagaacgcttgcaagtgtaatgaatgtggcgaggtttttaggacacagtcacaacttggcatgtcatcatagacttcatactggagagaaaccttacaaatgtgaagaatgtgacaaagttttcaatatcaaatcacaccttgaaatacataggagagttcatactggagagaaaccatacaaatgtagggtttgcgacaaggcttttgggcgtgattcataccttgcacaacatcagagagttcacactggagagaaaccatacaaatgtaaggtttgtgacaaggctttcaagtgttactcacacctggcacaacatact

SEQ ID NO: 311257 - DNA, 914 bp, Homo Sapiens
  misc_feature (593)..(637): n is a, c, g, or t
gttgatatttggtcagtgggatgcataatggccgagctgttgactggaagaacatgtttcctggtacagaccatatgatcagttgaagctcattttaagactcgttggaaccccagggctgagcttttgaagaaaatctcctcagagtctgcaagaaactatattcagtctttgactcagatgccgaagatgaactttgcgaatgtatttattggtgccaatcccctggctgtcgacttgctggagaagatgcttgtattggactcagataagagaattacagcggcccaagcccttgcacatgcctactttgctcagtaccacgatcctgatgatgaaccagtggccgatccttatgatcagtcctttgaaagcagggacctgcttatagatgagtggaaaagcctgacctatgatgaagtcatcagctttgtgccaccaccccttgaccaagaagagatggagtcctgagcacctggtttctgttctgttgatcccacttcactgtgaggggaaggccttttcatgggaactctccaaatattattcaagtgcctcttgttgcagagatttcctccatggtggaagggggnnnnnnnnnnnnnnnnnnnnnnnnnnnnnnnnnnnnnnnnnnnnnctgtctttgtggggagggtagacaatatgaacaaactatgatcacagtgactttacaggaggttgtggatgctccaaggcagcctcccccttgctcttctttctgagaagtggctccagcagaaaaaagctgctggcccttttaggatatgttccatggcaagtaaaaaatatgtatttgtccccaatccccggccatggcttttgccaccttgggcttcccccgggacccccaccttgaagggtggggggctaaacttgaaaccatcccacagggt

SEQ ID NO: 311258 - DNA, 548 bp, Homo Sapiens
tctccccatagtcctgggagctcactcgtatcaacttctccctctattcaggattcctcatcatctagatcctggaagaactggaacaaggcataggcctctttcaatttttcgtggtgtgcagctgccaattcttggacattcaggaaacgcttgttgacattatcttttttcttcacaatctgatcaacgttgaaagtcccgctggagagcaaatcttcagccaatgtattcaggtccttgagtgcatcctctcgagccaacatctctctctccaatagctgatgcttcttgagtaggtttcctgctgaagccaagtccctggcctgatctttcatggccagcaatgtctctgcctctgagagccagaactcaaagtcccggatgcttgtgttgaacctctgttgacgactggcctcattgagcttcttccctttgtcatttgttctctcaagcagatgatcccaatgttccttcagctggttccagttgctccttcatgggcctcttcattgccatcacaaggcgctacggttcaatcaggggag

SEQ ID NO: 311259 - DNA, 1543 bp, Homo Sapiens
  misc_feature (72)..(72): n is a, c, g, or t
  misc_feature (313)..(369): n is a, c, g, or t
  misc_feature (1457)..(1457): n is a, c, g, or t
  misc_feature (1482)..(1482): n is a, c, g, or t
cggtagcgtaagtgacgtcggcaatcacgaacgagtgtcgctctgagagtatcgcacgccataaagcggtcncatgccagggctcactacatgtataaaaagcggcggaggggtgggggagggtagagaaggggtgcacatgaggttgtgacgagtgccggtccgatgtgtgggagagggcaagcattaagtgaggcgaatggcggatggcagtgaagcgaggagtagagagcggggaggggtggcgcgggacaagaatgggaggaagatggctcacaaagagggggatggggcgcgcagaacggaaagaatnnnnnnnnnnnnnnnnnnnnnnnnnnnnnnnnnnnnnnnnnnnnnnnnnnnnnnnnnaagagaggagggagaaatgaaagatagatggaaaaatcgggtaaaggggacatagctatgtaagggaggtgaggggaaaaggaaggcgagcgggatgcgcccaggggggtggacgggtggcagcgaatcacggatcagaggggcgaggatgaaggtgaacaggggatgggtgggaaggacgcaaaaactgtgggagacgtggttacttgtaaggggtgtgagatacaggtgccgacaggaagaatcgggggtcggaagggttttcatgggggtggagagagaaggggaaaggtggggaggggggacaaacggacgagtggaacagggcatggcgggagtggaaaagaggggtgaaagggtgggtaggtttgttagaggtggttacgtgattatagaaaggcaaaacggaagcgataggagtggttttgggtttttaacatgattgccttttatttattatgcaggttgttgatttacatagggagttggagatgctaaccaagcatggagttttcacatggtctatttctgctgagttcagggacttggagacagcctttaacttctggcaaaaagacaatttcacaaaggtgtttaaaaccatcctttggtttttgatcctgagtcagagacggacatgtgcttatgaaagaaggtagagtttcaacccttaggtaaccttaaaagagcaggaactatgttgtgtgtaagtcatgtgcagtatacaaacttgatattaaatgacaaattggaacaatctttctctaggaatgcctctctttccatagaggcatcacagtgaagtctcttaaagccttgatctaggttgtgttacagatgggcttacagagtatgaatgcacgataagaaggaaattggatagggagtgaggatatgaaatttaaaagaaggaagaactggaacaaggcataggcctctttcaatttttcgtggtgtgcagctgccaattcttggacattcaagaaacgctggttgacattatcttttttcttcacaatctgatcaacgttgaaagtcccgctggagagcaaatcttcagccaatgtattcaggtccttgagtgcatnctctcgagccaacatctctctcttncatagctgatgcttcttgagtaggtttctgctgaagccaagtcctgggctgatctttatgg

SEQ ID NO: 311260 - DNA, 877 bp, Homo Sapiens
aactggatatagaatgacaaggttctgatcagctgtgtaaatgtccaggtgtctctgtgagtattgcatattattcaatgaactacagagcaaatgcagatggcttcttagttttgttcctgtcatgtatgttaactgctcttcacttcctccacacctgtctttctctggcttgcatccagtaagggaatttgggaaaaataaaaccaatgttaaccttaagctgaggcaaacatgaagtagtgctatcttcaagaaacaagtacaaatttcatttcagcataaattggaacaagtttggtggattatctactcgcttggattatccacacatttttgagctggtggcacatactctatccaggattcctcatcatctagatcctggaagaactggaacaaggcataggcctctttcaatttttcgtggtgtgcagctgccaattcttggacattcaggaaacgctggttgacattatcttttttcttcacaatctgatcaacgttgaaagtcccgctggagagcaaatcttcagccaatgtattcaggtccttgagtgcatcctagaaagtctcgggatactcagtgaatagtatagtataggcattactcagatcccacactttaacaacagctggtctggctcaaagactgggccaaatggattgcttttaaagacatggagtttgattatgtgttatacatgttagcatatgttcaggttggagaagggccatatgtgggagcgatagaggtagcatgactacattactcaaactgtacatttagcctgtgtcctgtttctccttctgatattttcagtatttgccttctctcccccactaaaaaagaaaaccagcaaggtgcggtgctcat

SEQ ID NO: 311261 - DNA, 718 bp, Homo Sapiens
  misc_feature (625)..(625): n is a, c, g, or t
ttttgtttgtaattctataaagtaaacttccactttctttcaaataccagatcaaatatatagcttaaagacaattggcttatatgtatgcatcagtaaaagataaaaaagatagtttcccaggtccactttctggaatcttaaagtctatagtttagggataattgattatcagtgacagttttaatgtcttcacagcccgttaattttacctaattaaaatgactgctggttgagaacactaagaacaattttgcaaggctatgttttcaaatggtctcctaacatgggagggagaagagccagaaatatttctattctgcccagaggagagggatgccaacactacttacctctcgagccaacatctctctctccaatagctgatgcttcttgagtaggtttcctgctgaagccaagtccctggcctgatctttcatggccagcaatgtctctgcctctgagagccagaactcaaagtcccggatgcttgtgttgaacctctgttgacgactggcctcattgagcttcttccctttgtcatttgttctctcaagcagatgatcccaatgttccttcagctgttccagttgctccttcatggcctcttcattgccatcacganatctacgctcaatcagggagttccccaggttgatgacgccatgcacctgctcagatcggccatcgacttcatgtgcaaaggtctggtgtttca

SEQ ID NO: 311262 - DNA, 510 bp, Homo Sapiens
  misc_feature (235)..(249): n is a, c, g, or t
ggactacaggcatgagccactgcacccaggctatgccagtactgcaaaagagaaaaaaaatgtcccacgcaaataaacttactagttcaccaaaggtatactggctctgccctgtctattcattcaacttatcaactaatcttgctccccttacctttaggccagtaactccaaacattttcagaattgcaataccatcattatttgatttgagcaaaaatgttctatggcattnnnnnnnnnnnnnnnttaatatttttttagactgctatgccaccctctaatatatttggagaaattctagagcgttataaaataaatactaggaaacagtcttatgatcaaacttatctgatgtttaaacattcttgtgaaactataaattgtaacagcgtgaaaacttttaactcgaaaccatcctcagccaggcactgtggctcattcaaaattctacaaagtttttttaaaaaatagctgggtgtgctggtacacgtatgtagtcccagctac

SEQ ID NO: 311263 - DNA, 741 bp, Homo Sapiens
  misc_feature (658)..(658): n is a, c, g, or t
  misc_feature (682)..(682): n is a, c, g, or t
gactcactgttttacttcatttgtctctacaagtattaccttatcaaagaggccttctgtcatcacatcatataaaatggctcacagacatgtacgtacatgcacttttcatcactctcctcccctttactctcttgtatttttcctcatagcatttgtcaccgtgtgattgggtatataataggaactcaaatattggtgcaaataagtgactccttaatacaaaatgtgtgagaggtactgtaaaattggaacatagtgttatcagatcttaataatagcttgtagacagaactgtggcatatatctagaaatcaacttttagcctattcttactgacctagagaataataagctctttaaatgacacccttaatgaaaactgtcacataattttcctctaaagtcagcgatattttttaacaatcatattctttatagaattcctaaatctgggtttttgaaaaaagaaactagtgaccatttaaaattgttggctctattcccactgcttctagtggactagcctgaaaaaaatatttttccatgtctgcgtatattttataccttatataatgtcctctctgaaatcatggaggaatttaagaaggagaaaattgataatcatacttacttagtttctttgggaattatttgncattttagacacaacatcagtagncggaagcaagacacaacccagcctaggggagggaagtgttggtgggctgactggccgtt

SEQ ID NO: 311264 - DNA, 663 bp, Homo Sapiens
  misc_feature (76)..(111): n is a, c, g, or t
  misc_feature (194)..(235): n is a, c, g, or t
gaatccagcattcaaaagttttgtttctattcagggtttctcctatgtctgatcattaattgcttttgaatgtttnnnnnnnnnnnnnnnnnnnnnnnnnnnnnnnnnnnncccacataacaataaaaccaaaacacctctgtcactgatttctccccaggcttcagaaagcggaggggaacagaaaaaagcannnnnnnnnnnnnnnnnnnnnnnnnnnnnnnnnnnnnnnnnncattgcacacacaactctgagttctttattcgtgagcaagcgggccgaagtcgaggcggctgggtcacagggaggaacaccctggggagggacgtgttgaagaagagaactttctaactccagacaaacgctttcaaaataccgttggctaggtggctgtttccttggtggtggaaaacgtcatttaaagtccttttcatgttttcatagcaggcaaaatacatggcatgggccggccctgcacccatgatcatgacgttgacgcctcgcaagggcctccagaagcttcggtccgcatgattttcttgagggctccgtagatacttgtgtactgggctttgggatctggactcaaactctgcattcgtgtcttcaccgagtccaccgggtacatgaccgagtgctccaggataccaggccctcgtgcc

SEQ ID NO: 311265 - DNA, 1025 bp, Homo Sapiens
aatatttttaacgggggaaaaaaaatttaggaacccaattaatttcgggtctcccggatttcccctagaaaaaagaggggcaaatggagagttcccttaaccaacttttcccaggtttttttccaatcatcatgatttttaaagataaaagtgacaattccagttttttcagttatatggaaatctatggcaaaatggcagccattatggcaatgaagggatatgttttagactgttagatgatatttaacggaatgcagaaagcagttggtacattgtgaccaatgctggatcattaacagcaggtctacctttgggttatcatttaagtttcatctgtgacattgtgatccttagtgagatcagatcaagagacagtacagagtttctcaggtggtaaatacaatgccattccaaggaacacccatcccctttcctaggatggaattatgctgctgttactcaacgtgcagggttcagtgagggagacacagacttactggtgtcaacaggggtgagagcaagagcaacagcagctaccctgtgttcccaatgccttgcctatgctcccactttcttagcaatagaattccgtagtgcatgggtacatcgttataaacaaggcctaatgaagcagcagcttccacattttaacgcaggtttacggtgatactgtcctttgggatctgccctccagtggaaccttttaaggaagaagtgggcccaagctaagttccacatgctgggtgagccagatgacttctgttccctggtcactttcttcaatggggcgaatgggggctgccaggtttttaaaatcatgcttcatcttgaagcacacggtcacttcaccctcctcacgctgtggtgtaactttgatgaaaatacccactttgttggcctttctgaaggctataatgtcaggatcgtcctgaaagtcttgaggttctgccaactcatcgtactctgctgctgcatccttgccagctaaaacgagccctcgtgccgaattcgccacccaggcc

SEQ ID NO: 311266 - DNA, 201 bp, Homo Sapiens
accatgcccaggcccagtttactactctcaaatgtcccttgatttcaagctctcttgtaaaaagcaaaatcctagtgtattttctcaaggaccttggaattgttgcagaggcataatatacaaagtaatacgctttcctttctccctaaaaaaaatagctggagaccttgaaaacattgtactatggaaagaatcagtccc

SEQ ID NO: 311267 - DNA, 998 bp, Homo Sapiens
  misc_feature (58)..(58): n is a, c, g, or t
  misc_feature (184)..(184): n is a, c, g, or t
  misc_feature (847)..(855): n is a, c, g, or t
ccgtctcagggccgcgccgcccagcgttataccctacggttagggagaaccccccccngggttttatcccccagggctgttaacggggctcccccccagaaagccgtatctttgtccaagagggtgtttttaccggcggacatcctctaggcactacaagccttagcttcgactccggtccacntggagtggggctttcaatcctacaatttcaatgctctgatcagctcccaggtcatcagtatctaactttctagagtaaaacagttgaaattgatactccaagcattaaaaatcctgcaaaacaagataatttaagagtacagaattggctcagccatttggggaactgactagaaaaggggaactttgatttcatttctaatatgtatcatatacattggaaagtttcacttagggagataataaaagtttaattgaggtagtaggcatttgaaaaaggatgtgattgccaagtaaggatttcaaaggtggaggggacagaaaagggtttaaagactgagaaaatggcacaggcacagaccaggagtcggggatgtgtgtgggtggtgttggtggtaaagttgccaccaaggatccccataaactctgagagttggatttaaaaattagcaccaagtcataatggaagaaatcagagatgtgcaaaggccccttgtaggaagactactttccaggccagcggcagagtataaggcatttcctagccctacatgaatgtattcacatacatagaggataaatgtaggcaaaatttgtatatgttgggggcagtaaggagagggttggtggtgaaccctggaaattttagaaaccaagacagagnnnnnnnnnttcatctgagggcaaagaataatgaaaaactagtcatccttagcattctaaatttgctttagcttgtaaactgtaaactaatttgtctagtccttgtgatagaaatatctttattttagaaattattgcaatcttattttata

SEQ ID NO: 311268 - DNA, 757 bp, Homo Sapiens
  misc_feature (180)..(180): n is a, c, g, or t
  misc_feature (324)..(324): n is a, c, g, or t
  misc_feature (571)..(571): n is a, c, g, or t
  misc_feature (643)..(643): n is a, c, g, or t
  misc_feature (647)..(647): n is a, c, g, or t
  misc_feature (676)..(676): n is a, c, g, or t
  misc_feature (724)..(724): n is a, c, g, or t
gcggccgcccgggccccggttggcgagcgggcaggcggccggcgccctggagcgggccatggacgagctgtgcgccgcgcggtgccgccgacgccggcctacgagtgcgcgagaagacaccggcgcccgccgagggtcagtgcgcggacttcgtgagcttctacggtgggctggccgagnacgcccagcgggccgaactgctgggccgcctggcgcggggcttcggcgtggaccacggccaggtggcggagcagagcgccggcgtgctccatctgcgccagcagcagcgggaggcggcggtgctgctgcaggccgaggaccggnctgtacgcgctggtgccggtatcgcggcctcttccaccacatcagcaagctggacggcggcgtgcgcttcctggtgcatctgcgggccgacctgctggaggcgcaggccctcaagctggtggaggggccggacgtccgggaaatgaatggggtgctgaaaggaatgctactcagaatggttttcctccgggttcctgaacctagaacgggttacctggcattcaccgtgtgaagtgcttcacaaaancactgaggctgaggctgtgcatcctgtaaaaaactggatggacatgaagcgccgcgttgggccctacagaangtgntacttcttttctcactgttcgacccctgnggagcccctggtcgttttgcacgtggcactgactggtggcatctccancaacatccaggcaatcgtgaaggaacattctcc

SEQ ID NO: 311269 - DNA, 782 bp, Homo Sapiens
cctcttcttcctcaacgatgcccgggccgatcagtctcgggtgggcctgatgcacattggtgtcttcatcttgctgcttctgagcggggagcggaacttcggggtgcggctgaacaaaccctactcaatccgcgtgcccatggacatcccagtcttcacagggacccacgccgacctgctcattgtggtgttccacaagatcatcaccagcgggcaccagcggttgcagcccctcttcgactgcctgctcaccatcgtggtcaacgtgtccccctacctcaagagcctgtccatggtgactgccaacaagttgctgcacctgctggaggccttctccaccacctggttcctcttctctgccgcccagaaccaccacctggtcttcttcctcctggaggtcttcaacaacatcatccagtaccagtttgatggcaactccaacctggtctacgccatcatccgcaagcgcagcatcttccaccagctggccaacctgcccacggacccgcccaccattcacaaggccctgcagcggcgccggcggacacctgagcccttgtctcgcaccggctcccaggagggcacctccatggagggctcccgccccgctgcccctgcagagccaggcaccctcaagaccagtctggtggctactccaggcattgacaagctgaccgagaagtcccaggtgtcagaggatggcaccttgcggtccctggaacctgagccccagcagagcttggaggatggcagcccggctaagggggagcccagccaggcat

SEQ ID NO: 311270 - DNA, 658 bp, Homo Sapiens
  misc_feature (79)..(173): n is a, c, g, or t
  misc_feature (531)..(531): n is a, c, g, or t
  misc_feature (569)..(569): n is a, c, g, or t
  misc_feature (601)..(601): n is a, c, g, or t
gtagctgggattggaggcatgcaccaccatgtgtggctaattttgtatttttagtagagatgtttgtttctccatgttnnnnnnnnnnnnnnnnnnnnnnnnnnnnnnnnnnnnnnnnnnnnnnnnnnnnnnnnnnnnnnnnnnnnnnnnnnnnnnnnnnnnnnnnnnnnnnncctggactcctatctttacaataattatctgtcatgggtagtactggtttcacttgctactattatatttctgttaggctctctctgaatagcagtgaggctaactttgacagtttcaaagaatattacaggttgtctttcagccttgtaaaaatgaatgctatcaaatcgaatttttatataatcaaactctttaaatcaattccaatattgaaatcattgcatttatagtgatactaattgtgattgtctttctttttccctagccttaccttcattttctcatttttcttttcattctgcgatgcctagaaatgaactgcaggaagaaactaatgagaaaggatcctgtgttcanaatttctccaagaagcaacgctattgttccaaacccanaggagcctgaaggagaggaggaagatatccanatggaaagaatgagaacagtgaatgctatggctgtgcgagactttgatgagacaccc

SEQ ID NO: 311271 - DNA, 718 bp, Homo Sapiens
  misc_feature (187)..(212): n is a, c, g, or t
cttgctgatattttcaatttattactgcagtagataattgctctgaaagtgcaacactaaatcactcttgtcatagcctctgctccgtttccactggcaaatacttggaaattcattcttcgagcattgtggaccacaagcttctctctgggtggaaaattattgccactgccagtatcatagggannnnnnnnnnnnnnnnnnnnnnnnnngaacagaaggtttcaaaaagcagacactggagaggagtaggggccaatttcaaacagaaaacccaataaagggctggagaggagtaggggccaatttcaaacagaaaacccagtaaagggctggagaggagtaggggccaatttcaaacagaaaacccagcaaaggagttagaggagaacagctccaactgtgcaaagtggagaccgactctccactctccagtggcaacctcacattctggtactgtgcaaagcggagaccgactcttcactctcctcacattctggttacgttggccctggtagacctttatccctttgcctctgtaacggtgataccataatcataaccgtgccacatctcagcatatcagaggcccatggagtaaaaatagatgaaaagacctctcaagctagtttggaaaaatagagggtttagataaactgactatttaatctcctacttaaacctgttaggcagaatatctgggagaacactgggcgta

SEQ ID NO: 311272 - DNA, 1011 bp, Homo Sapiens
  misc_feature (10)..(10): n is a, c, g, or t
  misc_feature (12)..(12): n is a, c, g, or t
  misc_feature (14)..(14): n is a, c, g, or t
  misc_feature (18)..(18): n is a, c, g, or t
  misc_feature (30)..(30): n is a, c, g, or t
  misc_feature (48)..(48): n is a, c, g, or t
  misc_feature (128)..(128): n is a, c, g, or t
agtcctgcantntntcanttttttcctgtnatcccccaatgcccaganctcctcgtcctcttctggctgggcactgacattaccagaagatggcccctgtttgataaagaattcttcatggtggtccnaagaggagtccatggagcatccaggctgagagctgtttatacatgaccccatgacaaacggccaggattttttccagtgcacttcgaacaggaggcaacccccccacagctgtgtttgtagactgtttccaggatttgacaaccatgaatcttttgacttttaatttgttctactacaaccatcacagagggaaaaagaagctggaactggtctaggaagtagttgacatgtgatatggagagatggggatcacccaggaactcttgttccaaatcaagcagtgcttggcgataaggctgcaaaacagaatccagccctgtgcagaaggcctgcagggtagattcccatgtaacccccctgtggccctgttgagatggatggtgatccctgctgttgcaccatggcccgtgtactgttcaatgaactcagtgaagcgaatatagtctgtgccgagccggcagagtcgattcaggacactggtctcactgggggtggaggaaagggaagtcctgcgatacgtgcaggccactccgcttgttccagggtgaaaatggacccagggtacccgctcagagccaagagcagttcgtggatcattcccacggcggacctcgagtccctggttatgtcaccccctcctccagcgcacctccaggcgaccacgaggggagtgcttccccttccacacgcgcaccggcccctgggtcgggcggtttgtgccgaatcaacccaccgagacaatcgctgcggcggagcggacgggaagctgggaaggggtcgcgggggagtcccggaagttcggcagctcaacggggtccaccagctactcccgcccgggctctgcggagactgagtcgcggtcgctgccctcgcgcatgcccc

SEQ ID NO: 311273 - DNA, 684 bp, Homo Sapiens
  misc_feature (24)..(24): n is a, c, g, or t
  misc_feature (54)..(54): n is a, c, g, or t
aaccttaacctttgaaaagttgantgcccgtcaacttggcccctgcctaactcnggatcccagttattccccattttgtatttaaattttgtagttgagtgactgtggttctcattgttagatctgacatacagagaagtgcaattatagggttcttcaaagatgtgggtgctgcccttgtaaatctgttttgcaaggcattggtcaagggtatatcttctggaccctcccagctgggatgagtaggtctaaagtgactaatccactcccccttctgaatctccctaagcttttggatcccttcctctacattaaaccaagggagatcaggtatttccagctctctcacagtgggccattttttaatccatatttcagctaaccaaggaaataacctattagaaccttttttaactccttgagctgcaacattaaaagcagagtccctacttactgggcccaaatcaataaattcagcctgatacaactcttatgttccttccaccattatccatacctttaatatccattcccatgcttggtctctagatttctgtttatattaattagagaactcaaacagttcttttcagttgtagtgcacctcctcatggatcacactctcaacttcacttccagggtcctgccaggactttagtctaattataggtctagaagcaacaa

SEQ ID NO: 311274 - DNA, 812 bp, Homo Sapiens
taagtcgggccctgttcagccccccaatttttaccaagttgcgttcttccacttccctttccgtaaggctttttaacccccagacagtatttttcataaatagaacaaattttccaccagtcacatcttttaggacctttttggattcagttagtataagctcttccacttcctttgttaagacttcatctggtaaagtcttaagttttgtagaaaggaatttaattgctcgttctctaacaatgtcctctccttgaagtatttggctgaacaacccacttaaagtcccttttgcatccattttaaatatacttaatagggcattgttcactaggttaaattctgcagagtcatctgtctgcaaaagttgcgttagtatatctgccactcgaggaagattttctccagtggcaaattgaggcagttctttaattgcttgacgtcgaatagatacatcttcattctcacagaggtctaactgtgcattgatagcagaatcagccaattgtggaaaatgcttaaagaatttcggaataaattgagctgctaatcgcttttccttagtaccacctttcacaccatccaatatcacttgataggcatctttatgctggcccacttgctccgtggcatcggccaggatgccataattgcggtaaagctcctctactgtcggcatggtgagcgacaagcccagggcccggttccgctatccttgtcctgaccggcgccaccgccgcctcggaacttctccaaacccactacccgcactattacacctccagctgccgccagtgcagccgccagtcccc

SEQ ID NO: 311275 - DNA, 825 bp, Homo Sapiens
ttcttgttgttgtcatcaatataaatcttttggccctcattaatgaaatcattatctttcagagttggcagttctttggccttttctttgtcactagcttctctagccactgtagagccctttaagtcgtatttcctatacacagacaaacggtggctgaatacatttcttgtaactatcacatatatttcaactccatcaacattaagccggtacatgcccaagaactggggaagaagggtgatcccatgacattcccactatgtactggtggtatttcttcaggatgttgtgcatttcgggccacgtcttccactggtaatagtcttgatgatgtatcttttgtcgtaggaagtgtgaaaacgaagctccactgcggggcctgggagtcgttggggaggggtgcgctcctggtcagggaattctggaaatcttgatcatcaattccaaacctctcccgcaggttacggaagaccatcgggcagtattccttaaacttgaaatggctcggcatgttttctttgttaaaaaggtgattgtccacctttatttttgaataggctttgaagtcatctggcatcaacataacagggatttgaacatggctcagttcattgatcgagtggtttaccccccacatgaggacgctgagcagcgggtcgctggcccgaaacagcttcactttctgcgctacgaagtgcttcttcttggtcttggtcttgctcgccaggacagaggaccctaggttgccgggggtcgccatggccgcctcctatgtcccctccaccgccgtgctcccgaggccggggacccgccctctctacc

SEQ ID NO: 311276 - DNA, 778 bp, Homo Sapiens
ataattggtgtgttccagttcttcgtggagaacacgtaacattgaagagacgttgaaacaactaagtgtgcatagttcaaagatgctttaatgactctatcacggaattccagtaaatccactgcatccattaagaacattacgaacctgcatggctcttcttttcgttaatgttacttgaaaatttttccactcccaatgttgttccaccacatgtgcaaaaacgacatgtccatttccacaggctccagcaatctgagtgccatcgatagaccatgcaatattaaatatgctgccagtgttgggtttttctaatgcatgtgaccacccagttttatcacacaagcgtaaagtatgaaacgatccaacagcaaataattctccatctggagcccaggcagctgaagtaatgggatgctcatgaggttgtgaattgtacagtgggcggccgtaactatcccataccttatatttacagtcttcaccagcagataaaataagatcattgaccgagttccaatctacttttaaaataatgccatcatgagctttccacttgctgagctaaagttgatctaagcatcccagtctttgaccaaatttttatttgtccatcttctccaactgtaactaatgctgttccttcataattccatcttcctgcaagtactgctccacagtgagcttatacacttttttccactcttcctaacttggaaatcagatgaaatttaccatcagaacttgtgaggacaaagctttctgcctgggtttgttt

SEQ ID NO: 311277 - DNA, 1242 bp, Homo Sapiens
gcctttcgcatattttttgcggggtctagggtttctaaccccccggtaaaatccttaggggatggtcggcggttctctactccctttcgtttggcttcacggtattatccgagggcgtcctttctctctttcaaattgtggtccaaaactagatgcctcatgtccctccaggaagatgacttctacttctcggccttcctggggtcatctggggactcaagagatctccctggaagacctggaacgtctgcgtttcagcatgtctgtctatttcctcagcacgttccttccccatctatcttgatttttctaggtcgggtcttaatctgttgatcaatattctgttgaactggaactggaattcttggaaacaaggtagaaaaccactccagttttgtgagaaaagatcgtagcatttctccaatggtcattacacagcctccaccagccttcacatataggtcctacagaaacacaaaagataccctagccgtcaaaaaaagtatttccatatatacatgaatattataaaaatattaccatctttggaatctcaatacaaaaaaaactaacagaaaaattttattttcatatcctgatctgacaatgaatgaacagaaatatttgggcttagtgtgtgcatgcaagtgagaacaaaccctgcagcctcacaggcataaagggaactgatctcactcagttaacaatatgaaaaagccccttacatttctaaactatgcggaacgattgacttaaatttacattccacatacctactatgtatttatttctgtggacatatttgcacacatcatataccttgcaccataacctagctacatatgatctactttagataattcctgtctaaaggttatcttttaacagctctaatataaaatgaagccctaataaaactggaagcaatagcaaaccaactgccatgaagcagtgaggtttctaatttagttatgtagaaaataaataaatgaacaaataattggaaacgcataatccatgatgaccattgtctctgaaaagggtcattaccgcatgaaggccttcttgctatgccctctcacagctcaggacatgttagtcagctattgtcagtcccaaacctatagtgcaagcacacaaggaaagtgagatttgttatctaaacaggaaaacaagagctaaaggtaaaactgcttgcactcacacacatttaagtgttcagatatacagtatttccaaata

SEQ ID NO: 311278 - DNA, 3145 bp, Homo Sapiens
  misc_feature (33)..(33): n is a, c, g, or t
  misc_feature (227)..(227): n is a, c, g, or t
  misc_feature (418)..(429): n is a, c, g, or t
  misc_feature (470)..(478): n is a, c, g, or t
  misc_feature (520)..(535): n is a, c, g, or t
  misc_feature (575)..(584): n is a, c, g, or t
  misc_feature (640)..(688): n is a, c, g, or t
  misc_feature (690)..(722): n is a, c, g, or t
  misc_feature (1719)..(1719): n is a, c, g, or t
gggcgggcgacagtatagtgttatatattcgtnccaagacgattgctgtggatcaacagggtggtgggtgggtgttgcctcccacgagggcggcgaatatattgaggggttgtctacgtcgcagccgcgcggcttttctcggaagaggggcattatacccgctggtccagggcgaaggaatagcgtgctataaaggggaatattaccgccgccaccgagcacttatnagaaaaaagatgggcccgcggcgccagggggggcttttaaattttgtgtgtatatgcggggatttcgcctgttggggagtccctctcgtgtggtagggggttcccgtgaagaagtcccttctcgggagactcccccttctgggggttttgtgtctagaaaaggcgtcgggtgtttcccgcggcgggggggnnnnnnnnnnnnggggggggatccacaagcccctttgttcttgtgccccgggnnnnnnnnngggagacgggatgtggggccccagtttccctttacctacacnnnnnnnnnnnnnnnnccaacccggaaatgttttaaagaaacgttttttgagggcnnnnnnnnnncgcccaaagggtaggtttagttagtttttttgcgaatttcggatatcacatggggnnnnnnnnnnnnnnnnnnnnnnnnnnnnnnnnnnnnnnnnnnnnnnnnngnnnnnnnnnnnnnnnnnnnnnnnnnnnnnnnnnacagaaaacagaactttattccaagggccagaggttatttaaaattatttacactcactggaaatcacgtggaggggctgggcccagctcagcagagagaaagagcccttctgtgcagccaccgagggccagaggcctccagaggcatggagcccggtgcccccatgcaggccctgggctgtgctgccaggggccggtggacctcacctggcctgggggctgaggaggatgcaccccaggcccagaggagtctttgtcactgggcctgcgcccatgccaaggccaagccaaacacacccaggagactacgggagggagccaggagagctgattacaggccggagtctgtggggtgggtggggcaggcaggcccctagctccacacgtccagggagtagcggcccttggtcatcagtttcttgatgtagtccaccgcctgcgcgtgctccatggccccgagctcagccacgatgtcgtagaaggtgttctgcacatccctggccatgttccgtgcatccccacagacgtagatgtgggcaccgccttcgatcaacttccacaggtgctctcggtcttgctttagcaggtgctggacgtagaccttgtgggactgctcccgggagaaggccacgttgagctgggtgagcgcaccgtccctgtggaactgcgccagctcctcccggtacaggtagtcctcatccgagcggcggcagccgtaagtacagcagcgtctcccccacctccttgccctgctgtcgcagccaggcccgctcctggatgaagcctatgaagggtgccaccccggtgccggggcccaccatgatgacaggcgtggtggccttgaagggcaggcggaactgggacttgcgcacgaacatgggcaccagcgcacggccgccgttctccccggcaggctccttggcccgcagccagttggtggccacgcccttgttgatgcggccggccttggtctcgtactccacaaccaccgcacagnatgtgcacagagttggggtggaccttggaggatgaggcgatggagtagtagcggggcctgcaggcgccggcagcagctcaacacaggtggttcgatggggggccgcagggacgggcagtcctgcaggatggccaggatgtgcctccgggcctccaccaacccagctcaggtacagctccttgccctcgccggaggaggaggccatcttgcgcagcagctcctgctccgagggctccgaggcgtactgcgccagctcgtacagcacgttggtacgcggcgggttggtgatgtccaggtagtaggtgagggccgtgcggtaggacgtagggcacgggaatgggtgcttcttgttggactcctcatccaggttgttcagggacatgacgacgtccaggtcggcacccaggattttgcccagctggttgacgagagcagagtcgttggctgggtacacagccacgtggtccccagattcatacctgattttggagtccgagatgtccaattccaggtgcatgaggtggcgctcggttccctggttcagcttccggttggtggtgactgcagccaggaacggattcttggcatcaaaggggggcttctggttctcgtagctcttcagccggcccatctcccccatgtacaccttggccgcatctatgtcggtgtggaccacaagctcgtactggcgaatgctggactcctcgccagtggcttccaccccaaagtgttcacacacggccggccagaactgctctcgccaggtgatgaagtcctcctccaagttcccatcgtcgtcgcccaaccccagctcaaagatgcgctgggcgccgagctgctccagccgcttgtccacgtacttgcccatggcattgaagtgctcgtaggtcttgttcccaagaccaaacaccgcgaacttgaccccagagagatccacgtctgtctcctgcagccagtcgtagaagtcctgggcattgtcggtggggtctccctcaccgtaggtggccatgcagaaaaccaccagggcgttgtcgatctccggcaggctgctcaggtcggccaggtcatactcctcagggtccgctgacatgcctcgcatcccgtagcggtgggcgtccttggacaggcggttggcaaactcctctgcagtccccgtctgggagccgtagaacacgatgatgttcctccccgttttcttcatcttttccacaaagctgctctctctgacagaggaggtcaatgtctgaattttggtgaactcggggacttcttcttttttctttctgaagaggaaccagtaggttaggagacccacgatgagcgaaaacagaatcatgtccgtcatgctgaaaagagatacttcttcggccaccgcctcggacacggtggagctggtgtccacgtgggagtctcccatgttgatcat

SEQ ID NO: 311279 - DNA, 901 bp, Homo Sapiens
  misc_feature (95)..(95): n is a, c, g, or t
  misc_feature (244)..(244): n is a, c, g, or t
ttcggggtttttgggaagcttagttcaggccgggccccatattccccccccattgaaccaccttggcccgccatctatgtcgggtgtggacccancaagctcgttactggcggaatgctggactccctcgcccagtggcttccacccccaaagtgttcacacacggccgggccagaactgctctcgccaggtgatgaagtcctcctccaagttcccatcgtcgtcgcccaaccccagcttcaanagatgcgctgggcgccgagctgctccagccgcttgtccacgtacttgcccatggcattgaagtgctcgtaggtcttgttcccaagaccaaacaccgcgaacttgaccccagagagatccacgtctgtctcctgcagccagtcgtagaagtcctgggcattgtcggtggggtctccctcaccgtaggtggccatgcagaaaaccaccagggcgttgtcgatctctggcaggctgctcaggtcggccaggtcatactcctcagggtccgctgacatgcctcgcatcccgtagcggtgggcgtccttggacaggcggttggcaaactcctctgcagtccccgtctgggagccgtagaacacgatgatgttcctccccgttttcttcatcttttccacaaagctgctctctctgacagaggaggtcaatgtctgaattttggtgaactcggggacttcttcttttttctttctgaagaggaaccagtaggttaggagacccacgatgagcgaaaacagaatcatgtccgtcatgctgaaaagagatacttcttcggccaccgcctcggacacggtggagctggtgtccacgtgggagtctcccatgttgatcatgaaacgctggcagcccggcatcccgggaatccggaccggtccagcct

SEQ ID NO: 311280 - DNA, 959 bp, Homo Sapiens
  misc_feature (168)..(168): n is a, c, g, or t
ttgcggatgcccacccggccggaggagcggcagatggggggggaccccgtgcggataagggcgatggagtgttagcgggctggcgggacggggcgggcggtccccgcaggtggtcgatgggggcccccggggcgggcaggtcgggcggagtggccaggatggccttcnggccctcccccacccagctcaggtacagctccttgccctcgccggaggaggaggccatcttgcgcagcagctcctgctccgagggctccgaggcgtactgcgccagctcgtacagcacgttggtacgcggcgggttggtgatgtccaggtagtaggtgagggccgtgcggtaggacgtagggcacgggaatgggtgcttcttgttggactcctcatccaggttgttcagggacatgacgacgtccaggtcggcacccaggattttgcccagctggttgacgagagcagagtcgttggctgggtacacagccacgtggtccccagattcatacctgattttggagtccgagatgtccaattccaggtgcatgaggtggcgctcggttccctggttcagcttccggttggtggtgactgcagccaggaacggattcttggcatcaaaggggggcttctggttctcgtagctcttcagccggcccatctcccccatgtacaccttggccgcatctatgtcggtgtggaccacaagctcgtactggcgaatgctggactcctcgccagtggcttccaccccaaagtgttcacacacggccggccagaactgctctcgccaggtgatgaagtcctcctccaagttcccatcgtcgtcgcccaaccccagctcaaagatgcgctgggcgccgagctgctccagccgcttgtccacgtacttgcccatggcattgaagtgctcgtaggtcttgttcccaagcctcgtgccgaattcgccacccaggcctcgctacctt

SEQ ID NO: 311281 - DNA, 1324 bp, Homo Sapiens
  misc_feature (13)..(13): n is a, c, g, or t
  misc_feature (29)..(29): n is a, c, g, or t
aatagaaacactntttattcaaatgacanggcaggaagcggtggagcagcaggggggaaagggcagccaggcaggggctgggccagtgcttccctgtgtcccctgccattctggttggacagccacccggttgttggcatcagggtcagaaatactttccctcttttccctcttgccccaaactgaataaatagccatccctctccccacgagagctaggggagactcatgtgctgagtttggtgccccagtcacagcccagagtccggtgagggcagaagttcaaaatggcttgtagggagtagaatacaaaactgttctactcattctcaccttcctcttcctcctccctgccacactcccctcccagcctggtcccaggacaggtggtcggtgagggtctggagcgggagaattgttgcctagcatacactgagctcaagttcacaaggccatccagcctgtcacccatccgggttgaccaccaaagagaacgtctcacttcacgccactttatggacataaaaggaggggcagggagggaggcagtgggcagccaggcctttcccagcctcagaggtaaccagagtccgaggagcaggccccctaccgatccatctcgtccaggagtggggtggcatcgccagcaatggacatgggggtgctttcgatcatggggctgggggagggccgaggtgtcagccgctgcttctgtttccgccgttctgcctccttttcctgcagccactgctccgccatttttccccagtcgatggctgcatggctgttggactttggctgctgctgccgttgccgggagctggaagagggctggggctgggcctgggccgactgtggggtggtgctggcctggagctggtggtactgaggggtggtgatgggctggcttggggtcgtgtaggagtagctaggggtcattagtggtgtggccactggctgctgggctggcgttgggaatacctggagaggcatgaacagttaaatagggatgggtgtggggcttgtttggccttgctgtgaattctgggtaagcgcaagggtgggctcagcaaagctttccagatgatcttccactgagtatgtgcttctgaccagcagtgggaagcctgcaggtcagcaccgagcacacagtggtgcccactggtcctgaccatgtcaactttctggtggcttgcgggttccaaagatcccaaaggcccgtggaaaggttatgccctctcttaccctcttccccttcaaatgggcctaaggacaagaaatatctgttggagacagttaccaaggccgtggcagccccatctgt

SEQ ID NO: 311282 - DNA, 971 bp, Homo Sapiens
  misc_feature (15)..(15): n is a, c, g, or t
  misc_feature (25)..(25): n is a, c, g, or t
  misc_feature (31)..(31): n is a, c, g, or t
  misc_feature (51)..(51): n is a, c, g, or t
  misc_feature (59)..(59): n is a, c, g, or t
  misc_feature (70)..(70): n is a, c, g, or t
  misc_feature (86)..(86): n is a, c, g, or t
  misc_feature (95)..(95): n is a, c, g, or t
  misc_feature (122)..(122): n is a, c, g, or t
  misc_feature (136)..(136): n is a, c, g, or t
  misc_feature (144)..(144): n is a, c, g, or t
  misc_feature (169)..(169): n is a, c, g, or t
  misc_feature (175)..(175): n is a, c, g, or t
  misc_feature (239)..(239): n is a, c, g, or t
  misc_feature (893)..(893): n is a, c, g, or t
  misc_feature (905)..(905): n is a, c, g, or t
ccagcccatggaagnccaccaaggnccaggnaaacggggccaatacagaangaaaacangccgaaagccntgaacccgaaataaanttggggccncagtcaaaaggcgaaacccaccccaangaagtccgtgttgnaaccaagnccaaaaccccacacccgaaccctanccaacntgtccgccttaaaaacctggccgaataaggccagcaaaaggagatggccatagatgtgttttantttcattattttggtaggcctcccttttaggttacccagcccacatgcagccttcaggggttctagccgtagtttcccattgttggtgagatccagagcattgtatttcaggtcactgtttaaagtagttaccagagaatagggctgtagctgtaaattaacagtttgcttataaaacttgtcagagctgtaaatgttgtcaagttttgaagagaagtccagtgataagcctgcaatgttcagactgtttgtgtggtcaaatttcatttcagcatatgagcccatcatgtcatttgagagcttaagtccttcttgactgaccttgaagttgaaaatgtttttgctgtcgacacccagaatcatggcctgataagcacttcccagtgatagctctgtgagggcggctttcccatccagactgaattttgcattgtgttccctgaagcggccatttgttgttaatttcatagatgccccagagaggccaagctctgcattcagctcattctccagcaccaggagactacacttcaagttggtcgttgcactggtagatattccatcttggccaatccttagtgtcgccttgtgagcaccactattaattttgtcagtgcctaagatgtcagcatttaactcaagaccatgggaatntaggatccagangcaggctgaagacctcaatgactcgaatcagcctgatatcaaaacgcacatgcatttgcttaaaga

SEQ ID NO: 311283 - DNA, 165 bp, Homo Sapiens
gataacagcaacagaatgttccaaagcaacacacagagaaaaaatatctatgccttgtctgtattaagcaacctcccctactgcccagcattataaaaatcacattgccaaagcagctttacctgataatggaacgttttcttctcagatgtttgtaaagctgct

SEQ ID NO: 311284 - DNA, 1962 bp, Homo Sapiens
  misc_feature (33)..(33): n is a, c, g, or t
  misc_feature (43)..(43): n is a, c, g, or t
  misc_feature (66)..(66): n is a, c, g, or t
  misc_feature (101)..(114): n is a, c, g, or t
aacagtattcccaaaatgaatctgctctcaacnggccctcccngccccaaattaaaatgttaaagngtacaacaaaatcatcataatattctttgaacttnnnnnnnnnnnnnnccaactatttcaaggcacatttaatttaatatcaagagtgcaatacaaaaggcccaaatacaatgaaggaacacattcccccattaacaccaacgacaaagctcttttaaacatgtgcctgttgaatggaacggggatttcataaaattcactaaaaaaaaataatgcagtgagtctcatcacagctaatatccttatacaatctagttgtgaaatgaatgtttataatgcttcaaacagtttcaacctgaagtttgataccacaccttcatgtttgtacagtcctcagtaagattatctacagtttttgcaaccattcaaagaacaaaccattgaataaaaccacattgattaaggctcaagcaagtaatatagagccccaaactaaatggttaaatatatgcgctacttgtacggacatctattatttgattctctcatgactattgaaagttggttctcagcaaataaaccctttaaaggcaaaattcacctcatttgagttttgacccagaagttcaacaacaatcatgaagtccacagtcttattggcaaaactgatacacagtgtctctaagtcactatgctcaaggttaagagcgatgcatattccgtttttacattttactggaattttacatgttcaattcatgatttaaaatctctaggttttcattccttcaaactgtctgaagacacagtgtgccacagacttaagacttctgtttctccctctattttcttcaaacagaaacatttctcaagtgtctacatgttctagaaggggaatttttcggaggtggccacttcttcggaatagtccgacgccatcaggcctctgaagcaaggggaaggggaaaagaaaaaagctgaaacacaaggttcatctggtaagttttacattaaccattacaagctggacagtgtaagaatgtggcttttttttggctcaaaaagtctgagtcttggtgtggaaacgagtacttggctgtcccaccacagctttctcgtagtgggactgtcagggaagtcttgactggggagtatgatttgtttacctatcaggcgtaaacttccaggcactcagttcattttgggcttgttccagtttgtctttagtctgttccagttcacctttcatttttaggaaaaacaagttgatcgctgggtctaccattgttgatctcagttgggcaacgctcggctgctggacttgcttgaggtactggatttgagtagtacactcttgcatctcttgttccttggttgctagtcgcattacaaggatgttttccctgcgtgcagactcctgctgttgttgctttagtttttcttcagactctcttaggccagttacatcattagagttaagatctgtgtacttgccctccaaagcttgtacatatgcttcatattgtttccatcttagaattaactcatctcttgccataactttgaagtctgtttcactcaatcgaaccttcttgggaagaggttcttcgttggtcatcttgaatcaggagagtttcctttcaggcgtggccgcagtcactcgcccgccgccgaaccccgccaggagaggaaaggtgaagggagggagccgtcggcctagcccgatcggggcctcgaggcacaatggagcagctgctccccggtaacactccccgtcctttcccaggagcctggcgcgagctccgcgggccccggagctcagcaagctcagtaagggaagcggccgaggggaggggcgggccagcgaggtcggaggtcagccccagggcatcacgggaagggaaggtggaagtactcgccggggccacctgcggctgcggggctgcctcgtgcccc

SEQ ID NO: 311285 - DNA, 848 bp, Homo Sapiens
ttcatttttttgtgtcatcaaatctcatgatcagtttccctttaaagttaacctggtagtgctggttcagaagagcagcttttgcatgcccaatgtgtaagtaaccactggcctctggaggaaatctgacggtaacctttcccatctccgcacctggaagctcaacaaatttcccaacatcttgctttttctcaggtgccactcgagctttggttgttgaaacatcccacttggtacctactgactggaaggcctgctgggcttcaagaaagccaaaccaacgttttacatgaactggagctttcttctgtttcaactgttcttgccaggcagcatttccttttagggtggcccaaacacataaatctgctaaactcaaggagtttccaactaagtatgttctcagagacaggcaatgattgagttcattaattgtagaagtaaaggaatcacatgaagataattttgtagcactgaactccaaccagtgatcaatctcagtatgttccatcagattagagccatataacccagctgtagttgcaactctagccaagtagcgaagtatagaattcacatctgtgaatatcacattttcagaaacatgaagaatattctctttcccttcttcaacggaaatgctgacatcgtctttcacgtgttctactgccagcaaagctcctagcggagggtctcctgaattcacggtcagagagagcgtcgccatctccaccagtccgctggtccacctgtcagtacgcctggctcgtgccagaactacggaggaccccgcgaaaggaagaagatgcaacgtgtgcgcgtacccgacgccgccgcagccttcgctc

SEQ ID NO: 311286 - DNA, 1057 bp, Homo Sapiens
  misc_feature (29)..(29): n is a, c, g, or t
  misc_feature (43)..(73): n is a, c, g, or t
atgcagggtacccgggcaattcggccatntacggcctcggggnnnnnnnnnnnnnnnnnnnnnnnnnnnnnnncattctctagactttgcaatttcagctgactcacacttcacatttcccttgaatttcaaagagcttaaaaatatgtatgcagatcagccaaataaaaagtttggttttcatcagtgaaagcgttcccacactccccgtgggctctgtggaaatcggcaggcctggttctcctaagccaaactttttcctaactccttgcccttctctaatctcagggcctcctttttctcaaaacatatttgctttttcaggtctcaaatgctttctccttggttcctgcttatagaccgtaagggcttcttcttttgcaccaaaattataaaagttaagtttcttattggtcccttggtgtaatttacccattatcgcaggacagaaggaaggaaactgcagttaaggattattttgatgtttctcttatcacaaatattcacccatagggatggctaaactcagaactttcagttagaaacaaagttctacagaaaattttctttaaattgttttataccttatagttggtttggagcttttgttttcttatgctgtaatactgggtcactggtagattagaagaggcagccccctgtcatgatgctggctgtgtacaagagattggaacaagggctatgtgcacagtcacgaaaggggagtttctttatcgtatattcgatgggaatgcaggtcagtggaaaagaatatcctctccttattcatctcaccaggtccttggaactcaatgcctggagaaacattacactaagcttttactttgtctcttgggctacgagctagatgtgacattttagactctctctgtcttttgctctaggagcaaggcctcattttgaggaaacagatgacaaaagagaacatgcataagatgtgaaaattcatagctaaggattaataaaggctgaccatgtttggccttgactgaaagcaaagttttctctcaggctggtttatatttagcttccttct

SEQ ID NO: 311287 - DNA, 712 bp, Homo Sapiens
  misc_feature (353)..(415): n is a, c, g, or t
  misc_feature (527)..(527): n is a, c, g, or t
  misc_feature (614)..(614): n is a, c, g, or t
  misc_feature (685)..(685): n is a, c, g, or t
  misc_feature (697)..(697): n is a, c, g, or t
gtcaacctgaccgtacggcatggtgctttttttggggatagatcttcagacagaaaagtgcaaacaaaagggaaaaggggagcaaagggaaaacaggccgaagtggctaaccaagaaactaaagaagacttacctgcggcggggaaacgaagactgaggagagtccagcctctgatgaagcaggagagaaagaagccaagtctgattaataaccatataccatgtcttatcagtggtccctgtctcccttcttgtacaatccagaggaatatttttatcaactattttgtaaatgcaagttttttagtagctctagaaacatttttaagaaggagggaatcccacctcatccnnnnnnnnnnnnnnnnnnnnnnnnnnnnnnnnnnnnnnnnnnnnnnnnnnnnnnnnnnnnnnnggtacaaccagttaacattccacagatggggggttagtttgtatatcctataatacagagcatattaaatggcaatatggagtcagtcctgcatataatgtcttgaacattntacattacttctattaccatgttgctttttagtagaattgctctctaaagaaaccactctttgatcatggctctctctgccagaatngtgtgcactctggtacatctttgtgggagtcccgttttcctaatacttgttactgtgctgtggatacagantggacatgtagnggacgtgctggtggg

SEQ ID NO: 311288 - DNA, 1481 bp, Homo Sapiens
gggggaagattcccaagccccctagttccaatgacccaggattttcctagggaaccaggctttgggccaaggtccatttacctattgggggcccggggcgccaaacgaaagggttctagaaaagcttctgagggggccgagggcggccgaccaaggccctacgtgcgtcggaatgccgtgccgtgtcataaactgagattttattggttgaggatcagtacagacatttcaatttgtacacaaatcttaacatacgtaacgaaattctaaaaagccatgtattgtaattcttttttaaagttattccagtgactttccagcttaaaatttggaagcaaattttccttaagaggctatcaagtaccagtatcttcacgttggtcagctgttacatacggcccaccagttcacaactcaacagcacgtacactacatgttcaaatctgtaatctttcacagcacagtaacaaagttattaggaaaacaggactaccacaaagatgttacagagtgcacacaattctggcagagagagccatgatcaaagagtggttttctttaggaaacaattctactaaaaaacaacatggtaatagaagtaatttaaaatgttcaagacattaaatgcaggactgactccatattgccatttaatatgctttgtattataggatataaaaactaaccccccatctgtggaatgttaagctgacacccgagacagtcagagcctcccataattcaatatcccacactattttctggttgtaccaaaaaataaacaaccagcaaatgatttcacctcttaaaaaaaagcatttacacttaaaaaatgggatgaggtgggattccctccttcttaaaaatgtttctagagctactaaaaaacttgcatttacaaaatagttgataaaaatattcctctggattgtacaagaagggagacagggaccactgataagacatggtatatggttattaatcagacttggcttctttctctcctgcttcatcagaggctggactctcctcagtcttcgtttccccgttttccgcaggtaagtcttctttagtttcttggttagccacttcggcctgttttccctttgctccccttttcccttttgtttgcacttttttgtctgaagatttatccttcgctgctgcctttttcggcttcgcttccacttttgcaggaggtttagctgacaaccgcgccgatctcctcttgggctcttccttggcggcgccttcggcggagctgaccttcctcttgggcatcgtggcggcggggaaggcgcgtgccgggtgcctgcggggaaggcgcgtgccgggtgcctgcgggccgcggcgcgccgacagccttcgcgaaactgggctgccttgccgctgccactcctcccgccgcccgagctgctgagacccacagcgggggcggtgggagaaccggatggaaccggattgggagcccgcctcctcct

SEQ ID NO: 311289 - DNA, 1014 bp, Homo Sapiens
ttttgcacttttttgtctgaagatttatccttcgctgctgcctttttcagcttcaattccacttttgcaggagcaggtttagctgacaactgcaccagtctcctcttgggctcttccttggtggccccttcagcagagctgaaccttcctcttgggtatcctggcaatggggagggtgcatgccaggtgcctgcagagccacgagagcctttgcaaagctgggctgcccggacattttccacttttatccaccatggaagcaaaggattttgtgaacattttgctagtaaagccccatttccctaatgtcaagtaatggctcctgcaactaatcaggttaataattgcattatcatatttgtaaccacccagctcaaaatccactgaaattttcacttaaagggttttaaaacagattagaaaaacactgttcccaggttaagggtgaagatattcaagattttaataggtgacagatcatttttggcaacaaaaatcacataacaatggaaacaaaaacatctgttttcaaaatgttctctccatagtagaaattttttagaaagtagttactctttcaccctttgttcaagcatcacatttgccatgatggataataaagtgtgttgatcttttttttctagtatcttcttaggggcctaaaactggtagtcacttatcaacagagaaaattttagaaatacttgcttttctgtaaatgaagaatctatacctctttgagctccacaagccccttgactattttgctacaagatgcagtgcagatagcacaagagattttcatggtcactcttgtgtcagcacaatgttgtcaagaactggctgctttaggccatccaacccgtatggagaagggactgtaaacaacaacctaacggtccagcctgaggggagtagtgaagacaaatgtggttttctgcctgatgggatgctgaaaagccactgaaaactggaatcacaaacagcagtctttggcaagatggacaatgcttg

SEQ ID NO: 311290 - DNA, 933 bp, Homo Sapiens
  misc_feature (102)..(167): n is a, c, g, or t
  misc_feature (188)..(256): n is a, c, g, or t
  misc_feature (315)..(448): n is a, c, g, or t
  misc_feature (714)..(829): n is a, c, g, or t
gttctataaatcatgggatttgttgaaaacatgtttcacagacttctatttagctcagagccacattgaagccgtttttaaaaactgctcaaacaatgtaannnnnnnnnnnnnnnnnnnnnnnnnnnnnnnnnnnnnnnnnnnnnnnnnnnnnnnnnnnnnnnnnnattgccgagaactcaagaggnnnnnnnnnnnnnnnnnnnnnnnnnnnnnnnnnnnnnnnnnnnnnnnnnnnnnnnnnnnnnnnnnnnnntgtgagagtcttctcaatggttgctgatttcccatggtgagtactccaagagaacaagnnnnnnnnnnnnnnnnnnnnnnnnnnnnnnnnnnnnnnnnnnnnnnnnnnnnnnnnnnnnnnnnnnnnnnnnnnnnnnnnnnnnnnnnnnnnnnnnnnnnnnnnnnnnnnnnnnnnnnnnnnnnnnnnnnnnnngtatgaatgcttgaaggccatttagaggctggccaacatactcaaaagtatgagaaaaacagaatttttagaaacaaaatgaacacattaggttacatagcttgtaagtgacagtcttaataatagcaaagttttctaaaattcctaagtcttttcattatatcatgctatgagtcaatgttcaacaactcacaaagttaagctcctacttcctaccatgtaacaaaaaatttcagaatttatttacttatttatttataataaannnnnnnnnnnnnnnnnnnnnnnnnnnnnnnnnnnnnnnnnnnnnnnnnnnnnnnnnnnnnnnnnnnnnnnnnnnnnnnnnnnnnnnnnnnnnnnnnnnnnnnnnnnnnnnnnnnncatggtggcacgtgcctgcagtcccagctactcacacagttaagtagctagggttattcctaagagccttgaggggaggttgaggcaaggagaatcgcttcaac

SEQ ID NO: 311291 - DNA, 1823 bp, Homo Sapiens
  misc_feature (632)..(632): n is a, c, g, or t
  misc_feature (661)..(661): n is a, c, g, or t
ttttagagaattgacattttgcaaaatgcagcaaacattttaatttatacatgagaaaaggaagtgttcaaaagggtatgcatttcaagttattgcaggttatttgtgagagaatttctgcaggtaaaacatgtttaaatttaaccaacagtagcgtgtcagtgtatttaaaatcatgacaaaaatcttctctctggtcatgttgcccatgacaaattactatgatgttgtacgtttagggcaagatgtcaatacagcataaatcccatggtattttggttttcttctggagattaaagctgtttttcttgggataaatgcagcagcaaaacacaaaccagttgatcaaaaaagcacttctgccataactccaataattttcaggacacatcaaccgacagtagttttgccattcccagttcttttaaggattacatctctgcactgttgccttaaggacgtctgtaaaagcttgttctctgttaagccagtttactgactacagcctggttgagagaatttagttggttggtccatttatctagtgcagtatatcgtgcaccacccctcttctgatgatccagttcaaggagttggttgacttgatcaattcggccatgaatagtgttatnccaatatgcactgcaaccagcaagctctnccacatcagctacatctatgtttaactcccttagaaataaaaggaatatgtattcttgtgtaaggcttaattaattttataagcacttgtgttctgatgtttcgcaaaagctcttcaatgtgttctcttatgaaaggatcatccatgatgttgctgtgatttgtttttagaatcttttcaaattcagtgatgtcattattctgataggcacttactaaattcgtcattgctaaaatttctggatcatttttgtacggcttggcctcctgtgagtcaaatggatttattcccgatttcataagcatatttgctaagaccaaatattttaagcaagtggttcgtcttggacttccagattcatcataattcttgaaggcttcaaaaaaatcagtgtgtgccttttcaaattcaccttccctcaagtgcattttaccaccacattctctgataactcccataatcagtggatgagggatggcagacttgatgtgaagtgactgttcatagagtgctttaagttttttgttatttttctgtgctgtgtacatttgaatttccaaagcatatatttctaataactgtgtaccttttttcagatcatcttctccatcatcagtctggcacgactgatgtaactggcgtaaaattttttgaagctttccatattcctctcgttctaaatataattttccaagctttgtgtttgtcttaaaccacagtctatcattcttagcatctttcaaagcttccagtgttgtttcatagaattcctgcagtaaatccatctgtttagaagtagagatataatcaagaatagaattaatggatttttcagaataatttcttgtgactgcactccgaatataggtcaatagctgcttatatctattcatcatttctggaaagtttgtcaacttgaagttaatcttaatcatttgtttcagtgctttaaatccccattctcctttttcaccttcaagttccaaaaccttttggaaactgcttaatgccgcttttgggtcatcttcttttaatgctttggaattatagtactgattttccaaatccacatttggctcggagttactatcttcagagtattccaggtcgtagtcctcctcatcatcgcacatgaaatcatcaaaccatgtcaaacatcttg

SEQ ID NO: 311292 - DNA, 676 bp, Homo Sapiens
  misc_feature (80)..(80): n is a, c, g, or t
gtctccctcaccccacaccatcaattctttataccaaagccagattgatattttaaaaatatattatttctgaattttanaagagtcatatggctacctggaataaagattatattttccagattttccttgcacttggtgtggccatgtgattaaattctagtcaatggaatatgagggggattgatgtgtttaacttccaattagagtctttgaaaggaatgagcctgacttctcttgaccctttcttgataactgggatatgaacccaggaagtatgatgattttcaactatgtgagtgagatcaacaactaggggatgatgggtacaagactgaagaaagttgggggtcccaatatcatcaggttgcttccagccatactacttctgagctgcctacttagactttctttgagagaaaaattctctatcttattcagctactgtatctttggatgtctttgttacaacaaactaatctttaccctagctaatacatattgtgcttaattaaccctattatctccaagataaagtccaaatttcacatcttggggtgagagaacgtcttgctctacaccctgtttatcactctagcttctctcaccagtctcctactcctactctacttccattctgaattaccctgaattcatcataaatgccatggtttct

SEQ ID NO: 311293 - DNA, 377 bp, Homo Sapiens; identical to SEQ ID NO: 150759

SEQ ID NO: 311294 - DNA, 1049 bp, Homo Sapiens
tgaccaggaccatggcattggtcacatggctgtggagctcccgctgcttcgctgcgaaggacaggttgatgagggtccaggcgacgatcccggggcgcccattgaagaacagcttgaagtcaaaccacttcccgatccgagggttaaactcgatgcccattcatgtagttgtaaaagaaattgcctgtgaatttgcagtctctggcgctggtggggaagaagtagcccttgaccatggcgaaggtggagacggcatagcccaaggatgttggcgcaccacagcagtgggatccagttgtcgaagatgatggtgggcgagaaccaggacaggagatgagcgtttgcaaaccagagcaggtgcgtgaggagccaggcttgcaggccgttgatctgatacttgttcacaacccctgcagggagtcacggccccctcctggatgcctcctacgtagccgggtagaaacttatggcagaagtcagggagagacgtgtacagaagcacctggaaggtgacccacaaggtatagagctgggcggctttcctcgttataggtggagtcttggcccagatgtccgagagccgagcatgtccggtgacgatgtccaccacagggccggtcagggcgcagctgtattggtcacaagccatgatgaagtagtagacgatgaagggggcgaacagcagtaggaagatgacgctcgccagtgaaaaccagtccacctcccaggcacggccccactgcccttgagatgcggttctgtcattggtgacgccatctagactcttggctttgggaatgttgggttgcgattttgcagccattgggccctccagcctcttgccaaatagtttcacagcagaagggaacttttccttcttgaaccggccccttaaaagtttctagacacctgtgctccaaatgcctgcttgatccttctcaaccggctaaagtcctgcgcacacctcggcccctcacctgcgcccaccttcccctggcctcgcttgcgcgcgctgctccacgccgcgtaccctctagccaggggtcgga

SEQ ID NO: 311295 - DNA, 1426 bp, Homo Sapiens
  misc_feature (112)..(113): n is a, c, g, or t
gacaaagcaaactttgggcataaaaacaggtaaacatatacaaagcctttgtaatatacataaagcatatttttctgggactagtgacagaaaaagatgaacatgctgttanncaatgtcaaaaagtttaaaattcagtgtccaagcaattcctaacaatgcttctgtagctttaagctctaaacagtatagaatttatgcaaatgcattaaagaattcaagcttggcaaattacacccaagcaggttattaaactatatatacagaaagtaaatgataaatacagaattaaaagagtccttctgtttccttatagccgtgaaaattgacaaagtttctgaggacagttctataatattaaacattaggtaaccacagatgttgggaaacctaactacacaaaccgatttaaaatactcaagatgactttgtagtgtttaatacaattcagttcgtagttaagggcacaagacaacatttaacaaaaataatcacatcaattgacctagaaatcaaatgcaaatagatatgaatacaatctccaaaatctgtcttttaagtgaacattaaccatttattcaaagttatacaagaatttgacggattaaagtcttctgtgacataaagccatttcaaatagtttcatgtctcagctgagcaggaggagagggggtgaaagaataagtgagtaggccccgttgggcagctagacagtaaaaacagactcaacagcagccgcccccagcctgctgtcctccctgattgcctgcatgtgttgcattggtagcagcatgctgagggccaattttaatgccatttgcctcattattaatgtcaaagactccttcttgaattttttcataaatttcttttgctgtattaataaatgcctcttctacattggaagcagtcttagcagacgtttccatgaagatgagtccatgttctcgtgcaaaagcttcaccttcttctttttttacttctcttctagattctaaatcacttttatttccaataagcataatgaccatgttggaattggaatgctggcgggcatcttctaaccaggttgtcaagtggttgaatgtatctctccgtgtaatatcgtaaactagtaaagctcctgctgcacctctgtaatacgaccttgtgatggaacgaaaggattcttgccctgccgtatcccatatctgaagttttatctgtttcccatcaatagttatcattcgagcaccgaactctacaccaatagtaaggtcatgcactggctgaaacctcttgtctgtaaactgtagcaataagcatgatttaccaacacctgtgtcgccgattatgatgtacttgaagagataggcgtacgccatggccgcggccgctcagtgccagggcacacggctcctcctcccgctgctgctcctcctccgcc

SEQ ID NO: 311296 - DNA, 821 bp, Homo Sapiens
ctccattattaaatggtccaaaagactcccttccttggaaattttttcaataaaatttcttttggctggtattaaataaaatgccctccttcttacattggaagcagtcttagcaagacgtttcccatgaagatgagtccatgttctcgtgcaaaagcttcaccttcttctttttttacttctcttctagattctaaatcacttttatttccaataagcataatgaccatgttggaattggaatgctggcgggcatcttctaaccaggttgtcaagtggttgaatgtatctctccgtgtaatatcgtaaactagtaaagctcctgctgcacctctgtaatacgaccttgtgatggaacgaaaggattcttgccctgccgtatcccatatctgaagttttatctgtttcccatcaatagttatcattcgagcaccgaactctacaccaatagtaaggtcatgcactggctgaaacctcttgtctgtaaactgtagcaataagcatgatttaccaacacctgtgtcgccgattatgatgtacttgaagagataggcgtacgccatggccgcggccgctcagtgccagggcacacggctcctcctcccgctgctgctcctcctccgcgccccaaccccggtgccgctcagcctcgaaacgccaggcgccgcccgccgccgccgctgctgctgtcagccgccgggagtgaggggctgtgaggaagccggacgaactgacacccgcagagccgagggagacagcgcccgaccgagcccagccgaacaataacagccgccgcggcgcctccgccccgcctccgcccc

SEQ ID NO: 311297 - DNA, 530 bp, Homo Sapiens
  misc_feature (21)..(21): n is a, c, g, or t
  misc_feature (84)..(84): n is a, c, g, or t
aaaagcagcattatccaatanctgtttaccccgtacctggtatgataaagaattattttcagaaacatttccacagtgtttttnaaaggaaggaacatcccttaggagatattgttttaattgttgctaaaatctacttgctgtatttttctcagttgtttgataaaattgtatcataaagaattaaatgagttttttaagaattagttaaactatattgtctggtcatatttattgttctgttctcttttatttcaggcaaatggcattaaaattggccctcagcagtgttgctaccaattgcaacacattgcaggcaatcaggggaggacagcaggctgggggcggctgctgttgagtctgtttttactgtctagctgcccaacggggcctactcacttattctttcaccccctctcctcctgctcagctgagacatgaaactatttgaaatggctttatgtcacagaagactttaatccgtcaaattcttgtataactttgaataaatggttaatgttcacttaaaa

SEQ ID NO: 311298 - DNA, 356 bp, Homo Sapiens
gaaaactcagcaaaagccgccgctgctaccacctcagcgcctcccccaacccgccccttccttctcgcggccgcacgtcacgtcagtaccctggcaagacaacgaggatttgcgtagggggcgagcctctgaggccacttggctcttacggccacgcagggcgccgcagatgcagccggagcccgcttttccctctcaggacgacccctaggcctgccagcagttctcctaccgacgaaggcgactgtacagcgtctctacctgctgttctgtgcccacttaccctgcctgctcccactccgggccgccggctcgcagcaggaccagcccggctgctacggccgcggatacacgcc

SEQ ID NO: 311299 - DNA, 544 bp, Homo Sapiens
gacaatgggagaactatagcactgcagggagatggcacatacctcatggcaaatgagtgacaggctatgttcacatgtaggagattttttatttggggtgagggaggattataaatatttcataggcatgaaaactacagatcccaagtaatatgatggcttttctcttggaactaaaatatttctatcctttggaaggctatcttttacattcaagaaaaacattttttaatgaggatatgttttatattaatctatgtaaaatatatagggtggctaatgtctaattagattaatgtttttggagaatgcatcctatgtcccagcttaacgattactgacttcaaaatctattgcttgaatcatagtaagtcaaagagcatataactctacttttagactgagaaaggaaagagagagaaacattcgactctcttatacacatttgcagcaatgtctctcaagaaggactaaaaatgacggatgctcaccagagtcccagctctagcaatattgccatctattttacagtattttaagcaat

SEQ ID NO: 311300 - DNA, 1820 bp, Homo Sapiens
  misc_feature (1542)..(1542): n is a, c, g, or t
  misc_feature (1570)..(1771): n is a, c, g, or t
gagttggttgattggggtttgatttgcttttgaaaagatttttatttttagaggcagggctgcattgggagcatccagaactgctaccttcctagatgtttccccagaccgctggctgagattccctcacctgtcgcttcctagaatccccttctccaaacgattagtctaaattttcagagagaaatagataaaacacgccacagcctggggaaggagcgtgctctgaccctgtgctaagcacggggtttcgcgcaccagggtgtctttttccagtccccagaagcagagagcacagcccctgctgtgtggggtctgcaggtgagcagacaggacaggtgtgccgccacccaagtgccaagacacagcagggccaacaacctgtgcccaggccagcttcgagctacatgcatctagggcggagaggctgcacttgtgagagaaaatactatttcaagtcatattctgcgtaggaaaatgaattgtttggggaaagtcgtgtctgtcagactgccctgggtggagggagacgccgggctagagcctttgggatcgtcctggattcactggctttgcggaggctgctcagatggcctgagcctcccgaggcttgctgccccgtaggaggagactgtcttcccgtgggcatatctggggagccctgttccccgctttttcactcccatacctttaatggcccccaaaatctgtcactacaatttaaacaccagtcccgaaatttggatcttctttctttttgaatctctcaaacggcaacattcctcagaaaccaaagctttatttcaaatctcttccttccctggctggttccatctagtaccagaggcctcttttcctgaagaaatccaatcctagccctcattttaattatgtacatctgtttgtagccacaagcctgaatttctcagtgttggtaagtttctttacctaccctcactatatattattctcgttttaaaacccataaaggagtgatttagaacagtcattaattttcaactcaatgaaatatgtgaagcccagcatctctgttgctaacacacagagctcacctgtttgaaaccaagctttcaaacatgttgaagctctttactgtaaaggcaagccagcatgtgtgtccacacatacataggatggctggctctgcacctgtaggatattggaatgcacagggcaattgagggactgagccagaccttcggagagtaatgctaccagatcccctaggaaagaggaggcaaatggcactgcaggtgagaaccccgcccatccgtgctatgacatggaggcactgaagcccgaggaaggtgtgtggagattctaatcccaacaagcaagggtctccttcaagattaatgctatcaatcattaaggtcattactctcaaccacctaggcaatgaagaatataccatttcaaatatttacagtacttgtcttcaccaacactgtcccaaggtgaaatgaagcaacagagaggaaattgtacataagtacctcagcatttaatccaaacagggtnaccctcagcatttaatccaaacaggggnnnnnnnnnnnnnnnnnnnnnnnnnnnnnnnnnnnnnnnnnnnnnnnnnnnnnnnnnnnnnnnnnnnnnnnnnnnnnnnnnnnnnnnnnnnnnnnnnnnnnnnnnnnnnnnnnnnnnnnnnnnnnnnnnnnnnnnnnnnnnnnnnnnnnnnnnnnnnnnnnnnnnnnnnnnnnnnnnnnnnnnnnnnnnnnnnnnnnnnnnnacccaaatgaattctaaaccaatcaaatgtctgggaagccctccaagaa

SEQ ID NO: 311301 - DNA, 426 bp, Homo Sapiens
  misc_feature (39)..(39): n is a, c, g, or t
  misc_feature (123)..(123): n is a, c, g, or t
atgggcccccccatctttggagcaaggctgatgtgctgntggctgaggctgcccacctgtagtccaaccttcccatcctccgtcaacagctttatctggctcttccttccttcttgacgcccnattatatctcccagtttggtccccgccagttcccagtgtttgtgctgagcctgaaaaggaaaaaggtcagtctgctccatcctgccacatgactgcgagcaatggaaaatcaatcccacgggagagcaggcttcaccccgcaggtggtaaactcccccagagtgctggtggcaccgagccacattccaatcctcaagcctccagctctcccaacaccaggccccgcagctgtcgggcctaaggacttgatagaggggactcctaacttctatctgtgggcctagtaagacttatgaagagaag

SEQ ID NO: 311302 - DNA, 2925 bp, Homo Sapiens
ggaggtgacagggcagcaggagccttagagcatggacggtgccatggggcctcgggggctgctgttgtgcatgtacctggtatctctcctcatcctgcaggccatgcctgccctgggctcggctacaggcaggtccaagagcagcgagaagcgacaggctgtggacaccgctgtcgatggcgtgttcatccggagtttgaaagtcaactgcaaagtcacctctcgcttcgcccactatgttgtcaccagccaagtggtcaacactgccaatgaagccagggaagtggccttcgacctggaaatccccaagacagcattcatcagtgactttgccgttacagcagatggaaacgcatttatcggagacataaaggacaaggtgactgcatggaagcagtaccggaaagcagctatctcaggagagaatgccggccttgtcagggcctcggggagaactatggagcaattcaccatccacctcaccgtcaatccccagagcaaggtcacgtttcagctgacttatgaggaagtgctgaagagaaaccatatgcagtatgaaattgtcatcaaagtcaagcccaagcagctggtgcatcattttgagattgatgtggacatcttcgagccccaggggatcagcaagctggatgcccaggcctctttcctgccgaaggaactggcagcccaaactatcaagaagtccttctcaggaaaaaagggtcatgtgctgttccgtcccaccgtgagccagcagcagtcctgccccacatgctctacatccttactgaacgggcacttcaaggtgacctacgatgtcagtcgagacaagatctgcgacctcctggtggccaataaccactttgcccacttctttgccccccaaaacctgacaaacatgaacaagaacgtggtttttgtgattgacatcagtggctccatgagaggccagaaagtgaagcagaccaaggaggcactccttaaaattctgggggacatgcagccaggggactactttgacctggttctttttgggactcgagtacaatcgtggaagggctcgctggtgcaagcatctgaggccaacctacaagcagctcaagactttgtgcggggcttttccctggatgaggccacaaacctgaatggaggtttgctccggggaattgagatcttgaaccaagttcaggaaagcctcccagaactcagcaaccatgcctcaatactcatcatgttgacagatggcgatcccacagagggggtgacggaccgttcccaaatcctcaagaacgtccgcaacgccatccggggcaggttcccgctctacaacctgggtttcggccacaatgtggactttaactttctggaggtcatgtccatggagaacaacggacgggcccagagaatctacgaggaccatgatgccacccagcagctgcagggtttctacagccaggtagccaaacccctgctggtggatgtggatttgcagtacccccaggatgctgtcttggccctgacccagaaccaccataaacagtactacgaaggctcagagattgtggtggccgggcgcattgctgacaacaaacagagcagcttcaaggctgatgtgcaggcccatggggagggacaagaattcagtataacctgcctagtggatgaggaggagatgaagaaactgctccgagagcgtggccacatgctggagaaccacgtcgagcgcctctgggcctacctcaccatccaggagctgctggccaagcggatgaaggtggacagggaggtgagggccaacctgtcatcccaggccctgcggatgtcgctggactatgggtttgtgaccccactgacctccatgagcatcaggggcatggcggaccaggacggcctgaagcccaccatcgacaagccctcagaggattctccgcctttggagatgctgggacccagaaggacgttcgtgctgtcagccttgcagccttctcctactcattccagctccaatacccagcggctgccagaccgagtgaccggcgtggacacagaccctcacttcatcatccacgtgccccagaaagaggacaccctgtgcttcaacatcaatgaggagcctggtgttatcctgagcctggtacaggaccccaacacaggcttctcagtgaatggacagctcattggcaacaaggccaggagccctgggcagcatgacggcacgtacttcgggcggctgggaatcgcaaaccctgccacggactttcagttggaagtgactcctcagaacattacgctgaaccccggctttggtgggcctgtgttttcctggagggaccaagctgtgctgcggcaggacggggtggtggtgaccatcaacaagaagaggaacctggtggtgtctgtggacgacggtggcacctttgaggttgttttgcaccgagtgtggaaggggagctcggtccaccaggacttcctgggcttctatgtgctggacagtcatcggatgtcagcccggacgcacgggctgctggggcaatttttccaccccatcggttttgaagtgtctgacatccacccaggctctgaccccacaaagccagatgccacgatggtggtgaggaaccgccggctcacggtcaccaggggtttgcaaaaagactacagcaaggacccgtggcatggggccgaggtgtcctgctggttcattcacaacaatggggctggactcatcgatggtgcctacactgattatatcgtccccgacatcttctgagccctctggccagcacgcctgtcctcccccggggccaaggcagaggaggaggacgacatcctgacctgctgctgaggctgtacctccttgactaagctggttccttgtgtcaaagcacctcatgccttccattaaagagaggccgtgtctctcataaa

SEQ ID NO: 311303 - DNA, 1044 bp, Homo Sapiens
  misc_feature (4)..(4): n is a, c, g, or t
  misc_feature (10)..(10): n is a, c, g, or t
  misc_feature (20)..(20): n is a, c, g, or t
  misc_feature (40)..(40): n is a, c, g, or t
  misc_feature (42)..(42): n is a, c, g, or t
  misc_feature (48)..(48): n is a, c, g, or t
  misc_feature (59)..(59): n is a, c, g, or t
  misc_feature (95)..(95): n is a, c, g, or t
  misc_feature (104)..(104): n is a, c, g, or t
  misc_feature (157)..(157): n is a, c, g, or t
  misc_feature (202)..(202): n is a, c, g, or t
gacnccgccntctttaatgnaggcatgagttctttacacnangaaccngcttagtcaangaggtacagcctcagcagcaggtcaggatgcgtccncctcctctnccttggccccgggggaggacaggcgtgctggccagagggctcagaagatgtcngggacgatataatcagtgtaggcaccatcgatgagtccagccccnattgttgtgaatgaaccagcaggacacctcggccccatgccacgggtccttgctgtagtctttttgcaaaccccctggtgaccgtgagccggcggttcctcaaccaccatcgtggcatctggcttttgtggggtcggaagcctgggtggatgtcaagacacttcaaaaaccgaatggggtggaaaaattgcccccaaggcagcccgtgcgtccgggctgacatccgatgactgtccagcacatagaagcccaggaaatcctggtggaccgagctccccttccacactcggtgcaaaacaacctcaaaggtgccaccgtcgtccacagacaccaccaggttcctcttcttgttgatggtcaccaccaccccgtcctgccgcagcacagcttggtccctccaggaaaacacaggcccaccaaagccggggttcagcgtaatgttctgaggagtcacttcccaactgaaagtccgtggcagggtttgcgattcccagccgcccgaaagtacgtgccgtcatgctgcccagggctcctggccttgttgccaatgagctgtccattcactgagaagcctgtgttggggtcctgtaccaggctcaggataacaccaggctcctcattgatgttgaagcacagggtgtcctctttctggggcacgtggatgatgaagtgagggtctgtgtccacgccggtcactcggtctggcagccgctgggtattggagctggaatgagtaggagaaggctgcaaggctgacagcacgaacgctgatgggagggggagtggcatttagaagcggggcagccaggccttccctggagctgctgatccctctgatgggg

SEQ ID NO: 311304 - DNA, 899 bp, Homo Sapiens
ttttggacacggcctctctttaatggaaggcatgaggtgctttgacacaaggaaccagcttagtcaaggaggtacagcctcagcagcaggtcaggatgtcgtcctcctcctctgccttggccccgggggaggacaggcgtgctggccagagggctcagaagatgtcggggacgatataatcagtgtaggcaccatcgatgagtccagccccattgttgtgaatgaaccagcaggacacctcggccccatgccacgggtccttgctgtagtctttttgcaaaccccaccatcgtggcatctggctttgtggggtcagagcctgggtggatgtcagacacttcaaaaccgatggggtggaaaaattgccccagcagcccgtgcgtccgggctgacatccgatgactgtccagcacatagaagcccaggaagtcctggtggaccgagctccccttccacactcggtgcaaaacaacctcaaaggtgccaccgtcgtccacagacaccaccaggttcctcttcttgttgatggtcaccaccaccccgtcctgccgcagcacagcttggtccctccaggaaaacacaggcccaccaaagccggggttcagcgtaatgttctgaggagtcacttccaactgaaagtccgtggcagggtttgcgattcccagccgcccgaagtacgtgccgtcatgctgcccagggctcctggccttgttgccaatgagctgtccattcactgagaagccgccggtcactcggtctggcagccgctgggtattggagctggaatgagtaggagaaggctgcaaggctgacagcacgaacgctgatgggagggggagtggcatttagaagcggggcagccaggccttccctggagctgctgatccctctgatgacgc

SEQ ID NO: 311305 - DNA, 380 bp, Homo Sapiens
  misc_feature (18)..(18): n is a, c, g, or t
  misc_feature (26)..(26): n is a, c, g, or t
  misc_feature (40)..(40): n is a, c, g, or t
  misc_feature (128)..(128): n is a, c, g, or t
  misc_feature (163)..(163): n is a, c, g, or t
aattcccaagccgccccnaaaataantgcccgttcaatgnctgcccaaggctccctggccttgttgcccaatgagctgtcccattcactgaagaaagcctgtgttggggtcctgtacccaggcttcanggataacacccaggctccttcaattgatgttgaangcacagggtgtccctctttctggggcacgtgggatgaatgaaagtgagggtctgtgtccacgccggtcactcggtctggcagccgctgggtattggagctggaatgagtaggagaaggctgcaaggctgacagcacgaacgctgatgggagggggagtggcatttagaagcggggcagccaggccttccctggagctgctgatccctctgatgactc

SEQ ID NO: 311306 - DNA, 468 bp, Homo Sapiens
  misc_feature (414)..(414): n is a, c, g, or t
tctgtaggatttttattggtggcattcagagctaaggtgcggtgggagcacagttgccatgcagctgggcccagaggacatatccagtaaccaagggaaatggagggctgggtgggccatggagtctgacatgtctgcacaggccacatgggtgtcacccacagacatggctcagggacgagggccctgcagactcagcagagtcctggggcccagggcacacctccccctgcatcttgcccaggccctggcaggttacccgtcctgccgcagcacagtttggtccctccagggaaaacacaggcccaccaaagccggggttcagcgtaatgtttttgaggagtcacttccaacttaaagtccgtggcagggtttgcgattcccagccgcccgaagtacgtgccgtcatgctgnccagggctcctggccttgttgccaatgagctgtcattcactgagaagcctgtgt

SEQ ID NO: 311307 - DNA, 1896 bp, Homo Sapiens
  misc_feature (214)..(214): n is a, c, g, or t
  misc_feature (249)..(249): n is a, c, g, or t
  misc_feature (1708)..(1754): n is a, c, g, or t
ggctatggccagctaggtcccctcacccatcactctattcttgaccccaaagcagggccactgcttttacttttgaacctggggtcctcaaaatgagtgtgtgaaaagtccataaatgcaatctggttgaaaacagatgacgcacacacacctacactaactgtctgacagttaatttcgtgtatacaaaaaactaactttaagatttattttntgtaacttttttcaacagggaaaacaacacactcnctcagggaaaggtgaggggttgagaagacaggccctgggtaaaaattcttaggacagcacctggagttgagaggcctgcctaggagagaacacaggcactgccacaccaccacaggggacagctgctgtctgaggtcagcagaccagttcacacgccacgcaaggttgctatagatccaagtcataaaaatcttccagctcatcatgaaacaagtcccactcatcttcagagtctgtttagttcgtcgtcccccacctgcagcccaaaagcataagcaacatctcgcccagctcaaaggtgacaacctcttcttcatcgttgtcaaaggggttgctgttctctctttcctcaatgagttcccagaagtggttccttcgttgggcccggtatctgcttgatgttcccactttctgtctctgtggctcctctctacggccatcagggtacgcatgcttgtaaaaacagttccctccaaatgggcagctcccacgtccttcatcaaaatacctgcacgccttgttgctcattgcctccttgtatttcagaatgagtttctgcttctcttctttctcctccacccagtactcacttggaatgacaaagttagatgtgatccggcattctgggcaggactttatgatcttgctctcaaattgcttagcactcctccacttgcgaatgcacttgagacagtaggtgtggttgcagttggagaggatcccgaagcggcgctcactggggttggctttctcatagaccacctccatgcagatcccacacaccatgtccttgctgcgctgcacggcaaatgagagctccatgtccttctcatgggcctcaatgcacgatttgatatgctgcgatctctgggcagcatccattggatgcaggacctgcagcccacacatgtcacaagaatctccgtggagatacacacagttctccccgtatcggcactctcccactgcagcataggggcacagctgcttctttgtctccacggcggtttgctctttctctgattcttccttggtcactgaggcctgcaggggtgcttcagtgcaggaaggcgcagtacggccacagtagggttgcccaggaacaaactcaatagcattcacccagtcctctgaacctgctcctacagttgcaaagtttgaatttcttgactcagcttcgcctgtattcatttcaacaagtggtccaactatcgatgagagacttgaggaagcagcaagggatgactttgtagttagctctgtagcagttgcttcttcctgtttcaatggtttgctatgttcatatctgcagcggtctccataaatacagtaccctcgctgaaaatacttgcacactacactatacggactgtcagagaggtcatgcgagtagcgacagttgtctccttccttacaaaccccatgcataaaatacctgcaggtgacctgtttagtccannnnnnnnnnnnnnnnnnnnnnnnnnnnnnnnnnnnnnnnnnnnnnngggacggggcggtgactgtggggatcggggtgggggaggctgctgccgccgtcgccgctgccgctcctgctcctgatgttgtggctgttgttccgggagttgcagcctccgccattactgtttatcccacacagcaaagccc

SEQ ID NO: 311308 - DNA, 1223 bp, Homo Sapiens
tttttttaattgttttatttgggaaaagtgcttcttacaaaagggcagctgcaaaatacagagacctctgcaacaattatttgttttttcttaaagtgaaagaatgggtgggatccaaggaatcaaagcagtagatggacaaaccaggagcatccccgagttattttcaggaaacagagcaacaaaacacaaaggtacaatttccaatcaaggaattcttccaacaacttaactttagctaatctcagggattcccaagccctccctttcggtggaaaagtatgacttatcactgcaaacccattactccactacaataaacaccttagaacagagttttgaatcacgtctgtctacctgaaagctcaggggtggaatgaggcaaatacccacaaaaaccaaacacaaaaacccgacaacaaaatgcctcaagtgaggacaaaggtttctcagaaagtgcctgtactggaaaggctagatcgtaaaacattaaatacaactgtgtatccaagacccagtttgtgttattatatgggattaaccaggtagttttaacctctatggctaaccccatttctctatttatatagacagagctagcactgctatattgacaactaccaatatactgctttgccctttaagatctatctgccacacaaggcttaaaccactaaaccaggtttttctactaaggctaagaatactgcatctatgcagggatgagaagcttatcacacacccacacactcacaccatgtcagcccttgggagccaacttccaactctgcattgatgttatgcctctctatcttttatacgtattctttctcaattttcctatcatgcaaaacagtaaaaaatctcaacacattcacacctgattctggttacccagtagtattacttgtgtgcaattaaacaagagaccaaaaccacagaacaagtgcacgtggtagggattacagggtagggaacagatataaaaacacagatgtgcagatttcaccagaaacctcaaggatccacatcccatgtctggggcagagggctattggccagcttaggtcccttcacccatcactcctattcttggaccccaaagcagggccactgcttttacttttgaacctggggtcctcaaaatgagtgtgtgaaaagtccataaatgcaatctggttgaaaacagatgacgcaacacacctacactaactgtctgaccc

SEQ ID NO: 311309 - DNA, 444 bp, Homo Sapiens
ttccgtttaaataaatttatttcttgtagctttgctctgtttagattatgtggtttttgttcagttatgagaacaatctttaaaggatggtggattgttggctagcttaatgaatggaataggaaagtggaaatgtaaaacgtcaggaaacatacattcagagctagatcagtttgttcactgagcctaaactggctaataatccattaaacacaatctcctcagaaaaagcacgaagattctaactgatacacagggtttcctcattcaaataaaagtagatagaccaactaacctagaagctagctgaaatacaaagaagaaatccccattagaatatcccagtttcaagataaaatgcatgcatttaaatgcggtccatctggttgaaagttggcacaagttactaaattcttccccaaaagagaaagcacaaatgaagac

SEQ ID NO: 311310 - DNA, 387 bp, Homo Sapiens
  misc_feature (27)..(27): n is a, c, g, or t
  misc_feature (38)..(38): n is a, c, g, or t
acaacacccatgtcccctttgctgcgnctgcaacggcnaaaatgaaaagcttccatgtcccttcctcaatgggccctcaaatgcacgatttgattatgcctgcgaatctctgggcaagatccattggaatgcaggagctgcagcccacacatgtcacaagaatctccgtggagatacacacaagttctccccgtatcggcactctcccactgcagcataggggcacagctgcttctttgtctccacgggcggtttgctctttctctgattcttccttggtcactgaggcctgcaggggtgcttcagtgcaggaaggcgcagtacggccacagtagggttgcccaggaacaaactcaatagcattcacccagtcctctgaacctgctc

SEQ ID NO: 311311 - DNA, 784 bp, Homo Sapiens
ccggtctctgggagtgcagcttcggctggtgtcatcggtgtccttcctccgctgccgcccccgcaaggcttcgccgtcatcgaggccatttccagcgacttgtcgcacgcttttctatatacttcgttccccgccaaccgcaaccattgacgccatgtcgggttattcgagtgaccgagaccgcggccgggaccgagggtttggtgcacctcgatttggaggaagtagggcagggcccttatctggaaagaagtttggaaaccctggggagaaattagttagaagtggaatcttgatgagctgcctaaatttgagaagaatttttatcaagagcaccctgatttggctaggcgcacagcacaagaggtggaaacatacagaagaagcaaggaaattacagttagaggtcacaactgcccgaagccagttctaaatttttatgaagccaatttccctgcaaatgtcatggatgttattgcaagacagaatttcactgaacccactgctattcaagctcagggatggccagttgctctaagtggattggatatggttggagtggcacagactggatctgggctagagagaggcgatgggcctatttgtttggtgctggcaccaactcgggaactggcccaacaggtgcagcaagtagctgctgaatattgtagagcatgtcgcttgaagtctacttgtatctacggtggtgctcctaagggaccacaaatacgtgatttggagagaggtgtggtctgtattgcaacacctgggactgattgacttt

SEQ ID NO: 311312 - DNA, 634 bp, Homo Sapiens
  misc_feature (212)..(212): n is a, c, g, or t
caccggggcaagttccggaagtggttgccagcaccaaacaaatagggccatcggcttctctctagaaatggctgatgattgatgtgacaatgccagaaagcaattagcaatggcccagatcaagtctgtgcacttccaaccatatccaatccacttagagcacttggccatccctgagcttgaatagcagtgggttcagtgaaattctgtcntgcaataacatccatgacatttgcagggaaattggcttcataaaaatttagaactggcttcgggcagttgtgacctctaactgtaatttccttgcttcttctgtatgtttccacctcttgtgctgtgcgcctagccaaatcagggtgcttaactaatttctccacagggtttccaaacttctttccagataagggccctgccctacttcctccaaatcgaggtgcaccaaaccctcggtcccggccgcggtctcggtcactcgaataacccgacatggcgtcaatggttgcggttggcggggaacgaagtatatagaaaagcgtgcgacaagtcgctggaaatggcctcgatgacggcgaagccttgcgggggcggcagcggaggaaggacaccgatgacaccagccgaagctgcactacta

SEQ ID NO: 311313 - DNA, 617 bp, Homo Sapiens
  misc_feature (14)..(14): n is a, c, g, or t
  misc_feature (62)..(62): n is a, c, g, or t
  misc_feature (81)..(81): n is a, c, g, or t
  misc_feature (113)..(113): n is a, c, g, or t
ggcaagcaccaacnaagtagggccatcgcctctctctaggaatggctgatgagatgtggacnatggcagaagcaaattagnccatgccccagatccagtgtgtgccactccanccatatcccatccacttagagcaactggccatccctgagcttgaatagcagtgggttcagtgaatttctgtcttgcaataacatcccatgacatttgcagggaatttggcttcataaaaatttagaactggcttcgggcagttgtgacctctacctgtaatttccttgcttcttctgtatgtttccacctcttgtgctgtgcgcctagccaaatcagggtgcttaactaatttctccccagggtttccaaacttctttccagataagggccctgccctacttcctccaaatcgaggtgcaccaaaccctcggtcccggccgcggtctcggtcactcgaataacccgacatggcgtcaatggttgcggttggcggggaacgaagtatatagaaaagcgtgcgacaagtcgctggaaatggcctcgatgacggcgaagccttgcgggggcggcagcggaggaaggacaccgatgacaccagccgaagctgcactactagagaccgg

SEQ ID NO: 311314 - DNA, 661 bp, Homo Sapiens
acagcaccctcttcatgtgctcattgtgaggctcttaacccaaaaaaatgtacagggtcctttgcattacacattcatcagaagttcaaaattctggccacagtgcttgtcttgccatatgcactgtgtcttgtataggcaagcgcttccaagaagccaggattcacttgagaatgtgtctctctgtgccaggtctcgacatgacgactactgtgtaggtgagggaggacctttcaaagcactttcttttcccacttactatgtgtgagaagttgctcctgctctagatctcatgtgccagtactcaccaatttgtaaaaggcttagtaccttttaaagctgctctctccatttcaaacttgaacaaaaatttcattgacacattgaagtttggaactacttcttcgacatttcagcaaactcactgaaactcaaagacccacagatcacagtgacacagtttgaaccaaggctgtaccatggcagtcatgcaaagcatgggacagaagaaataccgcggcagtgacctgtgaggataacttccattttttccctcggagagaacagtttacggggcagaggtgatatgttctgccttttgaagattactggcacgcgttcagctttttcacctctctaatcgaaagggagcagccactcg

SEQ ID NO: 311315 - DNA, 430 bp, Homo Sapiens
caggattcggcacgaggtaagtgggaaaagaaagtgctttgaaagttcctccctcacctacacagtagtcgtcatgtcgagacctgccagagagagacacattctcaagtgaatcctggcttcttggaagcgcttgcctagacgagacacagtgcataaaaacaacttttgggggacaggtatgttttcttgcagctgcggttgtaaggtcttggcaagacaagcagtgtggccagaattttgaacttctgatgaatgtgtaatgcaaaggaccttgtacatttttttgtttcaaggtcctcaagcattcagatgtcacttgatgatctgtaagggaacttgctgatttgggaatgtgcttagggaacacacattccttttgacagggtctgtcactgggtgggtgatgaattatacagatgacatgtgc

SEQ ID NO: 311316 - DNA, 539 bp, Homo Sapiens
  misc_feature (225)..(238): n is a, c, g, or t
ttaactaatttctccacagggtttccaaacttctttccagataagggccctgccctacttcctccaaatcgaggtgcaccaaacctggaatgaaaaaaaacgttattcacattttcaaatggctatacacaggtttctgtatagatttgtcatccattggcacaagctaaaaaccactgaaaacagacttcgagaggtaaacctagcactgtccttcgtgaaaannnnnnnnnnnnnnaacagccacagttaacatttcccgtagtcccaagtacacattacttaggtcatgtaaacagcctgggatttatcatgtcggaagccggggatttatcatgtcggaaacttgtcacccacatgccagaatttgggattctggcacacaccacttcttgtggttactgtaatcttccccaccagcctagcaattcactatcagcaataaggaaccaaacagctttagtggtaagaacctaaacagtacagtcagcgataacagaacaagggttttctcagaaacacttctgctagcaaaccca

SEQ ID NO: 311317 - DNA, 363 bp, Homo Sapiens
acgagtgaagcagccagccgatcaatagtcctccatccccctcgagtcctccgattgtcatgcctaggccttgccacaaagacagcacctttatgtgaaaaaaatcttagaaaaaatgcaggttaaagaaacgcaataacctttctttaaaaaagttaaatggatatcttctgggaacccaagccatgaatgcgagtttgccatgtttgaattctacaaaggaaggcatatacatgatcaattatctgagcagaattctagataggttaagtaagggggaaaaatacttcatttgaaatatttcccattatagaacacagtcgcgctcgtgttgactcgtgtccccatggatacccatggcag

SEQ ID NO: 311318 - DNA, 587 bp, Homo Sapiens
gatgtgaaatttgtcatcaattatgactaccctaactcctcagaggattatattcatcgaattggaagaactgctcgcagtaccaaaacaggcacagcatacactttctttacacctaataacataaagcaagtgagcgaccttatctctgtgcttcgtgaagctaatcaagcaattaatcccaagttgcttcagttggtcgaagacagaggttcaggtcgttccaggggtagaggaggcatgaaggatgaccgtcgggacagatactctgcgggcaaaaggggtggatttaatacctttagagacagggaaaattatgacagaggttactctagcctgcttaaaagagattttggggcaagtaattttgtgtctgctggtatacagaccagttttaggactggtaatccaacagggacttaccagaatggttatgatagcactcaggcatacggaagtaatgttccaaatatgcacaatggtatgaaccaacaggcatatgcatatcctgctactggagctgcacctatgattggttatccaaagccaacaggatattcccaataagactttagaagtatatgtaa

SEQ ID NO: 311319 - DNA, 1965 bp, Homo Sapiens
  misc_feature (601)..(601): n is a, c, g, or t
  misc_feature (606)..(607): n is a, c, g, or t
  misc_feature (617)..(617): n is a, c, g, or t
  misc_feature (622)..(661): n is a, c, g, or t
  misc_feature (665)..(674): n is a, c, g, or t
  misc_feature (788)..(803): n is a, c, g, or t
ggtcgtgtgtttgtaatacagcggggtgcgcacacatcatgatgacgccgaggctttttatttgtacacacccccgttggtgtttatcggctcgggcgcgcgaataggtgatgtatatctcccaaaggcggacgacaacgggggcgtagaggtcgcgcgggcgggcgcatagttacagggttcacgacgagagggcgtattagggaaggggcgttgtccaagtgttgggcatagaaactggttataggggaatgtttaagcccgtgttctctcgatagagggtggacagggacgggggcgctaattttgtatattggagacctcccgttggcgctccccccttgggtaaaattcccgatatgaaagcctcgagaaactcccctcctgggaattggtttacaagaccctgcaggtttgcgccccgcggggcgttttttttgtggggggggaaattcaaggggcgtggttctttgcccaggggttttcttgggagaacaagctggtagggcagggggtccgttacctttttgggcccggcgcccccaagaggaaagagttttgaaaaaattttctgggggggagagggcgggggaaaaagggnttttnntttttgggtnttggnnnnnnnnnnnnnnnnnnnnnnnnnnnnnnnnnnnnnnnncttnnnnnnnnnntttttcagtcttcaaatattttttattggaaggccatgcattgccttcatttattgtatttcaaatcactgtacatttacttttgtgaaaacactgcctgcattttctagtacnnnnnnnnnnnnnnnnttgtttcaggaatgtagagaaatatccaacttaaatagcgaaaaagtgcaccataattactgctgcactgcagtcatttctgcaattcccatgtttcttaaataactatcttgtcagataacacacaatataaagagcaattatgaaaaacagacatttacatatacttctaaagtcttattgggaatatcctgttggcattggataaccaatcataggtgcagctgcagtagcaggatatgcatatgcctgttggttcataccattgtgcatatttggaacattacttccgtattgctgagtgctatcataaccattctggtaagtccctgttggattaccagtcctaaaactggtctgtataccagcagacacaaaattacttccaaagctcccattggtgtaatttgcagcactgtaaacaccattctgagtttttgccccaaaatctcttttaagcaggctagagtaacctctgtcataattttccctgtctctaaaggtattaaatccaccccttttgcccgcagagtatctgtcccgacggtcatccttcatgcctcctctacccctggaacgacctgtcaagaaaacaattgcaaattgatcaattatgtctatgacacaaatcattgtggacagaaagaaacagatctattcatggtaggcgtgaaatgtttttacaatttttcagcttaagttttcacattcaaggttttactcaccctccaataccatttaaatggatttgtagacaacgatgtgactcgtaactaccaacatttcctatcagtcatccttacctgaacctctgtcttcgaccaactgaagcaacttgggattaattgcttgattagcttcacgaagcacagagataaggtcgctcacttgctttatgttattaggtgtaaagaaagtgtatgctgtgcctgttttggtactgcgagcagttcttccaattcgatgaatataatcctctgaggagttagggtagtcataattgatgacaaatttcacatcttccacatctgtaaggtgttgcagtgtggcaaaatagcaatgtacggagttttgcacaccacaacagccagaccaaaaataaaaagttagacaattgtattcccaagaaggtacgggctgcaaaaaatacagttaaaatggt

SEQ ID NO: 311320 - DNA, 1994 bp, Homo Sapiens
  misc_feature (139)..(139): n is a, c, g, or t
  misc_feature (192)..(192): n is a, c, g, or t
gagtagcaagggatatggcatatggcctggtggttttcatacccattgtgccatattggagaccattactttccggtatggctggagtggctatcatacaccattcctggtaaagtcccctgttggattacccagtccntaaaaactggttctgtataccagccagacacaaaatttacttcccaaagctcnccattggtgtaatttgcagcactgtaaacaccattctgagtttttgcccccaaaatctcttttaagcaggctagagtaacctctgtcataattttccctgtctctaaaggtattaaatccaccccttttgcccgcagagtatctgtcccgacggtcatccttcatgcctcctctacccctggaacgacctgaacctctgtcttcgaccaactgaagcaacttgggattaattgcttgattagcttcacgaagcacagagataaggtcgctcacttgctttatgttattaggtgtaaagaaagtgtatgctgtgcctgttttggtactgcgagcagttcttccaattcgatgaatataatcctctgaggagttagggtagtcataattgatgacaaatttcacatcttccacatctagccctctggaggccacatctgtagcaatcagaataggagcttttccatgtttgaattcatttagaacccagtcacgctcttgttgactcttgtcaccatggatacccatggcaggccacccatctctcctcatttttctggtaagctcatcacatcttcttttggtttccacaaaaacaatggttttattctccttctcactcatgatctcttccattagacgaataagtttttcatccttttctacgtcatgacacacatccacaatctgaagaatgttgtggtttgcactcagttcaagtgcaccaatgtttatatgaatatagtctttcaggaaatcttcagcaagctgtcttacttcttttggccaagtcgcactccacattagagtttgcctatcaggtcttatttgatccacaatcttccttatttggggttcaaagcccatatcaagcattctatctgcttcatcaaggacaaggtaggttgttcttctcagattggtttttccacactctaaaaagtcaatcagtcttccaggtgttgcaatacagatttccacacctctctccaaatcacgtatttgtggtcccttaggagcaccaccgtagatacaagtagacttcaagcgacatgctctacaatattcagcagctacttgctgcacctgttgggccagttcccgagttggtgccagcaccaaacaaataggcccatcgcctctctctaggaatggctgatgattgatgtggacaatggcaggaagcaaataagacaatgttttcccagatccagtctgtgccactccaaccatatccaatccacttagagcaactggccatccctgagcttgaatagcagtgggttcagtgaaattctgtcttgcaataacatccatgacatttgcagggaaattggcttcataaaaatttagaactggcttcgggcagttgtgacctctaactgtaatttccttgcttcttctgtatgtttccacctcttgtgctgtgcgcctagccaaatcagggtgctcttgataaaaattcttctcaaatttaggcagctcatcaagattccacttctttttaactaatttctccccagggtttccaaacttctttccagataagggccctgccctacttcctccaaatcgaggtgcaccaaaccctcggtcccggccgcggtctcggtcactcgaataacccgacatggcgtcaatggttgcggttggcggggaacgaagtatatagaaaagcgtgcgacaagtcgctggaaatggcctcgatgacggcgaagccttgcgggggcggcagcggaggaaggacaccgatgacaccagccgaagctgcactactagagaccggtagaaatgaatgaggtccc

SEQ ID NO: 311321 - DNA, 1626 bp, Homo Sapiens
  misc_feature (113)..(129): n is a, c, g, or t
  misc_feature (1103)..(1117): n is a, c, g, or t
ccagtcttcaaaatattttttatttgaaaggccatgcattgcccttcattaattgtatttcaaatcactgtacatttacttttgtgaaaacactgcctgcattttctagtccnnnnnnnnnnnnnnnnntgttttcaggaatgtagagaaatatccaccttaaatagcgaaaaagtgcaccataattactgctgcactgcagtcatttctgcaattcccatgtttcttaaataactatcttgtcagataacacacaatataaagagcaattatgaaaaacagacatttacatatacttctaaagtcttattgggaatatcctgttggcattggataaccaatcataggtgcagctgcagtagcaggatatgcatatgcctgttggttcataccattgtgcatatttggaacattacttccgtattgctgagtgctatcataaccattctggtaagtccctgttggattaccagtcctaaaactggtctgtataccagcagacacaaaattacttccaaagctcccattggtgtaatttgcagcactgtaaacaccattctgagtttttgccccaaaatctcttttaagcaggctagagtaacctctgtcataattttccctgtctctaaaggtattaaatccaccccttttgcccgcagagtatctgtcccgacggtcatccttcatgcctcctctacccctggaacgacctgaacctctgtcttcgaccaactgaagcaacttgggattaattgcttgattagcttcacgaagcacagagataaggtcgctcacttgctttatgttattaggtgtaaagaaagtgtatgctgtgcctgttttggtactgcgagcagttcttccaattcgatgaatataatcctctgaggagttagggtagtcataattgatgacaaatttcacatcttccacatctgtaaggtgttgcagtgtggcaaaatagcaatgtacggagttttgcacaccacaacagccagaccaaaaataaaaagttagacaattgtattcccaagaaggtacgggctgcaaaaaatacagttaaaatggttatccatttcctgtaggaataccattgaggttgnnnnnnnnnnnnnnngcacatgtcatctgtataattcatcacccacccagtgacagaccctgtcaaaaggaatgtgtgttccctaagcacattcccaaatcagcaagttcccttacagatcatcaagtgacatctgaatgcttctgcgcagtagggccacttaaagtttcacagcaacctcttcatgtgctcattttgaggaccttgaaacaaaaaaatgtacaaggtcctttgcattacacattcatcagaagttcaaaattctggccacactgcttgtcttgccaagaccttacaaccgcagctgcaagaaaacatacctgtcccccaaaagttgtttttatgcactgtgtctcgtctaggcaagcgcttccaagaagccaggattcacttgagaatgtgtctctctctggcaggtctcgacatgacgactactgtgtaggtgagggaggaactttcaaagcactttcttttcccacttactatgtgtgagaagttgctcctgctctagatctcatgtgcca

SEQ ID NO: 311322 - DNA, 1377 bp, Homo Sapiens
  misc_feature (496)..(505): n is a, c, g, or t
gtccctcaaaaggcaagttttatagaaatcatcactaattggagtttcaagatatggaccgagttctctgctgtgtcgttgcttcttggttcttccatcatctgccctcatctctttttacagaaacatgaagggaaaagagttaccactctaaattgtagcaaatgcaagaattacctttctctctaccattcttggcaggggtcagtcatctgggttgattggaacattcccactgagcttgctgccccaggtggaattccattctgctagaaaattctgtgttggtgaaatatggacagataatgttgagaagataaatgagtaacatttgtgaaattatttgaactcttctaaagaaaagacccacactgattccagggatttttgttaagataattggaatttaaaatatgatattttacttgattaatgtctgttctgactttttttgtcttttggccttggaggggctaagagaaaggattcatagacnnnnnnnnnnaattaatagaaataagtaaaatgcacagaagatgtcaatgtctaaatgtggcatcctatcaaccatcaataaatggtaccactgccctcccccagaagcatccccaatctccactcaggtgggttcagcctctgcaaagctcagcactctgtacctccacccaaatcttgattattcataatgcccctaagccagagtgttagactcagtcaactaatcatgtgctaggtgctgtgcaatctgctgaggatacaaaatgaatagccaacaattccttccttcaaggagctcacctggtgaggaaatagatgcaaaaacaactgattatagcatacagtgaaccctgataaaagtgtgggcccccaaaaaggagaggggctcaatgcttcctaagagagtagaggcagcttcacaaagaagataacactaaaactgaatctggaaaaacaatagcaattatccatattagtaaagagagaaagaggattccagtgaagagaaaagggtacccacagtcatggaggtcaggagaagcaggaaagggtgtacagggaagtaattcaggaaaatctacctcagaaggaacacgggaatgcacaacaaataatgtagcctgagagacaaggccggacctggtttgcaacaactgtttttgccaaaagaggtttgacatgatagagccatcgaagacgtggtgatgaggtgatcttcagaagatgagagatgaggtggatatcaaaatgagagagcaactgaggacaagagctgagaacttaggcataaactaaatgttcctccagtgtgcacctgtgacaggaataaaataacaacctttttaagctcacatcaacctcagatattgcttcagcatc

SEQ ID NO: 311323 - DNA, 1193 bp, Homo Sapiens
  misc_feature (75)..(84): n is a, c, g, or t
gaggaggacctgcttaaacatcacaccttggtgcggaaaagaaggtgtaactttatgcccttatcccaataccannnnnnnnnnatttttaaggattgggctcgcccagggccaaaagacctcattcaggcatatcccggtccaaaaacttttttccaatctcccgcctggttccaggtgtcggttggttgacccttccaatttcccaggggcctgttccaatcaaaaaaggaaggtccatcccctcccggaaggggggccatttaggaggttgggcccgccatccgcactccattagggttttcgggcaagggaggctgccttgtccttggtggagggccatgggccacgctgggttcaccagtctgggccactcctttttccgtgggagccctcgggtaaggagaaaggccctcggggccatgcggtgcccttaccccgcaggaagcaattggtggtgtggccaatcccagagggcagaactttgtcccagagcatggcattgatcacggtgctcttcccattgctcgtccggccaaaaaaagccactttcatgtgcctccgagccagcacctcactgatgcctctcactttggataggtaacctttgacgtccagaacctgttcttctgtggtaacggggtccagttctgcattcctgtacgtgtcttcaaggaaggtggcgctctcctggatgtaggcccccagctgctcaaaaatgccattgatcttcttcttggcagtgacaaagtgcttaagtggggatgcattcacctcagccatgtgtctcttatttttcttgactgtgacgatagagttgcatcgagagaagagcagggacattgcgttttttggatggtgagagatcttcacagggtaggcatcatggacatggctgaagtccaaaaggcaaaaagattctgagttctcttctgtcctgtctcgggttgaggttggctattgattgactgtgttgactccaccagtccttcaccttcccggcctcgcggcggccatcacactcactacgtcaccagcgagctgccaccccggggggaggcgggaggagggaagtggataagcgcgtcaccagtcgctctcagattgccctctcgacccgggtgagctggtggaccctgagcccagccggctcgccccgcctactccttacgcctctgctgccccgcgactcc

SEQ ID NO: 311324 - DNA, 1412 bp, Homo Sapiens
  misc_feature (142)..(152): n is a, c, g, or t
  misc_feature (246)..(246): n is a, c, g, or t
  misc_feature (318)..(318): n is a, c, g, or t
  misc_feature (344)..(344): n is a, c, g, or t
  misc_feature (1009)..(1068): n is a, c, g, or t
  misc_feature (1138)..(1138): n is a, c, g, or t
tttttccaaattagggaggggggtggttccacaacccccgtgggtcccagcaggccatggggaagctctggaccagaaaagcccttccgggcgtaaacgttccccttcaaaggatgaggaagtccacatccgagggcacatnnnnnnnnnnnagggactgatttctcagcatcaaacagcctctgtggaggccgcttaaacttcttccttttggcaaaccagtctttcaagctcatgcgggcctgnatgcgatcgtagtcgatgcgtgggatcatcttcagggagatggtgttctggctgggctccacgtagtccacntgagcaatgtcatccttgtagatgcnccgcttgaggcggacccaggactttggtttcaggttggccacctccttcaccactttgagcacgtctgtcatctccttgatgggcaccatctgctggttccagtagccaagccgcaggttgcccaccccctcaatggcctgcttcacgtgggtctgcttgtaggcctccacgtagatgtagcccttcacatgctctggtgccactactgacttgatctgcaggggcgtgtctgtgaactggtaggcaatgaacttgcgcatcaaggaaatggccgtggcccgttcctccccaatcttacatttgacagtccacagattgggatccttgactcctgggagcagctgctgctgggtgatgtcgtctgagagctcatcagatcctccatacaccgtctctcccacagatgacttggcgtatttcttcatgtaatactcgcccagttcttcttctcgctggtccctccagaggttttgcaggcggcgagccccagaacgatcttcatccaggacaacattatcgatattggaggcttcaatctcttctttctctagaatgtcctctgctccatcctcccactggtcctcgtcctcatactcatcgtcaacatcagcctcgtccagaatgaagcctccatggcggggtttcttggggggtcggtcatcannnnnnnnnnnnnnnnnnnnnnnnnnnnnnnnnnnnnnnnnnnnnnnnnnnnnnnnnnnnggctcttcttctttctcactgcccgctgcactccgccgctcttcgtctacctcggcctcctcgccgtcanctgctgcgctcgctgtcctcctcctcggaaaagttgctgtcctcgctgtccgacatcttccgctgctgctgggaaagacagcagtcttggcgcgtcccacaatcctgcgctccaccccgagcctcagtttccccgctggttccctgggagaagaaaaccctcttagggctgcttccggcaggctcgttttggcaatcgcgaagcggagtgaggaccccctcctactgccacatgctagacctccccagtttccgaatctgttctctacacctcc

SEQ ID NO: 311325 - DNA, 1023 bp, Homo Sapiens
caatttggggggaaccgggggtgcaccaggcaacatggggaccgcgtttggtggtgttttgtccatggtgttcgagccatgagttttcacaattctccatccgggcggttgccatttttattccgggcggcacccccagttttcccccgtggaatcccccagggcccaagttccacctttgtggggtggagagctcgaaaggtgggttttggaaccagggacggctgcaggagggataagcttcaccccccaggggttacccatggccttggtgaccacgttcaccctgctttgcgatctcctcccagcccccacaccagccttcagccagagcacctgccacccttgtgtataagcacggtgccgcacagccccccgcccggcctgccttcttcaggacagtgaaggcgctgtcgtccccaatcaccaccatctccaccgggatgccttcagcccgggcctgctcccgggccaggccgaagttgagccgatccccagtgtagttcttcacgataaggagcgtccccactgtgccggcctgggccacggccctgatggctgccaggatgctgcccactgccggggaggtgaacacagctcccgcgatgaccccagtcagcatccccttccctatgaaaccagcatgggcaggctcatggccagagcccccacccgacagcagtgccacccggcccttgaggctgtccaggtcagaacggagggccacgcggtggccctgcaggagctgcaggttggggttgcaggccaccaggccagcaagagcgtcatcagcacagccagccaccgagttcaccagcttcttggaggtcatggtgtggaggctctgaaacaggctgagttcacaccgttgcactgagctgctggaggatggacaatcctgtgctacctgggtctgagtacagtggaggcagcagcagcacctgcaggagtgggtaacgatacaagctgcggaaggaactcgcagtcgactggccctcgtgccgaattcgccacccaggcctg

SEQ ID NO: 311326 - DNA, 1039 bp, Homo Sapiens
agggttttttggggccattctttccccaaactgaagggaagccgggggttgcccccgggccaccattgggacggcgttttggtgggtgtttgttcaatgttggttggagcaatgaagttttcacaaattttcatcgggggggttgcccttcttttatccggggggccccccagttttccccgggggatcccccaggccccagctccaccttcgtggggtgagagctcgaaggtgggtttggaacccagggacgctgcaggaggataagctcacccccaggggtacccatggccttggtgaccacgttcacctgctttgcgatctcttccagccccacaccagcctcagccagagcacctgccaccttgtgtataagcacggtgccgcacagcccccgccggcctgccttcttcaggacagtgaaggcgctgtcgtccccaatcaccaccatctccaccgggatgccttcagcccgggcctgctcccgggccaggccgaagttgagccgatccccagtgtagttcttcacgataaggagcgtccccactgtgccggcctgggccacggccctgatggctgccaggatgctgcccactgccggggaggtgaacacagctcccgcgatgaccccagtcagcatccccttccctatgaaaccagcatgggcaggctcatggccagagcccccacccgacagcagtgccacccggcccttgaggctgtccaggtcagaacggagggccacgcggtggccctgcaggagctgcaggttggggttgcaggccaccaggccagcaagagcgtcatcagcacagccagccaccgagttcaccagcttcttggaggtcatggtgtggaggctctgaaacaggctgagttcacaccgttgcactgagctgctggaggatggacaatcctgtgctacctgggtctgagtacagtggaggcagcagcagcacctgcaggagtgggtaacgatacaagctgcggaaggaactcgcagtcgactggccctcgtgccgaattcgccacccaggcc

SEQ ID NO: 311327 - DNA, 134 bp, Homo Sapiens
tcctcaacagtttttaaggtaagaaaatatatgtagtaccttccatcttttctatctctttgccacctatccctcaggcctgattcagcatttccttctgtacttacatttggtttcattttcatgcttaaaag

SEQ ID NO: 311328 - DNA, 813 bp, Homo Sapiens
tccctttctggcatttttcccaacattggcgcttctatggcttattttattaccctttcccttgttccaggaatccatcattccccaaatcttttaaatatttcattaatttccataattccagtttcaagttgcctgatagaagattctctctcatgaataagacggaggtcatcctctgtaatttcttcatcctgcacctgcacttgaggttgagtttggctttcccaggatacaagattcctttcttttgagctgtcctcaggaaaactgccagacactctggaactggctcttactcgagcaacaaactctttctctcgctcagcagcctgcctctggaccttctggaagtttgtcagtgatgttgtgaactctgccactaagcgatccttctgtattttcctttgacgctgttcactgggggtggtgggcagagatccaaactctttaatgtacttatctgtttctttggcaagctggttagtatactgctgcttctgttgcaactgttgcctcaattcaggtgaatcttgaggtgttccaagttgattcagagttctttgtatttccacagaacactgtgtgatcttctggatgttagaagagatcctctgggccaactgggcggggtcaccaccaactcctggagtgtaagacatggttgatgttcttattcgctaatttcatcagatgctgtgcagttttctaagcagtcacctggacctccacggctccctcctacacctccgaccgccgtcacccacctaccccggagccctcagctgcaattctcagctgatgggcggtccc

SEQ ID NO: 311329 - DNA, 965 bp, Homo Sapiens
  misc_feature (132)..(132): n is a, c, g, or t
  misc_feature (383)..(398): n is a, c, g, or t
atttatttaaataattatggagataattatagacattaaaaatattgattccagctttttgcctaaatacagtttataccaaaaaaagtgtatccaaatatctgttctccatcagattgacccttaactttntaatatttattttattatgtactgtgacacagaagcaacatatgtatattgtgaactctcatacgataaactatgcgctgaaatttgtttcttcctgatttcaaatccctgcatcctgctattcttgaaagtatataataacagatatattaagatgaattgaataaaatatgaccttttaaatcttaaaaatgcttaatgctctataagtcatatggcgtctagattgcaatcgtatatattctgggttnnnnnnnnnnnnnnnngcaaccttctgaaaattaagtccttgtgcccaggaacaattcttggggttcggaacatcttcccaaaatagctttttcattctttggtgtgatattaataatgttccaagcaataagatggaagaggaaataattactggcacaattacatataaacctgcatcactctggtgtttttcaatatcatcttgagtgaaactattaattatctttggttttcccactccttccataaatattgggtaaagactgaactggtacttctcaatggggataaaatgatcatggatataatacttcttaacagatgaagagattctaagccattttatttcaccatcttcattaagatttttccactcaataataaaatacattagcttgtaatcactgggtgatagtatccaggaaacaatcacacaactgctgtttaaaggataagcactgagtgactgcacgatatttactttgctcataggccatgaaaaggttaaattaaaatttgcaacagaagcaccaattgaattgatggccagaaccgtaacagtatgtgcttgctctgtccac

SEQ ID NO: 311330 - DNA, 421 bp, Homo Sapiens
tgagccaccgtgcctggcctgcatgagtaactgaataacaatgttaacagctgaggagtgaggttatggatttgtttctgtatactattctgtccttcctaaatttatacagtgaatatctattgcttttgtaatcagtaagaaaataataaataagctttgagaaggtaaacattggacgtgtgatttatagatatgatctggttctaaagaaaaaagatgaggcatctaatctgtttagagcagaaatatatatttaagaagccatgcatgtatatatttgtactcctcatgttaaattattattcatgtttttattctagattataaaagagtatgaaagagccatcatctttagattgggtcgcattttacaaggaggagccaaaggacctggtcagtactgggattctagattgtt

SEQ ID NO: 311331 - DNA, 1037 bp, Homo Sapiens
  misc_feature (27)..(27): n is a, c, g, or t
  misc_feature (38)..(38): n is a, c, g, or t
  misc_feature (57)..(57): n is a, c, g, or t
  misc_feature (63)..(63): n is a, c, g, or t
  misc_feature (100)..(100): n is a, c, g, or t
  misc_feature (102)..(102): n is a, c, g, or t
  misc_feature (104)..(105): n is a, c, g, or t
  misc_feature (108)..(109): n is a, c, g, or t
ctattttatactgtaaacatctggacncacaatgacantggaaaagaaaccctaccnctcttnagagtaaagctaatttgtcccgactcatgctggaagntncnncannctacactacctagatgctgtgtttgcccctatgattcctgcagcatatctatgggcagaggaagacaattgttgagttttctcagcagcaatggtggtcagtgtctgcaggtatcggagctgaagggctgcaggagattcagtgatgaccatggaggcttctttcagagccctggatgcattcatttcctcttcggctgcaataaccttggcgcgggcctcgcgggacgcttctgcttctgcagccatagctctctggagctgcacaggtagttcacatccttaatttccacacgctccacctttattccccaggcatcagtggcatcatccagagtagactgcatgttgtgtgcaatttcttctctgtcagagaggatctgagaaagattcttggtgcccagaacattcctcagagtagtttgtgccaaaagacgggttgctgagtcagcgttggtgatatttgccacagccagggttgcattctgaacgcggtaatagaccacaccatccacgctaattgtcactgaatcctttgtgaggatctcctgaggaggaatatcaaatgaaatagttctcatgtccactttgatgaagctgtcagtgcatggcagaataaaaaacaaaccaggtcctttggctcctccttgtaaaatgcgacccaatctaaagatgatggctctttcatactcttttataatctttatgcacatccatattgagattgggaaagttataacggtgaataagaatgagaacgccaccaaaatccatccgcaaggtccaaggcccttactggggctgtccttgaaggagtcggggagccgctgggcttcggagtcccgtgtgtgccgcttctcggccatgctgcccgagacgcagtcgcactcccccgtcctcgttgccaaacccggaatcccgggaattcc

SEQ ID NO: 311332 - DNA, 1570 bp, Homo Sapiens
  misc_feature (1406)..(1509): n is a, c, g, or t
ggaattcccgggatctccgggtttggcaacgaggacgggggagtgcgactgcgtctcgggcagcatggccgagaagcggcacacacgggactccgaagcccagcggctccccgactccttcaaggacagccccagtaagggccttggaccttgcggatggattttggtggcgttctcattcttattcaccgttataactttcccaatctcaatatggatgtgcataaagattataaaagagtatgaaagagccatcatctttagattgggtcgcattttacaaggaggagccaaaggacctggtttgttttttattctgccatgcactgacagcttcatcaaagtggacatgagaactatttcatttgatattcctcctcaggagatcctcacaaaggattcagtgacaattagcgtggatggtgtggtctattaccgcgttcagaatgcaaccctggctgtggcaaatatcaccaacgctgactcagcaacccgtcttttggcacaaactactctgaggaatgttctgggcaccaagaatctttctcagatcctctctgacagagaagaaattgcacacaacatgcagtctactctggatgatgccactgatgcctggggaataaaggtggagcgtgtggaaattaaggatgtgaaactacctgtgcagctccagagagctatggctgcagaagcagaagcgtcccgcgaggcccgcgccaaggttattgcagccgaaggagaaatgaatgcatccagggctctgaaagaagcctccatggtcatcactgaatctcctgcagcccttcagctccgatacctgcagacactgaccaccattgctgctgagaaaaactcaacaattgtcttccctctgcccatagatatgctgcaaggaatcataggggcaaaacacagccatctaggctagtgtagagatgagcgctagctttccaagcatgaagtcggggaccaaattagcctttaactcataaagagagggtagggcttttctttttccatatgtcaattgtggtgttcccagaatgtatagcagttataaaaataggtgaaagaattgttagcttgtaaatactgagagattggtgatttatataaggtaatctgttagtcttaaaatagttaaaagtttgtatttttagattattatgtagtaggttagatccctcttgttttgacttccactgactcattctgaaccccctaagcacccaggccagaggaaggaacctggggctgtaactgccacctgacaccgctgactggctaaatgctttgcagaaagtgatgaccttacaccacaaccagcttctccaggtcatatgtgccttacctccagagagtcttttaaaatttttctgagatggagtttcactcttgtggcnnnnnnnnnnnnnnnnnnnnnnnnnnnnnnnnnnnnnnnnnnnnnnnnnnnnnnnnnnnnnnnnnnnnnnnnnnnnnnnnnnnnnnnnnnnnnnnnnnnnnnnnaaccgggctcatgaccccatgcccagctaatgtagggataataatcactggtataacataa

SEQ ID NO: 311333 - DNA, 1266 bp, Homo Sapiens
  misc_feature (37)..(37): n is a, c, g, or t
  misc_feature (107)..(107): n is a, c, g, or t
ttctttccaattaaccgtcccataggagtatcacatntagtccatcttttatagccaaatttaatgtcactacaaaagaaagcaaaattggacgatagtcacatgtnattcagcatctagaaagctgtaatggcaatgaagatatctatataaatcaggggtttaaaatttttttccttaacagtctcaggtatcaaccagaagaagttgctgatgacccatttactgatgattttcgaggtctattggcaaaagaagattggtggttaccgctggggctgttgctggttccattcatagtactggaaatgtgaggaaactgtggatgaggagactgcactggagtactggggctaggcaaacaagaagaggtggagggaatacctcctgctgggctgttggccttgtcactcccagagtcactttccagttctccagcatttgtcagtccatctctctggtgactgatcttcattcttttacaagtaggtcgaactctgtatttcaatggaagtggaccattccttctccaggtataaatgtaggcaatatccattagtgtataataatcctttaaaggttcctcctcatacatgacatcaatctggaaagtattaggtatgtccattttacttctgagaaactttcttaagtgcatcacagtcattgctgctgggcatcgtaagtatcttttatcattcacctcctccttagatttctctttgtctttgtttactttccgatccaatctgttctggtcaaagaattcaatggataagcttattatctcatcatcagttataattctcttatcttcatctgcaacctctcctctatcttcattagagccattggcagcatcagcagaaggatgagctgcataaaaatcccttcttctcttcatttcatttttgaaaagccctggaactaatttgtatacaatatcttggagagttttatctgaccttatattcagtagtggtctggtcttgtgaacttggacatcacaaataggacaatacttgctggtctccaggtaacgaacaatacacgttttacagaaggaatgtagacattctattatggttgtggcatcaatgaagtaccctccacaaagcacacacatcaggtggggatttagctcagtgatcttgattctcgttgttcgatgcatttctgcttgataaaaaatcacttacacttggcatccggccaccgctgcaactccgcgcggagcccggcccgagccccgagcctcggcgggcg

SEQ ID NO: 311334 - DNA, 1271 bp, Homo Sapiens
ggggagtacctcacgaaggggacgtgggaaagtgttagcggggaacgctgggaaactcccggcctccgccaccatcttgctttcctttaatccggcagtgaccgtgtgtcagaacaatcttgaatcatgaagctactaaccagagccggctctttctcgagattttattccctcaaagttgcccccaaagttaaagccacagctgcgcctgcaggagcaccgccacaacctcaggaccttgagtttaccaagttaccaaatggcttggtgattgcttctttggaaaactattctcctgtatcaagaattggtttgttcattaaagcaggcagtagatatgaggacttcagcaatttaggaaccacccatttgctgcgtcttacatccagtctgacgacaaaaggagcttcatctttcaagataacccgtggaattgaagcagttggtggcaaattaagtgtgaccgcaacaagggaaaacatggcttatactgtggaatgcctgcggggtgatgttgatattctaatggagttcctgctcaatgtcaccacagcaccagaatttcgtcgttgggaagtagctgaccttcagcctcagctaaagattgacaaagctgtggcctttcagaatccgcagactcatgtcattgaaaatttgcatgcagcagcttaccggaatgccttggctaatcccttgtattgtcctgactataggattggaaaagtgacatcagaggagttacattacttcgttcagaaccatttcacaagtgcaagaatggctttgattggacttggtgtgagtcatcctgttctaaagcaagttgctgaacagtttctcaacatgaggggtgggcttggtttatctggtgcaaaggccaactaccgtggaggtgaaatccgagaacagaatggagacagtcttgtccatgctgcttttgtagcagaaagtgctgtcgcgggaagtgcagaggcaaatgcatttagtgttcttcagcatgtcctcggtgctgggccacatgtcaagaagggcagcaacaccaccagccatctgcaccaggctgttgccaaagcaactcagcagccattttgatgtttctgcatttaatgccagttactcagattctggactcctttgggatttatactatctccccaggcacagctgctggagatgttattcaggctgccctttatccagtaaaaccatagcctcaaggaaacctttccaaccagatgtccaagttggccagaaccaaccttaaagctggc

SEQ ID NO: 311335 - DNA, 1686 bp, Homo Sapiens
  misc_feature (66)..(66): n is a, c, g, or t
cccttaagttcttaattaggtctgtctggagcgttttccttctgttccaactagactatttttccnggttctccctttaaaggccttgttagatccaaaaggatttccaggccccttaataaactcctttttggattagcttcgttggggaaaaatgttaagttaaaccactttaaacaggaagtttttattgactttaggtcagctgggaataattacctgcatttatgccttattttacctcactggaaaaaagacaaatgatatattagagacttctgactttcatgtgtttgctgctctgggctgagagaacgttcagctctctcctgtaatgtgtgcatcagtattacaactcatcaacaaaaggtgtatgtcccaaatttccacttgctgccattgacttctggccagaaacaaacttctttgccgcatttatgatatcagcattagccactgaatcaatctgctgaaggactgtggatggtggcatgtaagaaccagcaactagagcctgggacccgacttcttccaggaaacactcagaagactccactgacattaggtatccagctttcagcttgttcttggcagcttggacatctgtgttggaaaggtttccttgagctattgtttttacttgattataggcagccttgataacatctccagcagctgtggcctgggagatagtataaatcccaaagagtccagaatctgagtaactggcattaaatgcagaaacatcaaatggctgctgagttgccttggcaacagcctggtgcagatggctggtggtgttgctgcccctcttgacatgtggcccagcaccgaggacatgctgaagaacactaaatgcatttgcctctgcacttcccgcgacagcactttctgctacaaaagcagcatggacaagactgtctccattctgttctcggatttcacctccacggtagttggcctttgcaccagataaaccaagcccacccctcatgttgagaaactgttcagcaacttgctttagaacaggatgactcacaccaagtccaatcaaagccattcttgcacttgtgaaatggttctgaacgaagtaatgtaactcctctgatgtcacttttccaatcctatagtcaggacaatacaagggattagccaaggcattccggtaagctgctgcatgcaaattttcaatgacatgagtctgcggattctgaaaggccacagctttgtcaatctttagctgaggctgaaggtcagctacttcccaacgacgaaattctggtgctgtggtgacattgagcaggaactccattagaatatcaacatcaccccgcaggcattccacagtataagccatgttttcccttgttgcggtcacacttaatttgccaccaactgcttcaattccacgggttatcttgaaagatgaagctccttttgtcgtcagactggatgtaagacgcagcaaatgggtggttcctaaattgctgaagtcctcatatctactgcctgctttaatgaacaaaccaattcttgatacaggagaatagttttccaaagaagcaatcaccaagccatttggtaacttggtaaactcaaggtcctgaggttgtggcggtgctcctgcaggcgcagctgtggctttaactttggcctcgtgccgaattcgccacccaggcctcgctc

SEQ ID NO: 311336 - DNA, 575 bp, Homo Sapiens
ggaagcatggtatcaacgcagagtgccattacggccgggggagacaagatggcgctgcgggcgatgcgggggattgtcaacggggccgcacccgagctacccgtgcccaccggtgggccggcggtgggagctcgggagcaggcgctggcagtcagtcggaactacctctcccagcctcgcctcacatacaagacagtatctggagtcaatggtccactagtgatcttagatcatgttaagtttcccaggtatgctgaaattgtccatttgaccttaccggatggcacaaagagaagtgggcaagttctggaagttagtggttccaaggcagtagttcaggtatttgaagggacttcaggtatagatgctaagaaaacgtcctgtgagtttactggggatattctccgaacaccggtgtctgaggatatgcttggtcgggtattcaatggatcgggaaaacccattgacagaggtcctgttgtactggccgaagacttccttgatatcatgggtcagccaatcaaccctcaatgtcgaatcttcccagaggaaatgattcagactggcatttcggc

SEQ ID NO: 311337 - DNA, 858 bp, Homo Sapiens
aggagatctcggatgaccgcaagcttcaaaggatggttgccttccaaaaaggaaaagggtccatgccccattcaaaccgggggtttccaggaggtttgaaaaagggagccttgggggggcccagccctgcctggcattttgaagctgtcggtgggagttttgtattcccataaatgtggttgggaggtaggttaagcactcgccgaagtgtgtcccggattcgggctgtggttgcttggtcactggcagtcttattccatattgaaataatgtcttcctgaaagcggacagacaccacagccccacagatctcctccccaaccatgaactgttcccccagcatggccaaaatgagattctcccagcaacgggaggccaagcccttccgcagccgaataatccacttgccaccatttttatttgcatcatcctcccacatgggtttaattccttctttgaagagatggaagtcactgtggcctgtcaggtccccaggacgtaccatgtggctataaaacctccagaactgctccacagaggcaaaggtgccaatctgtttgatattctgttcatagctctgtgagctcgtgggacggccgggggttctcctggagtaccaaaaagtgtagttgtactgcaggggatgctctgccggtccagggacaacagcctttctcttgctactgctctgattcttgtctcgttccgttttttccttctcaccatctttctgtgtgctgttttcttcattctgatcatggtccccactgtcatcatctttcaaagcgtcgaacttgttgttcatcctctcgccgccgctgtcgccactgcctcagggagtgacttccgctccacccc

SEQ ID NO: 311338 - DNA, 332 bp, Homo Sapiens
  misc_feature (197)..(197): n is a, c, g, or t
  misc_feature (321)..(321): n is a, c, g, or t
agtttagcaccatttattaagtgatctcagctgttgttgtagctgctgcgtgtcagcctgttcttaaaacataaaatgctcttccaattcctcttgtccaggacagaaggatcttccaggtagcacgccaacagaacaagagactccgatgacgccagcttcaatgatggtgccatccagagagggagagggtcatnggcacattcaaccgcggcttccagaggttttgaaaaaggagcctttggggggcccagcctgcctgggcatttttgatgctgtcggtgtgagttttggtattccataaatgggttttggggaggnagggttaagca

SEQ ID NO: 311339 - DNA, 463 bp, Homo Sapiens
agtttagcaccatttattaagtgatctcagctgttgttgtagctgctgcgtgtcagcctgttcttaaaacataaaatgctcttccaattcctcttgtccaggacagaaggatcttccaggtagcacgccaacagaacaagagactccgatgacgccagcttcaatgatggtgccatccagagagggagagggtcatggcacattcaaccgcggcttccagaggttttgaaaaaggagcctttgggggcccagcctgcctggcattctagtggaagtgcaaaaggttggctcattgggagaggaaagagagggggacgcaagggaaagtagcatctgggtctcaaagagggttggtcttctggtctctacagctacagggctgaagtcccagaggcagacctctggataaagcagagagcagcaggccagtctttctagcagactaaggcaaaaacccacaggc

SEQ ID NO: 311340 - DNA, 537 bp, Homo Sapiens
  misc_feature (103)..(156): n is a, c, g, or t
  misc_feature (176)..(232): n is a, c, g, or t
  misc_feature (240)..(253): n is a, c, g, or t
  misc_feature (257)..(297): n is a, c, g, or t
accagtctgagtaacatagtgagacctgtctcataaaatcaagcatatgtgcacatcatatatatacattcagtcaaattaattttttttgagacagagtctnnnnnnnnnnnnnnnnnnnnnnnnnnnnnnnnnnnnnnnnnnnnnnnnnnnnnntgatgttctgggctcaagannnnnnnnnnnnnnnnnnnnnnnnnnnnnnnnnnnnnnnnnnnnnnnnnnnnnnnnncagctaannnnnnnnnnnnnngaannnnnnnnnnnnnnnnnnnnnnnnnnnnnnnnnnnnnnnnngagcatgatttttgtttccatttatttctattaataataatatgatacttgttaaattgatttattgataattgacagcaggtgatcttttttttaaggaaaaacttacggacaaaaaaacccaggactattctatttactaacttagtttttggtatcattcttattttaagtagttatgaggatactttttctgcattatgtttcagaagcactagtattctagaaaagcgtagggcc

SEQ ID NO: 311341 - DNA, 330 bp, Homo Sapiens
  misc_feature (44)..(44): n is a, c, g, or t
gtgatcctttttttaagggaaaaaccttacgggaccaaaaaaanccccgggacctattcctatttacctaaccttagtttttggtatcattccttattttaagtagttatgaggatactttttctgcattatgtttcagaagcactagtattctagaaaagcgtagggcccaggcagacatggtggctaatgcctgtaatctcagtatttggggagactgagggaggaggattgcctcagcatagtgagacactgtctctactcaagattaaaacaaatcagctggatgtgatggtgcatgcttgcagtcccagctactttggaggctga

SEQ ID NO: 311342 - DNA, 703 bp, Homo Sapiens
  misc_feature (388)..(609): n is a, c, g, or t
  misc_feature (635)..(655): n is a, c, g, or t
ttaaacatgtataagtaaagattaagtggacaaatcttaatagcctgaagactgtctacatgtgtttcccatgtaattcctagtaatgcaaagagagagaacattcccaatagcttctcaggcacaaatttgccctctcagttaatactgcataaatgtgaccattatcttgtcttttatcatcatgtatgatgtttggttatgaacttaacaacataattctacagtatttcctactgtgtatctggtatgccactgccactcaaggtttctttgagagggagactatatatttgttactattattaatgaatctatttccatgactgctgtgaaaaacccaggctgagttaacagtgatgagctctggccaggcacagtggctcannnnnnnnnnnnnnnnnnnnnnnnnnnnnnnnnnnnnnnnnnnnnnnnnnnnnnnnnnnnnnnnnnnnnnnnnnnnnnnnnnnnnnnnnnnnnnnnnnnnnnnnnnnnnnnnnnnnnnnnnnnnnnnnnnnnnnnnnnnnnnnnnnnnnnnnnnnnnnnnnnnnnnnnnnnnnnnnnnnnnnnnnnnnnnnnnnnnnnnnnnnnnnnnnnnnnnnnnnnnnnggacagagcaagactctctcatctcnnnnnnnnnnnnnnnnnnnnngctctcaagcatgtcagttcaaaaaaaatttttttttaagtgatgagt

SEQ ID NO: 311343 - DNA, 348 bp, Homo Sapiens
atttcattcaggtgacaaactcatgctgaggttcccaatttttgtctcagagctaggatattcctgcaactgcatccaagcgctttctccaagcgttcggggagccgccggaactcttcttccaggcaggcgttccgagactccgcacaataggtacctactcttggggttttgagccgcagtgtctgcctctgttcaagtatccaggctcaggtacagacctttcagtgcaggcggcgggaggctgcgaacacggaggactcctctctcaggcatactgcctgcccgggcggcggcgcctgacagattgctctccttgggatcggcggacatgccctgggcgctccc

SEQ ID NO: 311344 - DNA, 949 bp, Homo Sapiens
  misc_feature (137)..(137): n is a, c, g, or t
  misc_feature (162)..(162): n is a, c, g, or t
attttcgaggttttagaaccgccagacaaaagtcaccaggccattctgcttaccaggttgcccaagatcctggcccagaagggctaagtgggggaaactggcttcaatttcccttggctccccactacccagtcgcntggtataggaacccccccaacccancataaacagcaaccagtgatgcaaacgtgacaagtaagatggaacccacactgaaggtgggagatctctggtgaacaggccaggctgctatccatctcaaagaggtagaaacaatcttggactttgccacgctcctcagacacagggttaaaattgtccgctagggtgtgtcgattgcaggagatcatcaccactgcacgacgctgctccttgccacagtggttgtcatattcatcaccccctttatagatcagcatgatccaattacttccgttgaagatgtgagtctcgttgagtctccctaccactgtctccttcccattacttttgttgatttgcaccaggcctgccccagaagtgtggttgccagcttcccggcacaccctgaagatgtagatgtatgtgtctgaaccctggcccacagtgctctcaaagcttttattaaacagtggtttcagcctcttcactagagccaactctttctctgactctttacccttttctcctaccaagtcgcaagttttttcttctgtctgccaggattctctcactgccacagccaggagtagtagtagcagtccagtcctccagcagctgtagaaagggaacaacatcgtgtcgtgggaaactggagtagccaaagctcagaatccccagtgaatacccttctggggatgggagacggggccagctaggggccggccgcagaccccggtcccagagctagtttcagaggccagcgttccccctagcgcctcgctgtgccccactctgggaaccggaaaag

SEQ ID NO: 311345 - DNA, 1009 bp, Homo Sapiens
atgcggactgttgtgtgcccgggggggatataaattttattttaaagtttatatttccctgcaggatagccaacatacatcttttccttacccggaggcaaaatccattttccaaaaaacgtggacattgccccactgcattaagtttaaagtgctccctatatatatggccagtaaaagtaggcaaggaaacttcacaacacattccaatctttaatatctcaaaaatgtttccaaggcaacattattaaaataattataccacagtccctaatataacatcaagctccagtaggaaggtacagagagggcaggaagtttccatccagtctggtttaggtgctcttcttttcttcacccagtaaattcacggtagctttcttcgcttctttagtgatggcatctgcagtctctttggccttgtctttaaggtccttgaccacactgtccatctgggactcgtgcttcaggaagaaaggacggatgatgcgcttgtagagcagttcagccccattagaagggctcggggccatgcaccacaacaggaagccacacttcagcatgtagtagaaggggaaccatgacaggaagatatcagagaagaattcagcaatgctgaacacaccatacactacccagtaggtcagccactgggtatcatcttctttgttgggactctctatagctttaattgagatgtaggctgggtagccaaatcctatcaggttgcagaggagagaggctccataaccgaacaccaggtacaaggccaccagtccgatgacaccaagagcgatgaagctcctgttcacgccggttttggcctcgagcttggccagaaggtcagtcatgcagttcttctcgtgcaggaaccggtcgaacctctccctcatggccgcagacatggcggggaccgtctcgccgctcggggctgttcctagtgccggatagactggagcggcgactgcggcggagcagcggcaggcggggaccgcggcgcgtctacgcc

SEQ ID NO: 311346 - DNA, 622 bp, Homo Sapiens
ctttctctccttttttaagtggaggttttttggtttctatcacaagaagagatggtggtctttcattggaagactgatttggaggatttttttgatctgcaaatcttgaagatggcttatagattttacctcttttttcatctgtttcatgttcttctttagctgcattaacaacaccccctcgcacaaatgttttcactttattaccatcacttccttcaaaagcagcaagaaactcctcataaatctcagcagctgccttttcatcctcctttttctttaattcttcctgttcctttttacttaaagttcgcttagctgtactcatttttccaatactgaatgctttaagtttgttttccagaagaggtcttgagagattctgatgaggagaatcacaaaggctttcacgggcactttcattcctataattatgttttcttgggctcttaggtcgtgtccgacttggcatatcactatctgagggtccagatgcatccatatgtgcatctgaagatccagatgaatgaacatctgatgatctcgtctttgaactggccttctgagatccgcctggcgttttgtccgccatcttgagctttgcccctccttcggcggcccc

SEQ ID NO: 311347 - DNA, 505 bp, Homo Sapiens
  misc_feature (43)..(43): n is a, c, g, or t
  misc_feature (79)..(79): n is a, c, g, or t
tcattaggaaagtactgtctctgaatggttaggttagagatanagccatctgacatatcctaagggaccagattctccnactcactccactcagtattcagacgtttcattaatttgaatgcatttactggatgcccaacaaatccttctggatcttttgtcgctgtactagttagccgatctaacttctctgcccatttttttatttgttctaacttgtcctcttctgccttaatataatctttcagagaagtcaccagatctttctcagtatggatcaaatcagtcatctgaccaattgaagtaaaaaagcctggatgagccaaagactggggaagcagaattcctataattaatatataccagatcatcttggaagatttaattttacaggatcacacacctggaaagtgggacgagagggcggcgcgctcttcagcccccagtcgcctccactcggagcggctacttcctaccctcagcccgctggcggcgcgactgggcc

SEQ ID NO: 311348 - DNA, 688 bp, Homo Sapiens
  misc_feature (600)..(600): n is a, c, g, or t
gacctcttatttatggtgcttttcgtcctactgatgcctacattttcaaatggttgttatcaacagcttgtggaaggctgattgttatgatgggaaaagaagagggctagggtaattacgaggagcacagtcattggaaggaatgttgactctgaattaaataagtaattgacagacaagaacaactgaaaaagagagagagagaaaatgggaaaaatgtgtagtttggatcttaacaagattaaaagtgtcagtgatgatatgagatatgagtttctgaaatcctacacttgaaagattccacctgcttttttatgaccagactgagtgctccttaagttgaataccattgaagaagtgcctgccctaaaaccctggttttgcttgtcactaggaggcatcttattttcacttgaacacagctatttctagaggattcagggcctttgattgtgtttctgtttggtttcttttgtgtttgtgtgttgctggttgtgctgagatgtaggaatgccataggaaagtgtcaagtgatcctgctgaggggtaagagactcagcagaccacttcattcaaactgttgcttgcactgagcacggngctctttctttgatcttcttggcttcaaaacaaattagaccaaggcccaagcttcataggcagatgtttctggttgctggcttgtgtc

SEQ ID NO: 311349 - DNA, 2062 bp, Homo Sapiens
aatggccactttggtaaaaacacacagtgttcaaacctatgaaggattacatcctttggacaggttttattcccaggatatcaaaccccttggccatgacagcagctactgcttcacatagcagcatacgccacatgttcaccttcaatatttttccagtctgtctatctttctccacacagtagcagctatcatagaactctgtgaaagcagttgccagctcatatatataatcacagagagtgtggagaaataagtcatctaaaatcttttgcagaatctcagggaaccgtaaaatgcaccggcctagtttccattccttctcatgatccaaaagaatcttggtttctcgagcagctttttggagcatttcttcatcaatattggccagacgtgcaatagacctgattctagtgaaggcatacaacaagtaagcagctgtatttcctctgtcatctagcattttgtcaaaggagaagatgtagtcattcaaccggttatgggaaaggtcagcatatttgatgcagccatatgcaacggatgtctgagcagcattcaattcctctgcagttaagaccttgtctctttctttttccttcaacttgtccatggatcgttttagtccttctcccagaagatccatgaggcgcactgtttcacccgaacgtgttttaaactttttcttgtcttcccctagcaccacaccaaatccagcatggaagactcgagttactttagggtcataccaaccaatcatttgagcagcagcaaatattgtctggaagtgcacagattgtccattgtccacaacatagataatcatatctgctttttcctcaaatagtctttgtttaatagcagccaggtcagatgtatcataggtataacctccatctgattttactatggttaatggtatggaacaccctgggacaaatacaatctttctgccatcatccacctgcacaaatcctctatcttcaaattcctttacaatatcattcatcctatcttgatagaaggattcccctctctctattaaagagacgtccaatgcatcatagattttatttaactcttggcgggagacatcacagataagcttccaagcttttgtaatatctgggtttttaccctggagcagaactacacactgatatgctcgcttcttaaattcctcctcagtatcaaacctcttcttagattccttataaaagacctgaagatccccaataggaggtgaaactgttagataatctggaaatttgtcttgcaggtgagcgatgagcatgccaaactgggtcccccagtctcctacatgatttaacctgagcacgtcataccctgcaaattcaaagaggcggcttatactctctcctatgatagttgacctcaggtggcctacatgcatctctttagctatattaggggaggaaaagtcaactataacctttttattctctcccagagcaggtagttgaactccattcactagaagactggtcaattgttctgatacaaaatcctttcttaagtggacattaataaaaccaggaccagcaatttcaactttttcaatacattcattgtctgggaggtgtttggtaatgttttcagcaatttctcttggattaactttctgttccttggttttgagcatctgagaaatacccatagcactattacactgatagtccccaaacttggcctgctgacttggtgtcactagcagaggaggattttccaaatctggatatgcagccttaattgcatgaccaaagacctcttgtaggcggctaataatgttaatcatatttttagttggtttgttcctttctgcctgaagactctttcgaagaatattcagtcgatactttaattttaaattttcttcttgtaactgctccaaatttggagaagctcctaaacagccacagtttttcaaccggtcaatttcagcagtcagagatttaatctcttcttcctgctgcagcagccgcgcggagcactcagacaccagtatgtccatcctcccatcagcgtctcactcgccaagtggccc

SEQ ID NO: 311350 - DNA, 537 bp, Homo Sapiens
  misc_feature (18)..(18): n is a, c, g, or t
  misc_feature (44)..(54): n is a, c, g, or t
  misc_feature (75)..(75): n is a, c, g, or t
  misc_feature (84)..(84): n is a, c, g, or t
  misc_feature (92)..(92): n is a, c, g, or t
  misc_feature (105)..(105): n is a, c, g, or t
  misc_feature (129)..(129): n is a, c, g, or t
  misc_feature (138)..(138): n is a, c, g, or t
caacccctaaaaaagggncccctaaaaagggtaaaaaccaaaannnnnnnnnnnaaccccttcccacaggttttnccaaactgngggcaaanggccccttttccnccgggggataccacctggtaaagngtaattaanccctggtaaatggccatgatggataataatcccttaaaaaaatccaaccagcccaagagtccatgaccaataccatcaccctgagaaataccccatagcactattacactgaatagtcccccaaacttggcctgcctgacttggtgtcactagcagaggaggattttcccaaatctggatatgcagccttaattgcatgaccaaagacctcttgtaggcggctaataatgttaatcatatttttagttggtttgttcctttctgcctgaagactctttcgaagaatattcagtcgatactttaattttaaattttcttcttgtaactgctccaaatttggagaagctcctaaacagccacagtttttcaaccggtcaatttcagcagtcagagatttaa

SEQ ID NO: 311351 - DNA, 1199 bp, Homo Sapiens
  misc_feature (29)..(29): n is a, c, g, or t
ccagggtgcagccagcagccggcagcttncacctcataagttccctccacttcaggggctgtctccagctgggccttgatctctgcgatctccttagggggcagtgaagatacttgttccctgaagaagcatggggagcagctgcctgaggcggggaggtgggtagtatgtccccagcgccatacttaactccaggtcatagcccttagcgcggtcaggtctctctccttcctctatccgattggtcaccacagggtttccggtgatccgggtccgcttgaagggagtcatgggcttcagctgtgcagccagggggctgtgggcgacggcagccaagaagcgggcaatgtagaatgtgccggctccttctgaacccgactccccaggtcccagcagctcccagagcactgtggctgggaagtagcccacaaagctggtcttacaatggacatggagttcatagcattcaccggggcccagtggacagggcaactcctggtcttcattgtagaaagcaaactggggtgtccggcagagtgggaagaggtgagtgagggtaacagactgggttccgccattccgaagcctcagggtcagcacctctttgcggttcaaatccaggcggataaggagctgcccatctcgggcttcatggggcccctggacttccacatccacaccatgtttcccatgaagatactcagccctgtcataaaagatcttggctagcagtgacttgtggtgtttgctgatatctgaccccagcttcattctcctcttttctgggaaccgcacgtcggcccagcggtcgagtctgaagaacctgacccgagtcttggtgacgtaggccagatttgcaatcttcattccatacagcatggaggagaagccaggggcgggggtcccaaagctgatcttgaagtcgcggttataaatggtccgcagccgctcgcgatctgtctccatgtccagtccccgaacgaccaggaaactctcgaaacactggcccgcctcccggagctgccggcagctgaacttactgggcatcgcggcggcggctgcggcccaggcaggagggtccgtggaaatgaaactgaaagtcgccgctgcagctgagctttcccttcggtttcttcgtcctatcccctccccctcttcgcattaactctttcctaaagcgtctgacccctccctcaggg

SEQ ID NO: 311352 - DNA, 1031 bp, Homo Sapiens
  misc_feature (12)..(12): n is a, c, g, or t
  misc_feature (24)..(24): n is a, c, g, or t
  misc_feature (63)..(63): n is a, c, g, or t
  misc_feature (72)..(72): n is a, c, g, or t
  misc_feature (984)..(984): n is a, c, g, or t
  misc_feature (1003)..(1003): n is a, c, g, or t
catgtattattntgccgtccagtntagaaactcattcagttttcattttcttccttcagacgnttaatcatntctaaagctccttggttttcttcctcaaccttccgcaagctacaggtcaactgctgctgaatgttgagtagcttctctctttcaaagcggcccctgttcaagaatacctgtgcacttctgctccagttcaataatttttccttcctgagtggtgggctcttcattctttactcgctcttgtaaaagattcatcagcttctcattttcttgacttagctgctctgccctctctcgatgctgatgaaaggatgtctctaaaatcgtcttttcatccaccagcttctcattttcagctgtcaattcctgtaccatttgttgctggtctgataattcttgtagagtagcctgtagttcttctgcagtgctatggtggttttcttccatcttttgtatcttctctgtgagggaagccagggacaattcacttacgctgtttggggaactcccagcagtagaacactttgaactcttaaaggggttactggtggaggacaggggccttgagggtgtctctgctgtaatgtgctcaaagtcggaagcatctggcgacaaagaagctttggtaacatcgctacttgaggagcctgatgtccgtaatgcatttccatgtatgttttttttatactcatcaatgtcactggacaactgatttccagttgggcttccgaagcttgactcttgagttatggatgttgggcagctgctgtcgccagtgtgacttgctgccccttctgaatttggggagtgctcaagatagatcagtttctccttcaggacccggttttcttcctctagatcggaaagctctttctgaaagttcttgttcttctcctcaagagctcttatcatagggttccgtgtcacctgggggagactgatgttccatcgacatttggggcccaaagcatcagntcccctcagcgttcagagntcccttttctctttggtatttctttagg

SEQ ID NO: 311353 - DNA, 799 bp, Homo Sapiens
atcccttttaaccccggtttttcatgaagcctttaaaatttggcaagagggcccatttagggaattccccagtcaaaaaacctttataactttcttcatctccagcccctgcaagggacagactttgaaagaaattttaacagaggaaattctcttttcatttgtgatggtgcccctaatggatgcagtgtcaagctgatagatgtctattttattctgtatgataactacatactgctctcctctgggggaccattctactatgtgagcattttgttttatattttttatgaatgctgatcttccttctacaagattccacgttcttaaagttttatctgtaccaaccgacagggccaacttgccagatgggtgaatagaaaggaaggtcacctgtcctttgtgagctttaattgacttcaggcattcccatttctttgcatcccagatacagatgagtccatgttccgctccactgattaaatgcctgttgccatagaatttcaggcaagttattgtaccactgtgatgcactagagccccatgctcaatcttctttttcatgtcataaatgtgaattgtttcatctttgctcccagtgaccacaaaacgactatttacagctactgctgacaaggaggcagtgtgagcatggtgagtgaagtcagccacaagagtccattgctcgtggtcgccgcaagcctcgggctccgggtgtacagcgaacccaaagaggacctgctcgtagcaaccagcgaccagctccattcagcagcgcacgtgcctcttccgccccccc

SEQ ID NO: 311354 - DNA, 994 bp, Homo Sapiens
ctcagcattgtgttttactttttgggagagaggctaggaggaggaaggggtgaaaacagcgtctcactggagtctcaaaagtgtatgaatcttctggtagtgcaaggatgggataagatggccagggaagtcagatggaaaatccccaagattctttttgctactgatttctataattaaaatatgacatatgtaagggactagtgcatgatattcaataaatgtcagttgtctttcctaactaggttcctcacaggctaggttatgcctagatatcatcatcctcctttcagggaatgaagctcacctagaaaactagggaactaaaagtgcaatatggtttgggtaatgcagttggttagctgtctccccatcctcccaactcactattccagggaggggctgaaaacagaagtggctcccctgaagtctagttagcatgtcatgacagagtccacatgaagggctgtgggctgcaactttctagtgcacagtcctctctttttggcgatgataattgtagggaaagaagcgcacacgcatgctgatttcacgagctgtcttcaggatctcaacagccttgctgtgctcaatatcttggaaatccacatcattcacagctagaacttggtccccttcctgcagtcctgctctatgtgcatcagagtcaggaatcaccttggagatgaagatgcctagctgggaggcctttcctcctcggatgttaaatcccaactgagctccaggaggcttcttcagtgtgatggttcggggcagaaactgggtcaactcattgttgtagtccgggtggtgtaccctctcatgaggaggaatccatgctggaggattctcataggcaggcaagaaaaccaccgggtagtcatcataaggaatccggctgtccatctcgggcaaggcccagtgggcagtccacagcgacctcagactccgctcactgacaattcagtctgggaaccggaagcggatgctccgc

SEQ ID NO: 311355 - DNA, 502 bp, Homo Sapiens
  misc_feature (14)..(14): n is a, c, g, or t
  misc_feature (23)..(23): n is a, c, g, or t
  misc_feature (34)..(34): n is a, c, g, or t
  misc_feature (63)..(63): n is a, c, g, or t
  misc_feature (82)..(82): n is a, c, g, or t
  misc_feature (459)..(459): n is a, c, g, or t
aactttcctaatgncaaaatccnccactttttgnccgatgataattgttaggaaaaaaaacgncacacgcagctgaatttcnacgaagctgtccttcaggaatctcaaaaacccttgctgtgcctcaaatatccttggaaaatcccacatccattccacagcctaaaaacttggtccccttcctgcagtcctgctctatgtgcatcagagtcaggaatcaccttggagatgaagatgcctagctgggaggcctttcctcctcggatgttaaatcccaactgagctccaggaggcttcttcagtgtgatggttcggggcagaaactgggtcaactcattgttgtagtccgggtggtgtaccctctcatgaggaggaatccatgctggaggattctcataggcaggcaagaaaaccaccgggtagtcatcataaggaatccggctgtccaatcctcggcanagcccagtgggcagtccacagcgacctcagacctgtgccgaat

SEQ ID NO: 311356 - DNA, 1569 bp, Homo Sapiens
  misc_feature (1233)..(1291): n is a, c, g, or t
tcatttacaagtatgtaatggaaagtcgtgatcctagtacaaatgtgatattattggaggatactgctgcagtcttgggagttataatagcagccacttgcatgggccttacttctataacaggcaatccactgtatgacagcctaggttctttgggtgtgggcaccttattaggcatggtctcagcattcctcatctacactaacacagaagcactcttagggcggtccatccagccagaacaagtacaacggctcactgaactcctggagaatgacccatcagtaagggcaattcatgatgttaaagccacagatctgggattaggtaaagtaagatttaaggcagaagtagattttgatgggcgagttgttacaagatcatatttggaaaaacaagattttgaccaaatgttacaagaaattcaagaagtgaaaactcctgaagaactagagacctttatgcttaaacatggagaaaatattattgatactttaggagctgaagtagatagacttgagaaggaactgaaaaaacgaaatcctgaagttcgacatgtagatttggagatactgtgagtttgatggaatgaatcacctgggtggggaccttggaaacaagtttgtccgtccactctacaaagtttcctcctctcctacactgaaagactcagtgccatgcagaagccttttttttaagatgaaggaaatattttatgtaaagagcaactcagcaggacacagaactaaaactactacttacatctaacagacacactacaagttgaatcaatttgaaaatcatgtttttatgcttccatagggaacattttggttatttaaattgttcataatgtcccatatttcacctgttcagtgtatactgtactttgcaatcatctttccttttttcacattggtaaaaataagtggcatccataggatcatgatttttaatttgttgcctctgaagatttcactccatcaagatctgccaatcttcaatattctggctaaatcttggtatgtggtttttaaacagtcactccgtttcaaagtctgtctttccttatagaatgtggaaattatttctccataccttgtgattttgacctgagtgctaagagaatcactctccttacctagttatctacaaatgttcattccagaaatgtttagttactgaattgaatgaagacatctcagtacactcttttaggtcatagtagttgcnnnnnnnnnnnnnnnnnnnnnnnnnnnnnnnnnnnnnnnnnnnnnnnnnnnnnnnnnnnctaatgttaggagatatagtcctagatatttccatgggccagtgtgatgacttttttttaaatgaggttcagtaccataatgtttatttactggaagataatgcatttataagcattttaaaattctgtaaagtgggttagaaatatttataattttacaggcaggacagcatttgacttttatttaaaggcggcactacttatgtaaatctgagctgggggatatttcttgcttttagagagagacagaatctctcactgaaactcatgggtcatga

SEQ ID NO: 311357 - DNA, 741 bp, Homo Sapiens
actcaagcactagcatggatgagagctgcttgtggcgggagcgctcctcttccagctgactagagagcttcttctgttctttttcaaactttttcacttgggatttttcaaattccaactgttgagtcagcctctctctttccttctctagcatgtaggtgacatcatctccttcagccgtatcctgtgcatgccgctgcctttcttcctcaaggtctaggatcacctttcggtgcctgctctcagcagcagccagctgggacagcatgcgctcctgcatgttcttgcactgcttcatcccaaccttaagaatagagagtgggtttgtgcagactggctgcttttcgccatcatttttctccttcagtgtttcaaaatctctctgtagagccattaaaggatcactgatgttatattttccatagcgttcttcaatgaaagtatctctgtgttgggcctttaaggcttctataacaaggtcccttgcttcaagctctccttcaagaatactaaatagtgtcaggagttcaggcttgctgagtttttccagattcatcttgaaagcctgataatcggcagagtcacacttcagtcctcaagtataaacttacagttttcttcagtaaaaaattgggaaaattgccaaatatatttaaaatgccattagcatggtggaaatgtgtccaatgctttccacgacgctccgggctccgctcccctccgcctccactccccatcccc

SEQ ID NO: 311358 - DNA, 624 bp, Homo Sapiens
gggtttttcttttgaaaatgtaatacataaacagaaaaattcaaaagtataaaaagttcacggtgagaattcagtatctcacatttttcccccagttccttttttccagatgcaatcattgttaccccaaagagattccatgcttacacttgtctgcctgctgctacttttttgggaacagtggtcttttagtaggctcaaagtgaccttgttataaagttaggttggtttacatatccacacttccccctctgtctcactgccttcatctcgtatggctctcctagttcctctctagccatcctgccctctttgcttctttcacacacaccaagtatgtttcccccctcccccggggtttttgtgcttcttaatcttttttgcttggaatcgtttttctgtcaggtatctgtaagacttgcttctttacacttttttaggcttcattcaaatttcaccttcttggtgaggtctagtttaaagctgtaaattgtgtcccccaactttctgtcgtctttcctgctttattttcctccatttcagttgtcaccttaaaatatgctttataatttactcactttgcttgtcttttaacccccactggaacgtaagcatgatgaagta

SEQ ID NO: 311359 - DNA, 857 bp, Homo Sapiens
cgggtgctcatctctcccttctgttttatgtgatttgcttggggagaaagctaaaaaaacctgaaaccagataagaacatttcttgtgtatagctttgatacttcaaagtagcttcctttgtatgccagcagcaaattgaatgctctcttattaagacttatataataagtgcatgtaggaattgcaaaaaatattttaaaaatttattactgaatttaaaaatattttagaagttttgtaatggtggtgttttaatattttacataattaaatatgtacatattgattagaaaaatataacaagcaatttttcctgctaacccaaaatgttatttgtaatcaaatgtgtagtgattacacttgaattgtgtacttagtgtgtatgtgatcctccagtgttatcccggagatggattgatgtctccattgtatttaaaccaaaatgaactgatacttgttggaatgtatgtgaactaattgcaattatattagagcatattactgtagtgctgaatgagcaggggcattgcctgcaaggagaggagacccttggaattgttttgcacaggtgtgtctggtgaggagtttttcagtgtgtgtctcttccttccctttcttcctccttcccttattgtagtgccttatatgataatgtagtggttaatagagtttacagtgagcttgccttaggatgaccagcaagcccccgtggaccctaagttgttcaccgggatttatcagaacaggattagtagctgtattgtgtaatgcattgttctcagtttccctgccaacattgaaaaataaaaacagcagcttttctcctttaccaccacctctacccctttgcattttt

SEQ ID NO: 311360 - DNA, 1263 bp, Homo Sapiens
  misc_feature (43)..(43): n is a, c, g, or t
  misc_feature (1056)..(1056): n is a, c, g, or t
  misc_feature (1058)..(1058): n is a, c, g, or t
aaccaaggcaccgttaattccaaattcagttaggggccaccanttagagtccagaagaatggtccggtaatacatggacatgccaagaaccagaataataatggtggtgatccaagctaatccagcaaccacgagtacaaaaggggtcttagggccagtgtagtaatagcccccatacatactgcccaatccaccaacgcctcccatgccatacggttgtgaatatccaaacaagttgtaccactcactgtccttgtgaatgtaagctgtgacacaagcaaagacaccggcccccaaaagcagctccaccacacccagtattctcagcaggcctgcccacgacttcatgtaggagtatctcaggttatactcctccaccttctcactgtatgttcgaactgtttgtgtgtgtcggtctagagatccatagggatcccggggaaacactgcgtcagcctctttccgggaactaaaggttccttctgaccctccgaagggatctttgcaggagttgaggggcgaacggtggtttggtcttgctggagaggctggtggtgaacactccactccatcggagatgtacctgatatcagacaccggcttatcccattcggggtcctttttcttccctctgaaaaagttcttccaggagtcagggacaaagcgccttactggtttgagatctggcgctatagctggttcttctgtgtcacttgagtagaagtctgggccgaatggtggctgtaatgggagagggggtggtggcaagggatcagcgctcactgcccgctcactgtcatgaagagttgggtgggttcttatggtggtatcttgatagggcaggtcgcttgggacctcatcgtagcgcctgtcccgattcctggatcttccgtcatttgacatttgtgattttcacacctggcttaaaagttttgctggacccaagaaacgggtagatttcggatacttctgcgcttccgaggggtcgggaaaggctctgcggttctaactaacccacgactgcccgggggtaccgagcattttagctgtggggtntnccccgcgccagcctctgggcgcccggtcccacaaatctcattgtgtcctcggttctgcccgcgccggctaggcgttcgtcttcgcgtttctggctgaaacccactgtctttggagattccgacccaacgaggccgaaactaagccgggagacctcccaggtaaggagcaccgagatcgccccgaggtgcgcgccccgccccgccc

SEQ ID NO: 311361 - DNA, 826 bp, Homo Sapiens
tggaaaggcgggtttcccgtttaaaaataaacccctccttcctggagtgcgtaaaggaattacatagccttgagaaaccagccagatggttccatttcttaagaaaaagggccttccttcccaaaccacccaaaatccgggggcctgggttcaaccaaaagctttgttaaatttttctttaagtttccggattcttcacattcctttccttgagcaagattttctatccatcttcatagccctatgatcataacaccgcccatcttcttgcccacctctgccagcatgtagcttctctcctgaggacgtttcacagttgctaattcagaaacctcaagcttctcatcatctttgaatccctcttgccacttctcaaattcattcatccaattcaaagcagtattaagaggacaaaccactaacgccgtgctgaaatccagtttgtcacacaaaagaactgtatgaagaaaacttaccacctgtaaagtctttaccaaggcccatacagtgggcaagaatgcatccttgaacctggagatttctttgtttttttcacagactcacagcagcaatcccacataaactgaacaccatctacttggatggggtttcaatttgataaccatatttctatgaacctgcactaaaggttctttggtttcttcatcttcatctaaaaccaacttggttgttattggacacttggtgggtgaagcatcttcaatttctatcacctctctcaattttttctcgctcacgctccctctcagcaatacgttttcgtctctcttcctcttccttaagagcattttgtgtttctgttctc

SEQ ID NO: 311362 - DNA, 1137 bp, Homo Sapiens
  misc_feature (632)..(891): n is a, c, g, or t
  misc_feature (900)..(932): n is a, c, g, or t
aaactcatacaaatttattttaaataagctttaaaatcagaatttaaattgataaatgaagtaatctattgaaaaaatgttattttacatccattctgggtattaccacaaattttaaaagtagaagcatagcatttgccagttattttaaaaaaccgagtcaatacaaattagtctcaaagttcttgaaaattaataagtgatttttctcactacttaaccatacctggaataacctttgaagaaacactactagcaaactttagacaacaattataaaaccagattgttggcagaggacacaacaaaatgtaagttagaaaattcataaacatacatttattcaggaaatacaattactagaatccttgatatttcaatgatcattccacattataaaatattcacaaacatgtagttttttaagtctacaccaggtcatgctgacattctttttggataagccataaccatttcttctattaaatgctataatatccattttaattgtaaacaaagtacttgagccagactacttaagtacttgagcaaaataacttaaaaaaatcttaagaggaggaggacaatgatattttttaaaaacatatttgaggctgggcatggtggctcannnnnnnnnnnnnnnnnnnnnnnnnnnnnnnnnnnnnnnnnnnnnnnnnnnnnnnnnnnnnnnnnnnnnnnnnnnnnnnnnnnnnnnnnnnnnnnnnnnnnnnnnnnnnnnnnnnnnnnnnnnnnnnnnnnnnnnnnnnnnnnnnnnnnnnnnnnnnnnnnnnnnnnnnnnnnnnnnnnnnnnnnnnnnnnnnnnnnnnnnnnnnnnnnnnnnnnnnnnnnnnnnnnnnnnnnnnnnnnnnnnnnnnnnnnnnnnnnnnntctgtctcnnnnnnnnnnnnnnnnnnnnnnnnnnnnnnnnntttgaatcgtcaaatcctaaagaactaggctgctattatctagtattatactaacaaatgaagtgcccacattaagacagtacataattattaacgacaatatttctcatctgcaatttttaaacatgctttctcaaataacaaacacgtatttttgtaagttttaaaggcaaagggggcagaatgatgacagacataaaaagct

SEQ ID NO: 311363 - DNA, 2742 bp, Homo Sapiens
tggggaaaccattgatttttattaatttcataactgggaaattccatgtgaaagtgaaacaagcatgagtcaagtcaaccagggaaggaatctggggacaggccaaggagcgggaggtggggcagcgaggcagtcctgctggtaggagccctgaggatttcccagcttgtgtgcgctgcctctggcatcctagagacccggatttactcagctaggagagaggatggatcacagggtctaagggtggccattcagaggtagaagatggaggggcggcagattctggcagggcagcagagggctcagtggccatggctagaggggtaaaaaattcaggacatcccccaggtgctgcctcagccagggctgcatgcggaagagattgatgtgaaagtctcgtggcggcgggaccttgctacgaggggcccttttgcgggagtttttgtcagcagagccaaggcaggggttgtaaagaccccagctcaccagacccacctgaaaaaacctgaatctccgctcaaggaaaactgctcccccagattctcccttgcagggactctcatcctcctgggtcccactgcataggaactggtctgtcaccacctccctgacatctgtcaagtttgggaacatggttttttcttgggagacaacctcggcacagcttgtccactccactcccatcttaaggttaaatgttcagtttgctcccattcaaggcgacaaaatgagcaggaacactctgtttgttccagccagttcattctcatggtccctacaggtgctgccttgaggtctccgcagagccagattggcctccatcgtgcagggaaggcagatgggccctggcatgggtggacatctttactttctgggccagcttcagcagagctatgtcatcaccatagaactccaggattccctggttctttttggcaaagacatcaaaccctggggagatcaccgccttctcaataaggaattctttgccccactgggatttggggtctcccacattgaccctccacagggagtggtcgttgccatcgcggaagcaatgagctgctgtcaggacccattggtcggagatgagggccccccgggcaggttctcttggctcttgggcttaatagtgacatgccagggtgtcctctcctggtcagaggcgtttgctgacatgttccccaccccgcagatggtgtctgtgagcttggagacatccagcatatgttcaaagacctggtgcagagcctttgtgtcctgcagaatgaaggcatgcctctcaccatccttcttggaccctagctcattcagttctctccagtccacatccagcttgttcacgtcgatggcatagatgtccagatagtcatttctctgctggttgatgttcaggatctctctgatatggtcagcagctgtcttgggagagccacccatattggacccatctgtcagaaggatgatggcatgtcggacctgccaggccatcgtccatgccgaggagtcgcatttggttgttcacatgatctttatagttggcaccaggctgctgatcacctcagtcatatcccgggagttgtcgttcaggacagacatgaggactttgggctctgaggcaaaggtgataatggcaacgctcacattgatctcaaagctgaagatcctgtccaccatgagggaggcgctctccttgaagatgagaaagtcattttccgacacactctgcgaacagtccaggagcaggtagaggttcagatgaccagagcgctggatttggattttacggcccaggctttcctttgtcttctgggtgggattggtggccccaagcatgtgggagaaggaagtgcccagggcaggggccacgtcctcagggaagtcataagagtagggttggcggcagatgggctccgttccactccagaccccgttgccctggcactcccgctccgaagaccccgtgagcacaagattcgaggagcagcgatagcggaccttgtccccatgaccaaagcggaagcctgtccgcactgcgcctagtgaaatgcctgggttggggcagtggccagccccattatcacacacagttgtttctccatcccacatgccgttggggcgacactgacgcacaggcgagccccgcaatatgaagccatcctcacactcgaagctcacattgccacccacgggataggaccccagccgtggggtataaatgccattctcaaaggagacaggggctggacagcgcacaggtttgcagaccgccttagacagagaccgggtggctcctggggtctgccactgtccgctgctcttgcacagccgtgatgctggggatgggtacaggccctgggggcaggagtaggtgagaaggctcccaggagcccagccatggctgagggtgaaggtgccacccgagatattcacgttctgagggcaggagggagccgagtctgccagacctgggtacaggaacagcaggcaaaaaagaaccatcagtgggcccatggtgtcctccctaggggcggcgagaggtagagagccgcgggagggaaaaggtcatctgacttcccgaaaactagagctgggtcagcagctgcttcattgctgccagagaagaaaaaccagggagtggcaagggggatggtcttctgttagggaaataataagcagggattggggactgaactgaagggtgaaacctttgccctgtctccctgatgctaatatatctat

SEQ ID NO: 311364 - DNA, 966 bp, Homo Sapiens
  misc_feature (143)..(145): n is a, c, g, or t
ggggcaaagggccattaaaccccctgggggaggatccccggccttctttcattaagggatttctttgccccccactggggatttggggtcttccccacattggacccttccacaggggaagtggtcgttgccatcgcggaagnnncaatgagctgctgtcaggacccccattggtcgggagatgagggcccccccggcaggttctcttggctcttgggcttaatagtgacatgccagggtgtcctctcctggtcagaggcgtttgctgacatgttccccaccccgcagatggtgtctgtgagcttggagacatccagcatatgttcaaagacctggtgcagagcctttgtgtcctgcagaatgaaggcatgcctctcaccatccttcttggaccctagctcattcagttctctccagtccacatccagcttgcccaccccgatggcatagatgtctggtggggaagagggaaatcaccagactcctgtggctttggggccagatagtcattcctcttctggttgatgttcaggatctctctgatatggtcaacagctgtcttgggagagccacccatattggactttccatctgtcagaaggatgatggcatgtcggatttcctgccaggccatcgtttccatgccgaggagtcgcatttggttgttcatcatgagatagacactgtttaaggccgcataggtgttagtcccagttccattttcatgatctttatagttggcattttccaggctgctgatcacctcagtcatatcccgggagttgtcgttcaggacagacatgaggactttgggctctgaggcaaaggtgataatggcaacgctcacattgatctcaaagctgaagatcctgtccaccatgagggagcctcgtgccgaattcgccacccaggccccccccgtatttattattttttttgggtgtcggtatagagagagggtggggc

SEQ ID NO: 311365 - DNA, 985 bp, Homo Sapiens
  misc_feature (964)..(964): n is a, c, g, or t
cccttgatcaagtttacaactctttgagaagacatccctaatggaaatactgaatggcagatctattactgtggtaccatgtagtgtgtaataaatcttgaagtccagaaagcaagtatatttgctgtttagagctatacttaaggtatagagattcttttccacctgtggtgtgtaaaatcagtattgtgtttaattttgcaggtttttcaaggatcaactaatgtgcaaatacagtggtgatatatttatattacatttttataatgcttttgtatggcactttatagttttcagacaccttttgtaacagccctgtgagacagacaatattatccttattgtacagatgggggggctctggaggctctgaaaagtttttggtgatattcccctaagtttataccacaaaatgatggagccagaatttagttgcagaacttctgactccaagtccagagttctttactagacatctggtttcttactagctttttgctagctttttattttacagtgaaaagtatggaagcaaatcctgataattttggcttattatcaaatatcatttattttttattgcagagacccagcagatgtaactctcattgtagccatcccaaagaaaacccttctttgccctttgcagtgccacttatttaggtaactgaagtgtatttccagtacaatttgattttgaactaagatttgatatagagttgtaattgcttacataactctttgaaaatgtatcatccctgggttctcaggtgaaggaggcaattcaaaagtaaaaaagaatattcgaatacaataaataccctctgttctcacacaaatgctgtttcttagctaacttgctttgacaacctactgatgtaacttctttattaatgtgaaatatttatattttgaaataaaattactagtgttgaatgaatcatgtggtaaactaccccttaancaccccctatccttcccttgt

SEQ ID NO: 311366 - DNA, 888 bp, Homo Sapiens
  misc_feature (175)..(184): n is a, c, g, or t
  misc_feature (830)..(830): n is a, c, g, or t
  misc_feature (863)..(863): n is a, c, g, or t
caattgacaagactttaagtcagggataacagtattaatgtctctgttctgtttccatgttaaatttaatttaacctggatagccacattaatgaattggtgctgtcaaaatatagtaatttttaaatttgttaataatgaaaacccttaagcatgcaggatgaggtatttgggnnnnnnnnnnagatcgatcacatctacagaaaatggctaaaccaagttaacttttattatagacagtgaataaaacaccaaaaacccaaaaatgctttaaccacagtataaataatagattatacacatcatcttaataactatttttaagttatttaccatagcctctgtatagaccttaggaacagctgtttcagtgatctggcaccagtttatttggttctgctgaaattctgtatcacaaatgtgctacctggttttggtccattagataattactctttataaggaaaggaaagagaagcagagttagttccagctctaatagggatcttcaaagttattttgtcttgatgtatgtaacagtaattctttacatcttttgatttttctcttcctttttattcactcttcccacgaatttaaatgtttaagttatattcatcactagcaaggatgataaacacttgtgccctgaaagctaacagggagaggttacacaatattttacaggttgcttaaaacattatttaaatgcatcaccttccacttgctcacataccaagtcagttattttcaagggaagaaccttttaaattatggtcctccatttactacttccactgagagtatgctctcattcctcaggtgttttnagaaacatgactaataaccacacaattaagtanaatcattccaagtcctatggcctgg

SEQ ID NO: 311367 - DNA, 568 bp, Homo Sapiens
  misc_feature (394)..(474): n is a, c, g, or t
gggaggccacactggtttttgttaagacctcatcagtcctgggtgcttgccctcaattcctccatagctatgttagcatatttaatatcttttgctattaatccttaactagttaatccttaaagggctagttaatccttaactagtcccttcattttgtgcattatcttccagtattctccttctctttttttacttcttccctgctacccatgtgctcttggtgggtagttaccaacatatacagaatctgcttccctttgcagcatttcatttgcataaagactggatggcactggtttgctccatctctgattattgtggctgttttgaactttgtgaaaatactcccttggcacacataaacaggaagacacacaaagatatacacaannnnnnnnnnnnnnnnnnnnnnnnnnnnnnnnnnnnnnnnnnnnnnnnnnnnnnnnnnnnnnnnnnnnnnnnnnnnnnnnnaagccctgctcctgagccagtctttgttattcatgttaagctgaagttgcagtgtggccctcttgaaattgaaaactggttggttggggaagaa

SEQ ID NO: 311368 - DNA, 1624 bp, Homo Sapiens
  misc_feature (71)..(152): n is a, c, g, or t
gcctgttttgaactttgtgaaaatactcccttggcacacataaacaggaagacacacaaagatatacacannnnnnnnnnnnnnnnnnnnnnnnnnnnnnnnnnnnnnnnnnnnnnnnnnnnnnnnnnnnnnnnnnnnnnnnnnnnnnnnnnaagccctgctcctgagccagtctttgttattcatgttaagctgaggttgcagtgtggccctcttgaagtgaagactggttggttgggaggaactgaattgtgaacaaagaagctagttcaaatttgcataaatcatccctgctatagcttagattctcctaggtagtagtttctttcagaaggaaaatgagctgtgcaggtcatatgagggtcttcttatcctattatgatatctctagtaactctggcagtaacagaagcaaagtaaatctggacatgacagacatttagacgaatctggcagtacactgagttttaactggacaccaagcaggcaaggctggaaggttttgctctctttgtgctaaaggttttgaaaaccttgaaggagaatcattttgacaagaagtactgtgtagtctgctgcagtcttctcttgggtccaactggcactgcctgttagtctattgggaggcccagcaggtcacaactgacgtcccacagccgccttgctatagtctcattacgagcttgggcagagacccatgccacatgacagtcactgaaatgattcccacttagaatctcaagaccttctgttaaggcacagtgcaggctggtctgggctccctgctgaggagtcttgatgaaaaaggagaaaagccaccacatccatctcatgaaagatgagtgccgaaccagttcagattggactgtgccagggtgtacagaatacgtcgtaacgccagagccttttagtctccgggccagttcctgggtgaagaggatgttggctagcttgctgtgacagtaggccaggcctgcattgtagaatttctcgccctgcaggttatggaagtggatccttcccaggtgatgtgcgagggaagacacatttactatccttgatggggctgattcctttagtttctctagcagcagatgggttaggaggaagtgacccaagtggttgactcctatgtgcatctcaaagccatctgctgtcttcgagtacggacacatcatcactcctgcattgttgatcaaaacgtggaggtgcttttcctcagctaagaagcccttagcaaaagctcgaatagacttagtatcagacaggtccagtttccgcaccaacacctgctggttccctgtcgtggtctggatctctttggccaccaattcccccttttccacatcccggcaagctaaatatactcgagctcctctctgagccagctctttggctgtctccttcccgatacctgtattagctcctgtgaccacaactactttcccaggaagctgaacagttgatgtacacaccccactggacagcattttcctgatttggggcgcagccatatacagaaggaagggcagaaggaggagcaacagcgggaacatgagctcaaccatctctgccggctgcagcggcaccagagcgggatgctccagcgttgctcgccgactat

SEQ ID NO: 311369 - DNA, 547 bp, Homo Sapiens
  misc_feature (389)..(465): n is a, c, g, or t
gccacactggtttttgttaagacctcatcagtcctgggtgcttgccctcaattcctccatagctatgttagcatatttaatgtcttttgctattaatccttaactagttaatccttaaagggctagttaatccttaactagtcccttcattttgtgcattatcttccagtattctccttctctttttttacttcttccctgctacccatgtgctcttggcgggtagttaccaacatatacagaatctgcttccctttgcagcatttcatttgcataaagactggatggcactggtttgctccatctctgattattgtggctgttttgaactttgtgaaaatactcccttggcacacataaacaggaagacacacaaagatatacacaannnnnnnnnnnnnnnnnnnnnnnnnnnnnnnnnnnnnnnnnnnnnnnnnnnnnnnnnnnnnnnnnnnnnnnnnnnnngtggaagccctgctcctgagccagtctttgttattcatgttaagctgaggttgcactgtggccctcttgaagtgaagactgg

SEQ ID NO: 311370 - DNA, 613 bp, Homo Sapiens
  misc_feature (296)..(432): n is a, c, g, or t
  misc_feature (554)..(555): n is a, c, g, or t
gaatttaaagacagaaatagcaactactcaacatgaaatagaaaaaaaggaattttttaaaaatggaaaagagcatcagtgagctgtggggcaatttcaaacagtttaatatacatttgactggaatatctgaaggagaagagagggggtggaagagaaaaattagttagaaaataatggctgaaaaatatccaaatttgatgaaaagagtatagtcacagatccaaaaagctcaatgaacaccaaacataagaatcatgaagaaaaccacacaaaggctcatcataatgaaattnnnnnnnnnnnnnnnnnnnnnnnnnnnnnnnnnnnnnnnnnnnnnnnnnnnnnnnnnnnnnnnnnnnnnnnnnnnnnnnnnnnnnnnnnnnnnnnnnnnnnnnnnnnnnnnnnnnnnnnnnnnnnnnnnnnnnnnnnaaagtactgaaagaaaaaaagtccgtttagaattctatacctagtacaaatatctttcaaaaacaaagacaaaaataaagactactttagacatataaaagctgaaatatttcatcaccagnngatctgtgctacaagaaacactaaaggaaatccttcagacgccgggtgcggtggctca

SEQ ID NO: 311371 - DNA, 2421 bp, Homo Sapiens
  misc_feature (1255)..(1255): n is a, c, g, or t
  misc_feature (1273)..(1273): n is a, c, g, or t
tttgccaggacactcttttttatttaatcttaagacaggtgaagagaaatcattggcggggtctgcccttcccatagcccttttgatcacaattttcccatgagcttcaaaatagaagaccataaattgaaggtttattttaaattacctaagtccctgaaatagaagagtaatttatttttagtattaaagagattaacaagttgtctcattattctgatttacccatattcaaaactcacctactcagaaaactgcaaacccatagttgctaacaatcctatttaaccattaagaaaggatttacaacaataaaagctatgtacataggaaatatcagagagtagaaagtgctaaccagaggtacccagaaaagctttctgtgactgaaacaatacttcctgtctaaggttcagggagtaagatgcttctttgggggctgagaaattaacatgagaaacctttggtatccaaattggatttctgagctctttgccacggcatttttggctagtctaaaacaatcatttggagaaagcaacaccaaggatgaggaggaaggaattctcaacctcggaccaatctctggccccagggttaggactgagaacaaatacactcaagggctgactttgaatggcagtgggacaacttggaaaactaatcacttagtatcaagtcaggcctgttgtgaatacccaggttggctccatcccagggcccttgtactgagaccctcagaagaatgacaggtgagaggatgatacagctagagttatgcgacttaaaggtagcaacccacaaggatggcagcagaagcccttaacagtgaccttcagatcagtgacataactccactgttagcggcagcagggctgagtaaatccctaataatttcaggttaggcaggatcttgactcatataactcatggtagaagctataggttctattctataaaatctctgtatacatccaagaggttgggatactcagagagagtggcagaacacgtggtcttcaaagatctgcttctctgtagctgggaagatcttgtcacaaattggacaattgaaacaaaggggctgcatctgctgttgctccaaggtgtgatcacaaatatcatctgctttgcagatagggcatttcttgatggagagcgggctgggggaagaactttcttggataccagaatatgggtttccataggcaagtcccgggattttgtcttgcgcctccttcatctgaagtagggnacttgatacggcaaaganttaaaatccagacccatgtaactgagcaatctgctgttctccctcttcaaaagatcattttctccttccaatctctctttctgtctctgcagagcattacatataatttcgttctcactcagtctttttgacaggtcaaagttttcatccattaattcctgttgtttcttcattgcagtagtttcattctgcttcatttgctccactgtctgctcgagcttcttctggtcgttcctctgttcagttaacctgagaaagaggtggtcattttccttgtttcagctgctctaactgctctgtcttatcttgatctccctgaaccaagcttctccatttctttctcttgagttgacagctgggcctgaaagctgatccacttctgattcccatcttctcattttctgaggacatcttctggttttgttctttcagttgaagcagctctgtctcccaatagtccttctgttctttcactttcagttccaacttcttattgatgctctgtagggtttctagctcctcctgcttcttttggagctcagcctgcatgtctgagttctgcttctggaggctgatacagctgtccttcagctcctggttttctttgcaaagctccttgttgtgctgctcaatctcttccacctctccctgagtggtaacaaccaggatgtcttcctcattttctggacggaattggaaaggaatacttgctccccggaccacaccatcctcatccacatagcagaactggtaatactcatcatccttgggcaggtagtaagctttgaattggacttcctgctgtttagctgatttgttgtttaggtcaatgggcaaagtaacccacatgaaggtgtaatactcacgggttgtcttccaccccactctaaagatgccaatccaatcctttcgacgagggatgaaatgctgggtgaaggtataatgacatgtgacgtcccctccagggatgtagaacttctccacactgttaaagatgacctgagagaaatgacagtgatccagcaagacagctgatgtggggggatctttgatggtctcctccatggtaggggtccagggacagcaaccagcagcggcgcgaccgacgcgtggtcgacgatatcccgtgaaattccggaccggtaccc

SEQ ID NO: 311372 - DNA, 425 bp, Homo Sapiens
  misc_feature (285)..(345): n is a, c, g, or t
  misc_feature (348)..(348): n is a, c, g, or t
  misc_feature (397)..(397): n is a, c, g, or t
  misc_feature (402)..(402): n is a, c, g, or t
ttaaagttgagaacaggtataagtgcacactgaatagtctaatctacatgtaacacatattttagtatgattttctatactctaatcagcaccgaattcagagggtttgactttttcatctataacacagtgactaaaagagttaagggtatatataccatcactttgggacttggtagtattattaaaaggttatttccttcactgtcaataaaagtccaaatgtttagcttaggtctgagagtcaaacaatgttaaggattgtcttaaaggttccttagccannnnnnnnnnnnnnnnnnnnnnnnnnnnnnnnnnnnnnnnnnnnnnnnnnnnnnnnnnnnnaancaagaacaagcagcaacagctgttttgttggggctatggatttaggttnggcanagtcaatttcggattacctaagg

SEQ ID NO: 311373 - DNA, 1098 bp, Homo Sapiens
gattcagaggaggatgaagaccattttggaggaagaaaagcacccttattaagaattgcagcaagtaagccaacaaggtcttttcaggatgattttcttatatcaagtggtacatttcattttatttacttcagtttctggtgaatgtgtgactcagttgttgaaggacacctgctttgaaggaggggacattactacggtcttcacaccaagcgccaagtactgccaggtagtctgcacttaccacccaagatgtttactcttcactttcacggcggaatcaccatctgaggatcccacccgatggtttacttgtgtcctgaaagacagtgttacagaaacactgccaagagtgaataggacagcagcgatttctgggtattctttcaagcaatgctcacaccaaataagcgcttgcaacaaagacatttatgtggacctagacatgaagggcataaactataacagctcagttgccaagagtgctcaagaatgccaagaaagatgcacggatgacgtccactgccactttttcacgtacgccacaaggcagtttcccagcctggagcatcgtaacctttgtctactgaagcacactcaaacagggacaccaaccctagatacgaagctcgataaagtggtgtctggattttcactgaaatcctgtgcactttctaatctggcttgtattagggacattttccctaatacggtgtttgcagacagcaacatcgacagtgtcatggctcccgatgcttttgtctgtggccgaatctgcactcatcatcccggttgcttgttttttaccttcttttcccaggaatggcccaaagaatctcaaagaaatctttgtctccttaaaacatctgagagtggattgcccagtacacgcattaaaaagagcaaagctctttctggtttcagtctacaaagctgcaggcacagcatcccagtgttccgccattcttcattttaccatgacactgatttcttgggagaagaactggatattgttgctgcaaaaagtcacgaggcctgccagaaactgtgcaccaatgccgtccgctgccagttttttacctataccccagcccaagc

SEQ ID NO: 311374 - DNA, 699 bp, Homo Sapiens
  misc_feature (104)..(104): n is a, c, g, or t
  misc_feature (106)..(106): n is a, c, g, or t
  misc_feature (239)..(239): n is a, c, g, or t
cttttgggcttctgttgtgctgacttttaagatccattattttaaaaacataaatccctattcattaatatgtattttttaaaaaaacaggtttacttgtgtcntnaagacagtgtacagaaacactgccaagagtgaataggacagcagcgatttctgggtattctttccaagcaatgctcacacccaattaggcgcttgcaaccaaggccatttatgtggacctagacatgaagggncataaacctttaccagctcagttgcccaagagtgcttcaggaatgcccaagaaagatgccacggatgacgtccactgccactttttcacgtacgccacaaggcagtttcccagcctggagcatcggtgagtgagtcccaggacattcgagtggtcggatgaaaaacagaatcgtgatttactaaaaagcttttgccatcaactttatgccagaatttattttgaacccctaaaagacatttctataatagtactcctagttttcttcatgaaaaatacacttaaagcctaatttggatgcatttcatttatggtaaggagtctatcttttaataacactgtcagaaaaatatatatacttggctaatttcaaaagcgctacacttttaaattggcacttttgaaacagctgcaattggtatgattgtcagtgcccttcccagtctaaaaaatgttacagt

SEQ ID NO: 311375 - DNA, 625 bp, Homo Sapiens
attcagaggaggatgaagaccattttggaggaagtgattttcttatatcaagtggtacatttcattttatttacttcagtttctggtgaatgtgtgactcagttgttgaaggacacctgctttgaaggaggggacattactacggtcttcacaccaagcgccaagtactgccaggtagtctgcacttaccacccaagatgtttactcttcactttcacggcggaatcaccatctgaggatcccacccgatggtttacttgtgtcctgaaagacagtgttacagaaacactgccaagagtgaataggacagcagcgatttctgggtattctttcaagcaatgctcacaccaaataagcgcttgcaacaaagacatttatgtggacctagacatgaagggcataaactataacagctcagttgccaagagtgctcaagaatgccaagaaagatgcacggatgacgtccactgccactttttcacgtacgccacaaggcagtttcccagcctggagcatcgtaacatttgtctactgaagcacacccaaacagggaccaccaacccagaataacgaagctcgataaagtggtgtctggattttcactgaaaccctggcactttctaaa

SEQ ID NO: 311376 - DNA, 757 bp, Homo Sapiens
accattttggaggaagaaaagcacccttattaagaattgcagcaagtaagccaacaaggtcttttcaggatgattttcttatatcaagtggtacatttcattttatttacttcagtttctggtgaatgtgtgactcagttgttgaaggacacctgctttgaaggaggggacattactacggtcttcacaccaagccgccaagtactgccaggtagtctgcacttaccacccaagatgtttactcttcactttcacggcggaatcaccatctgaggatcccacccgatggtttacttgtgtcctgaaaagacaagtgttacagaaacactgccaagagtgaataggacaagcagcgatttctgggtattctttcaagcaatgctcacaccaaataagcgcttgcaacaaagacatttatgtggacctagacatgaagggcataaactataacagctcagttgccaagagttgctcaagaatgccaagaaagatgcacggatgacgtccactgccactttttcacgtacgccacaaggcagtttcccagcctggagcatcggtgagtgagtcccaggacattcgagtggtcgatgaaaaacagaatcgtgatttactaaaaagcttttgccatcaactttatgccagaatttattttgaacccctaaaagacatttctataatagtactcctagttttcttcatgaaaaatacacttaaagcctaatttggatgcatttcatttatggtaaggagtcta

SEQ ID NO: 311377 - DNA, 685 bp, Homo Sapiens
gtatcatcttcacatggtaaaggaaagataacaaaatcagaatttgaatcttaattttcagcaagtgaacagggcggtggtgatccaaaatctgcattgaatgcttcagataatttaaaaaatgagagctctgattatacaaaaccaggagacattgaccctacatcagtagcaagtcccaaagatccagaagatataccaacatttgatgaatggaagaagaaagttatggaagtagaaaaagaaaaaagtcagtcgatgcatgcatcttctaatggaggttcacatgccaccaaaaaggtccagaaaaatcgaaataattatgcctcagtagaatgtggtgccaaaattctagcagctaatccagaagccaagagcacatctgctattcttatagaaaatatggatctttacatgttgaatccttgcagcactaaaatttggtttgttattgaactttgtgaaccaattcaagtaaaacagcttgatattgcaaattatgaattattgtcttctactcctaaagatttctggtttctatcagtgacagatatccaacaaataagtggattaagctgggtacttttcatggtagagatgagcggaatgtacagagtctccctttagatgaacagatgtatgcaaaatatgtcaaggttgagttgctatcacattttggatcaga

SEQ ID NO: 311378 - DNA, 1102 bp, Homo Sapiens
  misc_feature (52)..(52): n is a, c, g, or t
tgacccatgttttgttagctcaaagacatgaccttacacacaggatagaganacagaaaggtcagactaaagggatgattaaagtcattagaaaatacaaaggatgtgagggagtgttgctgagtcctgtattacaagaagtgggtctctcgctaggtcaaaatctcaattttgcctttaggaatttatttggttctgcaggagatagaacctaaaagcattaactaatgagaaaattgctctaatattttactgaactatactgtagaaattaattcttcataacccattgagaaaaatgtcttggtgccatcctaaaagggtgttaaatccattgtgatctttgtgggggaaaagttggaaagcatcattcactcttaaatgtcagttagttaagaacaaaaatcactaatcatgtgttaagattctggtttgcattacaccattttgacaaattagccatcccaatcttgctttgcttaggctaatagcacaaactgcttatatcctcagtctctgagacagacccagagactgggaagaggaagcaggggaacagggtgctgggtgcctagaagatgctaaccaggtatgaaaaattaacaaggaagaatttacaagaataatccatacattaattatggagtgtttaatgtattttgattaaatgagaaagtcaaatgcatttcagtaaaactgatgggcaacatattaatagtaagtcatgtaaggcaagcatcatcattaacgtcttaaaaagcactgaataagcctaagacattttctagaaaataaaatatataatccattattccgtttattatgcaaatatctgtctttctgaaagatttacggaaaacattttctccatgtgtcatgcactatgtaagaaagcaagaaaaccacagcactaattatagtttcttattaaaaagtaaaaaattcctttttattcaatgacttctaaattattgcacagatacaagtgattagggagttaaaaacatgagtaaaacataaaacataatccctatccttaaggaatttatactcttctagaagaaaaagtaaaatatgaccataaataagtataatcgaaggt

SEQ ID NO: 311379 - DNA, 489 bp, Homo Sapiens
atattaatgcgctccccactcgcgttgtgagccccgagagcgtcccgcacgatcagtttgggtgaaggtttgtgcttggggaagggggcggaggaacagaagcgctcggaccgcagcaggcagcggacccccagcatcccgcgtccgctcaggccctccgcgggagcagctcagaccccacggttcgaaccccgcgtgcagcggccctcctttctcagctgctccccttccgcggccgcagctctgctgtaaggcactccagagcccctcggctgcgcgctttctccttcaggactcccagctctgtccccacagaacctctccgcttcccacttcccaacggggcggaatggacaggacactaggcaaacgccagaaagaaaccacgtgcagttggcagctggggcgccccactacccgcgacaattgtaaacctacgaacagaacccgggccgcaacacgcgcaaccactcctacctcaccacgccc

SEQ ID NO: 311380 - DNA, 597 bp, Homo Sapiens
gtcagtttccgtaaattatcacagccacttcaggaccactcagcatgaggtcatatgtgacagaggagtaagtggaagtggcaagatacagagatctcaaacagctgacattaaattgtcttacttttgctaattgtacgaaaacgtaaccatgtgtatgttttgttggggccattcccagtgcatttctgcgtagaaggtatttgaggggaggcatgaataataactataaaccagacatacaaagttctgtatatagagcatggatataataatgttatcatagtatcatgtatgacgaaggttgatcatatgcccacttttttgtatgaaggaaaaggcacatagtagaccctcaggcaataggaactaaaaataaaaatatgtgtgcatatgtaaatagattaatgaatcaattaaccaaccaacctacaacgtacccaaggttagaaggctgagcactttgttgcttggtagattagattgggttagatagatgctcaaccaagagaaggaatagccctttttaatgtgtacacgcatgttccacacattattctgacgtcttccaaagaccaggagggcactgtcctggat

SEQ ID NO: 311381 - DNA, 975 bp, Homo Sapiens
  misc_feature (262)..(262): n is a, c, g, or t
ttccgaggggccaattgaaaaaccgggaaaccaagttttgggcccagggttcccgggggcccccgggggaaaaaccccaagctttttttgtaattccttcagggagttatttctgggcctttggtgcccgaccctttgcgggggttgcttgggtgagcaagggcagggtactccttcgggcgttgggcctgcaagtgttcagccccgatgttctggccgaggtatttttctggcatcttcaaaaggctgagcaccacaggancccaggtcagacacggacatgccatccatgggaacgtcacctgtgggcaagctcagcaagtagctctttccgtctggggctttctggggcaagaagtgggagaggaggttctcaaaatagcagggcagccgcacactggtcatgggaacgccaatgtcccggaaatattcctccacctcccctttgccgtcaaagtgcgcggcggccaatctccctgccgtcagcttcttgatgttctccaggccgctgtagaccacatagtggaggcccaggcgcctggccagatcagcgagcagcttcccctgcttgacctcctgctcctggctgcagctctcccagtaattggtcacgatgaaggtggcgtaagccccattcagggccagctccatgatgacctggtcatcttggtctccctgcactacttctgcaccttgcagcctcagctcctttgctgccttcttcctagggtttcgggtcaccactcgaaccttgaatgtcccatcttccaggagtgtgcgggccacggagccaccctgggcacctgtgcctccgaaaaccaccaccagtttcttgtccaccatgaggacgagaatgggacgaatccggtccagagatctggcagagcgccgctcacggaagcccagcgtcggaggacccctggctgcagccgccaatcccgacgtgtcggccgaaacccctcctccggcgccccg

SEQ ID NO: 311382 - DNA, 355 bp, Homo Sapiens
gggtcaccactcgaacgttgaatgtcccatcttccaggagtgtgcgggccacggagccaccctgggcacctgtgcctccgaaaaccaccaccagtttcttgtccaccatgaggacgagaatgggacgaatccggtccagagatcggctggagtgacctcctcgccgcggcctgggcgggacaagttccaggagcccgggaccccgattctgcggccgagtccactgcagaggcggggatggagctgcgcgctaggcgccaactccctccccgcagctccggccccacctggcagagcgccgctcacggaagcccagagtcggaggaccactggctgcagccgccaatcccgacgt

SEQ ID NO: 311383 - DNA, 782 bp, Homo Sapiens
  misc_feature (136)..(136): n is a, c, g, or t
tttttttcccaataggtaatgattcacttttattatgatcaatacggaaaagatctacctagtttaatagacccagaagcttaaaagaaagattgggatgtgcaaaacatccaggcaaaccaaaataagaattcancgacagaaaagaaatgaaaaatgagaattttgaaacaaggccatcagctttctcaactagtacaggtgttccaggacgtagctggcaacatacttgattgccaggaaggtctcctcgcaggtagcccggatctgggattctggaaggagaaagccatatctgcctgtatctcgaagttcaaaggtgaaggaatatctgattccttggtcataagcccagtcgtcagagcccccagcagcaggatagattgttgtagctcccgggccatatgtgtacttggtgccgtgcagtgaggcaagttctttcacagtagctttagccagggcattcaactcagcattgttctcaccgagtttgtaagcatatgagtaagggtagatcatcatttgggagtacgagtggattgtcagatatgccttgatggaagagagtttgttgcggatgaaatcagccagggccttggtctccttttcagactctgcggcaggtccacagtaagtttcatcacagggtttcgagaggctccaatttcacaccaaccagcatcaaaatttctgttggggtctgtgccaatgcagctagatccagtatgggtggagcgagtctttctccaaaatcggctcttggtccaggtgtagatgtagcc

SEQ ID NO: 311384 - DNA, 605 bp, Homo Sapiens
gaacagaaagctgattacatattttagaaaaatttactgtgaggcaaaagccacatgctttaaactatcagaaaagaaaggccccaggaacctttcgttggctttttaggcacatggttctttgcacagttctgaagccaagactcacagattgttgtagctcccgggccatatgtgtacttggtgccgtgcagtgaggcaagttctttcacagtagctttagccagggcattctgcaaaagaaacaggaataagtaaggaaataaataaaagcacactgccaaacaaatgccctgtacattatttttaaggcattcaaaacatgtaagtaacaatttggatcgtattatatgcttattcaggacccattttcatttttctacttaacctagtgatatgatccaagtaattcttgtgcaagaatgtcttccctaataccctccccaagcattcactctgagcctctatttatcttgtcttgtaagagtttgtaacagaaaagcaggagacaaggaagtctttatggttgtgcaaagaagttgtttacctgtttgcaggcaaacaaaccaaaacacacgcatgcaaaaacgcaaagaaaacaaagc

SEQ ID NO: 311385 - DNA, 445 bp, Homo Sapiens
gcatcaccactagattttattagaagtcaattcattggtcaaataacagtagtctcctaacacggtgtgagggtgagcagaacttcctccctgacggtttctggactacagaagttgaactgttttccaacatttgtctccactataatcttggatgctcccactctaggtaaagttgggttgatcacattgttataccaaataaatttaaccatctgcaagtccccaacatccacatctgagtcaaattcattggaatgagtactatctggtttgagagtgcccttgaaaatttcatactgcttagagtttcctttatttccgaacaaagaaactagtatgtgtcctgtaaccttttttccagacagtgtgacagataccttatacctccaacgtgcaaaattactggcatcaccagtgtctagataaaatttctggcccacat

SEQ ID NO: 311386 - DNA, 750 bp, Homo Sapiens
  misc_feature (225)..(320): n is a, c, g, or t
  misc_feature (355)..(371): n is a, c, g, or t
ggccttgagagttgcttttggcattaatattctaagagaattaactgtatttcctgtcacctattcactagtgcaggaaatatacttgctccaaataagtcagtatgagaagtcactgtcaatgaaagttgttttgtttgttttcagtaatattttgctgtttttaagacttggaaaactaagtgcagagtttacagagtggtaaatatctatgttacatgtagnnnnnnnnnnnnnnnnnnnnnnnnnnnnnnnnnnnnnnnnnnnnnnnnnnnnnnnnnnnnnnnnnnnnnnnnnnnnnnnnnnnnnnnnnnnnnnnntatatctgtgtatataaatccacatgcacatgaannnnnnnnnnnnnnnnnatttgtgtgtgtgtatgtgtatgtatatgactttaaatagctatgggtacaatattaaaaaccactggaactcttgtccagtttttaaattatgtttttactggaatgtttttgtgtcagtgttttctgtacatattatttgttaattcacagctcacagagtgatagttgtcatagttcttgccttccctaagtttatataaataacttaagtattgctacagtttatctaggttgcagtggcatctgctgtgcacagagcttccatggtcactgctaagcagtagccagccatcgggcattaattgatttcctactatattcccagccgacacatttagaaactaagctatgttaacctcagtgctcaactatttga

SEQ ID NO: 311387 - DNA, 1360 bp, Homo Sapiens
  misc_feature (179)..(223): n is a, c, g, or t
  misc_feature (425)..(468): n is a, c, g, or t
gaagctaacacttgaatttctgaagtctagcttaacatctttggttttcctactctacaatcctttcctcgaccaacgcaacctctagtacctttccagccgaaaacaggagaaaacacataacacattttccgagctcttccggatcggatcctatggactccaaacaagctcactgnnnnnnnnnnnnnnnnnnnnnnnnnnnnnnnnnnnnnnnnnnnnnaaaacaaatatttacttcatttgccaatcagaggatgttttaagaaacaaaacatagtatcttatggattgtttacaatcacaaggacatagatacctatcaggatgaagaacaggcattgcaaggaccctctgatgggacggtactgagatatctcggcttccgctcagcccggttttgactggttgaaaccggacattgnnnnnnnnnnnnnnnnnnnnnnnnnnnnnnnnnnnnnnnnnnnnccttcatacccagcgcaaaggcactggccgcacttgcaggaaaagtgcaacttaaagcagtaccttcattcatgaagctactttttaatttgatgtaacttttcttattttgggaagggttgctgggtgggtgggaaatatgatgtatttgttacacatagttttctcattatttatgaaacttacccatacagaatgatataactcctgtgcaatgaaggtgataacagtaaaagaaggcaggggaaacttacgttggatgacatttatgagggtcagtcccacatacctctttcaggagacaacttgcaccagtttgaccttttcttttctttgtttttattttaagccaaagtttcattgctaacttcttaagttgctgctgctttagagtcctgagcatatctctcgtaacaaggaatcccacacttcacaccaccggctgaatttcatggaagaggttctgataatttttttaactttttaaggaacagatgtggaatacactggcccatatttcaaccttaacagctgaagctatgccttattatgcatccacatgtatggtccctgtagcgtgacctttactagctctgaatcagaagacagagctatttcagaggctctgtgtgccctcactagatagtttttcttctgggttcaaccactttagccagaatttgatcaaattaaaagtctgtcatgggggaaactatatttttgagcacatgggaacaattatacttccctcgttcatattatgttgatacaaaaagaccttggcagcccatttctcccagcagtttttaaaggatgaaccattggaatttcatgccatccccatagaaaacctgtttttaaaattttaggggatcttttacttgggtcatac

SEQ ID NO: 311388 - DNA, 684 bp, Homo Sapiens
agcaaccagagcatatccctgcgccggcctcgcctcgcttctcaatccaaggctcgtgacactaaggtattgatagaagacacagatgatgaagctaacacttgaattttctgaagtctagcttaacatctttggttttcctactctacaatcctttcctcgaccaacgcaacctctagtacctttccagccgaaaacaggagaaaacacataacacattttccgagctcttccggatcggatcctatggactccaaacaagctcactgggtttcttttcttttcttctggtttaattttaattttctattttcaaaacaaatatttacttcatttgccaatcagaggatgttttaagaaacaaaacatagtatcttatggattgtttacaatcacaaggacatagatacctatcaggatgaagaacaggcattgcaaggaccctctgatgggacggtactgagatatctcggctttcgctcagcccgggtttgactggttgaaaccggacattggttttaaaattttttgtcaggttatgtggagaatttttttcttttcttcatacccagcgcaaaggcactggccgcacttgcagggtgcaacttgcagtaccttcattcatgaagctactttttaattgatggaactttttttattttggggggtttgctggtgggtggg

SEQ ID NO: 311389 - DNA, 623 bp, Homo Sapiens
ccacccagcaaccccccaaaaaagaaaagttcccctgcaagtgcggccagtgccgcgctgggtatgaaggaaagaaaaaaattctccacataacttgacaaaaaatttaaaaaccaatgtccggtttcaaccagtcaaaaccgggctgagcggaagccgagatatctcagtaccgtcccatcagagggtccttgcaatgcctgttcttcatcctgataggtatctatgtccttgtgattgtaaacaatccataagatactatggtttcttaaaacatcctctgattggcaaatgaagtaaatatttgttttgaaaatagacaattaaaattaaaccagaagaaaagaaaagaaacacagtgagcttgtttggagtccataggatccgatccggaagagctcggaaaatgtgttatgtgttttctcctgttttcggctggaaaggtactagaggttgcgttggtcgaggaaaggattgtagagtaggaaaaccaaagatgttaagctagacttcagaaaattcaagtgttagcttcatcatctgtgtcttctatcaataccttagtgtcacgagccttggattgagaagcgaggcgaggccggcgcagggatatgctctggttg

SEQ ID NO: 311390 - DNA, 650 bp, Homo Sapiens
  misc_feature (157)..(227): n is a, c, g, or t
  misc_feature (509)..(562): n is a, c, g, or t
atgggaaaaatagaccctgttctgtccctgtaattgatcctcagatcctccctagtacttggccataagaagctgatgggtggccagatgccttcagaccagcccacatagaccctgagtgtgttatcaagtctttcctgcccatatgttatagaannnnnnnnnnnnnnnnnnnnnnnnnnnnnnnnnnnnnnnnnnnnnnnnnnnnnnnnnnnnnnnnnnnnnnnatctatagcttcttctcttgactccagctcagtgattattcatcagcagaacattcctggaatgttaaatgagtcttaatcatgtacgctggaaacatcacaggagatctgcagataagtggtgacatcggtccaggcatatatatagctggagagtctaacacatcatagattaattctcaccacagcttctgttgcagaattcctgtactgtctcattgtctcttttacagcacttactgcagcctgccttgtgtgtatgtgtctttcctactgtatatnnnnnnnnnnnnnnnnnnnnnnnnnnnnnnnnnnnnnnnnnnnnnnnnnnnnnnataaaatcagtaaagacatcttgtgagttttagtggagacagacaataaataatgaacatatacataactatgttagaagaatatccc

SEQ ID NO: 311391 - DNA, 626 bp, Homo Sapiens
gtgtgctcctggcctgtgtgacagtgtctttcccgaagcagtgaaatgagaaattctgcaagtggccacccggaatatcagtctgtagctcttgggcctggatttctactatgttagtgagtgtaggaatatactgtgtctttaatggatgaaaattcaatgtatgctgtgaatttgttggtttgaaacattgaaatttttcattagacaatgtttacatacctcacctgaagaacctttgagagtgtatatataaaattttaaaatatattaagttgctttaaaacaatatgtatagctataaaagttggagttattttaactttgaatatgtacccaagtctcttaaatattgaaatcttgtagacttcttgtgcttctgtgttttgctttcctatcaggccatgtaggaaactgtgttcttgttattggtagaggggccctcactgaaatccaagcttggaaggatgtcctgtgttgtttcagattctcttgtttggttttgaaggatgcggtgtggagccagaggatgtgtgggaggggtttctctaacactgacttctattccatgagctttttcaaggcgcttattttatggcagcgtattaaacttctttgatattcaa

SEQ ID NO: 311392 - DNA, 859 bp, Homo Sapiens
  misc_feature (45)..(45): n is a, c, g, or t
  misc_feature (97)..(97): n is a, c, g, or t
gagtccataattttcctttccaaaggccagacagctctgatgtancagatagtcagaagtcaacaggccatttaagatagtcctagattttatgaanatgccagagttttcaagaagctactgtcactatcaggtagattccttgatggtgtaagactgtatttctttttcattccaagaactggcagcttcttttttctgagtcatttctgaatccattgattatgtttcagttctcttgagagtccaagctaaatgaagtttaaactgcttatctgaagacaccatttaaatttgagttcattacatggtttactataaaagctatttggcatatgcagtattcaagcttatttcagttactgaaactaaactcaaactcattttgtccaactgtgaaccctagttaacctcatcacttcaaaaagaaatgagctttttttgacattcaattttctacgattcaagtctcatatatgttcgtataaatgcaagtacagaacttatgcattcatcaaagagtaatatctctgagttttttgaaatgttttagcaatagaagcttgtactgctaaactgttgtctctgtttttattactagtttattttgaagacatttcagtataatcgccttttctttattgaattttgttactattctttgaatctctcttttctcttcttcatttaatctttgaagaatggattccaagagagaaaagtgaaagttaatgtactgagccacatcactgctaatttcttctgcatctttatccatgaggaaaatgcgagcattcttttcagaaggtccctgtaggagcctctgcagtagcggaatgtctgtcttctttagtcgtcc

SEQ ID NO: 311393 - DNA, 1064 bp, Homo Sapiens
  misc_feature (143)..(167): n is a, c, g, or t
  misc_feature (348)..(348): n is a, c, g, or t
  misc_feature (413)..(414): n is a, c, g, or t
  misc_feature (979)..(979): n is a, c, g, or t
  misc_feature (995)..(995): n is a, c, g, or t
  misc_feature (1003)..(1003): n is a, c, g, or t
  misc_feature (1019)..(1019): n is a, c, g, or t
  misc_feature (1023)..(1023): n is a, c, g, or t
  misc_feature (1027)..(1027): n is a, c, g, or t
  misc_feature (1030)..(1031): n is a, c, g, or t
  misc_feature (1033)..(1034): n is a, c, g, or t
  misc_feature (1043)..(1043): n is a, c, g, or t
  misc_feature (1053)..(1053): n is a, c, g, or t
  misc_feature (1055)..(1055): n is a, c, g, or t
  misc_feature (1057)..(1057): n is a, c, g, or t
  misc_feature (1062)..(1062): n is a, c, g, or t
agcaggctggtaccggtccggaattcccgggatggcggcgattttcccttctgtcagatcttgatgaacaaagcagtcataattcatctctagaaagatttatatcctggcatttgaaatgctttttatttagaatagtagtnnnnnnnnnnnnnnnnnnnnnnnnntgatgatggaataccagaccaagagaattccttggatttttctgaacactttaaccaacttgaattgttggaaacacatggacaccttattcctactggtactcaaagtctttgggtaggcaattctgatgaagatgaggagcaagatgacaaaaatgaagagtggtatcgattgcaaganaaaaaaatggaaaaagacccaagcagattgcttctttgggctgctgaaaaaaatcgggtaaaaannaaaattacagagggaagtgtgacagtaggaaaagcactgggttcaagccagaagacctgcctttactgttatggccatcatacctatctcttgattgtgaggaccaaatgagacaatgtacatgaaagcacatattaagctgcaaagtgtcatgctaggtattatttgggggtttaaggataattatctataaagatagcaagcaatcatctatattttaaaatcatttatataaagtcattaggatcatttaggaaagagaggatggaaactaacatttattaaaaactaactataccaggtaccttattacattattttatttaatcatcatgtatccctataagtaatattcttctcttttatagagtaagaaattgagattcaggaatattaatttgcccaggatcatcgaagtggaatgaacatcaaagcctattccctctgcttggcacttccacctcattttactaagtttcccatgtctgtgttagtaactaataactaaaagggtctcgcattttaatagcttttaacccagagcatgcccatttaccagaggccntagacaactgaaattncacctaangtgtttctaaggtgtntganaggnttnngnnttgatcccngattcctttnantnttttntt

SEQ ID NO: 311394 - DNA, 898 bp, Homo Sapiens
  misc_feature (487)..(487): n is a, c, g, or t
tcccttttgtaagtaaaagtgcaccatacaaatattaagacaatctagcttgtgtggagtgaccaagatccacaacttacttttaacaacagtattaatttagttgacactgtctctttaaatattaactggaatttagctgactcattttggagcagggtagtgtaaacatttcaacatcacttaggaagtttattaataaacactttcagctgggtttttaaatgagcataataggagcaaaaaatgctttcaaatgataaatatgtatgtatttgcatgcccaccacgcacaaaatatgtgtgaatgtttgccctatgcatgaaagttgggtcactccttaaaaccagtttaagtatgctagcttacattttctacactgaggcccagtttcatgtgacattggctttaaagtttaaggccaagcgatcaacctacctaagtaattttagttaatctgattcttaaaatctttgttttagatanaatggaggatactccatctaaagatttcacacactcagagataacaaagtattccaactttgcttcagagaacatgtctaccttcatttcattataaataactttcaactgcgagacacacaagaggtaccaggacatgagtcttctacatgggttcccatcttttagatttttttcccctagaaagccagcttttaaatgccatcacatgtgcacagcttgctttaatatttctcagaagctcagatcacatgggagggcgcttcagcctgtcacaaggctgcaatgtgacaagctgagctggatggaggctctcacataaagcctagtcaacaggggcctctgaaatcagcttctatttatatctcaaagcctgccaactcctacacaaccccaagaactaaggatgca

SEQ ID NO: 311395 - DNA, 1135 bp, Homo Sapiens
gaaacaaagtatgttatatatttgccaataattcacatgctgcctcagtgtcctcagatcccaggctgcacataaggtccatttgcctgagtattattacatacctccttctccagaaaactttcaagttcacagccttgcgttgtccatctttaatacacttagttgttggttttaataattaaggaaacaggacctacctatacctgtgccaacagggggcactatccctctgtaaagaacaaatcaaaaagtattttgtgttgtagctggaggatccaatggtcttgcttttggcaaaaacttgaagaggagggtggtctttacatgtgtggaaaccttgagtgaccgagcaaatagcaagagaaattgcttagtggcttttaaaatttgaaatataattttactttttatttttacaatacagtgtacagtatgacatctcaaaataacagtgcagatacaggaaaagagtacaaagggggattaacaacagatgtcagaaggttacctttattaaggctaaatccctgctttatattttccacacattcacaaaattacattcaaatcattccttattgatccttatttcttaggccatgagaaaaggaagataatccagacattagattttcatagaaagcaaatctggattagtctaaataatattctccttccatttgttctgacaacgaaaatttgagaaacaaagttatgcaccaacctaaaacttccttatttggattttccaagtacatagcattagttattgatatcatttctatattaaatggtaagacctcccccacactgggggtctccagtcagaaccacagagggacaggaaatggaattggccagagtggctgtacaactaggtgtacagcaaggcttttttccatattcttttgtggaggtcagcaacaactcagttttcactttaaggactatgttgaatatcagcacatcctcatcactaggatttagaaaagtttaggacatttctatctaccattgctgatgaggaaggggagaatgattgatagacttcactgaccttgaaatatttatcatctcagacttcctaaaagtatggcatggcatcacctctgccttgatacaagatctgccc

SEQ ID NO: 311396 - DNA, 785 bp, Homo Sapiens
  misc_feature (691)..(691): n is a, c, g, or t
  misc_feature (761)..(761): n is a, c, g, or t
  misc_feature (771)..(771): n is a, c, g, or t
catctatccaaccttctgaatacgttcttccttgtccagacaagcctggcttttctgcttctcggatatgtttttacaatgctaccaacccattggtaacctactggggacctgttgatatctccaactgtttaaaagaagcaaatgaagttgctaaccagattttaaatttaactgctgatgggcagaacttaacctcagccaatattaccaacattgtggaacaggtcaaaagaattgtgaataaagaagaaaacattgatataacacttggctcaactctaatgaatatattttctaatatcttaagcagttcagacagtgacttgcttgagtcatcttctggagctttaaaaacaattgatgaattggccttcaagatagacctaaatagcacatcacatgtgaatattacaactcggaacttggctctcagcgtatcatccctgttaccagggacaaatgcaatttcaaattttagcattggtcttccaagcaataatgaatcgtatttccaggtaatgagccagtggtttctttcattttaattaattagttagacatataaaaacttgctgatcacttagcagttgctgcttccaagaggtcttgggtccatgaagtgggcaaggtctggaatgttggcttaagtttaactaggaggcagtagcccattaaagtattgtggggngcttcaggagtggggtattgctttcataatctggggtgacaggggttggtcagctttaccttctacaagnggggttactnggagcttaagcatg

SEQ ID NO: 311397 - DNA, 639 bp, Homo Sapiens
ggggcaggtgtgaagcgtgtgctttagtttcgtgggaggcctggcatctccgagagggaggggaaaggtaaccactcctttgtggaggtcgccagggtcattgtcgtggatttgcacagtcggctgggcggtgcaatggcggaaagaaaaggaacagccaaagtggactttttgaagaagattgagaaagaaatccaacagaaatgggatactgagagagtgtttgaggtcaatgcatctaatttagagaaacagaccagcaagggcaagtattttgtaaccttcccatatccatatatgaatggacgccttcatttgggacacacgttttctttatccaaatgtgagtttgctgtagggtaccagcgattgaaaggaaaatgttgtctgtttccctttggcctgcactgtactggaatgcctattaaggcatgtgctgataagttgaaaagagaaatagagctgtatggttgcccccctgattttccagatgaagaagaggaagaggaagaaaccagtgttaaaacagaagatataataattaaggataaagctaaaggaaaaaagagtaaagctgctgctaaagctggatcttctaaataccagtggggcattatgaaatcccttggtctgtctgat

SEQ ID NO: 311398 - DNA, 371 bp, Homo Sapiens
  misc_feature (17)..(17): n is a, c, g, or t
gtttccagtggagtttntcttctaaagagacagtaaacaggtcacaactcattccttgagaaaggattcctcatcacatctctgtatcttcagaattggaagaagaatgtgaggctgtactgtgggcccgttcgccatgtgcgagtcatgggactccaccactattccttctttagaatctggaggggtgtcaagtggatcagccagggaggaaacaatagggattttcttagcttggaaataatcataggccttctttccacagactagaagtgtgacattcttcccactgctctggattctatccaccaccttctcatagggttcatctagcacattcaccccattcacttcaatgatgacatcctcat

SEQ ID NO: 311399 - DNA, 1253 bp, Homo Sapiens
cttatcttattctaaggtcttaatctgtactttattgcgttttgggtttctagaggcaaatgaaggttaaagcataaaaagtgaatccaaaacaaaagcactatcaagcatactcaaaaggcatttgttaatggtatttattctagcaaccacaacattgttacaaaagcacaattttaataggcttatctgctaagatgcttttataagcagctgtcacctatacagagttatgaatcatctttggtgctcaaggaacctgtagaagtaagagacatcatcatacagagaaatgtagttaagttaagttgaagcttggaaaagatcacatgaaaaaaatctagctcttgccttatctcttcctaagttaagcataaattagccgtctgcaatagccgcctgtaagacaaatgataacagaagacaatcacacatggtgaatggtttccagtggagtttttcttctaaagagacagtaaacaggtcacaactcattccttgagaaaggattcctattaaatacccagaaacagctatcaaataaacagccaaagctattacttgtcatcacatctctgtatcttcagaattggaagaagaatgtgaggctgtactgtgggcccgttcttttgccatgtgcgagtcatggtttgactccaccactattccttctttagaatctggaggggtgtcaagtggatcagccagggaggaaacaatagggattttcttagcttggaaataatcataggccttctttccacagactagaagtgtgacattcttcccactgctctggattctatccaccaccttctcatagggttcatctagcacattcaccccattcacttcaatgatgacatcctcatcctctagcccagccaagtcagcaggaccgcccttctgtacctctttgatgaatgagcctggcagaccccgaatcgcatttaagtgaaagccatagccattttcacctttagccagcctgcagagtttaggcttatgatctacttcctctgtagtatctggtggacttgagacttccagagaagtgggagtaggagctggagcctccttgacagagccattgggcagttcttgactttgatagtagagaaatggagaaaaatgagccagtctgtacatgttgtccgtctctttgtctaccaccaacagtgaagtctgatctccaccctttctaatcatttctaccacactgtcatgatccagggtttccacagactcgccgc

SEQ ID NO: 311400 - DNA, 810 bp, Homo Sapiens
  misc_feature (307)..(346): n is a, c, g, or t
atgacagcttttacataagacgcgtggctacaagtatgcccactgactttctgggaacttgcagccttttaatatgctattttgccaaaatcaaatgtcagatgcttttagtaacaggattattttcgttaagaccccttcattgttaattgctgggttagtttctggggtgagttctgagcaggaaacgagcctagatagtgtgcttataagcttcctgggatgctggtggaaggggtggtagttgtactcagcatgccttttttatctatttcatcagggctttgggctccagcagaaaatctgnnnnnnnnnnnnnnnnnnnnnnnnnnnnnnnnnnnnnnnnggggttgggggaggggtgtcaaatcatcaaggacatagattctggaagtccagcagaggaggctggcttgaagaacaatgatctggtagttgctgtcaacggcgagtctgtggaaaccctggatcatgacagtgtggtagaaatgattagaaagggtggagatcagacttcactgttggtggtagacaaagagacggacaacatgtacagactggtaagtaatacaaggccatatattcatgcattaaggctgggcccattcactcatgacctcaacttttgcactgagttaggactttgttcctcaaactggaagaggcataacaatcatcattaaggctaaactgaagctcaactcaaattggtagtgataagagaatgccaaatgattgataaatgagttttaagtccttggtcttaagattttgaaagaatttgtgaatataactgcaggcttactcttg

SEQ ID NO: 311401 - DNA, 1471 bp, Homo Sapiens
  misc_feature (902)..(952): n is a, c, g, or t
  misc_feature (990)..(990): n is a, c, g, or t
  misc_feature (1054)..(1108): n is a, c, g, or t
  misc_feature (1134)..(1134): n is a, c, g, or t
  misc_feature (1162)..(1162): n is a, c, g, or t
  misc_feature (1176)..(1176): n is a, c, g, or t
  misc_feature (1199)..(1199): n is a, c, g, or t
  misc_feature (1266)..(1266): n is a, c, g, or t
  misc_feature (1295)..(1296): n is a, c, g, or t
  misc_feature (1303)..(1304): n is a, c, g, or t
  misc_feature (1310)..(1312): n is a, c, g, or t
  misc_feature (1445)..(1445): n is a, c, g, or t
gggctggaccggtccggaatttcgggatcacttttaaaagtgcagccggagaccagcctacagccgcctgcatctgtatccagcgccaggtcccgccagtcccagctgcgcgcgccccccagtcccgcacccgttcggcccaggctaagttagccctcaccatgccggtcaaaggaggcaccaagtgcatcaaatacctgctgttcggatttaacttcatcttctggcttgccgggattgctgtccttgccattggactatggctccgattcgactctcagaccaagagcatcttcgagcaagaaactaataataataattccagcttctacacaggagtctatattctgatcggagccggcgccctcatgatgctggtgggcttcctgggctgctgcggggctgtgcaggagtcccagtgcatgctgggactgttcttcggcttcctcttggtgatattcgccattgaaatagctgcggccatctggggatattcccacaaggatgaggtgattaaggaagtccaggagttttacaaggacacctacaacaagctgaaaaccaaggatgagccccagcgggaaacgctgaaagccatccactatgcgttgaactgctgtggtttggctgggggcgtggaacagtttatctcagacatctgccccaagaaggacgtactcgaaaccttcaccgtgaagtcctgtcctgatgccatcaaagaggtcttcgacaataaattccacatcatcggcgcagtgggcatcggcattgccgtggtcatgatatttggcatgatcttcagtatgatcttgtgctgtgctatccgcaggaaccgcgagatggtctagagtcagcttacatccctggagcaggaaagtttacccatggaagattggtgggannnnnnnnnnnnnnnnnnnnnnnnnnnnnnnnnnnnnnnnnnnnnnnnnnnccactaattttagtattcattctgcattgctagataanagctgaagttactttatgtttgtcttttaatgcttcattcaatattgacatttgtagttgagcnnnnnnnnnnnnnnnnnnnnnnnnnnnnnnnnnnnnnnnnnnnnnnnnnnnnnnnatattaagcagaaatcctgcaatganaggtactatatttgctagactctagacnagatattgtacatnaaagaattttttttggtctttanatagatacaaatgtctatcaacttttaatcaagttgtaactttatattgaagacaatttgatacctnaataaaaaattatgaccatgtcaaaaaannccccccnnccccannnaccaaaactggtcggccggccttcggcccctcaaaaagctttcctagaccaattcgttttggcgccgcgggccccagtagggtaaagtgaaacatgggcccatagctggttttccttaaggagaaccccgggnccatggacttaaggggctttgggata

SEQ ID NO: 311402 - DNA, 506 bp, Homo Sapiens
agcatcatctagagatgatgctctcaattcaaccaagcccctcaaaggaccttctaccctggataactacctcatgctggaacttcccttcctgttactagaaggaagtagcctctaatggggaaggtacccatggcttctctccgatgcacactcgaggcagcatggtctactgagactagggccagggttggagcatcacactgtgcagaagaatgcccactcaatattgttttatgaaacaatgtttcttaagttttaagaagtttaggaaactgttttcttaagtctcatctttcaactatgacactgtcccaaagcttttgagattgataaacagctgcattttgcctgctctgcacttttggtgattaaaccgagattgattggtaagcagattcagagtcctggtccccgaatgccatgcaaaggcctgctggctgggtgtcaatgctggctcaattaagaatgctgctgaatgaacctgctccacttctcactctccc

SEQ ID NO: 311403 - DNA, 913 bp, Homo Sapiens
gtttcccaaacatttgggccattttccaagcaggagaggtatctttccctaattagtaaataggatcccaaaaaaggaaaataaagggcatgactgaagcccagggatggtccaataaagaaatgttttaatactaaagaggcggtttttactaatgtctcgataaagggtgggcttattttgtaacccatgagggtctacatgctgttccaaaagactatatatcagaataggtagggaagtaaaacaaatattgtataaagtcaggtacacgctgtcatacaatgtttgctgagaaaacaaacagtagaactgatataaaaactggggtgtgataaagcacacattcttataaaaaaaatactgtacaagggtagctattctaatataataaaaatgaccatgaacaaaaagcaatttggagaggaacttaaatctggctattgcatagtcactgtttcttgcagcctgtcttccttctttacccatgattcctatgccaacatgggcttcttgtatcatgcttacgtcattagcaccatcaccaacagccaatgttataggtttctcaggtgatatttttattagtcttattacttttgctttctgcagtggagccatacgacagcataatacagctgaacaatttctgcaaacttccataaatagtttttcatgctccctgagtgcaagagataggctggtcccatccactaccagcccatgctgaatcacatgatcctctgtaattcttctggcaagctgcctcaattgttcagcacactcgctgtctgatttctggtttataagctcaaggatgttcatggttctatgaaaatggccacatgataaactcacactaacagctgtttcatgtttatccccagtaagtacccatactttcaccccagcc

SEQ ID NO: 311404 - DNA, 989 bp, Homo Sapiens
  misc_feature (872)..(880): n is a, c, g, or t
aactaatcctagttttgatgggagattgaaagatattgatgaagactttaaacgagagcttcgaaatctggttccattgctgcttgcccctgaaaatttggtagaaaaagagataagtggatctaaagtcacttgtagagatcttgtagaatattttaaggcttacatcaaaatctatcaaggagaagaacttccacatccaaagtccatgcttcaggcaacagctgaagctaataatcttgctgcagtagcaggagcaagagatacctattgtaaaagtatggaacaggtatgtggaggggacaagccttacattgcaccttcagatctggagcgaaaacacttggatctcaaggaagtggcgataaaacaatttcgttcagtaaaaaagatgggtggagatgagttctgccgtcgttatcaggaccagcttgaagctgaaattgaagaaacctatgcaaattttataaagcacaatgatggcaaaaatatcttctatgctgctcgtaccccagccacactgtttgcggtcatgtttgctatgtatataatctcaggactgactggcttcattggcctaaactctatagctgtcttgtgtaaccttgtcatggggttagcactgatatttctttgtacttgggcatatgttaaatactctgggggagttcagagaaattggaacagtgattgatcagattgctgaaacactatgggaacaggtattgaagcccctgggtgataatttgatggaggaaaacataaggcagtctgtaacaaactctatcaaagcaggcctgactgaccaggtgtctcatcatgccagattaaagacagactgacagttcatctcctcacggactccactctcnnnnnnnnncatgcttgctgtacaatgagaactcaaataaaaataaaccaaagtttacaatcaactgtagaagtagtttagtgtaactggcttcacagatggctgccacagagtgtga

SEQ ID NO: 311405 - DNA, 1323 bp, Homo Sapiens
  misc_feature (150)..(158): n is a, c, g, or t
  misc_feature (1106)..(1106): n is a, c, g, or t
acaaggatggcgtaacccggaaatatgggggaaggatatatgcaacaaatttttaattatgtactgaaaataaattacaggaaataactttaaaatgcaacagaggacaaagtcacaataaacattcccattgaattcccttggtgggcnnnnnnnnntgagattgcagtgctcaagataaatatcacaaatatatcaaaaacttcaaattgtctatgcattcacacactgacatgagccacaaacattcctttcacagggacagtacttatttagcctaccacaggaccagattttgccataaactacaaaacttttaatacaaaatcgtatttatatatttataagtcatatacatgccctatctgtgattttagaaaataaaagctacacactgtacagacactcttaactcatagctgtaggcaacatttttggatggaatttcttccccaataaaattaatggcatattttatatacatgaaggctaaactgcaaaaagacagttcagtttcccagatatgcatctccttttagggcaagtttataaatttaaaaaggcaagacaaatgtacacctcagaattactttcttagctacaagagttgccatgtaatttctgtgaagtttctgatacatgcattgatgtaatactggtattgaaggcagtaaagcaatatatacttttaatgtagtggctcaataaaggcttcattgtctttccaatcttgttctttgaacagtgattcataaattctctaaaaattaaaatttcaatgggacactgtgttaaagagactctaaatagatttctgaaaatatttccctgaaatatccttttacataagacaaattcactaacattagattaagtaaaaagaaataaaagagttaaacatggcacaaaggtgcatgattaaccaatgctcctcagtccatctgcatgtcttaggagccattaaaagaatgcttaaaactaacaaacaatcttcacactctgtggcagccatctgtgaagccagttacactaaactacttctacagttgattgtaaactttggtttatttttatttgagttctcattgtacagcaagcatgaaaanaaaagagagtggagtccgtgaggagatgaactgtcagtctgtctttaatctggcatgatgagacacctggtcagtcaggcctgctttgatagagtttgttacagactgccttatgttttcctccatcaaattatcacccaggggcttcaatacctgtggtatgagaaatgtgcaaaacaaacaaacatgaggtaaaaaaagagttacatataaaaat

SEQ ID NO: 311406 - DNA, 703 bp, Homo Sapiens
  misc_feature (290)..(290): n is a, c, g, or t
  misc_feature (600)..(660): n is a, c, g, or t
cctgtgggctagggggatgtttatcatatgtctgaaaaggcttgcatactctttgtcaatggaaaatatatattttactcctttaatataacctgcattactaaaatcgcagccctatatcaggtttctaatcaattatttgttgaatatataattaatagttgtcatattaagttagaacaagaccgccttctgtttcttcgagaaaaggatattttgaacaatttcaaaacttacgtttccattttgaaactgtcttggccaacggtagcttgacattactcgtgtanatccgtaaggatgagcaagcataaatccaactgccattttgtacagcctagcatcccagaaggtaagaatagaggctcctccagccccatgtcctcgttgattgtcatggttatccacaaagacaagcgctctgtcagaaggttcgaaaccccaaccttctccccagttcctatttttgaaaaataagatatacgttgatgtatcatttcacaacagtttgagagtaacttaactgtgcatctctctctgtaaggcatggcatctgaagattaaattctttctctaattaaatgcttttcctgtaagagnnnnnnnnnnnnnnnnnnnnnnnnnnnnnnnnnnnnnnnnnnnnnnnnnnnnnnnnnnnnngcatgtgtaatctacatgtatggtccatatttgtatatacatg

SEQ ID NO: 311407 - DNA, 730 bp, Homo Sapiens
ttcttgcatgaaatatatttgtaaacaatataataaaagtaatttttaaagacctataaagaatgaattttctattggactattctaatactatctagcagtttaaatggtttttaaagaagtagactggactataacatagttctacaattctagctataatatattttgagagatactttctacaaaacaaaaacgactaaagggcagaaaaatgattccacactaagaaggcattggtgcctctagaagttggcccaatctaaatttgcacaaggattttttcaattttcaaagcattttccttgtttaagtcggtcaatgtagtagcatagcttcacagccgttcccagcttcacccccaagtgcttcagcaacacgtcactcgtgagtaggagcagagccttcccgtcaatttcctatggagagaagagacttaacgataattaataatgcttccatattttcatcagaatggttagttctttatgagaacatgtaaagcaaactagagagcagctcattgcagatgtatattctctgaatatgcgtctactttatgaaaactattaaaaatataacttgtacagtgaagcaccgtttggtaatgtataaactcatttcaagttctgagaaaaaggaaatctaacataatatcttaaaaaataaactgtgtcaaacttaattttaaatatatactgtatgttgaataaaatactacacatccatg

SEQ ID NO: 311408 - DNA, 1056 bp, Homo Sapiens
  misc_feature (1005)..(1005): n is a, c, g, or t
tcccgggatgctctctgatccactcaggggtcagggcatcactggtctcgcgtgcgcgtgaccaggcccggtttccggtgccaggacctttccgaagcgtcgagtggcctaacggtcacagctgtcgcccatcggagaggcaggactactgcgagcagttttaccgcgacctccggaggccggcgtgacaggctctgtcactaaaatagcaggaaccgaatattgtatctgacgcatcctgtaatactgaagagcaactgaagacagttgatgatgtccttattcattgccaggttatatatgatgctctgcaaaacctggataagaagattgatgtgattcgtagaaaggtttcaaaaatccaacgtttccatgcgagatccctgtggacaaatcataagcgatatggatataaaaagcattcttaccggcttgttaaaaagcttaaactccagaaaatgaagaaaaatgaggtttacgagacattctcctaccctgaaagttacagccccactttaccagtgtcaaggcgtgagaataattccccgagcaaccttccaaggccatccttttgcatggaagaataccagcgagctgagctggaggaggacccgatcctcagccgcactccgagtccagtgcatccctcagatttctctgagcataattgtcagccgtattatgcatctgatggtgcaacgtatggttcttcttcagggctctgccttggcaaccctcgggctgacagcatccacaacacttactcaactgaccatgcttctgcagcaccaccttcagttacaaggtcaccagttgaaaatgacggttacatagaggaaggatgcatcactaagcacccttcaacctggtcggtggaagcagtggtcctatttctcaaacagatcctcttgcattatgccctcttgtcgacctcttcagaagccatgaaattgacgggaaggctctgctcctactcacgagtgacgtgttgctgaagcactttgnggtgaaagctggaacggctgtgaagctatgctactacattgaccgcttcgg

SEQ ID NO: 311409 - DNA, 621 bp, Homo Sapiens
  misc_feature (11)..(11): n is a, c, g, or t
aaagcacccgntaagtcggtcaatgtagtagcatagcttcacagccgttccagctttcacccccaagtgcttcagcaacacgtcactcgtgagtagagcagagcccttcccgtcaatttcaagaaataggaccactgcttccaccgaccaggttgaagggtgcttagtgatgcttccttcctctatgtaaccgtcacaactggtgaccttgtaactgaaggtggtgctgcagaagcatggtcagttgagtaagtgttgtggatgctgtcagcccgagggttgccaaggcagagccctgaagaagaaccatacgttgcaccatcagatgcataatacggctgacaattatgctcagagaaatctgagggatgcactggactcggagtgcggctgaggatcgggtcctcctccagctcagctcgctggtattcttccatgcaaaaggatggccttggaaggttgctcggggaattattctcacgccttgacactggtaaagtggggctgtaactttcagggtaggagaatgtctcgtaaacctcatttttcttcattttctggagtttaagctttttaacaagccggtaagaatgctttttatatccatatcgcttatgattt

SEQ ID NO: 311410 - DNA, 444 bp, Homo Sapiens
gttctgggggggactttcaagtcttccagatggttgtcaacaacaaaaaaggcttattgaatcccatcttgctatgcaagttttatcagatgatcaaatagtggatcttatacatccccattgtatgtacgacattttcaaaccaagtcttaacttttcaaggacattttagtagctaattcatgggagggggaagaatgatgcatgtttttagattgactgactatttttgagttatggggctcattttgaaatactgctgtccagatcagcttgttgctgcatataatagaaggttcttatgaatccaagttgtatattcacttgtaggataatttaaaaattagattttttttgcatatgagcaaaaaccttttgttggatacaggagagggttggactttatctacagttatcttttgattacagcaacagctctgggtg

SEQ ID NO: 311411 - DNA, 3438 bp, Homo Sapiens
  misc_feature (59)..(83): n is a, c, g, or t
  misc_feature (114)..(122): n is a, c, g, or t
  misc_feature (247)..(247): n is a, c, g, or t
  misc_feature (304)..(313): n is a, c, g, or t
  misc_feature (660)..(669): n is a, c, g, or t
  misc_feature (681)..(681): n is a, c, g, or t
  misc_feature (691)..(693): n is a, c, g, or t
  misc_feature (701)..(701): n is a, c, g, or t
  misc_feature (705)..(745): n is a, c, g, or t
  misc_feature (747)..(752): n is a, c, g, or t
  misc_feature (754)..(754): n is a, c, g, or t
  misc_feature (756)..(757): n is a, c, g, or t
  misc_feature (759)..(760): n is a, c, g, or t
  misc_feature (762)..(792): n is a, c, g, or t
  misc_feature (794)..(798): n is a, c, g, or t
aaataggtgttttttcttacaaagattttcgggggggagaggttcccccggtgggaggnnnnnnnnnnnnnnnnnnnnnnnnncaattgttgtggtccccacgttttgcccacnnnnnnnnnaaatattttatttccgaggggggttttaaagcttagggggacaaatttggtgggggtaagagggggtccaacacggcctctttttggaagagggggtgtaattctaggggggcgagaaaaatggngttttttgtgggaaaggagccccaccaattttgggggcgaaaaaatgggctaaaaannnnnnnnnncaaacacattgtttttatttcaaaaattctcggcgccgagaggacccccgcgggcggtgtaaaaatatatccccatctgaaaacgaaacccccctggggagagccccccctctgggggagggagttctccaataaaaagaacccctggtggaaaccccccccgggcggggtgttttgttttatggggagggataattaagaaaccccccccgcggcagtatttctgttattgttctgaggatacacaaacccctttggcccaggttccccggtttctctttggggcccgccccgcgccacaaaaatatgttttaaaaaatttttccgggcgcgcagagggaaagggnnnnnnnnnnttttttgggggnctaagggttnnnaaaatttntttnnnnnnnnnnnnnnnnnnnnnnnnnnnnnnnnnnnnnnnnntnnnnnntntnntnntnnnnnnnnnnnnnnnnnnnnnnnnnnnnnnntnnnnntaacaagaatgcagatgccatttatttggtccataagtatagtcgttatttgagttttacaaaacatcgaatataaataacctgaaactgtaacaatacacaaaaattggcttcttacacagacataccaggcggtacaaactgaaaacttgagtaaattaacattgttttacattaatatacatagtgccatctaacatttaaaaacaagtttcaatgcatagcactcgatacttctttgaatctgtttcaatcagttaagagtatgaaaatggttagatctaggctaaaaataattcttcttctagccaaaaataaaggcataatatttataaccaggtatcaactttactaaaccacaatattttgaaactattaatgatacctaagggtatttacattaaaaaggcaacatgcattgtgttgttttatctcatgactggttatgcacacactttgttcaaagggtttttaaaactatattcctactttcaatacagcatactgcaatgtgtctaacagttctagcaaaatgaatgctttcaaagggagcagaatcattttcaagtcactgctgtcaattttttccctttggaacaaaggacataacaatctggttctgcccagataaactaaatagtaagagggttctgtttagaggcatttctgttcaatctaatgctatgacatcatcaagctcttccttctgttctatacgtgacctctttgcactgagattctctttctcatctaatttcctcttgcggcttctctcttcttcactgacgtcggcattatttgaagaatcttcttcatccgaatcaactatgagaacgtcatcttgctcttgagctgtggaggtggagggctgagctccatcatcactgccattggttatgcttttggcagcatcttcagcttgtttgggccccactttttccggggcatcaccaacaacttcaaattcaacgtcctttcctaggtcttcactatgaaggatgttgatcaataaagtatagtcctggaggaagtcatctgcttgaagccggctgccatttctaattccaaattctgacaacttcttgtgattattagcttccgtctctccctcttcggaagatattaggattgttcctttcccatcttcaatttggacatctggtgctaccatagcaaatttttctttcactatcttgtcttgtaaggtgagaacagtcactttatggacattcagccgcacagtcacctctggcttgctggcacatacataacaattggggttgggaggatccagtgcacaaggcacaagaagcttctttcttgggtttggttgtttattcaaaaaaattgttctgcactggtctatttttcctgataaaatcttcaatccttccaatactatcaacccagcaattactgcattagtagtagcaatagcaggaataatgttccctgccattgatttgatatcaaatctactcttcatattcatactgaaaatatgcatcctgaggtttgcagcagaggtgacaaaatccattgcagatgggtcatccttatcccatatgagctcagctccatcccccttttctgctaaatgaactctcaaagtctcgatgctctttgaaaaaagacgtgcatagctctttacatctagaacctgctggtctttcaggcctaactggggttcattctgttgatctgatgcattcgtttcttctccttgactttgtacttcagcccagtccaacggaactggaggtttccttttccgccatagtttgtccattgtcaacagatacctgatgtcatctttaaaaagcttggtaaaaagtttaactggatcatatccagttgatttagcccattccttagtagaaatacgtttaatgtcaccatcttcattagatgctctagctctggcttcggcttccgttggttcccaggcagcttcagggtcagctctgtcaggagatacttcttgatcagcatcttcttccccaaacaactggttgaacaagtactttgcccaaacgatgcaatgtataggttctgaaggtgtgttacgaattgtacagccaggaaaggttctctgggtcggcttaggatgacactcataacactcggtcacaccctttttgatagtagttacttgtccaagatacccagctgttccactttcaataagaggaacatcagctgccaggcacattctattaacatggtttcgggcagctctgttatctaaagcattcataaccagtataaactgtcggaaaaattccacattatagtcagggttcatgatgctgtcatggtaggcaacgatattagctttcgggtaaaactgcagtacactttccttggcaacctgtgcctttgatcttccaacatgtttcttttgaaacaaaaactgtctgttgaggttgcttacatcaatagtatccagatcaatcaggtcgatgtgggagaaaccggtgagcacgagattcttgaggagctcgcagccgatgccgcccgcccccaccaccagcacccggcccccggccgccgcctcagccagctcccggggcagcccccgcgacagtgccatggcgggacaaccaccctcgtgccgaattcgccacccaggcctcgctc

SEQ ID NO: 311412 - DNA, 1036 bp, Homo Sapiens
gtatcaatgtcagctgcctgaattgtgttaaaaagcaattcagcaacaccaactccttcaacattgatcaagtgaggctgaaataaagcttctggtgcttcaaatctctctcccccaactttgatgatacgtccatctgggagtgtataagattcaactaatactgtggtttctaaggccagtttctgctcttgctcaatattatatcccacgtaacacagtctttctttaatcatgcgaaccgtttcaaaatcagcagagtggttgaaggcgtatcctcgcaacagaagtagcttgataagatatctagttatatccctcccagcaatatccagtctcctggtaagatgagggagagaaaagccttcatatactgggcaaatgtgagtcacaccatctccagagtctaccactacaccagtcaataaaccttgagcgtacaaagtcagaactgcctggatggctacatatacaccggaaaactggtaagtttcaaacattacctctacaatcttctctctgtttttggttgggttcataggaggttctgtgagtaagattttacaatttctggtatctatattaagtttctctggtccaaatgtgtagtcccacaggtgtttcatgtcatcccaatttcgtactatgccattttccatagggtagttaacttctaacattgatcgtaattcacttgcctcatcaccaaccataagatccttgatttcaatgtttcccactttggtggttgatctgataataggtcttccaaccaaagctgggaagatgtgttctggaaagttagagcctgcatatccacacttcacaaacccggtgccgttgtcgcacaccaccaccttcctgccctggctgtccatcgtccgcccagggaagagccgctgcagccgcacaacctacagccaccgccgcccggccgttttctcttcttcctcttgcgtcttcccggcccctccttcggcccaacttttttcccccgaccggaagccgccgccgggctccgcccgtcatttagctc

SEQ ID NO: 311413 - DNA, 608 bp, Homo Sapiens
  misc_feature (175)..(175): n is a, c, g, or t
cgtcgcattctgtcatacatacttccacgcccagctccataataaccccctcttcctcctattggtctatcatatggtcccggtcgctgtcccagcaatcttcttggtggatcataaaatcctttgatttcactcctgctacttctgaagatctcaatatacctgtgccctattntttccttgcctttccccagagcattttctgctatctcctttgaagcaaactgcacgaaggcctcccctgtgcttctcccctggtagtccatcgtcaatgttatcccatttggcacgatttccaacccttgaaagaactgaactatttcctctttgctgcaaccaaatggtagtccacgaagtcgtactgtcccatcactagcgtcatttggaccattatgtttcataacccaatccatctcaataccgtttgatttaaatgccccttttacttcagataccctgtcaggcgatagttacgccgactctggtgctcgcggggtccagttcaaagaagggagaagtcgtttgcctcgtgtagcgctcgccacaacggttctcccaaccgtctccagcggtgacaaccgcttagggagctgcgcagcacagctgct

SEQ ID NO: 311414 - DNA, 1699 bp, Homo Sapiens
  misc_feature (418)..(427): n is a, c, g, or t
  misc_feature (437)..(589): n is a, c, g, or t
  misc_feature (1170)..(1170): n is a, c, g, or t
  misc_feature (1303)..(1306): n is a, c, g, or t
  misc_feature (1320)..(1320): n is a, c, g, or t
  misc_feature (1326)..(1327): n is a, c, g, or t
  misc_feature (1336)..(1337): n is a, c, g, or t
  misc_feature (1342)..(1344): n is a, c, g, or t
  misc_feature (1346)..(1366): n is a, c, g, or t
  misc_feature (1652)..(1653): n is a, c, g, or t
  misc_feature (1657)..(1657): n is a, c, g, or t
  misc_feature (1682)..(1682): n is a, c, g, or t
  misc_feature (1693)..(1693): n is a, c, g, or t
  misc_feature (1695)..(1695): n is a, c, g, or t
agatagtgtttagaaactgaggagttgaaaataccaggaatagatgctgctgttgtcactgatgtgaaactggttggttacagattgttagaaggtcagcaaacttcagtccatgggctaaatccggtcacaccattcctctactgttgagtggtacattagagacccaatggccattcaggccaaaagtactgactctggctttgaaagcaatggtgtgctctagatcttactgggaatcagctggcctgagttccaactgcttttaatgatagtttaaaacctggctaacttgtgattagaaccaaatgatatcttttggggaacaatttcatatagtcttaaataggtggctttattcaaaccgcatagttccaaatcatgatatcccgtatttctctctgtgtgtttgtgtgcnnnnnnnnnngacagagtcnnnnnnnnnnnnnnnnnnnnnnnnnnnnnnnnnnnnnnnnnnnnnnnnnnnnnnnnnnnnnnnnnnnnnnnnnnnnnnnnnnnnnnnnnnnnnnnnnnnnnnnnnnnnnnnnnnnnnnnnnnnnnnnnnnnnnnnnnnnnnnnnnnnnnnnnnaaaagcagtaaattctttacattatccttaagtgtatactctgatattcacagaacctctgtagttgactaagttattagtctgacagggcagtggaagggtttgttttaattgatgaggaaaaatcaaggtatgtggtaatttactttaatattctcaatagaaaagtaaataagtgtttccttttatttagttcttctcaccactaaatccaatacgagttcatattgatattggagctgatggcagagccacaggagaagcagatgtagagtttgtgacacatgaagatgcagtagctgccatgtctaaagataaaaataacatgcgtaagtggtgtctttggcacacaatcttatttcctaaacgtgaatttataaaataagaggctctaagatctgtaggtaacgcttggcagttgttgggatttaaaaccattttgacctctattaatggctttctgtggggctttatatatcgctgtactagtaattaataagcatactttgtttaatattacttaattgatcttttttacaaagcttgtattgatgaattttatccatcattcctttctcccntgttactctttctttttttcttaaagaacatcgatatattgaactcttcttgaattctactcctggaggcggctctggcatgggaggttctggaatgggaggctacggaagagatggaatgggtatgtaaagnnnntaaaatatgcaggnttagcnncttatcgannagtcnnnannnnnnnnnnnnnnnnnnnnnaaagataatcagggaggctatggatcagttggaagaatgggaataggggaacaattacagtggaggatatggtactcctgatggtttgggtggttatggccgtggtggtggaggcagtggaggttactatgggcaaggcggcatgagtggaggtggatggcgtgggatgtactgaaagcaaaaacaccaacatacaagtcttgacaacagcatctggtctactagactttcttacagatttaatttcttttgtattttaagaactttataatgactgaaggaatgnntttncaaaatattatttggtaaagcaacngattgtgatgngnaaat

SEQ ID NO: 311415 - DNA, 1220 bp, Homo Sapiens
gaatataaaaatttatttttaagtcaaagtatgcaacaaataaacctacagaaaacattttcccatcacaatctgttgctttaccaaataatattttgaaaacacattccttcagtcattataaagttcttaaaatacaaaagaaattaaatctgtaagaaagtctagtagaccagatgctgttgtcaagacttgtatgttggtgtttttgctttcagtacatcccacgccatccacctccactcatgccgccttgcccatagtaacctccactgcctccaccaccacggccataaccacccaaaccatcaggagtaccatatcctccactgtaattgttccccattcccattcttccaactgatccatagcctccctgattatccattccatctcttccgtagcctcccattccagaacctcccatgccagagccgcctccaggagtagaattcaagaagagttcaatatatcgatgttgcatgttatttttatctttagacatggcagctactgcatcttcatgtgtcacaaactctacatctgcttctcctgtggctctgccatcagctccaatatcaatatgaactcgtattggatttagtggtgagaagaaattagcaatgtcattttcagttgcacgaaaaggcaaccctctcatatgtacgaaatgaccaccatgaaaacctgaacttgcatcaccagctccaccatagccatgtcctcccatacctcttccatctctcattctgtcatcaaagccatcattcccatagccgtaattattatagccaccatagtcatcaaaacctccataaccaccatcatatccatcacctcctcgtcgcattctgtcatacatacttccacgcccagctccataataaccccctcttcctcctattggtctatcatatggtcccggtcgctgtcccagcaatcttcttggtggatcataaaatcctttgatttcactcctgctacttctgaagatctcaatatacctatttaaaaatgttttaaggtacaggtttcagcataaatgtattagtgtaaattagatactgggcaaaatgcagtaagtttttctatatctagatacataacccaatttaaattgcctaaatacaccgtaagttaacagtttaaacctacaaacttaattaaatatttaagttttacaaagaaattagtcacggaaaacaattcataaagtatat

SEQ ID NO: 311416 - DNA, 1504 bp, Homo Sapiens
  misc_feature (1206)..(1206): n is a, c, g, or t
  misc_feature (1255)..(1255): n is a, c, g, or t
  misc_feature (1426)..(1426): n is a, c, g, or t
  misc_feature (1465)..(1465): n is a, c, g, or t
  misc_feature (1473)..(1473): n is a, c, g, or t
  misc_feature (1490)..(1490): n is a, c, g, or t
tttatctcccacattgacatttattaataacatttctggcaaaaacaagtaacaagttcaataactgaattcacatcaacaggtttcattttgatccattagccaatttggaaaaaagccatattgatcaaagggattaaaattaaaaagcaccttttccttgctacatatagattctttaaactaaaactccaagcagggatcagatacaaaacccaactgcaggattgtttttattgactatgacatggacttgttgcttacatttttttaaagtcatcatttatacagttatttaaactctattgggcagaaaactgaaaatacaattgtgagaattatactccatagtaaatacctatgtacttaatactgaattcttgtgtcactgagaactttaaccttactctaagacatcttgcgataacgtgcaactatcaattttttggagacatttttggtatttcggtcaagtgctgaaggggttttactccaaaatctagggctagaattcagcttccaacactctcatacccaggtaacacaattatgaatattcagaaatcaatacctcttagatcatcaatgtttcagagctatgcctgataaatgacatttgaaaaataataatatagaaataattagctgaatttatactcctgaagccacttcatctttaggctttatatttacagtgttgtccaggaggaactaaagaaaaaagttacactaattatttgtcaagctctattccagatgtctgcttaagacttgcagtttacgcagaggtgaaccattatcctctaaaattacaccacactacttcttgtagaactaatagtaaaatacatcaacccaaatcttatgaaggcagcacatctttaggatttttaagtcaaagtatgcaacaaataaacctacagaaaacattttcccatcacaatctgttgctttaccaaataatattttgaaaacacattccttcagtcattataaagttcttaaaatacaaaagaaattaaatctgtaagaaagtctagtagaccagatgctgttgtcaagacttgtatgttggtgtttttgctttcagtacatcccacgccatccacctccactcatgccgccttgcccatagtaacctccactgcctccaccaccacggccttaagaaaaagatattaagaatcactcagcaggagatatctngcataaaataataaaagtaatacctgcactttaaagtttgcactacatnatgcgggactaacacaaactggaactagagatacttaccataaccacccaaaccatcaggagtaccatatcctccactggtaattgttccccatttcccatttcttcccactggttccataggcctcccctggattatcttttaaaaagggagagagggaaaaaaattggnggcttcatcggataagccaggctaaccctggcatatttnaaaacttncctacccattccatctntccggagcctccca

SEQ ID NO: 311417 - DNA, 441 bp, Homo Sapiens
  misc_feature (416)..(416): n is a, c, g, or t
ggtttgaatataaaaatttatttttaagtcaaagtatgcaacaaataaacctacagaaaacattttcccatcacaatctgttgctttaccaaataatattttgaaaacacattccttcagtcattataaagttcttaaaatacaaaagaaattaaatctgtaagaaagtctagtaggaccagatgctgttgtcaagacttgtatgttgggtgtttttgctttcaggtacatcccacggccatccacctccactcatgccgccttgcccataggtaacctccactgcctccaccaccagggccataaccacccaaaccatcggggggtaccatatcctccactggtaattgttccccattcccattcttccaactggattccataggccttccctggatttatcccatttccccatnccttctttcccggtaagggcccttt

SEQ ID NO: 311418 - DNA, 379 bp, Homo Sapiens
acgaggagagaactagtctcgagtgttttatgattgtcttgtacattcagcagtcactgcgcctgcagtcggcgacagtttaatgtgaggcaattaccgctacagacatcttgcttcatcttaaaaaaatattttcaaagcatctcacaggccgagctaagcaggaccctcactcagacattcaagagtgtttccgaggcagagctcagatgcctgcgggaagcggcccctccacctgcggaagggaagacgatgcctgttggagccgcacggaagcatccagaactctgaggcctgggggccggctgcggtcagtgcaaggctgctgacatggtgtgacctcttgccggggtgggggcagagcgtgcggtgacgggtc

SEQ ID NO: 311419 - DNA, 669 bp, Homo Sapiens
  misc_feature (81)..(93): n is a, c, g, or t
acattcagcagtcactgcgcctgcagtcggcgacagtttaatgtgaggcaattaccgctacagacatcttgcttcatcttnnnnnnnnnnnnnttttcaaagcatctcacaggccaaagagctaagcaggaccctcactcagacattcaagagtgtttccgaggaaaactcgaggaggaggcagcgtggaacatcttcccatggccacggccccggcacagagctcagatgcctgcgggaagcggcccctccacctgcggaagggaagacgatgcctgttggagccgcacggaagcatccagaactctgaggcctgggggccggctgcggtcagtgcaaggctgctgacatggtgtgacctcttgcaacggggtgggggcagagcgtgcggtgacaagggtcagactggcggctcccactgcagccagaagtgagggagccagcacacgggggtgggcagtggacaggacaggatgcggcaggccccagtaccccccactcaggaatttgcttcaggccaaagcccagggcagcagggtaaggcgccatcggccaggacctgcacggcaggggcagcccccttcactccctggacccgagaccgtctctcttctggaggatggacatcctgcatcccgaggtgcagtctgcacccagaaggggggatct

SEQ ID NO: 311420 - DNA, 1813 bp, Homo Sapiens
  misc_feature (663)..(663): n is a, c, g, or t
  misc_feature (752)..(752): n is a, c, g, or t
agaatcttttaaaaataatatttaaatttattgtttcacattagtttgaataaagcacaagccaagatggtttaaatatcatttgcagatgtccaagcttctttacaattacaggtcatgggcatcatcaacctagtccttgacttgcagctaaaaaaggcaaaaggtctgtgtgaagtgacagaagagcacaccctactcatgtcatgagcaaggaatcaaagtcgaagaacagtaacagtcttgacatcagcactgtaagaattactctgcagtaaactccaacccagaatggggaagaatactgaattagctgagcacattctgggacacaattctgaccaattttcagtctcatgatctctggttggagcaggtttcattctccaattctcttttacagaacagcagaactcgagccttcataaaagtgattaacgggcctttccgcttcttcatttttcctccagccaccttggttcctgacaccaatagcaccctctggtgtcatcattatctccagcatcctctcgcgagcgtttcttcttttctccatgctcccttaactccatttcgggcaaaacctttgggcttcagcgacgcgtttctgtcagcatcataacctcatcatcctgtgttggaaaacctggtagtttcttcccnaattaagtgttctatgcgctggaagagttccacatcaatactgtgtgacaaaaagtaatagccctttccggagcgccccagctctagcntgttcgaccctactcgatggatgtaatcccttggaattggttaggaatgtcaaagttgacaaccacatctacatgaggtatgtccaaacctcggctggcaacgtcagttgctagaagaatggaacgggccttggccttaaacttattaagggatcctaggcgcttactctgactcatttgtccatggagggggatggcagtgaagccaagatttcgcagtagcaaagctgttctctgggtattattacaggtgctgcagaatatcataaaggagtttccagccaattcatttagaatataaaccaggtaggtatccttgaatttagagggaataaaaatataatattgctgtaatttttcaactgtctggtatttagaggaaacggcacatttcacaggattcttcagagctgctcgctgaagtttttgaaccttcttggtcatggtggcagagaagaggaatgttttccgatctcgaggaatcactttgaggatcttgtcaacctctgtctcaaaatccatattcagtattcggtcggcttcatccatgaccaagtatttgagagctctcaagttgaaacctttcgtattttccaagtggtcaatcagtcgaccaggagttgctattattatatgtggtttttttgcaagggccaaagattgagacattgaatcaattccacctacaatcacagcactctgcactccaatagaggaccccagggcttcaaactgctctgagatctgaaaggccagctcccgagtcggggtaagaactagggcaaacaaacgctgcggggtctccagcagtgcgtttagaatgggcaaagcaaaggcgcctgtctttccagagccagtttctgcaagcccaatgatatcacgaccttgtaaggccaaaggaatagcttcaatctggatcttggtgggttttgtccatcccaactggtcacaagcttcacacaacacatctgtcacacccaggtctttaaatgttttagtttcctcctcttccacaatcggctgggacgcttcggtcggagaatcgtgttcctcgggtgccg

SEQ ID NO: 311421 - DNA, 2302 bp, Homo Sapiens
  misc_feature (1232)..(1310): n is a, c, g, or t
  misc_feature (1905)..(1905): n is a, c, g, or t
  misc_feature (1907)..(1915): n is a, c, g, or t
  misc_feature (2100)..(2126): n is a, c, g, or t
aacacaaaaacacaaacacaaaaagaaggaaaatcttggagggtgggcgtgggaactcaggaccccagagtggcgagtggtgtggggagggagagcctctctcccccttttctgtgtgagaggaactcttagtgtctggtgcagctattaaatgtgcaatgtgtcaagtagcttgttttacacgctacaacatagctcatttgtaacccattgtataagctgtgtatttacaaatataacacaacaatttaacttttccttagaatacaaaaagtcatgcatggtctggggaactatatgcttttccatttttaagtcaggactgcaatactgattccagttaatgagcagctaagatccaatctgtctaatacagtgaccccctagccatccgggcctggcaatatacaattttttttcccctccaagtttgtaacactccccttccagaaaggcattgtgcaacacaggattatttttaaatgattctgaatttgaattaactttttggagaattctgtgatgcccttagaagaaattggacacgtattgagtgtcacaaagctggggctgggaattgctggtctaatgtttcattagacttaagaacctaaaatttttctcagttgggtggataaaaccactaacgcttagaaactgttttctcatgcagctatgtttctcttatttatgccttgaggactaatttctggttttctagctgttaatgcactgttgaccttcataatggtgccttacgcaagcgatcccttctgtgggggtctcatacaggggtgtgggcgatgcatgctttattaaggctcttgtttcacctggcagtgtactgtatcaacgtataatacagaaaaaaaatctctttaaggtcctccttcacaaagacatagagtgaaactccctttacatgtcagtatttgttcaacactttaggcaacttgactgtcagtgttaaaatggaaaacaggaaaatggagaaatctgagcaattctgccaccttgagactttcatatagaccttgcacaacaattgtatagatcacacaccggctgtatttaatatgtaacattttcacacatattaaagatacagaagtattaaaaaacccccaatgttaatgtatttgcttaaaaggcacaagtttcacatatctgtctagctatctgttggtaatacagaaagtatactacttttttaaaaaagtgggcagaattcnnnnnnnnnnnnnnnnnnnnnnnnnnnnnnnnnnnnnnnnnnnnnnnnnnnnnnnnnnnnnnnnnnnnnnnnnnnnnnntttttttaaggagaaactagaatgtttagctagaaaattccacagcctgtgaagaaatatttcaaaatggccataaaggaggtaaaaatgaaaaccataacctaacttttatagaggctttatctttaatttaacgatgtgcggaggactttcttgcttgaatctgttccgggctgtctgctctgtccatcaaatgggcaggtctggaatggggcaccttcggccgttcagaagtggcctgaacagaatgctggaacccaggctggactcggacacactaaggttttgattttgaatttcagccttattagaagatctaacctaagagtaagctaaccacagggattcttttgtagaacactttttatgcagatgaagctattttttccagcaagtagattcttccagtttttccaaggagtaatttccccgaattggcataccacggcgtggacagctgatatttcacccagctgctggcttgtgggtgtggctctttgctttatatatatatacacacatgtgagtctggctgggctggtattttgtttgatcttcctggaaatgagcagtgactaacgctcacataactggngnnnnnnnnnatctgggctgatgaatacatttacctaagaaactcatttcgttttacttaagaggggaagtgcagttttcttttggcagttcagaatccaagcacttgatttgctgggtttggaaaactccttttttggccttctatgtgcttagccataacaattccattaagcaagaaggtaagcaaaagacnnnnnnnnnnnnnnnnnnnnnnnnnnncttgcactggcttgtctcacttacgaaacatgtgggagctgtttgcctgtgtggggctgtgtaccgtacactgtgaatgcgctgtgattttcataattagcacgtacatatagaagtacattctgttcaggtgataactgagccttaatcaagcagaaactttttgcgttggaatt

SEQ ID NO: 311422 - DNA, 374 bp, Homo Sapiens
agaataatcctgtgttgcacaatgcctttctggaagggaagtgttacaaacttggaggggaaaaaaaattgtatattgccaggcccgtatggctagggggtcactgtattagacagattggatcttagctgctcattacctggaatcagtattgcatgtattctaaggaaaagttaaattgttgtgttatatttgtaaatacacagcttatacaatgggttacaaatgagctatgttgtagcgtgtaaaacaagctacttgacacattgcacatttaatagctgcaccagacactaagagttcctctcacacagaaaagggggagagaggctctccctccacacaccactcgccactctggggtcctgagttcc

SEQ ID NO: 311423 - DNA, 462 bp, Homo Sapiens
ggtctatcagttaatctttaaattgttaagtaagataagattttgactcttgtgttaatgtgttagcaaattaaaagttcttaaaaggcaatctaatggtattagccatcttttattgttaattgtaaaagtcttcaggggaaagcaaaaggggagaataaggcatttgtgtatgtaacttggtaaatgacggtgggggatggatctagcatctgaaagataagcttctctactttgttataaagtggttaaaaaactatagatgctgcttattttctggtggtcatagacaacataggcttttgtgcaaaattggttgatggctactaatgttcacttggagatagcttttgatattctcaatgaaactcatctcaaaaaaaggtaagtattaaatgttaacatcagcacagatgtattagaactgttttttgtttttgagacagagtctcgctctgttct

SEQ ID NO: 311424 - DNA, 782 bp, Homo Sapiens
  misc_feature (64)..(64): n is a, c, g, or t
  misc_feature (82)..(82): n is a, c, g, or t
  misc_feature (95)..(95): n is a, c, g, or t
  misc_feature (436)..(436): n is a, c, g, or t
  misc_feature (509)..(509): n is a, c, g, or t
  misc_feature (511)..(511): n is a, c, g, or t
  misc_feature (686)..(686): n is a, c, g, or t
  misc_feature (691)..(691): n is a, c, g, or t
  misc_feature (702)..(702): n is a, c, g, or t
  misc_feature (719)..(719): n is a, c, g, or t
  misc_feature (746)..(746): n is a, c, g, or t
aaaaagcctgcaaaatttttgtctgccttcataaacaaaaaaacatatttttgtttgtaattanaaccatttattcttacantaaatagtttacnccaaaagcatacattattgtggcttttagactacttccatcattttttagggtctgtcttgcttttcatatccttttaaagctatcacatctgactgccatgacattctgttgcctccttagcttttttactttgctgctactatgtggggcgtgaagcaagacgatgacacagttctgaccaggttaaataagtagactgaaaagtcttcttttctaggaataaaagacgtggattcggtgttacacttcattcagtgtgaatatctgtgcctcatttgggccttgttaataaaataaattgtgattacaaaattacgaatgagggtattttataatttntaggaccctgcctttcttaatcaagttaaattttcatgattgaacagattttcaggtactgagtcagttttanantaaacttattagtaattcagttcatatacagagaaaccaggaaggtgcatgtacatgtgaatagagccaggtgtaaggcatggcattagggagtgctaggattggagattgaggtgtccatgttctgtcttaatgtattcagattcagttaaaaagaccaccacaatttgtggcnaacanatgcaggaatnccgttgagtcactagtnttgcaacctcaggtataaaaactagtntatgaaaaattatggcatagctccattattttatag

SEQ ID NO: 311425 - DNA, 611 bp, Homo Sapiens
  misc_feature (583)..(583): n is a, c, g, or t
tttttttaagggaatcaatgtctgtttattaaggcagatgctcataaaagtgactttcagtaacattttcagtataaaaatggatttacatttcatttctggaaaaccgttttgtacagtctgaccatggctaggagtcccagggacagcagcctctgctcagggcagactctgtgattcactgtctgtcctgctgctaccccacgtgggggagaacacgtgggctgagataaaaaaacagcatgtgcaaacctgacagatgtcaagggtcccaacacagttccttcagcgataaataaagcccagttttaagatgtgcagggaagtgttgacactgaacaggcacgctgacctaagtccctgccagggctctgagcacgtcagagcgtagtcccaaggagagtcagtgacagcacatggggcaagggagctggacagaagaccccagtagggtgcggcacctggtgagagcctggaccgcacaccaaggcagaggggtgcccctgaaggactctgggcagtcaatgacagcgacgcgtggtcgacgatatcccggaattccggaccagtaccagcctctttntaacaaggttttatatcctattcgccct

SEQ ID NO: 311426 - DNA, 624 bp, Homo Sapiens
  misc_feature (61)..(61): n is a, c, g, or t
  misc_feature (166)..(166): n is a, c, g, or t
  misc_feature (491)..(517): n is a, c, g, or t
aacccaccaaaattgaagaacacaatcttttgaaacatttaatcagtccatagcaaatagntattacataccaaaagctctaagtgttaactagttccaccacaatgccatgtaaatcttgacaatttagaaatcttgagatcaacacttaagttcttttcttganctctacagcttggtttgtaagtacatacatgcttttgtggatctattcccctcgccacacacacacattttcaaggagccaataacatttttttccatctgtgcctaaaaatgttacaattcagttctagcacattgaccctgataatgaaaatgtttaagttaaagatggggacacaatttcaatcttataaaaatataccagtattaaccaaaccttaaactcagagggcacttcacatgtgcacgagactttcagtaaaaatgacaagatcctagaacagctgtttccaggactttttaatgaatcaagtactctctctctnnnnnnnnnnnnnnnnnnnnnnnnnnntttttatactattggttttgttaaatccaggctatctggattaagtagataggggatgggtttttatagtttttatttttgtaactatagggcagctactataacaa

SEQ ID NO: 311427 - DNA, 1847 bp, Homo Sapiens
  misc_feature (1619)..(1619): n is a, c, g, or t
  misc_feature (1782)..(1782): n is a, c, g, or t
  misc_feature (1802)..(1803): n is a, c, g, or t
aggatttttaaggtaagcaattattttatttccttggcctgatggattgacttcattatacaagaacttgcagctgacagaactgacacacacatttcccccaagagaaagaacccttttcattagcagagatgaattgaaatgtcatgtctgagtgcaattcctgctccccactcccaccccacaaaatcccaaaagtgaaaataaatcaataaaatccccatgatttactaaaagtcatccctccaaacctttctaactagcagctgcagtggatgataaccaaggagggaagcagctggccatcatgtagcattcctgtgcatgtgagcctgaagggacagcagcatgggagcaagaatcctgaatgagagtagtatataattaccttacttcatacttgccccctccctacataagacacctctgtcctgatacatggaaaatactagaggagatgctaagagtggttttagtctacaattggaaatgcctgagacttattaaattccaaggaaggggtgagataaggggcaccaaagagaaagagcaggttagacagggatgctcaacactcttgtcaattccagtttaatgctatttaataacaaaaccatcttcttaatcacaaccaccttcatgcctaacccctattttccaaaggtaagagatccctgtctaaatttctgggttgttgtctactgccacccctggggtggtactgtgatgtctgagtgagattgcaaccgggatgggagaaaagaagtgtgagacagggaagatcaggggccacaatgcatcaattacagtgggtctcttttggtccccaggtatggtccactaccacaagtcccctttccctacctgtcttgtgcaaatgtcaaaaatagaatctctgcccaaagagaagggagcacagggagttgctgctggactgccatcatctctggccccaacttgtccacctcctgacccatctatgaaactgcacaacaattaaaccccaggaatgctgtaaacttacatcatccccattcctctatcaaagccaatccaacagctctgtcctgacatgctttctccctgggccgaggaagcagcaaaaaatatcaattgagcatgtgaaaatgtgatgacggtgtgtgtggtgtaatgtttctagatgtcttcaccttctgtctccttgcggtgggagccaccctctttccccatgtcgcgcacacacacccctcccctacccccaagtccaggtgctcccatctgctgggcttccaaccactcatttcccatagacactctcatcactgtaggccacatacagaaaatagtcttcctcatgattgtcctcatacagttggcccatggtagcactggtgggagggatggtgttgttgacaaagaagaataaggcgtcctcaggtctcaggtggattctcttccggattaagaagtagaactggccaacagtaaggtcagagggcactaggtacttcctcttgtccagatcaggcaccctggtttttggagccttctctacaatcacggggaccctgtccggatatttcttccggattttttctccttcttttttccgatactcaaagggatggtcctccttntactggaacttcatgatgcaccgcagggcttccgagatccccgcgcggggcctgcctccttcgccgctgaccctgtcccgctccctcagccgacgtcaaggtgtgctcagaatagctgcagaaacgtccgctccgggggcaacagcgctgggccgagtgtgcnaggggggtttcggggcggtnntctcgggtgagcctgcctggaggtagaggagagccagatggaga

SEQ ID NO: 311428 - DNA, 389 bp, Homo Sapiens
ttaaaacactatagtcagacaagactatagtcagacaagatttcagaaggattaaatctagtagagtggctaatccctaaaaaacaagtggtatctaatctctcagagccttacactgccatatgtaagaggatccggataaataacaccttctgccccacttctcagatgtgttatcaacgcatctagaacaagggctagaggatgccagactgcactggacggcatccagtattgtgcaaccagaaccattacctcatacagttggcccatggtagcactggtgggagggatggtgttgttgacaaagaagaataaggcgtcctcaggtctcaggtggattctcttccggattaagaagtagaactggccaacagtaggctcgtgcc

SEQ ID NO: 311429 - DNA, 447 bp, Homo Sapiens
  misc_feature (382)..(382): n is a, c, g, or t
  misc_feature (396)..(396): n is a, c, g, or t
ttttaaggtaagcaattattttatttccttggcctgatggcattgacttcattatacaagaacttgcagctgacagaactgacacacacatttcccccaagagaaagaacccttttcattagcagagatgaattgaaatgtcatgtctgagtgcaattcctgctccccactcccaccccacaaaatcccaaaagtgaaaataaatcaataaaatccccatgatttactaaaagtcatccctccaaacctttctaactaggcaggctgcagtgggatgataaccaaggaggggaaggcagctgggccatcatgtaggcattcctgtggcatgtgaggcctgaaggggacagcaggcatggggagccaaggaatcctggaatgnggagtaggtatatnatttaccctactttcatacttggccccctccctacataagggcacctttgt

SEQ ID NO: 311430 - DNA, 937 bp, Homo Sapiens
  misc_feature (899)..(899): n is a, c, g, or t
  misc_feature (909)..(909): n is a, c, g, or t
  misc_feature (914)..(914): n is a, c, g, or t
cagtgacagagcagctaagggccgggccatgcacagaaagagttgtgggggccacaggccttaactggctggccctcatggcatttattcagcacagacttaatgacaaaggctttgagtcaacacacctgtgggtaattaactccccctgcccccaggtagagagcaatcatgcacctgcggataatcaaaggttggtcttaggaccacatgagtaaacaagctattcagataaactcccccacattcccatgttatttgctctattgctatcaactcaaggtaaaggggattagaggtaaaaaggatttcagccaaatcctttactgaagctatgcaaaccttctggccttccaagaaggtttgtgtctatatcctgtaacttcatcttacaattttccaaccacactgactgatcccctaaatctccccattttctgttttttttgcattcagtcttgttcattggagagtacaggtgtgcgcagcaagggtctgtcaggcatggtggtcattgctcttattccggctttcatcctaaaattagtaaataacataagacaaacatgagtataattagcaacattcttttctaatcaaggagtgacccaccaccccccgcccccaggagcggtggtctatccaggagagataatctcacacacccttccatatggctgtttgttgggtgtgtagatctacagtttgaagggattctaaaattgtatttttaagttgccttatgtctgctgttaaattgtcatgaaaggttccccagagggtgttgtttcacctcatcccaacttatgcatttactgattccatgggtaggaggaagtttacacaggtatgtttttatgctccccagtcacagttttaatttgctgttgggattgccngtgcatcttngtcgntcccccacatattcccaaggcag

SEQ ID NO: 311431 - DNA, 784 bp, Homo Sapiens
aataacgtttaatagtaaggaaacatgtcaaaatacataccagaggtcataaatgctaggagaggctctgagaaaggagaaaattagcataagttagattaggtgggggaaggctttcggcaaaacgtagaacatcccaagtctcaaaaaagttgctaggatttgattaacaaggaggagtagtaagaatttgcagggttgagaaatagaaggagggaaagtaaataacatgtttgttagtgagcagacaggtccaattggtcttggttcaggcagaaacacagtggggaataaggtgaggtggtaatgtcacaaggaaacagaagacaaggtaaatttagattgtggaaagcctcaactgcccacagatatttcatctctatcctttacagttgatcttagtcaaaaggccaagaagtcaccatctctattttttatcttcaaagtttttattcaaaaaagtgaggtaggggaattggtattttcaaaagattgagagatttcccaggacacataaggatggtagaaaatagagacaaggagaccattttggaggctactattatggtccaaccatgatgtaacagcagatgtgtagctgtgagaatagacagaacagggagattcaaaaacaatttccttcctagaaggaaggaccaacagaacttggtgattaacacaaaaagaagaaataagaaccaaaaatgagtctgaagttcgagatatgtttatgaccagagacaaataattttagacctgcaagggtcagactccctcactttcc

SEQ ID NO: 311432 - DNA, 608 bp, Homo Sapiens
ttcaggttcaagcattttattttgctttataaaatgaaggtgaaaatgttttgggggagcctttccacagctctgctcacttttcgcagcctcattagctttttccacccttgaagatggaagactacgagcctctaaagcagtttcaactcgcttccgatctgctgaagacaagcgatatatgtttttgagaggaatacgcccttctggagtgacttgcagcttaagtttagtataggctttttccagaaatgcatccctggacatgttttgggccagcaggtttgttgccaaactgaaaacctcatttgtccattccttggccacttcttcttggaaagccacgagattcaaatgggagatgttcacgaggtcaggcccatacaccactgtgatcatgcgctgctccaggcgcccgatgttccccacatccaaaagttcacgtaatttggggtcctttggagctttggcgtgtctcccacatctggcatctttgacaaggctgagatccagtagctctgtctccttgttttgatctgtccagtaaaagcaaaatccctgagggtcagtccttcaaaataattggagtaacaatagttgagtcatca

SEQ ID NO: 311433 - DNA, 1343 bp, Homo Sapiens
  misc_feature (1269)..(1269): n is a, c, g, or t
ggatgcgttttccggccgtgcgtttgtggccgtccggcctccctgacatgcagatttccacccagaagacagagaaggagccagtggtcatggaatgggctggggtcaaagactgggtgcctgggagctgaggcagccaccgtttcagcctggccagccctctggaccccgaggttggaccctactgtgacacacctaccatgcggacactcttcaacctcctctggcttgccctggcctgcagccctgttcacactaccctgtcaaagtcagatgccaaaaaagccgcctcaaagacgctgctggagaagagtcagttttcagataagccggtgcaagaccggggtttggtggtgacggacctcaaagctgagagtgtggttcttgagcatcgcagctactgctcggcaaaggcccgggacagacactttgctggggatgtactgggctatgtcactccatggaacagccatggctacgatgtcaccaaggtctttgggagcaagttcacacagatctcacccgtctggctgcagctgaagagacgtggccgtgagatgtttgaggtcacgggcctccacgacgtggaccaagggtggatgcgagctgtcaggaagcatgccaagggcctgcacataatgcctcggctcctgtttgaggactgtacttacgatgatttccggaacgtcttagacagtgaggatgagatagaggagctgagcaagaccgtggcccaggtggcaaagaaccagcatttcgatggcttcgtggtggaggtctggaaccagctgctaagccagaagcgcgtgaccgaccagctgggcatgttcacgcacaaggagtttgagcagctggcccccgtgctggatggtttcagcctcatgacctacgactactctacagcgcatcagcctggccctaatgcacccctgtcctgggttcgagcctgcgtccaggtcctggacccgaagtccaagtggcgaagcaaaatcctcctggggctcaacttctatggtatggactacgcgacctccaaggatgcccgtgagcctgttgtcggggccaggtacatccagacactgaaggaccacaggccccggatggtgtgggacagccaggcctcagagcacttcttcgagtacaagaagagccgcagtgggaggcacgtcgtcttctacccaaccctgaagtccctgcaggtgcggctggagctggcccgggagctgggcgttggggtctctatctgggagctgggccagggcctggacnacttctacgacctgctctaggtgggcattgcggcctccgcggtggacgtgttctttctaagccatggagtgagt

SEQ ID NO: 311434 - DNA, 1397 bp, Homo Sapiens
gtttgtgtcgaacagcaaacggagtggaggcctgtatttcacacctgctcactcactccatggcttagaaaagaacacgtccaccgcggaggccgcaatgcccacctagagcaggtcgtagaagtagtccaggccctggcccagctcccagatagagaccccaacgcccagctcccgggccagctccagccgcacctgcagggacttcagggttgggtagaagacgacgtgcctcccactgcggctcttcttgtactcgaagaagtgctctgagacctggctgtcccacaccatccggggcctgtggtccttcagtgtctggatgtacctggccccgacaacaggctcacgggcatccttggaggtcgcgtagtccataccatagaagttgagccccaggaggattttgcttcgccacttggacttcgggtccaggacctggacgcaggctcgaacccaggacaggggtgcattagggccaggctgatgcgctgtagagtagtcgtaggtcatgaggctgaaaccatccagcacgggggccagctgctcaaactccttgtgcgtgaacatgcccagctggtcggtcccgggggtgatggcaggcgggatgaccaggagggccagcagccgggcctggtgcagagcctcggccaagtgggtgagcatgtggatgaggcccacgcgcttctggcttagcagctggttccagacctccaccacggaagccatcgaaatgctggttctttgccacctggaccacggtcttgctcagctcctctatctcatcctcactgtctaagacgttccggaaatcatcgtaagtccagtcctcaaacaggagccgaggcactatgtgcaggcccttggcatgcttcctgacagctcgcatccacccttggtccacgtcgtggaggcccgtgacctcaaacatctcacggccacgtctcttcagctgcagccagacgggtgagatctgtgtgaacttgctcccaaagaccttggtgacatcgtagccatggctgttccatggagtgacatagcccagtacatccccagcaaagtgtctgtcccgggcctttgccgagcagtagctgcgatgctcaagaaccacactctcagctttgaggtccgtcaccaccaaaccccggtcttgcaccggcttatctgaaaactgactcttctccagcagcgtctttgaggcggcttttttggcatctgactttgacagggtagtgtgaacagggctgcaggccagggcaagccagaggaggttgaagagtgtccgcatggtaggtgtgtcacagtagggtccaacctcggggtccagagggctgcatgtcagggaggccggacggccacaaacgcacggccggaaaacgctccagcgcgccggaagt

SEQ ID NO: 311435 - DNA, 817 bp, Homo Sapiens
ggggttttccggccgtgcgtttgtggccgtccggcctccctgacatgcagccctctggaccccgaggttggaccctactgtgacacacctaccatgcggacactcttcaacctcctctggcttgccctggcctgcagccctgttcacactaccctgtcaaagtcagatgccaaaaaagccgcctcaaagacgctgctggagaagagtcagttttcagataagccggtgcaagaccggggtttggtggtgacggacctcaaagctgagagtgtggttcttgagcatcgcagctactgctcggcaaaggcccgggacagacactttgctggggatgtactgggctatgtcactccatggaacagccatggctacgatgtcaccaaggtctttgggagcaagttcacacagatttcacccgtctggctgcagctgaagagacgtggccgtgagatgtttgaggtcacgggcctccacgacgtggaccaagggtggatgcgagctgtcatgaagcatgccaagggcctgcacatagtgcctcggctcctgtttgaggactggacttacgatgatttccggaacgtcttagacagtgaggatgagatagaggagctgagcaagaccgtggtccaggtggcaaagaaacagcatttcgatggcttcgtggtggaggtctgtaaccagctgctaagccagaagcgcgtgaccgaccagctgggcatgttcacgcacagggagttgagcagctggccccccgtgctggatggtttcagcctcatgacctacgactactctaccgcgcagtcacctggccctatgt

SEQ ID NO: 311436 - DNA, 379 bp, Homo Sapiens
cccaaatttttatgctctgaatatcttggttaagcattaacaatgaatgcctaaaaacacataaattaaaatttttacttaatagcaggtaaaaattttaactgcttaagaaatacactacagaaacataaaactgcataaaacatttatactaaaacaagtaatcaaatgacaaaatcaccacacttaatgacaaaaagcccaacattccagctgccctgttatataatatcagggttaaatattttatcttattacatcattacaaagtgatactacattttaccacagagggccaaaaagggactaggtcactaggggtaatatggaagggagatcctattcagcccgcaggggttgctcaggccctggttattcc

SEQ ID NO: 311437 - DNA, 931 bp, Homo Sapiens
gattctttacacgccccttagcacattttgtgaagaaatgtgtgtttttcttaatactactcatctttactcaaatacattaaaaaatcattttaaaattattttatatcatggattacagaagacttactaaaagtgaataatgcttattgttctcactacatgtttaaagaaccatctgaaaaacatattctttctaataccacttacaaaagacatttaatgaagataacacttctaattaggttattctagtgatcattttctcatgtaactatttaaaccagatgatttatggcttttcaatttttaaaatttcacatttaatgtcatgttaaaaacttttctaaatcagtcttccagtatcggattcttaagtgagaaaaaagaagacaaaagaggaaaattccgtatcaattatttggcctcctcccttccctggaaaccaacatttccttttaaatgcaaggtacactccttttcttagaacagagatcaggaaactttttgtgtgattttgtgtaaagggcaggttaataaacattttgggctttgcgattctcatttggcttctattgcagctgtttaccttaggctggagtagtgggaaagcagccatagacaatctgcatttataaaaagaagtccaaatttggcctttgggctatagttggccaaccgctgtctcagaagaacagatctacatacataaaagaatcattcgaaagaaactggtctctagtcagatgtgatgtctgattcagaatctagtagctaatcactctagaacattttgatgtcaagcactttgaatttagcccacttaagaatcttttattggaacacatgtcatgcttttcaatggagaaaatttatcttcaatttaggaatgggcttcaagttttacttattggggggcattcaagttaaa

SEQ ID NO: 311438 - DNA, 1691 bp, Homo Sapiens
  misc_feature (18)..(18): n is a, c, g, or t
acacacccatggaaaatnggcacatgcccaacatacacacccgaaaaaagggagattttactggatttacacatccagtgatgttaatttccatttttccctaagggtttgtgctatgttgaaccagatccttccagctttggggtgtgggtgactgcacccagaggctgctacttctgttggtgttgtgacagggctgcacctatacgctgtatcccaaagtgcatgaccgaagagcaagtctggcttctgatacgtgctgttgctcccaagaaactaagtgggcttctgtccaaatggccactgtcctgctggactatgctttctcaaagggattaatactgttctttattctgtcaggcactgcaccagttcatccactgagtcttttgctcggtccacctagcacctaggacagtgaccttatccagaaccaaaacgttcaagttcttctcaacttctacactggattctttcttcctagatcccaccttttgctggagattgcaagggcaaaggaggaaaataactgagaaaactctattgaataaataggagacccttcccatattcccaaacacctactgaggacgccagtccccatgctcaggacctccatatttagttctaatacccacaaccccaggatataatggagtcatcccaagtctttgatgacagtaacctaagactcgagcactattttggtggttcacctatgggccaagatcagaattccatgaaccagatcctttccccaccactttctctgacaccgtatcaggtaggcctgtgacatgagccatcgtcttgtacctcactccctggcaataacataccattgtatttaaaatgccacaccactcttatccctgtaaagtgaggttcagtgagtgctgacaactccgtactacaactggctttaagagttctgctggctttcttattcaaggagagccgaggtgtctgtcacatccaggcttaccaagacagtgtaccagaggtaaaactcatctttcctaatccaaaggaagggtctaccaatctatgtagatgagctcaggagaaacctggacacgtcagaatctcatttgtggctggctcccatgccaagaactatgtcagagaaaggtccatttctattccctcaaggaggaagtgtagttagggcagtgatttttaatagagggaaatttagagagtgttccagagctccacagcaaggatatggaaaactgtcccatccctctaataagacttcccataaaagtgagcgggatgccaggaagtaatcagatcagcccatgctaatgtttctagagctcctccatggcctccagcacccctttaccagctgctaggagtgtgtcagtctctcaaatgacaatgacaccctaactagagcctttatctaacatcctgtcacccactcatgtgctgcttccactgagaaaacacataccactcccctctacctcaggcctcccaaagggagtggtcatgtcaccactgggctagggctatactctctgccccattagggtccaaggtatgtcagcctttagaaggcatcttggtgcaccaagacactgtacattccggggctatcacctgatcctacagtcactttttgtgcaaaattcaaacagtgtgtggtacttgcatgcctcgtgccgaattcgccacccagg

SEQ ID NO: 311439 - DNA, 765 bp, Homo Sapiens
gtcatgtgcacattaatcaaactcgatctctctacttctatcttttctccccctttcatctcctctttcctttcttcctccttcccttgcttcctcttagacaaagggataaaaaatgtctctgaccaaagaagctttgagaagactacttgcagagaattaccaacttacccatcagatttgagttcatgaaaggtgttggggacaagccttcatgggctcctaatcgactgtcattcaagtgatcactgtaatgagggctgtctgtaaaacctctagatgaatcataggaaggacttggttgaccacttgttccccaagatgttgtacctcctctttcatcaatacctgatccactgaattgactgcttcccagtgtagttggtctagttttcccactattaacaggtggggaaaacatcgtactgaagtccagtaggtcgctcagctccttgtcggtccctatagcggccatgcgttgttgctggggattcatcttcggccacttctagcaggtcctgccgccccgtctccgcatccaaccaccccgattaaagttcactttggccgggagaacgggcttgggcttccccttgcaccgcccagcggctcggttcactttgccccgcacgagctctcgggtctgggagggggaggcggctttcgggcctggccgccccttcctcccggggcgggctgtcggtccccccgaatagaacttgtgggtctcttcaggcggacatttttttcgctgaggcggcctcc

SEQ ID NO: 311440 - DNA, 524 bp, Homo Sapiens
atgtgtgctatgttctatagctgaagtttatcagtagtgtttgaacagtaggaagattgttttggaaagttgcttggaatagcaagacttaatgaatttaaataagactaatacttgattattttttatattggtacctttataaatcctttaacctaattaatacatactctaagactttaagaataaacatatctctgtctgtaatattccccaaactttttgatctgcaagatgctttggcaagggaatacaataacacagaaaatacaaataaaatgaactagcagaaaagaaagcctttgcatgtcgttgagggctataagtaaacagtttaagagaaagaaaaagacaaagttgaaaaacacaaggactgcaatttggtagacacttgaagtctattagaaattcatttagccaactttgagtaccaaaacatggtagttataaaggagacacaatgggtgagtgggaagtttcacaatctgtggaccttacattaaaaatcacaaagtactgtgcaa

SEQ ID NO: 311441 - DNA, 1270 bp, Homo Sapiens
gtgctgcctccagttcttttttcatggtggatttcaaaatctccagggttagggtgtctctggcattcttcattccactcctgtgtgcagcttttctaagttcctttaagccttcctctggtttattgttgataatgagccaccgagcagactctagcagccaacttgaggtcagaaagatcacaaagtatggtacagacaccaccagctggaggatatgccagtctcgaatggcaaaagccaggcctgccagggtcataaatgcaataccagaagggcacattcccaatgtaattcccatggcctggaatctgtgtgttgcccactcggctattaacataatagtatttgttatgaggctcattgcagcaatcccagacaagaagcgtagtgagcagtaaatgaggaaggtgggagccaaggctgcacaggtgccaacaatggcaacctggaggtaacaccatctgagcacgaaccttctcccaaacctgtctgataaatgaccgcctaggatgcctcccaccatcattccagccatgaatacaaatttagccactgaagtcagtgattgagagtcacataccagatcccacttcaggtcaccgatggtggatgagaaggagattctgtcatacacccagccatccacacagggctccatgtctgcgtcacttgtgttggggaaggtcccattcaggtgaaggagctgccactgaggatgaacaaagcgacgacacttctctggcctcatgtttgagtccagtgggatggagattctcaagagtgcatcttggctgagggccccagtgtcattgtcagagacagtgtcattgtccaggatgtggacccagcagcgatggccaggtatgaatgcagtgaagttctccagcataaaatgaaggtatgtagcaacagcaaagattgagagaaaaacagtctgaaggatctggaatctccacaggtcaccagcgtgacccaggaggtcctgaaaggccattgaggttgaacagttgatcctcaagtagaggcaaaatgactgtatccagagaggttcaaagagggaaaatgttttctttccctaagtcacactaaatgtgttttgatcctgaccccactctcttcttgacgactgtgcttcccctctgcagcaggaccgtggaaacagtttcctcaagtcgttttggggtcagataggtagccgttttctctaaagtcacgtaagaaataatttgctcagatactcccagtcgtttacactgaaatgtgtttc

SEQ ID NO: 311442 - DNA, 544 bp, Homo Sapiens
  misc_feature (447)..(455): n is a, c, g, or t
gatattcttccatgatcattatatcaaataattctttgcccattactgagtggataaggcccaactctaaagccctggtagtaatattgtcatctggtgcccttagtattggacagataatcctgggaggcttggcttatgtcttccgagactggcaaaccctgcacgtggtggcgtctgtacctttctttgtcttctttcttctttcaaggtggctggtggaatctgctcggtggttgataatcaccaataaactagatgagggcttaaaggcacttagaagttgcacgcacaaatggaataaagaatgctgaagccctgaacatagaggttgtaagatccaccatgcaggaggagctggatgcagcacagaccaaaactactgtgtgtgacttgttccgcaaccccagtatgcgtaaaaggatctgtatcctggtatttttgagnnnnnnnnntctcaaggaaaaggcataaaaatgattgctacacaaaagtgaccaaattttaagaagccttcatgagctgattggtggggaaattcaga

SEQ ID NO: 311443 - DNA, 835 bp, Homo Sapiens
aacatctacctcctgatagcaaaagaactgaggaagctctttccactacggctgtattgcactggtgagtccgggcccatggatgagaatttgatgcgaggatcaatacaagcttaatttgaattaataaaaggaaatattttctccctttgaacttatctccgtaaagccattgtgcctcctcttgggggtcacgtgttcacaatcaatggcctttgaggagctcttgagtcaagttggaggccttgggagatttcagatgcttcatctggtttttattcttccctctctcatgttattaatccctcatatactgctagagaactttgctgcagccattcctggtcatcgttgctgggtccacatgctggacaataatactggatctggtaatgaaactggaatcctcagtgaagatgccctcttgagaatctctatcccactagactcaaatctgaggccagagaagtgtcgtcgctttgtccatccccagtggcagcttcttcacctgaatgggactatccacagcacaagtgaggcagacacagaaccctgtgtggatggctgggtatatgatcaaagctacttcccttcgaccattgtgactaagtgggacctggtatgtgattatcagtcactgaaatcagtggttcaattcctacttctgactggaatgctggtgggaggcatcataggtggccatgtctcagacaggtttgggcggatttattctcagatggtgtttgctccagcttgccattactgacacctgcgctgccttcgctcccaccttccctgtttactgtgtactacgcttcttggcggtttttcttcc

SEQ ID NO: 311444 - DNA, 437 bp, Homo Sapiens
  misc_feature (329)..(329): n is a, c, g, or t
  misc_feature (344)..(344): n is a, c, g, or t
  misc_feature (367)..(367): n is a, c, g, or t
  misc_feature (401)..(401): n is a, c, g, or t
  misc_feature (410)..(410): n is a, c, g, or t
gtgctgcctccagttcttttttcatggtggatttcaaaatcttgaggtcagaaagatcacaaagtatggtacagacaccaccagctggaggatatgccagtctcgaatggcaaaagccaggcctgccagggtcataaatgcaataccagaagggcacattcccaatgtaattcccatggcctgggaatctgtgtgttgcccactcggctactgtctgataaatgaccgcctaggatgcctcccaccatcattccagccatgaatacaaatttagccactgaagtcagtgattgaggagtcacataccagatcccactcagtcacggatnggttgggatgaggangggagattcttgtcatacacccnggccatcccacacaggggcttccatgtctgcggncactttgtntttgggggaagggtccccattcagggt

SEQ ID NO: 311445 - DNA, 965 bp, Homo Sapiens
  misc_feature (200)..(441): n is a, c, g, or t
  misc_feature (463)..(471): n is a, c, g, or t
  misc_feature (489)..(489): n is a, c, g, or t
gccccccaacccaaatagccatctaaagccggcttcaggttgtcccaaaaaaacttttcccacaaattattaaaaatactgccctttaaagctatgggatagatctaaagttaaggtagggggggattgtcattagacaggtaatagttatctgttcaggctcaaaaaaagtaaaaacccggccagggcttgtggctcannnnnnnnnnnnnnnnnnnnnnnnnnnnnnnnnnnnnnnnnnnnnnnnnnnnnnnnnnnnnnnnnnnnnnnnnnnnnnnnnnnnnnnnnnnnnnnnnnnnnnnnnnnnnnnnnnnnnnnnnnnnnnnnnnnnnnnnnnnnnnnnnnnnnnnnnnnnnnnnnnnnnnnnnnnnnnnnnnnnnnnnnnnnnnnnnnnnnnnnnnnnnnnnnnnnnnnnnnnnnnnnnnnnnnnnnnnnnnnnnngtaagagcgaatctctgtctcnnnnnnnnngatataataatagagtanagagtcatttaccatcatcagtgcccagagtctcctggggcttctgcaaaatagattcagttgtgattccggttctatttctagagtactaagcagagctgatgcacagaactcaatgtgagatagattaaacccagattttgtgggatgggggaagatattgttcttttgcttaaaccccacagagtttcaacatggatattaatgatatctgtccttgaaattcaccattaatttctctcaacttcacagcactcagaggtccagagtctggctctatgctaatgcagattctgcaagagataggtccccactctagagttcacatcattctcagctctgccagcaaccctttttctcacctgtaaaatggatatgctttatactggagtcggcacgaaggaataactcatgttcccagacataagctgtcactgaggttcccatttttatgttcattttccaactaccttcct

SEQ ID NO: 311446 - DNA, 1043 bp, Homo Sapiens
ttttttcagataccaccaccaatatttattacccaaagcaatctgaaagaatcgggcacaaggtcatggctttcccaggttacaagaaaatcagaacctcttcaaactcaccctccacccatagccaaagtaaggaattaaaggctatagctcaagctatgtcatggctactatatcctcattcttgatgaatagtctcaaagtcacaagttggcatgatgcgatttaggtccaaatcttaccagaaaaaaaacccaccattaaaataagacaagttcatagaaatcattccaacagaaagataccaagagcctttactggtaatgagaagaggaaagattttctgtttataataaccagaaagaaatggaattgtctaataaccatcaattgagtatgagcctagttgagttgagtatgagtctagtatgggatgctaatcttctggggtgggggaagtcctgtgagctaaccaaaccctcctggtctctggtgaggtccacaagtagcagtttcctggttgcctggtgacaagggaccgtacttaggggtggggtggggcatgttggggagggggtccttcacttggcaagtgaaataacacaattctcagaagctgtagaagaggcaatcttcaaacagtgctgagtagtcctcttactttttccacattaggggaatgcaaactggtttaacctcacatgacatttccttttttgtttgtatgtatttttcatttgattggtttaaaaattatcctggatccaggaaagtgatgccttttcttattctccttttatcatcaaaacaaacagccaatatgtctctagaaacattgcgttctaaactggaagtgctgacaagccttcatcccagaccctgagtggcagattttcatgaaaatcagcttctgggccagttaagtcttcatgaagttatcttttcataactcagccctcattcccctctgggtcagtagcagtggaaccaggaaacccaagggccagatttccttcctcaatgaaggcactccaggaagaagg

SEQ ID NO: 311447 - DNA, 1124 bp, Homo Sapiens
  misc_feature (146)..(146): n is a, c, g, or t
  misc_feature (158)..(158): n is a, c, g, or t
  misc_feature (307)..(308): n is a, c, g, or t
  misc_feature (321)..(324): n is a, c, g, or t
  misc_feature (328)..(328): n is a, c, g, or t
  misc_feature (474)..(495): n is a, c, g, or t
aggacaagttcaatagaaatccattcccacccggaaaagattcccaagaagcctttactgggtatggagaagaggaaaggattttcctgttttataataccccagaaaagaaaatggaaattgtcctaaataacccatccaattgnagtatgagcctnagttgagtttgagtatgagtctagtcatggggatgctaatcttctggggtgggggaagtccttgtgagctaaccaaaccctccctgttctctggtgaggtccacaagtagcagtttcctggttgcctggtgacaagggaccgtacttannggggtggggtggnnnntgtnggggagggggtccttcacttggcaagtgaaataacacaattctcagaagctgtagaagaggcaatcttcaaacagtgctgagtagtcctcttactttttccacattaggggaatgcaaactggtttaacctcacatgacatttccnnnnnnnnnnnnnnnnnnnnnncatttgattggtttaaaaattatcctggatccaggaaagtgatgccttttcttattctccttttatcatcaaaacaaacagccaatatgtctctagaaacattgcgttctaaactggaagtgctgacaagccttcatcccagaccctgagtggcagattttcatgaaaatcagcttctgggccagttaagtcttcatgaagttatcttttcataactcagccctcattcccctctgggtcagtagcagtggaaccaggaaacccaagggccagatttccttcctcaatgaaggcactccaggaagaaggggagttcctggcacctgcctgcccaaactctgctctacttgctgaactttgctcagcatgaacagggcattctggctacaagttcccccaaactatcccagattgtatctttaaggcacaccaattcctctgcttaaggacttctgttcacaatgaattgtattagttattcttaacattcaaaagagaaagttctgcatcagagcccacccatgtccagccattgtgccctgagatcccaagactgtggggatgagggcagagcccattaacatcagggattctggtcactggggtcacacttgagcatgattttcaac

SEQ ID NO: 311448 - DNA, 451 bp, Homo Sapiens
cctcactatgggggaattttgccctggagcccaagaattgggcaggggtccccctaatgtggaaaaagttagggggactactcagccactgtttgaagattgcctcttctacagcttctgagaattgtgttatttcacttgcccaagtgaaggaccccctccccaacatgccccaccccacccctaagtacggtcccttgtcacccaggcaacccaggaaactgctacttgtggacctcaccagagacccaggagggtttggttagctcacaggacttcccccaccccagaagattagcatcccatactagactcatactcaactcaactaggctcatactcaattgatggttattagacaattccatttctttctggttattataaacagaaaatctttcctcttctcattaccagtaaaggctcttggtatctttctgttggaatgaaa

SEQ ID NO: 311449 - DNA, 497 bp, Homo Sapiens
ttaaaaaattgaatactctttattagatgcattactttcattaccagacacaacaatatatatattttttaagtatttcagaccaagaaactcacaggaggtgttggaggtgggtggctggcctcttttgtctctttattattatattgagtagggcttcagctttttcatgcaatcctgaactcccggaccactgggtttggcacagacttgccgccccttcttggtgaggaatatgacacctggcttggagcactcgctgctcgtttcaaaataacttttcatgagtgaacacgggatgctttgtgagatgtaggaggtgcagcagtcagcagcaaagtgaaagctgttcagaactactggattttccagtggaagctttgacatcattaactctgtctctgcatcatttgtgaactgggcctgggatccaaggacagcaacaagcatgaggcaggagagggcagccacggagaccttcatcctcctggtgggca

SEQ ID NO: 311450 - DNA, 378 bp, Homo Sapiens
  misc_feature (302)..(302): n is a, c, g, or t
cctgctctatcttgtctcggtctctcactctgccttatacccctcagttgaattatttcttctgaggaggcaagaactgaggctgctgcagactgatatggattcaccactgctaacacctcctggttggaactacaggaatagaactggaaagggaaaaaaggcagcattcaccacatcccaatcctgaatccaagagtctaagatagtcccccactcctatctcaggcttagaggattagattaatctcctgggagggaaggactcttccttggaaacattttttttgatcttgcctgtnagctattggggataattcggggaaatccacaggggacagtttcaagttcatctttgttcctcttatttttctgttt

SEQ ID NO: 311451 - DNA, 961 bp, Homo Sapiens
  misc_feature (16)..(16): n is a, c, g, or t
  misc_feature (36)..(36): n is a, c, g, or t
  misc_feature (49)..(49): n is a, c, g, or t
  misc_feature (86)..(86): n is a, c, g, or t
  misc_feature (689)..(697): n is a, c, g, or t
ccttccaaagcctcangaagtgttggaggtgggtgngctggccctcttntgtcctcctttaattaataatattgaattagggcttncagctttttccatgccaatcctgaactcccggacccactgggtttggcacagacttgccgccccttcttggtgaggaatatgacaccctggcttggagcactcgctgctcgtttcaaaataacttttcatgagtgaacacgggatgctttgtgagatgtaggaggtgcagcagtcagcagcaaagtgaaagctgttcagaactactggattttccagtggaagctttgacatcattaactctgtctctgcatcatttgtgaactgggcctgggatccaaggacagcaacaagcatgaggcaggagagggcagccacggagaccttcatcctcctggtgggcaggcagggctggccgaggactcctgggctcactgcttcctggctccccgggataccagctctgcccttgtatttataagaagaggaggatccaggaagtcccagggcagaggtcagaatgctcttctttagctatataatagttaccatgcagtttcctaaaaagagaacaaggctgagagtgcaacagaaagtagaggacaaagatgacttgaactgtccctgtggatttcccgaattatcccaatagctacaggcagatnnnnnnnnntgtttcaaggaagagtcttccctccaggagattaatctaatcctctaagcctgagataggagtgggggactatcttagactcttggattcaggattgggatgtggtgaatgctgccttttttccctttccagttctattcctgtagttccaaccaggaggtgttagcagtggtgaatccatatcagtctgcagcagcctcagttcttgcctcctcagaagaaataattcaactgaggggtataaggcagagtgagagaccgaga

SEQ ID NO: 311452 - DNA, 509 bp, Homo Sapiens
  misc_feature (399)..(399): n is a, c, g, or t
  misc_feature (447)..(447): n is a, c, g, or t
  misc_feature (478)..(478): n is a, c, g, or t
  misc_feature (483)..(483): n is a, c, g, or t
  misc_feature (493)..(493): n is a, c, g, or t
attcggcacaggttattttgaaacgagcagcgagtgctccaagccaggtgtcatattcctcaccaagaaggggcggcaagtctgtgccaaacccagtggtccgggagttcaggattgcatgaaaaagctgaagccctactcaatataataataaagagacaaaagaggccagccacccacctccaacacctcctgagcctctgaagctcccaccaggccagctctcctcccacaacagcttcccacagcatgaagatctccgtggctgccattcccttcttcctcctcatcaccatcgccctagggaccaagactgaatcctcctcacggggaccttaccacccctcagagtgctgctttcacctacactacctaacaagattcccgcgttcgggtttnattgggatttacttatggaggaccaacaggccagtggttccaaggccngggatttgtttttcattcaccaaaagggggnctttncgtttgttancaacccagttgacagt

SEQ ID NO: 311453 - DNA, 457 bp, Homo Sapiens
ttttgaagagcatgagtggtctttaattcaaagcagggaagctccaagagggtgactggggctgagagttagcggtgggtggaggagggggccttggcatcttctctttatgtctctgagctgtgccttcgccaccccttctgggtcactcagttctccttcatgtccttgatatagtcctggacccacttgtcactggggttggtacagacggaatggccccttttggtgatgaagacaattccgggcttggagcactggctgttggtctcatagtaatccataatccgctgacgcgggatcttgtaggtagtgtaggtgaagcagcactctgaggggtggtaaggtccccgtgaggaggattcagtcttggtccctagggcgatggtgatgaggaggaagaagggaatggcagccacggagatcttcatgctgtgggaagctgttgtgggaggag

SEQ ID NO: 311454 - DNA, 365 bp, Homo Sapiens
ttttggtggctctcgggatgaaatcaaagcgagagttcgcgacagctcaggtggctggactccattcagcgcgttcccaggaaaaacatgagtatgacattgacaagcaggaggactacaatcacggcaaaaacgactacagtttgcacatccagggtcatggtgcaatgcagaacactgtagtgttccaggtggggggccggcagattgggagatgtcagtctctgttctgtcagactgtccatacagccaccatgttcgctcgttttcctaagcttgctcgctctcttcgctgggctcccggctgccagacactcgttcgatccctgccttgctggccctatccctcttctctccccatcccc

SEQ ID NO: 311455 - DNA, 1146 bp, Homo Sapiens
  misc_feature (48)..(87): n is a, c, g, or t
  misc_feature (318)..(370): n is a, c, g, or t
  misc_feature (394)..(425): n is a, c, g, or t
  misc_feature (441)..(452): n is a, c, g, or t
  misc_feature (473)..(473): n is a, c, g, or t
  misc_feature (493)..(493): n is a, c, g, or t
  misc_feature (506)..(510): n is a, c, g, or t
  misc_feature (516)..(557): n is a, c, g, or t
  misc_feature (561)..(563): n is a, c, g, or t
  misc_feature (565)..(567): n is a, c, g, or t
gacccaccccgttttcccggtccgggggttcaaaataattcccccttnnnnnnnnnnnnnnnnnnnnnnnnnnnnnnnnnnnnnnnnagataaaattactaaaccgagcggccgtgtaagaaaggggccatcgccggggggcgccaatatggttttgtggggagggtccccctgcggttgccttgggggggaaagggccccgagggcgcggccctttacaaaaaaacaccccagcggggggttttttgaaaaaccccccctgggtatggggcccgggaaagcttctttattagggggcgggagtggaatttcttctannnnnnnnnnnnnnnnnnnnnnnnnnnnnnnnnnnnnnnnnnnnnnnnnnnnnacaacgcttgtgggcgccggcccnnnnnnnnnnnnnnnnnnnnnnnnnnnnnnnntcctgttgttaggttnnnnnnnnnnnncacaatgggcgaaagggagtntgggggggtattttttgggntggtgtggggggnnnnnaaaaannnnnnnnnnnnnnnnnnnnnnnnnnnnnnnnnnnnnnnnnntttnnntnnnttatggtctaatatgggctttagttaatatttccaataagtcaatttcaactgtcagtgagaaaaataaagtttatttcttgtacagaagtaattccaattcaggttttaagtctgacccttcaaacttgggaagtttttttccaagtcatcagcaagcgccttatcaacttcacgtaggattttaataaaatcttccaccacagggctatagaaaggaagaaggttttgaaatgcagaggaacacttctgtttgctcaactggccttcctttactccctgagccaccgtctcctttgttaatgcctgaaaaatattagaaagaaattcacataaaatatcctttaagattttcaagtggaaatcatcttgggttaaatcagtccttttagtttcctctgtgttagactctgccgagttctctggttttttctgacactgttccatattttgtaagacccgaatgaggctgtcaattagaggaagatctactttttctatctttagatactcttgctcagtctgtgaggcatagatggcagacaacactgaaaaaacagaggctagcactgttttctgt

SEQ ID NO: 311456 - DNA, 960 bp, Homo Sapiens
agccctaaaacatctatctttatttttttacctggcatttttgttagaaaatagattacgttttaaagtaacattaaaaaaattcttcagtaagataattgcttttaataagtatatttttcttgctcttggctctatacatttttgcataatattttagtcttgaaaagcttttcattttcttaactctggaaaataatagtttggaactaaattagtttgagaaatctgaatcatctctctttaaatctgttcagttagtctcatgtattctcaggggaaaatgtctttattttactaagcggaagtagtagtcatattgaggcagaaatttgtagcccaaacaaggtaggtcttcgctgaaactaatttgaactattcctatttgaagcaaattgaacactattataaatctagactggctaattagatggaaactttgatggttaggttctttaagaggcatacaatccgttatgagaatgtttatgtttatgttttaatttttatcaaaataacctcagaggaggtacatgtgagtaaactgtcttaatggttgattacttggaacccacccattaattctaaatgatgtaatggtctataaggtagcaatctggcacagcttcagtaatgtgtgctgtgtttgtaaaaaggtgaagtactttattggcattttctaagccctctgacattgttagtgtctgggttggttggtttgcattttactattatggtggaatctgtgttccttcaccattggttaagtctgaggaactaacagtgaaattcattgatggccaacttggataaaaatgaagaatgatattttcccagtttactacacatggaccaatagtgattatttgggagagaacactgggtagtattgtttgacttaagaaccttaaatatattgaaaagtaatggcattcttgctcatgatttgcatttgttagt

SEQ ID NO: 311457 - DNA, 452 bp, Homo Sapiens
  misc_feature (319)..(319): n is a, c, g, or t
ccatctctccctccctccctcctttctcatgctaatttgctcaaaacaaccctatcttattcttgttctagctgacattaccttatgcattattaatcctgaactgaagtgtgaaaatttggaagattaattatatggttattctagatttaacctttatcaagctcagaaacttttcttatattcttagtttgacaaaaacttttatcataactaagtagtgatctctatcaactgctttttctgtatgaactgaggtaataatagacttttagtggtggggtcttactatgttatccaggctggtatcaaactcctnggcctcaagtgatcctcgcacttcagcctcttgagtggctgggatttacgggcataagccactgcacccagctgatttcctgatgttaactcacctttaaatttcctggaataattctacttgatcatgatat

SEQ ID NO: 311458 - DNA, 644 bp, Homo Sapiens
ccaggctccacttttattcaaaattgtattttcaggagtaatatttccatgtaccattttcacactgctatgcaagaatgacaatcctttagaaacctgaagcaaaccacatttggtttctacatcataaagtttataatccttaatgtctggagatatagggaaagggagattttcccagttaccaagaacactggctaaactggcaaaaaactggttctgtacacaacaccaagcaatccctggattcttctaaagaatgctggacagtaagaagtcgagggtgttgaagtcgagttaagtgttggactcctcattttagagaatcaattatttgatccttttcaaatttttgatatttgtcaatcagttttttatcaaagacaaaaactgccacttcctgctttgttgacttttttgtgccattaaaaatcttccaagctagcccattgccaccactggcaatgtgttgaccaacatcaaattctctagtgacaggatttctcattacagcactagtgacatcagctgttacttttgtaacagtactcttcaatttattaagcatggactccatggctgcaatattgggtagttatagtcacctcttccttcttccaggaggggcggtgctggggctcttt

SEQ ID NO: 311459 - DNA, 1651 bp, Homo Sapiens
  misc_feature (664)..(685): n is a, c, g, or t
  misc_feature (948)..(964): n is a, c, g, or t
actgacaatattttaaaaacccagtagggtccacagcagtgtttgaaatgacaggctttttatttctcaggaacagccgagatgacctccagaggtttccagcgaagctgtaacaatccaccctgcagctctatgacagggaggagggcgaatcaaatccatcatcttacgccagacttcagccctgcgggagctgctgcctccaaagaaagcggggacctgggcggactgcgtctctcccccgtgtggagaacgtgacagatgtgaaggttgggctgacagacacacggcctgcagcagcccagccagtcccccacagcatcgagccaagtcatttaaaaaggatttaggccactgcctttttctgagggaggagcggccagcatgtgccccgcggctcactgggcctgtctaatcacacagcagtggcaaaaggagtatctgccagacgcttcctatcactctattctgtctcctcatccacctgaagttcaccccgtttccccaatgacttagaatggctttgtgcttagttttaattgtagtttgtgctattctgtgaattaacaattcaaacaaaataagaaagccatgttgttaaacagtagaggagccggggactctgtctccattctctcatcacacacaagtcatgcatctaccnnnnnnnnnnnnnnnnnnnnnncccaacaaaaaaactgtcctttgaggaggcacaggtgtgacagataaggaacctgcagctcagattcaacaggcacctgccaagtccacactcaggactgtgacagcctcaacaacatgaggtccagacacattcactgtggaaggctctgcccacgcgaacaaagctgtcagctctagcaaaagggacactgccttcttcctccctcacttctcacctggtaagcccgggaatcaaaacagcaaaaatgagcccccaaaaannnnnnnnnnnnnnnnnagcagccactgttaccagcagcacccgctgcacaggcagaagcacctctggtgccactttcaagacaaaacaagagcacagttgaaacatctaatttgaaaatgttgatctcctttcctaagacattgctaaggggcccacaggaaggctggtggcaccagggaataaaccctggaagtggtgcagccactctgggaccaggcagctccggccagaggcctcaatccatggcagccagctgctcgatggcacggcgcactttcttcgcagtttcctcaaattctttcttcttattgttggtttcctttgcaattttgttcttggctctttctctgtccagtttcaaaaattcaccaagggttaattcttcaaactgcttcttgacagaaaggaaagcgcaaccggacgaatgctttttatgttcctctatggggtcgtcatctggctcccagccttccagctccttgaagcagaagaaacactgggccaagtctggctcgttctcagtggggcagtggatgaagccagcctcggccatccgctccggggtgcaggcgcagccctccaagaagggccagttcttgaatgtagagatgcggtggtccttgagaaagggctgccaggcagggggcaacgtcggggcacccatgccgccgccgccacctcgtgccgaattcgccacccagc

SEQ ID NO: 311460 - DNA, 642 bp, Homo Sapiens
  misc_feature (297)..(365): n is a, c, g, or t
aaggggcccacaggaaggctggtggcaccagggaataaaccctggaagtggtgcagccactctgggaccaggcagctccggccagaggcctcaatccatggcagccagctgctcgatggcacggcgcactttctccgcagtttcctcaaattctttcttcttattgttggtttcctttgcaattttgttcttggctctttctctgtccagtttcaaaaattcaccaagggttaattcttcaaactgcttcttgacagaaaggaaagcgcaaccggacgaatgctttttatgttcctnnnnnnnnnnnnnnnnnnnnnnnnnnnnnnnnnnnnnnnnnnnnnnnnnnnnnnnnnnnnnnnnnnnnncaatggggtcgtcatctggctcccagccttccagctccttgaagcagaagaaacactgggccaagtctggctcgttctcagtggggcagtggatgaagccagcctcggccatccgctccggggtgcaggcgcagccctccaagaagggccagttcttgaatgtagagatgcggtggtccttgagaaagggctgccaggcagggggcaacgtcggggcacccatgccgccgccgccacctctgccaacgggtccggcgattcaaatctggcggttaat

SEQ ID NO: 311461 - DNA, 932 bp, Homo Sapiens
  misc_feature (136)..(136): n is a, c, g, or t
  misc_feature (190)..(206): n is a, c, g, or t
ccaagtcccccatccaggacctgtggcagcctcaacaacatgaggtccaggcccattccactgggaaaggctctgcccacgggaacaaagctgtcagctttagcaaaagggacacttgcctttcttctcccctcanttttcactgggtaagccccgggaatcaaaacagcaaaaatgagcccccaaaaannnnnnnnnnnnnnnnnagcagccactgttaccagcagcacccgctgcacaggcagaagcacctctggtgccactttcaagacaaaacaagagcacagttgaaacatctaatttgaaaatgttgatctcctttcctaagacattgctaaggggcccacaggaaggctggtggcaccagggaataaaccctggaagtggtgcagccactctgggaccaggcagctccggccagaggcctcaatccatggcagccagctgctcgatggcacggcgcactttcttcgcagtttcctcaaattctttcttcttattgttggtttcctttgcaattttgttcttggctctttctctgtccagtttcaaaaattcaccaagggttaattcttcaaactgcttcttgacagaaaggaaagcgcaaccggacgaatgctttttatgttcctctatggggtcgtcatctggctcccagccttccagctccttgaagcagaagaaacactgggccaagtctggctcgttctcagtggggcagtggatgaagccagcctcggccatccgctccggggtgcaggcgcagccctccaagaagggccagttcttgaatgtagagatgcggtggtccttgagaaagggctgccaggcagggggcaacgtcggggcacccatgccgccgccgccacctctgccaacgggtccggcgattcaaatctggcggttaatggcgcgccgcggggcatgtcccc

SEQ ID NO: 311462 - DNA, 673 bp, Homo Sapiens
  misc_feature (601)..(601): n is a, c, g, or t
  misc_feature (606)..(606): n is a, c, g, or t
gcaagtaacagtggtagactctttcggtattttttcacttttttcttctgaggatctccgaggtaaaactggttgtcccatcttacgaagaggagctagctgccattttttaatttcattatctctacagtctgatgaatttctgccttcaccagactcccgttttaaaattttgaccttgtgcttcactgtatcatctatatatttggttctatcatttgttgtgtgttttgataatccaagcttttcacactccattgttttatctccactatggaattcaactgtagcttggttttccaaagtatctggatctagtatttcagtctttttgtcttcttcagcacaacattttacacagacatattctttgtcttcctcgcccatctgctgtgcttgagaaagacttaacccaacacaatcaccatgaaaccagtcatcacatctcccacagccaaccataaacctgttgccatgtggttttttgcaaaacccacactgcttgctgggagtccacatatatttgctttcaaatgaggagctatgatcagagccttctcttcttatggtagctatgttatctggaatgaacaatggtggntcgtntaaagaaaaacttttgctgcttcttctttggcggggttgtaggttcttactcaggttttttcagttt

SEQ ID NO: 311463 - DNA, 1200 bp, Homo Sapiens
  misc_feature (22)..(22): n is a, c, g, or t
  misc_feature (38)..(38): n is a, c, g, or t
  misc_feature (632)..(632): n is a, c, g, or t
  misc_feature (773)..(773): n is a, c, g, or t
  misc_feature (784)..(784): n is a, c, g, or t
  misc_feature (824)..(824): n is a, c, g, or t
  misc_feature (1033)..(1041): n is a, c, g, or t
aatggaaaaataattaaggccnatacagggtgtatttnccgggtccacaacagcacaaagtgtctttcatttttttgttggttctcttttaagatcttttttaccctgaagtcggtgaatacttttctagtttatttgatactctttctgtgtatatattaagcttttgctgtagattgcctagtaaaattactaaggataggttgtttttacatatggtctatttaagtctgatgtttacgggggaaagtgtagttactaaaaatgtttaacataatttggaagaagagtatgaacaaccaataccaatacctattgcgtttggattcttaagaccccagtttgttattccactaaactagttatcttaaccatatcatctggttttgtgggccattatttaccttcccttatgtcttatagaataatggttaatatttttaggtcaaaattacttttggaaagtaactttcccacaattaactgtttttgagcacctgacaaaatttagtgtttaccttgcgtgccattttgtgtcatccttcattaaaaaagcaattggaggtttgccagttatctcacttccctttttaaatcaatgttgttttaatgcactaatctgaattctgtanagaggattatcttagtttatactttgtattttataatgttcttgtatagcagctcggtactgaaggcggtgtttaacttggcaagctctgagacttcaaatgggaacaaatagtaagtagctaagtaaaccacatctttgncaccaaaatanagatgagttaaaaggtatctggttaggcctatttcatgangactatgctctggtgggaccacaggtcacctgatacttagtgctgtgctgcctgaaactcagcatggagacatcaccacatgcactgtggccatttcacatctttctggagcatcaggtcacttcagttttttattttaaggtgtcatcgatttttaccaactttgtcaaactgggaaaaagtgctttgcatatccaaaaaacttcccnnnnnnnnnccccaaaagggattacacaaaaactctttttgggaagggagggaatggaaactttaaagactcctggtggccaaaaatcaaactgcgctctaaaacagaatggggccaagggcccgggaggggaaatttcccaccaaacaggccccttggtttcctgaa

SEQ ID NO: 311464 - DNA, 482 bp, Homo Sapiens
aggaagctagtaatcactccatttctcatatttggtgtgaagtcctgagactgctggaagaaggaatccgagtgcaggaatgcttagccccagtgattaacttttacccatcaaaagttctttctaacagtgaaatagaccacaggcctagcctgacatttgtccaagcctaaattttcgcttaggctgttttgaacactgatacttatgcctgctttctaagcatgaaataatgtccttgttctcatgggagtaacacatgtttatgcttgggggcaaataagccaattgctttatgattaaccctgaagttaagcctaaaaagcaagggtcttacaataagagtgttgacaatatggttgaaaatgggcctgtttcttgttaaaaagtacatgtgtgtctacacgaacatgtgcatacatatgtgtgtgtaaggagtcaagtcctgactggggttgattgcctgcaatctaagggtcagt

SEQ ID NO: 311465 - DNA, 659 bp, Homo Sapiens
  misc_feature (84)..(117): n is a, c, g, or t
  misc_feature (630)..(630): n is a, c, g, or t
caagtttggcaggtgaatctatatttggcattttgaaatgagctccatccttaaactgaccacattagtttgcccgtgatgccnnnnnnnnnnnnnnnnnnnnnnnnnnnnnnnnnnaaatacaaaattactctgaccttggaagaatagtcttgggttagagctagtctgcatttattattacttagtaggcattccgtgattcactgctatttgccttttctgtgtcattttcttattcccccttcttcccttgtctcaggagccgtagttcatttttcagatgtggccaaagaaatggctgacaccctccctctaccccatacaactattcccctagattattctttatcctcatgacatcaggataaacattaatgttgtcacagtagcagtaggtagaatattgttcgtttagtctaatattaggctatttctcccagtagattcattgctaatgcaattgaattataaatttgggcagagttttagagaaaattgccattaaatcaatcagcttgttgtaggagcttgtctatatgctaatagcattggtgctggcatatttgggcagtaatttcagcattgcatacataaatttgctattgttacatttggattaatattaanacctgagtttatagtgtttcaggtgtagt

SEQ ID NO: 311466 - DNA, 606 bp, Homo Sapiens
  misc_feature (406)..(506): n is a, c, g, or t
  misc_feature (550)..(550): n is a, c, g, or t
  misc_feature (576)..(576): n is a, c, g, or t
aaagtaagttttgagataatacctaagaccacatggaaatttggttggtctaagtagaggacaagcacgtatttaactacctttggcaggggaaaaagtgaagtgggagagcttaccagtgctacctatgtgtaggctgacactctgaaacttcagtctccaggaatctccatatgttggcactattttgttgattatttttctataaggttatatttctttggaagatcggtaaacttgctgttctaacccaaattcagtgtagtcttcagcttctgaataaggaataaaggaatcgaatgtgctttggatgttcttttaacaatttcagaatgttggcatgccctttgagcatctaaacttccctcagcgaattggtatttatttatttatttagagatagaannnnnnnnnnnnnnnnnnnnnnnnnnnnnnnnnnnnnnnnnnnnnnnnnnnnnnnnnnnnnnnnnnnnnnnnnnnnnnnnnnnnnnnnnnnnnnnnnnnnngtagcaggggactatagggcatgtggccaccaccacacttccgnctaattttttgtattttttagttagnagccaggggtttcatcatgtaagccaagcg

SEQ ID NO: 311467 - DNA, 627 bp, Homo Sapiens
  misc_feature (20)..(20): n is a, c, g, or t
  misc_feature (97)..(97): n is a, c, g, or t
  misc_feature (147)..(147): n is a, c, g, or t
  misc_feature (222)..(222): n is a, c, g, or t
tttatagtgcttcttttggngtttaactttagaattgtgcctttaggaaaaactcacatgattcctgtagtactcttcgactttcactgattggacntataggaaaaattgaaggagaggatttacctcaaattggaaggtgtggcntataaagtagggggatattaaaggatatcacatatcttttgcccaaaaatccttagtcacttaagttgaaaattnctatggtttatattattaaatctgggattataaatactaggacataaactgattttataaaatcttttgtgtatacactctaagttgcttttgtcagtataaatagtaaactggcaagaaattaaaaaggcaagaatcaaaggatgagggcaaggaggctcaaaacagcataaacgtactatacataatactgtatttgtataatatataaatatgtaatataaaagtaaaccagaagaaaaggatagagaatataattaacggtcttcatttaaatataagtcttttctttctaacgttaaaaattagcaagttacactgaaattagtgtgagtatataaatatgagatagacatataataatagtgcaaaaaaatccagttgaatacgattcttcagacttca

SEQ ID NO: 311468 - DNA, 1311 bp, Homo Sapiens
  misc_feature (498)..(498): n is a, c, g, or t
ccacattttagatggtaaggtattcaataagtggggttttaaaagttaaatccctaatataggactttttggtatatctttttttacagtataaaagaaggctattttacaattttcttaggaaattcagtgtaaaagctaccaaagtgctaaaatatcacaatagcatgataaaaatacttgaataggatttcaaaaaagttcaaatacatataagcttattttcaaatatgtataaaaagatacaaggataagatttaaatacttcagcaaagaaatatcttgattttatatcaaaaaagtaaaatagcatagtacatcttaaaatactcttaccaagagtagaatcttcataaatagaaaaggaagattcctctaactctgtcctcccacactattaaaaaatattattaacctgcacatttctgttttcaggtatattgttgtcattaacctttgtgtgaaatgagtcatattattcttgaactctattttttnccagtataacagtaggcaatgcaactttaagtgcaaaagaagaacgtaacagtgattcttacaaaacagtgcataggtcacttccagtgtaacacaaatttgcttctgagtaacgagagaaaatgttcttcaagtatctgaatgacaaccacctccctgctcttttctcactcctgaaactgggtgaacaagcagagatgtggaacctttgaggctgcttggttctgaagaactggggacctgcaaattgttgctctgtgccaggccagtgtcagtaatatcactctttggactaatccttccttcactccgcgcactttcagatacactgcctgcctggcccttcccgtcgacctgttccccagagagtctggagatggatgctgctggcgaggcaggttcaccacagtcctgttctcttaacctgggggtgctagctccgtccgctttcacctctctcattgatgtttctggtgaggtttggatttctgtcaaagtttcttgtcctaggtaatcatggctagtaattgctactgcagaagtgccatgatttgctgtagctcctgtgctggttcccatggatttggaaatgaccttcagcttgtgtgaacttggtttatagtgcttctttttgtgtttaactttagaattgtgctttaagaaaaactcacatgattcctgtagtactcttcgactttcactgattggatctctcttgcgatttcgtttaaaaaacccagcccattctgtgcatgtctttttgcttccaacccagaagacagcagagatgccaacaattaatgtcatcaggtt

SEQ ID NO: 311469 - DNA, 615 bp, Homo Sapiens
  misc_feature (40)..(40): n is a, c, g, or t
  misc_feature (48)..(48): n is a, c, g, or t
  misc_feature (54)..(54): n is a, c, g, or t
  misc_feature (83)..(83): n is a, c, g, or t
  misc_feature (140)..(140): n is a, c, g, or t
caaaaggaggcactataaccccagttcacaccaggctganggtcattncccaantcccatgggacccagccacaggagctacngcaattcatggccacttctgcagtagcaattactagcccatgattacctaggaccangaaactttgaccagaaatccaaacctcacccagaaacatcaatgagagaggtgaaagcggacggagctagcacccccaggttaagagaacaggactgtggtgaacctgcctcgccagcagcatccatctccagactctctggggaacaggtcgacgggaagggccaggcaggcagtgtatctgaaagtgcctcggagtgaaggaaggtgagatttgattttatgtaaaatcatcactattttaaatactgcattacacattttttattaaagcataacacatttggaaagcattttgtgatatattatgtctgtactcttaccccaaggaagtttgggttcagcctataaatatgctatttagtagtttaattcttagctttgagaacagctttaatatatttggttcaagtaggaatgttcatttctgtggcaattgttaagagttccttgtacatttaagtaaatgcaattta

SEQ ID NO: 311470 - DNA, 546 bp, Homo Sapiens
tttgctgctttctttttcttccttatctcttttatctttgtcttcatcttgctttttcatagatgccagtttttcttgttcaatctgtctttgttttatttcttctttcttcagttctaggaaagcagaagggattcccgcgatgttttcttgtgcacttagcagcaggggccacagttctcccataaattctcgagcattttttccattcaaaaatccagtcaggttgatttgcatcattttggagtctggattcttcacttccagctggttgaatataaactcaatcacaacatcatcttcaaacccaaggatttccgttactctttttgttatccaaggctttataacctccaaatttactttgctcatgtccacctttttttctaggcattctgcaaatttcagctgcttcagtagtttcttctgtttgttgctgaaccgattatcctgttctgcacttgttccgcggaaaaatcccgcgtccatcttgccgcctcgctcggagatcgctccctatcccagggtacaccgcgccgccgcccc

SEQ ID NO: 311471 - DNA, 1480 bp, Homo Sapiens
gaggatcgattaaaagctttgccacattcttcacatttgtatggtttctctccagtgtgcatcttcgtatgtctagttagggttgaggattggctaaatgctttgccacattcttcacatttgtagggtttctctccagtatgaattatcttatgttcagtaagagttgaagatttcctaaaagctttgccacattcttcacatttgtagggtttctctccagtatgaattatcttatgtgtagtaagggttgaggattggctaaaagctttgccacattcttcacatttgtagggtttctctccagtgtgcatcctcttatgtgtagtaaggtgtgaaggctggctaaatgctttgccacattcttcacatttgtaggttttctttctggtatgaattttcttatgttcagtaagggttgaggaccagataaatgctttgtcacattcttcactcttgtaaggtttctctttagtatgaattatcttatgtgtcgtaagatttgaggattgattaaaagctttgccacattcttcacatttgtagagtttctctccagcatgtattattttatgtttagtaagggttgaggagttgcttaggagctttgttatattcttcacatttgtaaggtttctctccagtataaattttcctatgattagtaagggttgaggaccaattaaaggtttttccacattctttacatttgtaggacttctctctatgataaatgcttttgtgttgggttttatgtgaaagcatgcaaaataatttgacacgttttttacatttgaaagatttcttttcagtatgtcttatcttaggtctgtttgaatttaaaaatttatagaagactttcaaatatttatcacattgaaatactttgctctgggcagttgtgaaacactggttaagtccattataaccttctttgttcaccttatactcatccacacttttacagccttttcttaactgtaaattctcatgttcatattttccatgtcttctcagtattgctttttgaaaagaatcttttatgtcttgctctggccaaaggtctctgagtaaaatgaggacacatacctgggggttcatccaccatctcatgtctcttcatattccagggctcttttccttgctccagacaggtgatcaggtctggcttagagacagcaatacccaggaagaccaggtttctgtagttctctaacatcacatttctatataaattctgctgtgcagtgtccaggtattgccactcctccagagagaattctatggccacatccctaaatgtcaatggtcccatttctaggcttccagggggtcctggcatcttagctgtggatctcccaatacctgctggtaacggcgccacagaggctgggcctctaggagcagaggacacagagcagtgaagacagacctgggactccggcgacagcgagagacaaaggccccgccaaatcccccc

SEQ ID NO: 311472 - DNA, 1047 bp, Homo Sapiens
  misc_feature (1002)..(1002): n is a, c, g, or t
  misc_feature (1025)..(1025): n is a, c, g, or t
  misc_feature (1036)..(1036): n is a, c, g, or t
cggttgaaggctttggccactttcttcacatttgtagggtttctctccagtaagaatttttctatgggtagtaaggtttgaggactggtaaagggctttgccacatttttcacatttgtagggtttctctccgggtatgaattctcttatgtgtagtaaggtttgcggattggttgaaggctttgccacattcttcacatttgtagggtttctctccagtatgaattttcttatgtgtagtaagggttgaggactgtttaaaagctttgccacattttatacatttgaaaagatttttttccagtatgtcttatcttatgtttgtttgaatttgaaaatttatgaaagactttcacatatttatcacattgaaatatttttctctgggtagttgtcaaacattggttaagtccattataacctcttttgtgcactttacactcatctacactttcacagcctttttttaactgtaaattgtcatgtctacatttttcatatcttcttagtatcactttttggaaagaatcttttatgctctgctctggccaaaggtcttgggcaaaatgagaatacataactgggggtttggcaatcatctcatgtctcttcatagttaaaggtttttttccttgctccagacaggtgatcaggtctggcttagagacaacaataccaaggaagaccaggtttctgtagttctctaacatcacattcctatataaattccgctgtgcagtgtccaggcaatgccactcctccagagagaattctatggccacatctctaaattgcaatggtcccatttctaggcttccagggggtcccggcgtcttagctgtggctctcccaatacctgcaggtcacagggccacagaggctgggcctcttaggaaggcagaaggaaacagagaagtaaacacaagactggggagctctgggctgcagtgaggagacaaaggcctgtgttttttctttttgacagtttgattataatatgtnctcaatgtgggctattctttggntttcatcatanttgggagtttt

SEQ ID NO: 311473 - DNA, 329 bp, Homo Sapiens
gacccagtaggctgatgctcaccatggggcgcctgcaactggttgtgttgggcctcacctgctgctgggcagtggcgagtgccgcgaaggtaagggcccagcagaggggcaggtcctgctgctctctcgctcaatcagatctggaaacttcgggccaggctgagaaagagcccagcacagccccgcagcagatcccgggcactcacgctcatttctatggggacaggtgccaggtagaacacaggatgcccaattccatttgaatttcagataaactgccaagaactgctgtgtaagtatgtcccatgcaatatttgaaacaaatttct

SEQ ID NO: 311474 - DNA, 1805 bp, Homo Sapiens
  misc_feature (54)..(84): n is a, c, g, or t
  misc_feature (253)..(261): n is a, c, g, or t
ctccaagaacactttattaagaacattaacagactaatttccaacattcacttnnnnnnnnnnnnnnnnnnnnnnnnnnnnnnnccaagatataaacaatttttgttaaactataatacagtgggagtaaaaatgaactgagaatctgtttctgctgcacaacagcgaagggagctcccacaaaaatgtttgcccaacatttccttcttttgttcctgcatcccgggttccacttactcttcataaaactgannnnnnnnngccagaatgttggtatttcaagtttttctgccttttaaaaaaattcctgtaaatttggctgcatgtacaaattcattagctggaagtcccatccttggcggcatacagggatcgtaaagtctgaacaactttattagtcagcttattagcactcgttagagcaatttttttgtaaataatgtctgactctttaatagtgtctacccaaggcaccagtttgcggccatcacggcgcttagcctcagtccaggagccactgtaggagcctgccatccactgaacactgaagccactgctggttttctgcactactcttgcaatttgtggtcgatctttgtactttggacagcaaatagcgatgacatccatgacgtcaacactttcattcatctgtgctgccaactccgtagagtctgaatttcgttttgaccttctcaatgagtaatacgctgcgaaatacgttgactcctcctccgcctcacccctgaagtgcctcctcctctatcctccccatcactttcatcatcttctgtctctgctgctgtattatttttagggctgcctcctccaagcagtgaggtaattgctttgttccgagcatttgtgctagctgaaacctccccttcttcttcttcttcatcagggtccagatgttcatgagaagtttaaatctagatactgactatactccttttcacctcattctgtgattttggaattagccatgtcactccgcaggaagtccagtgtttgttttggatgaaaatgaactcctgtttttcggtttatcgctttatcatatacttttgcagattcagatggagagtacttctgaattttactatcagaaaatccacaaagattcttcaaatgttgttttaacatgagaagtaataaaataccctgggacacatttgcaaattcgattaaaggagctgaattttctggcaaacatttcatcactgaatttatatcgtcttctgaatctgaatctgaatctgaatctacacgtttccgtgacttccgaggcctggaaacttcttcttcactgtcgcttgactcattttccttactaggtgatgattttctctctttccttttgtcctttaccatagactccttgaatgactgcagtaggttactaccagaaactgagagtgtaatgtctatatgatgcattataaacaacggctcttcctgtgtctggtatggaaaacaggctagattgtctgctatatacaagagcatagtcacgtctgtttttgctgtgtcatcaaagaggttgagtaaagaaataagaaaggctcgtctgtgttggcggtttccacggatcatggagtaaaggtgtgaacacaaagcgctagaggactcgtcttgtctgaaaccccttacaggatcttttaggcatgtgttgattgcctgttgtacctggtaagacatcttcataccagccactgctttcatatgaatgaatccagcatattttttgtctatttccacaagttgctgatcagccttgttccgcatagcaggttctgggtccc

SEQ ID NO: 311475 - DNA, 568 bp, Homo Sapiens
tttattagtcatagtaccccagtgtgagttatcttctggaacattctttttcagacaactatcaaggagtcaattgttaatgataagtattctagtgccctaaactctaatcaatcatcttttgtatttagagtgtctgtcacaagtgagtatgcctaggaacgctaaacatatcctaggagttttcgtctaagtacgagatgaatatactggatttgactgatgtttgcatataatcttttaaagccaggttattattaaaatgatcctatcatttatgaagtatgtacaaagtttccatcctgtagaatttacatgtattatatgaattaaaaatataaaaaatatttatattataacaatacagtattgaagccttattttaatctagtttgacattctgtataatgtgatatggatattgatccttctggagtgcctctaaatgataatgtgctgaaacctctgaaaggaccttttttaataacaaaaatcttatatttgtaatatgaatgtaagtattccatacatgtatatacaaatatggaccatacatgtagattacaca

SEQ ID NO: 311476 - DNA, 651 bp, Homo Sapiens
caataaagataacagaagagtgacattttcctgctgcttaatgaaaatttctgtaaattggcttcccaaatcttcactctgtcttgtggaattttcttcttcaacatcatctacttcttcttcttcttcattagatattatattatatagtgtgtccaaagcataacctattatttcagaatctgaacgatctgtttgtaaaacatgaataagatgttccatagcttgtatacccacttccaagcggtatttcttagataatgatttgagagcacgaacagcatttcttcgatcatccaataaagtagatgaagctactctgtcacaaagcttttgaatcgtctcggcttctgtgtgctggggtccggcactctgaccccccattaccccgcggaggaaattcatcttgccgttcagccaccaggtttaccggcccctccggaaaaaaaagaagacaacttcccccgccctccgcagggcctggcccccaatcccgcactctacacactcctactgctgccaccaccgcctccaactcggcggccactccagccctctaagcccggaaacagccgccagcagcggccaagatgcgcatgcgcggggacgtggcattacgtggcggctcgaaggttgaaggcaaaaggggac

SEQ ID NO: 311477 - DNA, 968 bp, Homo Sapiens
  misc_feature (17)..(17): n is a, c, g, or t
  misc_feature (22)..(22): n is a, c, g, or t
  misc_feature (28)..(28): n is a, c, g, or t
  misc_feature (38)..(39): n is a, c, g, or t
  misc_feature (198)..(198): n is a, c, g, or t
ctgaatcacagccaagngaccncccagnccattcaggnngtactgataaacaccagggccatgagggcactaatcataatgagatatgcctgctggagtcgaagtggacctttccagtgaatggaaatcattcccaccacaccaaaattccagatcaggagtgcaacagtaatgtagtccacagcaacgttataggtnttaaacacttcccccaagtaaatgaatgaaaaaaagaacagcaacaatagagatgatataataagccaggcatggatgaccttatagcacctgtatttatacagaaccaccaggaggatagtcatgacaacaatgacactgatcatgatggcagcattcagaattgagtgcagggctctctggcccacagtctcggtatcttctgtgaatggggtatagattagctgcccatccttccgggtataaaagctgactgacttaatggtagccacgaccaccaccatgcagagagtcacagggacaaagagcatgatcacatgcttggcgccatatttcaatgtcagctcctcatcttcttcctcatcttgctccaccacctgccgggagttaccctggggtcgtccattagataatggctcagggtggccaaggctccgtctgtcgttgtgctcctgccgttctctattgtcattctggctacgtacagtattgctcaggtggttgtcctcagacatctgtgcattctggaagtaggacaacggtgcaggtaactctgtcattggagcaactgtatagaaatactgtttcacagaaaacaaagcctcttgaggttctttctttcatgtgttctcctccaggccaagctgtctaaggaccgcaaaggctgttgtcacttgcaggctcccagattaggtatacgcttccccgccgccccgctgccgccgcggctcgtagctcaggttccttccagaccagccgctgttttgttt

SEQ ID NO: 311478 - DNA, 612 bp, Homo Sapiens
ttttggctcctggtgtcattggggttgcaaaattatttagatcccatatgtagatttcagattcattagcaccagaagctaccagattagtctggaaaatgttcacatccaaggctctcactgggccagtatgcttgtcattctgggcaatcacaacttccttgtctccagctataattttagaaggatcatagagaataatatttccattttcaccacctgcaatcagaactccagagacatctcctttggaatccattttataaggccccccaaatcaacttgtggtacctgtgagaagaggagaatgtggcacaagatttcatatccaaggatggatcagagaggtctaattcaaatatctcaagggaagcattcgtactaaatgttgcatccaattgctgagcagatgttcctgttgctaggtaaatggggtgattctgggcagggctccatgcctgcatggctgtacgatctacttcctttaacttcatcctgctggcgaggaccttcggcagccggatcctgcgttagtgcagcgctcgtcggactctcccagcattcgccgccgcccctcctccccggccagggccacctccacgttccgttccc

SEQ ID NO: 311479 - DNA, 475 bp, Homo Sapiens
gttacatagtttactattgggaaggttaaaagaacaatcataaatgacaaaaagttaagagacagtggatacttacactttctggataattactcacaaaataaaacagtattaagctttatgcactataaagagataccaaaattctacaagaagtccttggtagtcatagtgagatctgcattttctatttgggaggaaaatttataattagactcctcataaatttgctttgctataaagaaataatttctcaatgaaaaaggttacaaagttttaagttagaaaaattgtgctacatttttacataaattagccaatgagttatttagtagttcaacaatataaatatggaaacaagcaagattttaaagtaaatagtgtaacaaagaaattaaaccacaaaccctttcaggtggtacagcctaaaatgtttaccctttctcaagcagaaattggactatctctcccggcc

SEQ ID NO: 311480 - DNA, 1363 bp, Homo Sapiens
gatgccctggctgtaggtccagtcaatagtgcttccactggcttgataaattgccttgatgatgctgccatagttgaacttggtcccgtagagagaggccatggctgtcacagcagccttggaaagctgatccagctcatcctggtcagggactggttctgttttgtagccatagggatacatgaggagctgggagtagctgtggatggagatgaaggccttgatgttcccatggtccttcacaaagtctacaatggacttgacctccacttcggaattggcaaacttgccgtggtaagtctccgagcaggggttactgctggctccggacactgtggggggacagagggcatggcggtgtggctcctccagcttctgtggcttctggaatccagttctttgcatggagttgggggtgaggtggtatggaagggctcactcccacccctggattcaggaaagcccaaaggccttctataacctgggggaactgccctcccagcctggtttgggcagagctgatggacacacccagggagggaagacgggctcctcagtggagaccagttctcacagagacgtggccaaggcgggaggacttgaggttaagctagaaggcccctaggtaggatttcagaccttagcccatttgcaagcaacttgccttttgcaggcgagtaacaaccaactctcagagcacagcctccatccccaagagccctcagaggcagagctgccacccccaaccctcccctcactgcaggggcaggagagaggcggggagcaagagcagtggtgaggagccattcgaggccatcccatccttgctcccaagacactctgggccttacacccaaagccagcgtcccagttcctgttggggtccacgccaatacagagggagcctgctgtgtgggaccgagtcttgcgccacatgcgattctgaggaaggaaatgggatcagccaccccgaggcacgtgtgacgcttgtcacagtgctgggtggggggggtggttcagaggctgcagagagcagagtggactgaggggagggctccctggaggtggaagccctcaacacaagtgccctgattggaagctgagctgcaggcacagcttgggatgggatccactcccagctggttgtcggggaggaagatcagcagagggggcatcgggtgaaagagggtggggaaggccatacgatggcatttggccagagggttctatatggcgaagaagctgcgaggtgtcctccaccaccactgtggccccatgtcattggtcagatgttttatttgccgtaaaaacagaagtaggaccaggaagtaaggtctggggcagtgggcctccactgggggac

SEQ ID NO: 311481 - DNA, 936 bp, Homo Sapiens
gatagttaaagggtctacaaaagaatcaacttctgcactcctgcagaaatcccaacccatggtatttgtgcaaggaagtatgatagaccactaaatgaagtgcctttgggtgaacgtctctgagatcaacatgtgcaaatacctcatagctctatttgatttgcttgttcaccagtacttttggagcagaatgtcaggagtatgtgaggaagtaaagaagacacatgagatcccagaccatcaaggagcttgcagtgaaaacttgcaatgccagtagagtgcgatctattagtgggttctgatggggagagtaggagctttacaggaacacatagaaggcagctaatccacactgatggggtggggaaagggcttaaggaggtctcccaaggaagagacgtctaaattgacagctgaaggctagtctgttgatgttagctggcaagtgcttgggggatagacaacaacaagaagagaagaacaaaccaggcccagaggtgagaggctatgatgtatccgagggtctgaaagttcaacaaggggtttggctgaagagtctagaaaaatagatgatgagttaggaaagctcggaggccttcagaatgagtttgggcttgatcctgaaggcaatgagaggcatggaaggttttcagcagaggagtaatatccattaggctggcattttagaaaaaccacagcaaaaattgtcctgaaaatacaatcttccctctccagacagagtatagctaccccccttccaaagttcacctcattggccacagcctgggagcccacgtggctggagaggcaggaagcaagactccaggcctgagcaggattacagggttggatcctgtagaagcaagtttcgagagtactcctgaagaggtgcgacttgatccctctgatgctgactttgttgatgtgattcacacg

SEQ ID NO: 311482 - DNA, 1121 bp, Homo Sapiens
  misc_feature (637)..(642): n is a, c, g, or t
  misc_feature (719)..(739): n is a, c, g, or t
aggggaacaggagtacttatacactgacgtggatgagctcaacgactccgattctgagacctactgagaggctgaggaggagggagttctcacagtaaagcttcaaactgtgctttttcaggaaaaaggcactttgatattcacgtagaaattcaacctaagaggaaagatcccacagtgagccaatgttaagagatctgatggcattaggaggaagagttttaaaggcaagttttacaaaaggaacttctagaatcttgaaatagacctgactgaggaaaacacattgatgtcagaattctttgtggaattgtttaatttggttttgcagtgccaggaacaattggggacactgtgcactctaacctgcttacacaagcaacactattgtaacagaagaaataaagacactagatttaaattttatcaataaaattacaactaaatttaaaggcaataaaagtttggtacagtaggcattatgtgcacagcaaattgcaaaaggaccaaataactgaaaggtttttttaataaaatgccattttgtggaaactggagtagattaaatgaaacattacctaaaccaaactgcaatatttctggaaatgaagctgagatttggttttaaatgttgagnnnnnnttttgggtttggtttttttaagaaaacatctgaaagccttccaatgctgtattaaaccatgagagaaagcagatgtnnnnnnnnnnnnnnnnnnnnnacagaactatttcaaatttccaatttttatactattagaattaaaaaccagctgactgggtgcaatacgggtgaaaatacttgtgacatagacattgagatggattggggtcaggctgttgccctgttttgaatggtttgggtttaaaatagtactatttttgtttgaaaatgtaaagaatttcctagaaaaaaaattcatgaaatcaaaaagtagactatttcaccctattgcagctaagtggtcctggggcatggagtcttcaacctctctatgaatggcacaccttagtcacttatgttactttttgtgtccccaccatgggttgggggattttttgtttattctgatctttgagtgtggctcttggcattttgttggg

SEQ ID NO: 311483 - DNA, 622 bp, Homo Sapiens
cacattataatcctcttcgtttggcatcaccaatgactccccaaacatcaaagacaaattcgtctgggaacgcaaagtctccaagagtttcgtcaagtgccacagcaaattcatctggatttactttgtcctttccagcttcaaacattgtggtggctaaatcaatatctcgaattcccatgtacaactcaagaacatcatcaatcttttcaattgcctttgctttggtttcagaaggcatttcttccacggtggcaggaccttttgatctcaggcgaagtgttgcccttccacaaccaattttttctcctgatgactttccagcctttgacctcagctctatttcaaatgccttcttaggttctattaacttcatagtaaagagttcctccttttttaattcctttaacttcttagcaacattatagtgacgccacccaacaatattttctctatttatggattcaatatgatccccaacacagattgttttaactgagtcaataacaccaccatctttaattctctttataaaagcatagccaacaccattatctgtaatggtgagaccaagtgaatcctcagatttatacacattcacttctttttcgattcctttcac

SEQ ID NO: 311484 - DNA, 550 bp, Homo Sapiens
tttaaggaaatatggctcttctttccccatggaatgtgtaaattgcaagcaaacttatcttttcctcaggagatccaaagtattatttaatgctttcctatcctttaggtctaaactaacagtgcttgttcaagttcctgtttaaagcgatgagatggaaagttgatgaaagtggaagtccattgcaaatatatgcattctataaatgggaaatatttttaattaaaataaaaaatgatttttaaattttattcaagaactgtagtgaaaaaccttaattggttcatatatcctgtaataacacattgcaacaaaatgaagagttggaaaacaagaatctttatgcaagtctagtaacataaaaataacttataagtcccgggttgttgaggctcttcttctgctttgaggttataaacctctgaagtagtgttacaaacattaagaaaaacgtgaaagggccaaagttccctctctaataccagcagttatagcacaccccattgtggtaataggatgcagccttagagacactgattcctgctttcca

SEQ ID NO: 311485 - DNA, 907 bp, Homo Sapiens
  misc_feature (709)..(709): n is a, c, g, or t
aagaactaccggggcttctacaaccggcctctgtctccggacttgagctaccagtgctttgtgcttgcctccttgaaggaacccatggaccagaagcgctatgcctccagcccctactcggatgagatcgtggtccaggtgacaccagcccagcagcaggaggagccggagatgctgtgggtgacgggtcccgtgctggcagtcatcctcatcatcctcattgtcatcgccatcctcttgttcaaagggaaagggacccactctccgtcctctaaggatgagcagtcgatcggactgaaggactccttgctggcccactcctctgaccctgtggagatgcggaggctcaactaccagaccccaggtatgcgagaccacccacccatccccatcaccgacttggcggacaacatcgagcgcctcaaagccaacgatggcctcaagttctcccaggagtatgagtccatcgaccctggacagcagttcacgtgggagaattcaaacctggaggtgaacaagcccaagaaccgctatgcgaatgtcatcgcctacgaccactctcgagtcatccttacctctatcgatggcgtccccgggagtgactacatcaatgccaactacatcgatggctaccgcaagcagaatgcctacatcgccacgcagggccccctgcccggagaccatgggttatttctggagaatggtgtgngaacatgcgcacggccacatgtggtcatgatgacacggcttggagggagaagtcccggggtaaaatgtgatcagtactggccagcccgtgcacggagacctgtgccttctcaggtgaccctgttgacacagtggagctggccacatacactgtgcgcaccttcgcactccacaagagtggctccagtgagaagcgcga

SEQ ID NO: 311486 - DNA, 747 bp, Homo Sapiens
  misc_feature (61)..(61): n is a, c, g, or t
catatagcaccttacaagccaaatctagccagctgccagctttttttaaagttttcttganacacagccacacccattcatttacctatgatctatctatggctgcttttgctctaaaactgtagaaatgagtagctccaagagactttatggcccataaagcctagaatatttactatctggctctttttttaaacaaaagtttgttcaactctggctgatacaggaaaataaagacctgagatccatttaagaagatcttttacttaagaagttcccaggacattatgattatacaatcctcaaatcacatcttctttgtgctatactttgttcaacatcctatatctttaaaaattattactaattaaatcacttttaggccaaaatttgggtactacatcaaagcaactgagctagaaggaactgctatagcagcacgatctaattaaacagaggccacacggaggctgtacacaggggctgagttcaaactcagggttctgatccttgcgttttatatgctggcaattctctgcatttgaacttaattcattcctaagaaagtaccattataaagcaacagacagggacatgaaggggtctttgttccctgaaagagcaaatacatttaaaattccaatgttatgtcatcttggacttaagctttgatgcgtttatgtttccttcaactggcttaagtccactgaaggtcctattgaggcttaacatcattacttttgtcac

SEQ ID NO: 311487 - DNA, 932 bp, Homo Sapiens
  misc_feature (558)..(592): n is a, c, g, or t
ccatttcaggcccccctgaccccctcctttcccctttgccacgagggagaacccaatagttgccccaaacaattccaagggttccagaaatagggagctttcaaaaacgaagccccggagttgccccccagcagacccaaacctagcccttgactgaggccggccctcagtagcccttgagtcgagttgtacatctccacgtcaatcaagccccttccggatggtttcgctcactttggcccccagtaagacagagcccactgtttcaaagatgctagctaggatgcaggcttgcttcagggtcactacacctgagcccacagctgtaccaaaagaatttgctacatcattggctcccacggagaatgccaagacaaatgcaataatgaagcccaggatgagcatccataggtagtccaccaaaggaccagaagcggcggtagcagctgtagtactggtaatcagcgttgccattctctggagtagtggttgtttagtaagagaactactgagcgcctttcaagatgtgtaaacagaatatgaggtatcaaaaatgcnnnnnnnnnnnnnnnnnnnnnnnnnnnnnnnnnnnctgtaaactacggcacagaaaccgagctggggagttactgctatacgctgcgtatgggcatctgttgtctggggtttctttggctcaggagggctaaaagcacggagcagaattccatggcggagaagagaaaggacgcaagttcatccagggaaaagggagggcggagcgggagacgaggagatcgaggcggcagcggctggagccacgggcacacggcccgggtcggcggcaccggggacagctcagcgggactcacgaccttcccaggaagcagccgcgggggtttgagcggccgagaagaagaaccacgcagagagcgccggcagccatcactccc

SEQ ID NO: 311488 - DNA, 1193 bp, Homo Sapiens
  misc_feature (421)..(438): n is a, c, g, or t
acatcatgaggttctttctttttatctttctcttcttcagtagcagctgcagatttttcaaataaattaaaattcaatgcactttctccttctgtggctacaggaggctttttcctttcattttgttgacgtgaaatcttcatggctgggttaaatactggatggtcttctaaagtttccatttctctttgaaatttccttattttttcctgagcctctttttggccttgcttgtttttttctagtttaaaggtagctgcttgttcttttgcatccagcagttttgctgcaagatgtaagtacctttcattagggtcaaatttttcctcctcttctaaacttttagaattctcattcttttcttcttcattttgttgttcagcatatcgtaaaatccactctttcatatttacttccatannnnnnnnnnnnnnnnnnggcttactcttggggtccttcttcatatgtttttgttttaggttgcaatggaggtgaaatagtggcttgtatttgaggagactgaaatttaggcctacttttaggttgctgctcttcaaattcctgactgaatccttcaggaagtgcatcatctgaaaggtttaaacagagccaatccaaggcagaatgaaggtcacctccatataagagtgtattggtcatggcatcttcaatgtcctttgtcttaaatgaaaatgcttgtaaagccatgtataaatcctgcaattttttggcagtaagtcttccagaaatcattcctttgtcattattttgctttttatgctcattgatcactccaataattctttgctctagtttgttattaattaccactttcaaaatagatttatccagatttgcaggaccactagaatcatttgtagaattaaaactataaatttttggaccttgcttgacacggggctccctggagccggcagcggcagcggcagcggtggccggcctggacactggcttcttgctttgggcctccccggcaattccagcctcggcagatttggctctggaagcagacacgtcggcccggaccaccgcggccgctggagccttgtgtttcttgttcttgccgcccatgttgcagctgtggcagaagatccttcgcggcccaggccccgacggtaccactgcacagccgagagctcttcacattccccggctccggggctgccaccctg

SEQ ID NO: 311489 - DNA, 846 bp, Homo Sapiens
  misc_feature (113)..(136): n is a, c, g, or t
  misc_feature (159)..(261): n is a, c, g, or t
  misc_feature (285)..(418): n is a, c, g, or t
  misc_feature (832)..(832): n is a, c, g, or t
tagttgagtttttgggaatcacataagtggtgaaaccagaaacgatcctaaggaaaggcttgaccttcgttaacacctttagtttccaaagtcacagcagctggggtccctcnnnnnnnnnnnnnnnnnnnnnnnngagacatagtctcactctgtcannnnnnnnnnnnnnnnnnnnnnnnnnnnnnnnnnnnnnnnnnnnnnnnnnnnnnnnnnnnnnnnnnnnnnnnnnnnnnnnnnnnnnnnnnnnnnnnnnnnnnngtacgcaccaccacggccagctannnnnnnnnnnnnnnnnnnnnnnnnnnnnnnnnnnnnnnnnnnnnnnnnnnnnnnnnnnnnnnnnnnnnnnnnnnnnnnnnnnnnnnnnnnnnnnnnnnnnnnnnnnnnnnnnnnnnnnnnnnnnnnnnnnnnngagccaccccagcctggggtctctttaattaaggttataatgctaaccatggcttaaaatactaagcaacattttccaaattgtttattactattgctttgattttggagaagctgggaagtaaggaggtgaggtgaatactctgattattaacacgtgttagagaggaaagttgtgtgaagaggctgccaaagtaaacagcacgaatgaatcttcttgtactagggctgctgcaaaccccaggtagacaaatgacagcccaggctcctgaaccatcaggaacccagggaatctacccaactgtgaggagggggcaggccttcgtcaataagggtcccaccatcacgggctaataatctttctcagtttagggtgatattgaggtatttgaaactgttaggaaatcttgacagnttttgacccaggtt

SEQ ID NO: 311490 - DNA, 662 bp, Homo Sapiens
  misc_feature (48)..(48): n is a, c, g, or t
  misc_feature (164)..(164): n is a, c, g, or t
tggaaatattctcatgataggactaagggctgtagtgagaatcacaanaccagactcaagactctagttttgaagccatggtccagtgagaagtttctatgttcctccatcagtaagattacttattgctaatctacaggtctagaatgatactaaagtaaganacatggtgttctctgaaccttcctgaagataccacatattcaattatctatccataaatatttctaatcacctcttacacacaaggcaacgtgccttctcccatgctagacatggtccttgtcttcacgaagtttatattctagaacaggtgacaaacattttaaacaagtattgttaaataaattattaaatctctactgtaataatttctcagaatgttaagtacatgtgtgctttgacaataaataacaaaaagcccttgactcagaaaatcctaagaaagtgaggtatgagctgagattaaagtcaaaatagcacagtaaaattaattctaacctacagatggaaatagcaaaagattaattccaacctacaggcagaaatagcataagattaattccaacctacaaatgaaaaccctaaattcatttccaaccccactaactctcaagtattactaatgattttgacaaatttgtgcccgttttactcacccg

SEQ ID NO: 311491 - DNA, 544 bp, Homo Sapiens
tttttacttctacaataaggaactatatgtgtaaaggaatatccactatcaacaatgatacagcataattcggaaggattatctcggaaatacctatgtgcactgagagccccagcatttactcttaatactgcttgaaactggtattcttcaaatagaatttcattcattgattcttgaattgaagtgaagttaaagtatggttcagtgataataatattagtatctaaaaaatcaacctgatacatttcttttccaaaaaggtaatcccaaacttgtctctgaacatcccaattcaccaagtagcccttttgaaaagggaggatgtaaaagagtccagaagggtcttttatttcatctatctggttggcagtaaaagttttaagacgtgctgtttttgaccggaactgacaattaggaataaccgacacattttcatggctgtaaccgattttggcgttgtaagctccattatccagcactaaggtcgtcatctcaccaccaaccacaccgcagccgtagttgttttccctttccgacccct

SEQ ID NO: 311492 - DNA, 969 bp, Homo Sapiens
  misc_feature (21)..(21): n is a, c, g, or t
  misc_feature (201)..(227): n is a, c, g, or t
  misc_feature (598)..(630): n is a, c, g, or t
ccccagttattcggcacgagnaaatttttattatgtttaccatgtaagtgtggtgttttaaagtataaacacaataaagatcttttgacagttatgaatagtattataaattaacatttttcttgtaataaagggaacatttttgtcttggtgcttgtctttgtttcctacctttttaattgctttaaattagtgttatannnnnnnnnnnnnnnnnnnnnnnnnnnaaatagctggggctctcagtgcacataggtatttccgagataatccttccgaattatgctgtatcattgttgatagtggatattcctttacacatatagttccttattgtagaagtaaaaagaaaaaagaagcaattattcggtgagttgtatttaattttcatgttgtttctaaagattaaacagaatgatatgtgcgataattaaatttgagttctccccttgcaggataaatgtgggaggaaaactcttaaccaatcatctaaaggagatcatatcttacaggtgatgcttagctttgattctttgggaggatggggctctggggaggaaccttttacagtaatttaagattattccttacttttaannnnnnnnnnnnnnnnnnnnnnnnnnnnnnnnntagtgctgggattattggcataagccagggctccaggccgaattcttattgtttgaaataatgttagtagctcaggctgccagtgtgagggagaacaatctgtaaatatcatctagaagcaagtgtattacaggcttagattacatgacatggttgggtacaatgaaagtatttaaatatttaactttcagaatttaagtccatataagcagcagtatgggcagtggttaagggcacaatctcaaccaggtgtagtgctcatgcctgtaatcccagaactttgggagccaaggcagcagaccactttaggctagatggtcaacatggtgagactccatc

SEQ ID NO: 311493 - DNA, 685 bp, Homo Sapiens
  misc_feature (79)..(79): n is a, c, g, or t
  misc_feature (98)..(98): n is a, c, g, or t
  misc_feature (150)..(150): n is a, c, g, or t
cgcctcagatcccggcctgtacttatgagggctggatcaagtccagggctagagggcagagtccaggagactgccaccntgccacgctgtccgctatntgtcaaaaggtctctcagcttagtgacaaattgagcaaagaagaaagtgagnaggctgttggcaagcagggaactagagcagcccagccaaccagacttaccggccctgtctgcaaagctgcacagcactgtgtatgagccacacagccttgagcagggagccccacctctccatgccggccgaggatgaaaggggaccacatgcaaagcacacttagtactatgcccaacagatattagcagtgacgatgccaatgtgtgtctttctgctagtttggagtatatccaggagatcgctggctgccgaactgtcccagtggaagttggttcgaggtacacagatgaggaatggtcccagaccctcatgacggtcaacgagttcatcagcaaatacatcgtgaatgaggtacatcatggggactgctttcccctagtacttgcaaggcagagagcatagtacatttaggcaaataaccccccatgtgttgtaatgggaggggaggagccagtctgtaagtctgtggtcggagggacgaccgcagcgaggaaggcaggctgcttagccagcagacatgagggattcatgt

SEQ ID NO: 311494 - DNA, 385 bp, Homo Sapiens
ttttttcaacagggaacattaatcatttgtaaacaaaactatattcttaaaccacagtgagcaaaacacactatacatccattcaagggatcacttcctactccctcttgtaacttcaattaagtcagctgtgtagtgagacaggttttgtgaatactcaaagaaaaatcagagctaaagcaatgaaagctagcatacatatccagatgaagcagagcagttaggatacatgggaaaacaaggaaacagggctgggagctataacgcagacctcagataacctaagagctgcagaaacaattttaaaatcttattataaccagtatcattcaccaggtaattaagagaatttaattttcacataagcctcaaagcaacactcccg

SEQ ID NO: 311495 - DNA, 550 bp, Homo Sapiens
ccgtcaaatccagatgtttgaacgaaggaaaacgaaaagaagccctctcccccatgagactgccacatggtgggagaggcctacccagttctctctatcttacactagatggcaacccagaggtctgtgcagcggttacaaacaaggcattattatccggaagggaagggactgtagaatttccattggctggggaacaacccagctttagcttttccagatactctgcatgtacaggtttatgacactggagaactttgatagcatcttctactttgaaccactctctcttccttccaatattaacagaatcttcccaatcttctaatatttcagtgactgttagaacataaacatatgttctgtgctttcggtcttggttctcaaatatgcccagaagtctgcctagttttccgccgctctccatggagcccgactcccgctcgcctccgctccctccggccgtagccgccaggggaaggcggtagaggcgcgcccacgcggagacagttgcgaagacccgctcccactgagcagcagcaccgcggcc

SEQ ID NO: 311496 - DNA, 665 bp, Homo Sapiens
  misc_feature (48)..(62): n is a, c, g, or t
tagaattgttgcatttcaaaagcaggttttctctttaatttttacaannnnnnnnnnnnnnnaaaatattatacttcatgaaaaagacaattgacatggatgacaacaagagtcttgaaattaagggcacactcattgttcttaccagggttagaagagagaagttattttcaaggaacaaatattttgctttacaacctctcgtttatgagaaaattggaatataaatttattacattgtgaaaagtatcataaaccatatacctttttatctaaatgcagtttcaaaaaagtaaataattgaagttttatttctcctctaaataacttgaatttttttctttaaaaatttatgtatttatatgtccccatttagttaagtggtagtgtaagtgtatgttgttaaaaacagtttctcagaattatagtaagcaatgaaagacaatatctaattaggttgttatcaaaaatactgtgtgtaaattagtccgtaatatagggtttggtgcgtatctatattcatgcttctatttcactcttcctcaaaacagttttatattatgttgaccagtgaaattgtgacttaatttcatggggacaggggcagtgctacagttcctggaaaaattagatttgtattatctttgtttcacacccaccacctt

SEQ ID NO: 311497 - DNA, 976 bp, Homo Sapiens
  misc_feature (567)..(567): n is a, c, g, or t
  misc_feature (884)..(884): n is a, c, g, or t
  misc_feature (898)..(898): n is a, c, g, or t
  misc_feature (902)..(902): n is a, c, g, or t
  misc_feature (963)..(963): n is a, c, g, or t
gatttatattcactgtgaatgaaaagcacagcctcataataaaagatgatttctcaaaaatagctgattggcaaaatatcgtcatcttgacaatatttgctctatatcttatgtcttttctgttttaaactgtgcctgtagtaatagatatctgtcttgatgaataagtaaaattaggtatgcatttgtttccattccttctgtatgttttagaaaatctatatgcatctaaaaccttgagcgtacgtaaaatattaccattcatatgttataacaatcctgtctataatatcttaaataccaaattcttgtcttatatagcaaatttattattccctaaaatactagactattagattcaggcatagtaccattttctagccatggggaaataatataaatagacaatggccatggtacatgcctctctggggtgtcactcaagacacagagatccagtattccttgcaatagaggagctttgggtatttcactaatcttaacttgttatttgacatgttacatttaatatttatgttgtttcagtaccttttgaaacataccagnttttttttctactgatttatggttttaaaatgtacacaacatagaaatgctgagcgcttctgtaaagcattcctctttttataggtgaaagtggcagcataattagcgtgactcaggaagctgaacttccacaattttacaatactgagccaaggaagtgttatagtcaagattgtgcactataaagattaaatgcagatcccttcccttgaatactctgaaacatcacatctaaatatcaaaagctaaaactacattccaatattacttcatatagcatgtttcacagtttttccattttcaagctaatgatgtanaattcctttttgtntgtntgtcttggcaattttggcagagagcttaatgataatagctgcaccctcatgagccctaatnttgtgttgggctc

SEQ ID NO: 311498 - DNA, 581 bp, Homo Sapiens
gtctctatgtaaattaaagctcaagccatggtattcaaaattaaaatgatttacataatctactatactttgtgatttttttagtaattaaccttcctgaggttgattttgttctccttagtgtttgcttaactaaagtgcttaataaaatttctacataatatattaccctctccatagatgaatattattttgaagtacaatctgacaaaaatctaactacatttaattatgcttgattaatccaaatgtcactgagagatttatagaacagagaaatacttttcaggttaagttcatactcttcactgtaagcttcctggatccggtattaccacaaatttactatctcacgtctctaatattgtttttaacatcccgataaaagatattcccaatagtctaaactggacggatgggactccagagatcaatctccgcttcttttcattttcaagagacaggcaaacctctatcaaagaggaagtcaccacttccaatgggaggcacgttgcccctgcagcgccaccaacacttaaggggaaaggatggagagaactgaagtcaattctccacctttc

SEQ ID NO: 311499 - DNA, 1062 bp, Homo Sapiens
  misc_feature (18)..(18): n is a, c, g, or t
  misc_feature (21)..(21): n is a, c, g, or t
  misc_feature (32)..(32): n is a, c, g, or t
  misc_feature (107)..(107): n is a, c, g, or t
aaaaaccagcttcccccnctnattttgtttgnttcctctccctccagcctgtgctgctctcctctggtgccaagatgttcctcaggtgtcttgtcagctgatgatgnacacgcagcacaggaggctaagaacagagctctgtggggcgaggtgtggggagagggcctgctctcacctagacccaaaacactgaggtctcctactggtgatggtgtcagatcccaggcctggggagccctttagtggggtgggacctcaggcagacccccaaaccaaagggagccagatgcccaagttcaagtcattagtgatatgtggcagggctgacagagaaataatcctggaggtctccaaagctgctgggaatggaatggcgatgaaaagcgcaggagtgggcagggtgtggtgggtgatggtggcctcactcagagtggaccaaggccccagctccttgcccaaaaccaaagcccttgggcccgaagtttttagcataacatcctttgcagtaaatctcgccatccttgtctgccagggtggttgactcaaggcctttgccacacttggcacatcgaaagcaggccttatgccaggacttcccagcaccaatcaccttctccgcagcatagactgcctggctgcatcgggggcagcgctcggagccaccaatcttctgggcaaatttggatgcattggggttggtggtgggcctgtggccaggggcttcctcgtgcttgatacccagcgactcccccttgtcagtgctgagggtgcctgcgccctgcccgtagccatagcctttgggcccatacttcttgccgtagcaggacttgcagtaaatctcctcaccatgcacggccacagtggtactgtccagattcttcttgcagaccatgcacaggaagcaggatttatggaagctgttgccttcgcactgaacctcttcggcaaagtaaaccgtcttctgacacaccccacatttcttgcctcctccccagttcggcattctggcagctggctcggcggcgcaggggcggcaggcgctctcggaagtggcggctcccg

SEQ ID NO: 311500 - DNA, 1184 bp, Homo Sapiens
tctggtctaaacagctttattgaccagatgagaaatcagcttgggtacagcccatgcctgcagccctttcagtgggtggctccagatagtgttgtcctttcagttgctgggagcggtgaggcccagccctttccccttcctcccaccactattcctaacctggggcctggcaggggtggagtgatgtgatctaagggtccctggagaagggtggagtggaagaggcagggtcttgggttaaagggaagattctgaggtctcagggcaaagggaaaggtgtttggatgaagactgaggcagtgcctacctccctccacatctgaggatcaagcaggtgtggcaagaacagagccctggcctgggctctgctggccgcagcctcaggagccagggttaaggccagagataaatgaagatttgagccattgataaatgccaatatatgtttcaggtatttcattaggatcctcccatcaagcagggaactagatgtttgagaagatcaaacaacatcctgactttggggtccttaagacctgggttattctcctcccagtcctagtgggaggctatccattccacaaagactcaaaggcaagaggcctggagaagcaggggctcctaggaccccgcctgcatgcctctctgcctccaatagtgactccctaagctgggactcctcaggcttactctgagggacaccaggaagctcaacctctttcccacagaggagaatctctgagatccaaaaaacccagccttcccccctcctcatcttggtcttgcttccctctccctccagcctgttgctgctgctcctctgggtgccaagatgtgtcctcaggtgtcttggtcagctgatgatggacacgcagcacaggaggctaagaacagagctctgtggggcgaggtgtggggagaggggcctgctctcacctagacccaaaacactgaggtctcctactggtgatggtgtcagatcccaggcctggggagccctttagtggggtgggacctcaggcagacccccaaaccaaagggagccagatgcccaagttcaagtcattagtgatatgtggcagggctgacagagaaataatcctggaggtctccaaagctgctgggaatggaatggcgatgaaaagcgcaggagtgggcagggtgtggtgggtgatggtggcccc

SEQ ID NO: 311501 - DNA, 656 bp, Homo Sapiens
  misc_feature (72)..(72): n is a, c, g, or t
atgtattaccaataattaatgactaattattccacttctatttattagagaataagcactttataaaactanactttgcattgttaattttttgaagactagattgagataattagcatctgttatctttcgagatagaaaaagaaaatagagaatttgatgggagattcatctagttttctttgatactatttgagacacaatttcttagtcagaaaactaaatgatgttttggattaacatctcaggcctttaataatgtagccctgtacaaaattcttttttcgtataatgcccaagatgctctgatttcccatgcatgtggttttggcctcatcctttgtctttcatagaatctatcccctctctatccatctgtcaacattagacccactctccaaagtctatctcaaaggcaccaaggttaagaaatagaatataaggtaagaggtggcaaccttgttctggaaatagatctaactgaagaaagaaagcaatcattacatacaccagaatatttcaaagttgtgggtagaatttcctcctaaaattacacttaaagtgagaatattatgaatctcatttctctcagttgaaacaatcttcttctagatccgctaaacactgattgagcgcctcccatctgcccggccgta

SEQ ID NO: 311502 - DNA, 969 bp, Homo Sapiens
  misc_feature (902)..(902): n is a, c, g, or t
gctagacacaggggattaaaatatatacttcgaataagtacctacctcagggctgataggaagattatacatgccaacacttttagagaacttaaaacatcatctgcccgtagtgagaacaatataaatgtttgttaaatacttttaaaaagttatatggaatagaaagaaatgaatcaattgagctgagttaaatagggaaagtatcatataagaggaaggaaatgatatgtactaaagaatagaaatttagagagtattccaagaaaggtaagaatgagaaaaatatttgggagtatggtaaagacattaatctgatgagaagtttcaaaaaggaacagagaaattacagtgtaaagatatttggaaagctagtagaaggttttcttttaaactaaagggttcagaaacagcatcagagacttcagaactaaagcagaaattcctccttcctatgagtcacacggatatctagctagctttttttagattcctttcagtttgagaagtccgcactttgtatagcaattgattctattgttaaacagctttaatatttagaaggtgtacttttatattgagccaacttcttttgatttctactaattggtcttatttctgatgttaggggtcatagagtatttttattttttctattactataacttttccactttgccaggactgctgcatgctaaaaactcttagttttgttcacttttcaccatatgacataattctaaggtcaacactgaaaaacttcctagggttactctggtttttttaattaagattttttaaagtgccaatcagaaaaacataatattaaaactggtgtcaatttataaaaaatgttctgatgtattgttttgtacaattatctaaacagaagcatgatgganctctaatatttattgagcacatgtcacgttcaaggcattttcacatatattacttaatttttatagc

SEQ ID NO: 311503 - DNA, 730 bp, Homo Sapiens
gaaaaggcatgtacctaaatagataaaggacctataccagctatgaatttgagttcagcaataattgtaaaatttgtaattcttttcaggtatttggtttttaaaaaactccctatgtatgcttttatcttatgttttatatggtgtccctcttttcctctctttctctctaatccagtttttaatgtgaacatgtttaatgtgaaaatgttgttcaaagcagaagcgaaccttttgtgtaaccttggcggtattaagtttgtttgtaagctatttctgccctgttagcttctgtactgaaacacgttttcttgcttttgttgcagtatggaagagaagagagcgactggacaattgtgctatcctgaatggaaaatagaggatacaatggaaaatagaggataccaactgtgtgctactgggacagactgttgcatttgaattgtgatagatttctttggctacctgtgcataatgtagtttgtagtatcaatgtgttacaagagtgattgtttcttcatgccagagaaaatgaattgcaatcatcaaatggtgtttcataacttggtagtagtaacttaccttaccttacctagaaaaatattaatgtaagccatataacatgggattttcctcaatgattttagtgcctccttttgtacttcactcagatactaaatagtagtttattctttaatataagttacattctgctcctcaaccaaatgca

SEQ ID NO: 311504 - DNA, 699 bp, Homo Sapiens
  misc_feature (46)..(46): n is a, c, g, or t
  misc_feature (78)..(78): n is a, c, g, or t
  misc_feature (96)..(96): n is a, c, g, or t
  misc_feature (102)..(102): n is a, c, g, or t
  misc_feature (107)..(107): n is a, c, g, or t
  misc_feature (115)..(115): n is a, c, g, or t
  misc_feature (120)..(120): n is a, c, g, or t
  misc_feature (137)..(137): n is a, c, g, or t
  misc_feature (158)..(158): n is a, c, g, or t
  misc_feature (209)..(209): n is a, c, g, or t
  misc_feature (222)..(222): n is a, c, g, or t
  misc_feature (232)..(232): n is a, c, g, or t
  misc_feature (234)..(234): n is a, c, g, or t
gtaaccataagctcattctcatagcagtacacttttcaactgtatngaataaaccaaaattatcccctactccaaacnaccaaaaacgcaaatagnaaaacnaaacnacactacngtagntcctcagaaatattcanaacaaaacatcttaattaaancagtactatttaaaaacatattctgaaaaacatttgaagcaatccattaantctgtatcataanatatacaaangnacattttattttaaattatcaacagtgaaaaatttattattttggtactttagacagctgctaagttgatctacacaaatttctctgtttagtcacaagacgaagatgggtttttttgcttattattctcacatataaatactggttagttttacataaaatacttctcattttcatttcagcattctgttcacatcggttatatttaaagtgtgactcatgtctaaaatatatctaatatgacataatattcaaccacttaaaatacagcatgatgtagaaacatagtattatcattataacaaacagcaaaaaaaatatgtaatgccagtgaccctcagatcaagtagtgaagcaaaatgttttcatgctggagaacacctttatgcttttattattataaaattctcttgcatgtcgtaggcaggatataccaaagcataatattgatgaggaagaggagaa

SEQ ID NO: 311505 - DNA, 1257 bp, Homo Sapiens
catttggggccatggggaagggcttaaaacccccggattcgaagccttgtaatttcctggaaaaattttgaaccaccccccactggggaggcggagttaatcttccaccaagattttgatgtaattccctttcttcaaactttcttgcaaccgttgactcagttgccaggcatgcttgatcctctccacaaacccatcaagtcccaagtattgtaaagataaccacagaggcagggcacggagtttgtctgtgggcttatttgatgtaagaccagcaactaaagtcaaggcagggtcatcgtgtttatacagtgtcaccgcaggaacagctggcaaacccagccacgggccaggagtcatcgtcatgctatcacatttggctgcagccagcactgatgaggagacataacccagagccaatgttgccagattcacaccctccacatgaagccatatgccatactgctcacagagttctttcaatctcccaatcttgtctgtgtgtcctactgctgccgttcctgcatttgcgacaagcaacaggggcagtcttcctcgctctatatcatctttaatcagtttctccaggaaggcaacatccatctgatgctgggatccaaacacagtgttacagggtacacggcacaagcaggggaagggcaagccgagctgattacaaaggtattggcccaggccaggtctagcagcagcactaagatatatgacaggcttcttgttatataacacattgaagccatccactacgaagtcttcatatcgagaatgaatggcaagcctacatatctttgcaagtccttctctttcctcttcgtggaaataagcacacccattttcatatctgaaaattctgcatagccataaggtggtatctgaaagtatcctagttgtaagttttctcagcttctctttgtccagagttgaaatataagctcccagactatgtcccaacaaagccatatgaccttgttctccaatattttggattctggggctctggggctcctcatcttcatctccatgcatgagattctgaactaactggaggatgctcaccatatcttgcccactgctcctggagtgggcctggaatatctccggatatgagcttctttccattttcctcttctgttcttctctgactgtcctccagcatcttcactgcctccttcaagttttttcccatttcagctaacgtggggtctgctcacttccgggcccaggcttccaagtctcccg

SEQ ID NO: 311506 - DNA, 1267 bp, Homo Sapiens
  misc_feature (32)..(32): n is a, c, g, or t
  misc_feature (106)..(106): n is a, c, g, or t
  misc_feature (190)..(190): n is a, c, g, or t
gcttttccaattttcccccaaatcttggttcnggggggtccctaaacggctgcccggttcccgccatttggggccaagccaccaagggggcagtcttcctcgcctntaaatcatctttaatcagtttctccaggaaaggcaacatccatctgatgctgggatccaaaacacagtgttacagggtacacgngcccaggcaggggaagggcaagccgagctgattacaaaggtattggcccaggccaggtctagcagcagcactaagatatatgacaggcttcttgttatataacacattgaagccatccactacgaagtcttcatatcgagaatgaatggcaagcctacatatctttgcaagtccttctctttcctcttcgtggaaataagcacacccattttcatatctgaaaattctgcatagccataaggtggtatctgaaagtatcctagttgtaagttttctcagcttctctttgtccagagttgaaatataagctcccagactatgtcccaacaaagccatatgaccttgttctccaatattttggattctggggctctggggctcctcatcttcatctccatgcatgagattctgaactaactggaggatgctcaccatatcttgcccactgccctggagtgggcctggaatatctccggatatgagcttctttccattttcctcttctgttcttctctgactgtcctccagcatcttcactgcctccttcaagttttttcccatttcagctaacgtggggtctgctatcttctccagggacgcgtccatggctgaggcggccggtggtggcctggcggtcccgggctctacttcctcctcccgcgccccgcagctccttccacgctggcagcgctgacgtcccccgcgcccgcggccgccggggcggagaagaggaggagctgccaggcggctctgccggatgacttcttagtttatgaaacacctttttatacgttatcttacaacttacatctctgtaaggtaattgggacaaatatttggtttcttcatttgacagagaagagagccaggattcagaaatgttaatattcaagttcatggttccgccacttactgggtgatcttgaacaagtcgcttaatcactctgtgtaatttccttaaatataaagcagaattcaaaatagggcttaccacatagggtgtgtgtgaagatgaaatgagttaatgtccacaaggcacttagaacagtgtctggtgcgtagtaaatctcaacaaat

SEQ ID NO: 311507 - DNA, 934 bp, Homo Sapiens
gctgccacaattccacttgaaatgtggagaaaatcattctaaagttctaaaatcattcaaagttgctgaggttcaaaaaaagttatattttgaaaacagatgaaattatatactataccaagattttgatgtaattcactttcttcaaactttcctgcaaccgttgactctgcaaatgacaaaaaataacacatgtaattagatggacatgggacatgaagaagtggttttcaccagggggctgtggaggtctgtgaacacggatgtcagggcaaagtcacctgccacttgggtggtttctaagttcagccacctgtttttgtatttcaacatctgttaaatattcacccaatccttcaggttacatgtagtaattcaagaaaagcagtttctaataagacatggaaatctgttgtatttgcaatgtaagtctgtcattcaaaagctactgagtataaacacgtgcaaggcacagtactgaacactaggggagaccaacgacaaatgagaggatgcagcacgctcaagagctggtgataagagcacagtgctgccactcatcacctgcaggaccacggctaagtcaattcatctgccagtcaccagctatgtaacctgtctatgcttcagttccctcaattataaaatggggaggatagtatgtatctcacattgctgtgaggattaaatgagttgatatgcaatacaggaagtgcttagaaacagggtctagaatgtagtgtcattagactaatgtctcaatcccaggtccctcatcactaatcatatctaactcatgggattggagtatattaattcaacagatattcactgagtactggacagtagaaagcccctcaagaaattcctttttgttttcttaaagaaaattaattctgaatacactgtcatcagtggaactgacattctagtg

SEQ ID NO: 311508 - DNA, 697 bp, Homo Sapiens
gttttgttttttactggagctgccacaattccactgaaatgtggagaaaatcattctaaagttctaaaatcattctaagttgctgaagttcaaaaaaagttatattttgaaaacagatgaaattatatactataccaagattttgatgtaattcactttcttcaaactttcctgcaaccattgactcagttgacaggcatgcttgatcctctccacaaacccatcaagtcccaagtattgtaaagataaccacagaggcagggcacggagtttgtctgtgggcttatttgatataagaccagcaactaaagtcaaggcagggtcgtgtttatacagtgtcaccgcagtaacagctggcaaacccagccacgggccaggagtcatcgtcatgctatcacatttggctgcagctaccaaaacaagaacaactctttgttagattatcagaatacacaaaccctaacacccctccctcccattccataaaaactgtgaagagccaggagggattgagtgattttaaattcattcttaaaaacaccaatattcagtaaatcaacaacataccagcactgatgaggagacataacccagagccaatgttgccagattcacactggaagaaaaaacaccagtctaagaactaattatttaatgttgcttactcaccatgtacttaaaaaaataaaggctgtgc

SEQ ID NO: 311509 - DNA, 421 bp, Homo Sapiens
  misc_feature (46)..(46): n is a, c, g, or t
  misc_feature (63)..(63): n is a, c, g, or t
agtatggcatcctagccccacactaagtgggtaagcaaaagggtancctggttaagttcctantaatgagaattgccaatggctttgaattaataaacctcttttggcttttttagactttagttgctggtcttacatcaaataagcccacagacaaactccgtgccctgcctctgtggttatctttacaatacttgggacttgatgggtttgtggagaggatcaagcatgccctgtcaactggtgagtagaagcctgacatttaaatgaaagactccttggccacagcagagacagaaaaacatctcatttctgtaccttccatccagagtggtgttgtctggattgactgtctcgtgagccagagactaatcgccctgcatgtaaatatttcttgttcaaagttctgggagaaagtgct

SEQ ID NO: 311510 - DNA, 567 bp, Homo Sapiens
ggcgggagatttgaatatatttctcatgagtcagcagatcaagtagatagaaaataagtatataaaagaattcaatgacacaattagatacatgtaatagagattacatactcttcaaagcttgtaataagtcaactcacaaacactgattttaagtccttccacaaagaaaatctcaataaaatagggatataataaatcacttccctcctagggcgataatgtgtataaaagtgtttaaggtataaagccttagaaaacatttgttccttttaatgccctgatgtgttttatcctaggaacggcagcagtaggacacacagacaagattgggagattgaaagaactctgtgagcagtatggcatatggcttcatgtggaggggtaagctggcggtgaggctggtggctccattcgggcctgcacagagtccttatgaggactggacatccaggctctcactttggtgacatttatcacgaagggctctttgggtcacagatcacaaaataacccaaattggcttaagccaaagagatcttactggctcacataactacaaagagc

SEQ ID NO: 311511 - DNA, 774 bp, Homo Sapiens
  misc_feature (394)..(394): n is a, c, g, or t
cccaggggtttaaaagaattcctggaaaagcttgacattctagtttggatcctggaggcaatgagttctaaaggattccctcccaatacgggagcccttctagcagcggaccaggaggattacatgctcctatcagggtctaccgcagaaactcatcccagtcagatacttttatctttgatgccttctggggctttcaagggtctttcttattctgctcacaccacccaatggggtagagatcagcctttcctgatgtcacaccagaaatctgctctccgatcctccccatagccatcatagcggagaaggagcaactgctcacaggtagtgataacggtggcaacccagtaggtctcaggatctgttctcacagccacctccagcttcatcncaggagcaaatccattttgcaaacgtgtgtccacatgtttaaaagacccatagggaactgctgtggaccctgtttcttctagataatcttcccagcttaattctacctcttccgtaccagagccggcatctgcatcaagctgctgctccccgttcatttccacagcatataggcaggctatatcctcccaacacaaaggaaaggcctatggttctgctaggatctgaagattacttgcaggtttcaagcatctgttcaatgggtatccacgggtccaaatgaaagtgctcgggttgtagacagagcggcggggatcccagaggggttcgcgggtcggacctggagtaccggcccggcgaagcgcgccgctgtcgcccccc

SEQ ID NO: 311512 - DNA, 357 bp, Homo Sapiens
ttccccactgtccccaaatgtcttttatagctgacatgtgctccctgtatttttttccgaaggactgtaggtagctctaatgttcatacctagttagaacccatagttcctttacaatgtgaattgtgattctttttgaaaataattttcttcctgacttcagagacatccaacataaggtaacgtaccagcagcccggattttatatacgatgaagcccatcagccccattcttatccaaatctcctggtaaagtttggtgtagtagggcttcatggggatccatatgttttttataatactttgaagcatcttggcgcaggacagacggctcagaacgcaccacaaatctgcagc

SEQ ID NO: 311513 - DNA, 651 bp, Homo Sapiens
ttttaagtagcaggatcaagtttaataaacgtttattgagcagtagaatacaagtgagtgcctggatcctgatcaccaagtcctgtacaactgaggtaattatttcacaatgatgggtggctcagtgagattctgattgcatgcgctgcatgacaaattatctactcagagtatgcctgacacgccggaggggctgagggggaacacactgaaagcagtaccaggtagcagtgcatctcacagatccatttattcatgccatgaagtaaacggtacttatacaagtgtacagtgacgttccacgctccccatctaacacggcttgctgaaatttacaggcagactgacgttttctttcacatgtactccaagtaaatctggttagtgatgaccaggagcaggcgctgaagctttcaaagccttacttcttttatcagcagcccggattttataaacgatgaagcccatcagccccattcctatccaaatctcctggtaaactttggtgtagtagggcttcatggggatccatatgtttttaataatactttgaagcatcttggcgcaggacagacggctcagaacgcaccacaaatctgcagccaacgccactcatcccatcctccactcatcccatcctccactcatccc

SEQ ID NO: 311514 - DNA, 931 bp, Homo Sapiens; identical to SEQ ID NO: 132757
  misc_feature (569)..(804): n is a, c, g, or t
  misc_feature (817)..(864): n is a, c, g, or t

SEQ ID NO: 311515 - DNA, 872 bp, Homo Sapiens
  misc_feature (438)..(451): n is a, c, g, or t
tacgcacaaggggaaccagggtggtgaattcccgctgggcgaattcagggttcaatcaaggcccgtttggggagggctttcccaattcgggcagaaaatgcttaaattgaattttccacccgtttcttccgaaaagttggcagggccggggcgttaattttgatattcgaggctcgcttgggactcctgtttggaaagatcccagtaaatgccctccagaactcccattttggaatttgttccagaaacgctccggtttcccgcccggggcgtttttttattggtgaggaattccaaggcccctagttcatggcccaaggattttcctaggaaaacagcctatggaccatgtttcactttacctacttggggcccgccgcgccaaaccgaatgggtctagaaaagcttcttcgagggcccgagggcggccgacatggnnnnnnnnnnnnnncgttgttatagcagtgcatctcacagatccatttattcatgccatgaagtaaacggtacttatacaagtgtacagtgacgttccacgctccccatctaacacggcttgctgaaatttacaggcagactgacgttttctttcacatgtactccaagtaaatctggttagtgatgaccaggagcaggcgctgaagctttcaaagccttacttcttttatcagcagcccggattttataaacgatgaagcccatcagccccattcctatccaaatctcctggtaaactttggtgtagtagggcttcatggggatccatatgtttttaataatactttgaagcatcttggcgcaggacagacggctcagaacgcaccacaaatctgcagccaactcggaaaggtcaccgagcgcgcaggcgcccc

SEQ ID NO: 311516 - DNA, 281 bp, Homo Sapiens; identical to SEQ ID NO: 132756

SEQ ID NO: 311517 - DNA, 968 bp, Homo Sapiens
aatatttaataggaatttgtgttagttgtaacaatgtgtgtattggatccaaaacatgttatattttaagcaatggcttggagagaactaatcaattcatattctgcatttccagccaaagggacataggcacaactgactggtggcaccttcctgtgggaagcctcttccatccatctacagcattgatacttttataaagtatgaatttatcttgcttgaagagttaagtctcattttccatggttaatgcaggattgctcataccagctttgcattttcctgggtttatgctgctctccgtccaagactgagaatcagtaagaaggtggctctgggactctctcaatggctttgcaggaaactgatggttttcgagatttttagctgtggaattcagccctgcaggagtagatgcttgttcaggatcctggttaacaaggcaagttggaaaggagcagccatcacctagacttgaaaaaatgggtagcaaccagtacttcttctcatcaccaaaaacttgtcgcatgtttttactgaaacccaagctgaatccattcttatctgttccatgtcgaaatactggacttctgaatgcctctaatgtagatttatttttgctgactagccaacaatgatagccaaacagagaagacaagctgacagaaaacatagctgcagcaaagaataaaaacataatatggaacttggcttgagtatcaggtaggccatttgtccaaaatttgataaaatactgtaaatctgttgccgcaataaaaaggcagtagagcagagaataagccaagaaaaggagaaagaacttataatttgaaaatccaacacaattgttcacccatggacaatgatgatccattttcaaaatacatttatcacagacggagcagtgatggcagcgatctggttttataagttggcatctgtcacagcatcggatggctccccggccg

SEQ ID NO: 311518 - DNA, 351 bp, Homo Sapiens
aatcactccaatgataataaagagcccaatcccaaatttgttgtgaaacactgcaattacttaaacatatatggtatttgtagtgactgtgcttcataaaataaagtggatacctttgtgaacaaaaatcacctcagttcaggaaaactatgacaatgcaagagacagcaaataagggacctacaaatttctgtcaaatgggacagagatgtacacataagccaaaccatgtgcaaaatgagcagaacccaggtactctgaaaagtatagttacccgatctctaatgatggagttttatttgtagtttattctctacattaaaaaagataggggctgcgtgtggtggctca

SEQ ID NO: 311519 - DNA, 585 bp, Homo Sapiens
gccggggcaaacggggccggaaagcgtggcagcgcaggcgcaagcgcagagagcggaggcggtggtggtggcggccgctggccagttgaatctacagacctatcttctcaggagctcagcctggccttacttcagtgataaaaggaggaaaggctggctgcagcaaacatcattcaagatgtccagcaaagggagcagtacagatggcagaacatacttatctaatggaagcctgtctatcattccatatgagatgtctggagctgaagaggggagggagacatcctcaggcattgaagtggaggcctcagacctgagtttgagcttgactggggatgatggtggccccaaccgcaccagcacagaaagtctaggcacagacacagagagctcaggtgaagataaggactctgacagcatggaggacactggtcattactccattaatgatgaaaatcgagtccatgaccgctcataggaataggaataggaggaataatatgaggaataagagcagcctcggcgccgtgtacagcgcaagcgggctaaccgtgaccaggactcatcagatgatgagcgggccct

SEQ ID NO: 311520 - DNA, 436 bp, Homo Sapiens
  misc_feature (27)..(27): n is a, c, g, or t
  misc_feature (34)..(34): n is a, c, g, or t
aagaatgtctccctccccctcttcaanctcccanacatctcctctggaactgcctaaaacaggcttcccattagctaagtctgttctgcccatctgtgctgctccctttgctggacatcttgaatgatgtttgctgtagccagcctgaaggaaaagggcaaccagtactcccagcgatgacttcgggtcggcggaaggaaaagacctgagcgctaagagcttgggatacgggtcaggcccatccttaggggaaaccggctgggaagcgagggggggcgcaggccgagccggaacgagacacagaccgggtaggtcaagggagggggggtgtccggctggggcagttacaagcacgggaatcggcgaggctcagcagcccgcttcccgtcttgggtcatccttctgctagcggctgctccgactgttccagcccagc

SEQ ID NO: 311521 - DNA, 675 bp, Homo Sapiens
atcatcaggagacagatctataagaattgttccactaccagaggtgttcaaagttaaatatgggttaagaccttgttgtccggagataagtctctcgactcctttaattagtttgtgcctatgtccataagcattgattccaatctctttcagctccttgtgccccatctcaactaatacatccaaagtgatctgttctctctcaaatatatccattaggtgctcaagtccaagattccttacgaattgagttatgctaaaatctactgctggaacctcctttttgtccaaactggaagcaccctctgttccacttgaactaactactgaagacagttttgaaacactcccagataagttgtcaagactggtggctgcagaaaggcttgatgggctagatggacctgaagagagagcatctgcagtggctcctgggcttctcacaccattgagcacttgaggcttgtaacaagagggcagagcagatgggggcatggctgctgtcagaagagcgctgacatcatctgctgaaactaaatctaaaggtgtttgtccttcctgatttttaagagtcgggtcagctccatgggctagcaacaaagcacaaagctgtgttcgtcccttttgggctgcttcgtgcaaaggtgtgaaagcccatttgtccgtggcattgac

SEQ ID NO: 311522 - DNA, 458 bp, Homo Sapiens
  misc_feature (55)..(79): n is a, c, g, or t
agtccaaagattagtttttgttgtgtgaagacagacatcttcaggcacagagagnnnnnnnnnnnnnnnnnnnnnnnnnaaaagcttattgatggtaaaacaaaaactattcattgtattattttaaagcatagaaaaatacaagaaataaactagaaggtcttcataacaaaagcacccagaaaacaacttctgttagcattttggtgtattttaggcatagtacatgccttgccttttattttacttttgccttcaacctttgttaattaaataactgagaaacccactcatgaattttacttatacaccttttattatttatgtgggttaatagtttttgaaaaaatactctggaattttgtatatcttcttttatggatttattcacattcataatttttttgaaatataagttttttacatattaagggccctattcatatgtgctgtatata

SEQ ID NO: 311523 - DNA, 970 bp, Homo Sapiens
  misc_feature (311)..(311): n is a, c, g, or t
ccataccctttctgctcggtctaccctagattccgttcccccttcttcgccccgttcttatttccgagcctaatccattcattttcgcatacccgccaccctcatcagcttccgacccctcccctctcaactcttataaccccagccaatatccgcgtcccaaagtggattgcctttgcgtcagttcccgtgcgaatccaatcataagacatcggtccgtgcatctacaaatattttctgtttaaatctctataaacgatgttcagtgaatgcaggtagcccaaggcactggctatttcagcagcataganacgagcccgtgtttccaggaagcagcgttcccctctggagatggtagaacacctctccaccattaatgtagtctaggacaaggtacaatttgtcagcagtctggaaagagaagtgaaggcccaccaggaaagggtgcttcacattcttcaacagaacattccgctccgacataatatgcttctcctctttctttttcaggattgctttcttctgtaaaactttgactgcatagaacacttcttctgccttgtgtcttgctagaagaacctttccaaaactgccctttccgatcactttcaagaagtgaaagtcagatggtttagcatgaggattggacgacgggccaaggttgatttgctgagaaggacttggtggaggagaagggttggcattcataagctcaggctcctgaggttgggagatcttcaagatggactgaacttcagggtgtttgcatgcataggagttattggcaatcttctgaataaagtcgttcagacccatcctcctctgcttcatgaaagcgatgagaattgccaccatgcccctcatcctggagtaagtgagggtgcccttagcagcctcagttttcaccgtcatcaccaccgcggggagacagaaagacgttagcgctcaaagaccggctcggcgtatgctc

SEQ ID NO: 311524 - DNA, 1538 bp, Homo Sapiens
  misc_feature (772)..(772): n is a, c, g, or t
cacattttgtttattcatctgttgagggatgtttgggttgtttctactttttgactattgtgattagtgctgctatgaacattgatgtacagatttttgtgtagatatgttttcaattatcttggggcatcttttatttttaatgtcagttttctatttttaaaaaatctagacaggttggcaaatcatttctgtaaagagtcagtaaatattttagcctttgtggtccatgacattaggtatacagattacaatttctgaactctgccattccagtgtgagagcagccatagataatatgtaaacaaatgagcatggctatgttccaataaaacttttaaaaagcaggggacagattgggcctgtggaccatagtataccaacccttaatctaaatgacacattcacatgatacattattctaaaggcacaaaaagcaaaaattctccctcccacctctgtcttccagctacggggttaccttccttgaagcagttaatgttatgagattttgtgtctccttttagacacagttaataatgagcattaaagtggctatatactattccaatgtgttgcagatagtttagtcaacacaaaagaacggacatatctgagggtacaccctaaaagtccttgaggaacagaaccttaaaagagagaacacctgcctaatctgactcctccatcagaataatcttttgaactcctgagatttgcccagtcattttggggccatgtctgatgaaagcttggtgatcccttttgggtncaaaaacaagctctgactgaagagatgcaagattttctcagatgatttgtgtgtcagtcagagttccgccagagaaacacaaccagtaggatatattctgtcttgtctgtcttcatatccatgtatctgtcatctacctagatttaatgcaaggaattggtttatgcagttgtaggggctggctaggcaaatccaaaatccacagggcaggccgtgtggaagggaggtctggaaactctcagacaagacctgacattgcagtccactggtggaatttctccttcttcagggaaacctcagctttcaacggagtggatcatacccaaccatattatccaggataatctcctttacataaagttaactgattgtagatgtaaattacatttacaagataccttcatagcaacacctaggtcagtttttgaataactgggtattatagcatagccaggtcaacacgtaaaattgatcaccacagtccatgtcttgttaacttggcacctgtacacatttccttaaaccatttaatctcccaataaagacaataacaaagtaaaacttctgcctatcatgacacagctaatctgtgtacaactgaaaatatgctcttttcctgggagagaattcacagtccttgactggtgttcacttttatccttgataatccagtaactttaataatattatgtaaatgtagctattttaataaattttatgttagatgacaaggggataagagaggggagaaaaaatacataaacac

SEQ ID NO: 311525 - DNA, 337 bp, Homo Sapiens
aagaatgatttggagacttttagagtagcccaggttctggttgttattgtatacaactagtggcaacaaagctgtctcatcactaaaagggcttaaacttattcctccaataagaaaatgtattgaataagaaaactttggtagctcagcttccaggaacactttaaactttattctttagtgttagtcttttagtagttatgtctaaaactagttgatattgaagcaaactggatatatatatgttattgctacccttaatgtgttttgtaatttttttattttaattaactcattagtatgtagttatgactttgactttttctcttctgatatc

SEQ ID NO: 311526 - DNA, 1307 bp, Homo Sapiens
  misc_feature (11)..(11): n is a, c, g, or t
caagaaaaganaatacaaaacctgaaaataacttcagtgctatagacatttaaaaagttacaattattaaaactctgaataaaaagatcttgagaacaggtacgtttcaaaacaatcttttacacactttggaaaaaaataggtatttttcaaataacttgatatatggtttatgtatttcatagtctctgagttttttttctgcaacactgttttgcattaaagtctcatattgtttaccagtaattgcttccttatgctgaaataaaactttgtttgttcattagttttctgtatatcccatttgggttttgaaagcggctcttcatgttttccatattcagtaatttttccttggtcaagaacagccaaccatattagcattcttaatggtggacagacgatgggcaataactaacaccgttcttccatcccatcagtcgatctagagcttcttgaacaaggtactcattttcggcatccagcgcactggttgcttcatctaggagaagaattttgggattctttagcagagcacgggcaatcgcaatccgctgtttctgcccacctgagaggagaacacccttttctccaaccacagtgttgaacccttgggggaaattccggatgaaggccactgcattggccacttcagccactctctggatttcctcagcggtcacagaggaagggtcatcagcaccataagcaatgttctcagcaatagagcaagaaaacaaaatgggttcctgactcactgtcccaattttggatctcagccacactgggtttagctgacggatgtcatggccatcaagactaatagttccggaagcagggtcgtacaacctcagcaggagtgaaagcactgttgatttgccagaaccacttgggccaaccagtgccgtgacagatcctgacggaatggaaaggctgaaatcctgaaatatgggcacctctgggcgagctggataggcaaaatgcacgttcttaaactccaaagcaccctggaagcttttctcatttaagatgaccccctcgttaaaaggcagcttgggctctctctccaggagctcccagaggcgcccccctgcacccagtcctttcatcagctccgagtagaaagagctcagacctgaggatgagaagcagaatccacacacatgtccatcactggcactggcactggccaccactcctctgagaggagtgacaatgattgcttttaatataaaatctgttattaatattttcaaaaaacaacttgaggcagcttcctgggaactgatactcagaatcgctcgtcc

SEQ ID NO: 311527 - DNA, 1479 bp, Homo Sapiens
  misc_feature (24)..(24): n is a, c, g, or t
  misc_feature (32)..(32): n is a, c, g, or t
  misc_feature (50)..(50): n is a, c, g, or t
  misc_feature (68)..(68): n is a, c, g, or t
  misc_feature (95)..(95): n is a, c, g, or t
  misc_feature (159)..(160): n is a, c, g, or t
  misc_feature (229)..(230): n is a, c, g, or t
  misc_feature (326)..(326): n is a, c, g, or t
  misc_feature (1139)..(1169): n is a, c, g, or t
  misc_feature (1306)..(1354): n is a, c, g, or t
gtgggaacttcttcccactttctntcagtttntggtagttgaacctccanctgagtagctgctgctcnagcattcttcttttggacttcttctgnctgtagcttcctgtgttctcagtcagctcattcaccaacctagcataatcctggcgtagttatnntagttctgcagactgctgcttttccagttgatttgtagtgttgctgactgcatctctcagtataccatnntcctgcttcaagtgagctatctctgcctccatctgctcacgaacttgctgaaacttcatctgcatctgttgagtctcttgataactgacatgtatnttgttttgaaatacattatgttccttttctaatgttccaattcgatctttcatccttgttataaccacattgcttctttctttctctgtcatcatttcctgggttaactgcttacaccgatcctttgtagcagcagcatcttccttcacagcagcgagtaacttgtccttttcttgaagctgatgtataagcgtagtcaattctcccttacttgacttctttaaagcatcttgtattacaccagacttctcctttagcaagtctacaacacaaagagcctcatcttcagaaaacatcatagtcttcaaggacagaagaaaatctttaaacttcacttcagcattttctttgtcagtttcggtcttcagttttttagtcccagatttctggatcccttctacttggtcaggtttaagcaaatcaataacctctctcttatctaccacaggacttgagtcagcattatccatcaaaggaatataagtagttgcatgaataaggggttcatctacgaagacattttctgtcttttgtttctttgatgaagctttcttcttccctgatccactttcttgtttagtctcttggtggaggggcaatgcttcttgcctttttgatggtaccatgagagtttccacctttttatcctggtcatcgcttccatttttagacttcttctgccctggtttcttcttcgaggcagctgcttcagagggaggggtgggctgtttagtaactgggacaggttctacttttttgccaggaatctttgatgcgtcactttctttgatgacctgctcttcaagcacaggnnnnnnnnnnnnnnnnnnnnnnnnnnnnnnnctaacactacttgaagtttcaacgacattcaatggaacaggtgcaacttgatcatcttctactgccaaagcatctgataatttaaagtctcgaggtacactctcagagtcggattcatggaggtttccattctggannnnnnnnnnnnnnnnnnnnnnnnnnnnnnnnnnnnnnnnnnnnnnnnnggtaggaataagcttttgttctcttttctgttttgcaagaacttcatcatataatgtttctttcatgaaaagccagaagaagaggaaaattactgtaataactattgaaggaataagaacaataa

SEQ ID NO: 311528 - DNA, 961 bp, Homo Sapiens
  misc_feature (535)..(576): n is a, c, g, or t
cccttttatacttaacgtctcccaagaaagaataaaaaaggaagaaatgtatctaagaaaagctagctcttcccattttgcatttcttaaactagtttggaagcagagttaaacaatttgggggtgaggaacgacattcagacttcatatttactctcttgtgatgaaggaaagagtcaagatagtaacgattactgctatgcctcgggataaagcacagcaggcaccatacaaagtggcaacacaatacatcaataatgaccaagaatagttctttacccttttcccaccagatagaaatataaagagagaatcacgcatgagagataaatacctgtttccacccccacctcaaattgctttggcatattttaagagataaatggatccacacaaaatttaactagctttttcttctcctttttagctgttacaaaaatgggtcaggtttaggatttattaattttctggcctgaaaacccaagtgcttaaaaataagatttattttctgaaggatcagctttcttggaagggnnnnnnnnnnnnnnnnnnnnnnnnnnnnnnnnnnnnnnnnnntttgaagacaatacaattgtatgatccctaaatatgggagaacatattatgtaaagtgaaatatgaaaatttttattagttttttctttatattatgtgaagataaattagatgatttataaaggtatttgaaaataatgtttttctaaaaggctgcttttttcacatttaccacctcattgtctttttattccctctgatgagacaacacagattccacccatgtgagtctctactcaggcatactagataattctgagaagtgctcaaattgtgtcttctattaatccattcctggggtgggaatactctgtctaattcgacaagaatcattttccactcactggccacaatattcatcaagcctcacagggaggtgaggcac

SEQ ID NO: 311529 - DNA, 1053 bp, Homo Sapiens
  misc_feature (17)..(17): n is a, c, g, or t
ccggtccggaattcccngggatctccccacagatgaaggacgtgttcttcttcctcttcttcctcggcgtgtggctggtagcctatggcgtggccacggaggggctcctgaggccacgggacagtgacttcccaagtatcctgcgccgcgtcttctaccgtccctacctgcagatcttcgggcagattccccaggaggacatggacgtggccctcatggagcacagcaactgctcgtcggagcccggcttctgggcacaccctcctggggcccaggcgggcacctgcgtctcccagtatgccaactggctggtggtgctgctcctcgtcatcttcctgctcgtggccaacatcctgctggtcaacttgctcattgccatgttcagttacacattcggcaaagtacagggcaacagcgatctctactggaaggcgcagcgttaccgcctcatccgggaattccactctcggcccgcgctggccccgccctttatcgtcatctcccacttgcgcctcctgctcaggcaattgtgcaggcgaccccggagcccccagccgtcctccccggccctcgagcatttccgggtttacctttctaaggaagccgagcggaagctgctaacgtgggaatcggtgcataaggagaactttctgctggcacgcgctagggacaagcgggagagcgactccgagcgtctgaagcgcacgtcccagaaggtggacttggcactgaaacagctgggacacatccgcgagtacgaacagcgcctgaaagtgctggagcgggaggtccagcagtgtagccgcgtctgggggttggggtggccgaggccctgagccgctctgccttgctgcccccaggtgggccgccaccccctgacctgcctgggcccaaagactgagccctgctggcggacttcaaggagaagcccccacaggggattttgctcctagagtaaggctcatctgggcctcggcccccgcacctggtggccttgtcccttgaggtgagccccatgtccatctgggccactgtcaggaccacctttgggaa

SEQ ID NO: 311530 - DNA, 813 bp, Homo Sapiens
atttgcaactgcgttttattgaaagaaagagtggaggggttaacatggggcccacctcacaacccactcttcacccccaaaatcacgcagggatgggactcaggaaagggaagcatgtgtgtgttgaataggagccctaactgtagttacttctttcacagcagggaaggaagagggaagaggcagctgtggagaggatgaggttgagggaggtggggtatctcgctgctctgaccttaggtagagtcctccacagaagcatcaaagtggactggcacatatgggctcccttcacaggccacaatgatgtgtctctccttcgggctggtccggtatgcacagttggggtacctggagccgtttgtcaggcggcagtctgtgatgtgcatgctggagttgctcttgttgcagttgccctgcccgttcttgcaggtgaccttttcctgtgaacagacattctggacatctaccaggggctcgtgcacaaaggtgttcactggtttgcaccgcccctgtgtcatattccggcgcctcatcatttggttacagtaggtggagctgctgctgggggaactgtctgagtccatatgctgccgctggaatttcttggcccgggattccttgcccagggaaggctggacccagcccagcaccagcagtatcaggacaagcagaaggagccggacaagagacttctccagagccatggtggcctcactttcccagaaaagcctggatctgcagcttggtgtctgagagagatggaaggccagtttctgcaatcactcagctcccggggtgtggaccttatac

SEQ ID NO: 311531 - DNA, 1330 bp, Homo Sapiens
  misc_feature (49)..(49): n is a, c, g, or t
  misc_feature (100)..(101): n is a, c, g, or t
  misc_feature (107)..(349): n is a, c, g, or t
cttaaggaaaaggagttacatggaaaattctctcatcctcccccctctncccccaactcctctatgtccaaagttgttttttatttttctgagacggagnnacatcnnnnnnnnnnnnnnnnnnnnnnnnnnnnnnnnnnnnnnnnnnnnnnnnnnnnnnnnnnnnnnnnnnnnnnnnnnnnnnnnnnnnnnnnnnnnnnnnnnnnnnnnnnnnnnnnnnnnnnnnnnnnnnnnnnnnnnnnnnnnnnnnnnnnnnnnnnnnnnnnnnnnnnnnnnnnnnnnnnnnnnnnnnnnnnnnnnnnnnnnnnnnnnnnnnnnnnnnnnnnnnnnnnnnnnnnnnnnnnnnnnngtgtgagccaccacacccgggcctaggtttttgtttaaaattgggcctttgttcctattcagtaaatctatgtcacaggatgaggccaggatttaaatatacaaatataaatttttagtatctttcacgtcaaattagaaacacatatttggaatttactgctgcagtctcaactgtgcttatcatggtagtggctgaaactggaagacattttttttaaaccctgaagtcattcatacttgctacttctttagtcttcttgcttggaatgaaaagtattcacaaataccaccacctaagcacctgtttcaaatgaaactcagccttctgcttgcaaaatgatgtctttataattaagcaaacagcaaaagacccatgtgagttgcttctttcttcctggagatgttagcaggataactggaatcctaggagctcctctgtgttgaatttgagaggcagaacaaaaagaaaagtggccttttccattccaaatcatggaggtaatgtgtagagaagtgatagccacatttcaaaaacagggaaagtaactgggtaaaagaagcaggactacccactctaggagacaacatagagacacttgccaagtcctgagttcagaattttgtttttgagatgaatataaaagcacctaaaggtcaaggaaaattttcttcctgtgataaggaacacaaagcctgtttggtggtctcttcgcacggacgcgcctaacactttgctttagtgtagatgaccactcccctctataaggtagggaggaagaatgttcggttagttcctctcctctggccgatattttttttcttctcctcgcacggtccaacagatgcactcggcctcccgggggctgctcgcccccggcccagaggccagtttgcagcggcacgccttactccgccatcttcgcagcttctcaaggtggccaaccctgcggtgggcctttcccacaaggccccccccgtg

SEQ ID NO: 311532 - DNA, 808 bp, Homo Sapiens
  misc_feature (560)..(671): n is a, c, g, or t
ggtgctgtcaaaattgagcaggagtttttaacagaagccttgccagttggcctcattggaatgaattgcattttgatgaaacagtacattgagtttgtagctgacagattacttgtggaacttggattctcaaaggtttttcaggcagaaaatccttttgattttatggaaaacatttctttagaaggaaaaacaaatttctttgagaaacgagtttcagagtatcagcgttttgcagttatggcagaaaccacagataactgtcttcaccttggatgcagatttttaaaaaacctctcgttttaaaactctataaactttgtcattggtaaatagtagtctattttcctctgcttaaaaaaaattttaagtatatcctttaaaggactgggggtttgctcaaaaggaaatccaaaacctattctaaacaatttgcatttatataattttcctgtttaacaacaagagtgtgacctaaatgcttttgtcttgtcactgaaataaaagatggcattatgtggttaagagcatggggcgaggggtcagacatgagtcctaannnnnnnnnnnnnnnnnnnnnnnnnnnnnnnnnnnnnnnnnnnnnnnnnnnnnnnnnnnnnnnnnnnnnnnnnnnnnnnnnnnnnnnnnnnnnnnnnnnnnnnnnnnnnnnnggatattaggattaggatgcaaaaataaatgcttaaccaacactactactgttagcaccactactaattatcattcattgataatattaattgcaatgatgttgtaataaaatactctcatttccttaaataattgt

SEQ ID NO: 311533 - DNA, 657 bp, Homo Sapiens
  misc_feature (517)..(517): n is a, c, g, or t
atacttgtatttttctacatgttccaaatttcctatattgaacataagaagatcaaaataaatatcaaatctaccttattaaataggcaccgatggttatatgctggtctgcatccaacaaaggcaaagcacaccttaaaaggatggttgacttcttttggaaaaggcaagtcatttttaggagaataccacacataatagaacactttaaactttgtacttatctcagtcttggctaattcagtagaaagtcaacaaatgtctagtacactaatttttatatcttcatatttcagttgcagttattctctttttctgtatatatctctgagatgcaaatctatatatgattatgttaatgagcttttttttaattcctaataatactttgtttttgtatgtcttactcctagggggattatggtggcccacttgtttgtgagcaacataaaatgagaatggttcttggtgtcattgttcctggtcgtggatgtgccattccaaatcgtcctggtanttttgtccgagtagcatattatgcaaaatggatacacaaaattattttacatataaggtaccacagtcatagctgaagtaagtggtgtctgaagcacccaccaatacaactgtctttacatggaagatttcagagaatgg

SEQ ID NO: 311534 - DNA, 707 bp, Homo Sapiens
ttaaaaactgggttttgttcacttacatgtcttaaaattgccttaaaatgaatacagaaatttatatggcagcttctagtacagttgactgctttaacatggcctgacatctagtgatatttttctctctttcaaatttctgttttctagctcttaaatatctgtttctcattcttataaatcaagatgcttgtagtatataattctgagactaattatctgcttttgaattttttccactgcaattcatataatgtgaagatctgtgaaaatgctatgggaaaactagcttgggttcaaaatatcttaaccaaatataccctgtaggcttcccaagagtgactgtctgacagttggtgactgtagaagaagctggttgggtgttttctgggccaaggaaatttaaaatgtctgcaatgttatccatcattactttttgctgtcagaagggatggcagattgaagcttttctccctatcgcattttcagagttgccgtgtcagagcttcaccttgggtgaaggaagatgggcaggaattctggaaacagaactcctgagacctacctctgcctgcctaaaaatgtggactgactcagtatgagaaataacaagaaaacatttaagtgtttggggcaaatgttaatcgctttctttccatagggcaattaggagggtgcttttcttatttaattacgctgataaattt

SEQ ID NO: 311535 - DNA, 790 bp, Homo Sapiens
agtctccagcaccatgtctggtttgtctggcccaccagcccggcgcggcccttttccgttagcgttgctgcttttgttcctgctcggccccagattggtccttgccatctccttccatctgcccattaactctcgcaagtgcctccgtgaggagattcacaaggacctgctagtgactggcgcgtacgagatctccgaccagtctgggggcgctggcggcctgcgcagccacctcaagatcacagattctgctggccatattctctactccaaagaggatgcagccaaggggaaatttgcctttaccactgaagattatgacatgtttgaagtgtgttttgagagcaagggaacagggcggatacctgaccaactcgtgatcctagacatgaagcatggagtggaggcgattcgacgcctagattgcctttcagaatctattgttaatgattttgcctacatgaagaagagagaagaggagatgcgtgataccaacgagtcaacaaacactcgggtcctatacttcagcatcttttcaatgttctgtctcattggactagctacctggcaggtcttctacctgcgacgcttcttcaaggccaagaaattgattgagtaatgaatgaggcatattctcctcccaccttgtacctcatccagcagaacatcagctgggacgtgcctggtctaatgcattctaccaacagcaccatcaagggcacgttggagctttcttgtcagaactgatctctttttggtgtggggaggacgggggtgccacctacacccc

SEQ ID NO: 311536 - DNA, 665 bp, Homo Sapiens
agtccaatgagacagaacattgaaaagatgctgaagtataggacccgagtgtttgttgactcgttggtatcacgcatctcctcttctctcttcttcatgtaggcaaaatcattaacaatagattctgaaaggtcttctaggcgtcgcagctctacctctaatggtttgagcttctcaacttttgcaatctcttcgtaatttttcgcctccactccatgcttcatgtctaggatcacgagttggtcaggtatccgccctgttcccttgctctcaaaacacacttcaaacatgtcataatcttcagtggtaaaggcaaatttccccttggttgcatcctctttggagtagagaatatggccagcagaatctgtgatcttgaggtggctgcgcaggccgccagcgcccccagactggtcggagatctcgtacgcgccagtcactagcaggtccttgtgaatctcctcacggaggcacttgcgagagttaatgggcagatggaaggagatggcaaggaccaatctggggccgagcaggaacaaaagcagcaacgctaacggaaaagggccgcgccgggctggtgggccagacaaaccagacatggtgctggagactcgttcaccaccgaaggcctcaaccgcgccggaaccggggggacccacgtgact

SEQ ID NO: 311537 - DNA, 1372 bp, Homo Sapiens
ttttgtcaagcagttgagcacaaatattttaattgtctaaaatgacattttctttaagagttatctacagttcaaagctcacttttatgaggtgtcacatccatcaccattttaagagatataaaatcatgaaaagatatcaccagaagctatgtaaacatttcagctaagggtaaagagaaagttaagggtgttttcacaaggaaattgaaagagggcaatccaaatgaagtcaacatggtcacacaaaaatcttggtaaaagaactagaatggaagcccaagctgctgagcaagtgggagaagaaaagaaaacatagtccaaacagatcacacaagggaacccaggacaaatgctgactttggcattatctaggtaacccctattttttgtcataggtgactctaataatagacctattgttgcaaaaccagtcaaaatcctaccaaattaaaaagaagtccctcattgacttgttgggtgtaggtggtaccccatgtcctcccacaccaaaagagatcagttctggcaagaaagctccaacgtgccttgatggtgctgttggtaggatgccttaggccaggcacgtcccagcgatgttctgctggctgaggtacaaggtgggaggagaatatgcctcattcattactcaatcaatttcttggccttgaagaagcgtcgcaggtagaagacctgccaggtagctagtccaatgagacagaacattgaaaagatgctgaagtataggacccgagtgtttgttgactcgttggtatcacgcatctcctcttctctcttcttcatgtaggcaaaatcattaacaatagattctgaaaggtcttctaggcgtcgcagctctacctctaatggtttgagcttctcaacttttgcaatctcttcgtaatttttcgcctccactccatgcttcatgtctaggatcacgagttggtcaggtatccgccctgttcccttgctctcaaaacacacttcaaacatgtcataatcttcagtggtaaaggcaaatttccccttggttgcatcctctttggagtagagaatatggccagcagaatctgtgatcttgaggtggctgcgcaggccgccagcgcccccagactggtcggagatctcgtacgcgccagtcactagcaggtccttgtgaatctcctcacggaggcacttgcgagagttaatgggcagatggaaggagatggcaaggaccaatctggggccgagcaggaacaaaagcagcaacgctaacggaaaagggccgcgccgggctggtgggccagacaaaccagacatggtgctggagactcgcggacgcgtgggtcgacgatatcccgacattccgaccgtaccagcctgcttt

SEQ ID NO: 311538 - DNA, 462 bp, Homo Sapiens
  misc_feature (310)..(310): n is a, c, g, or t
aaatcctcctcccgtaaatttttcgccctttccaactcccaagccttccatgtcctaggaatccacgaattggtccaagttaacccgcccctgttccccttgctcctcaaaaacacacttccaaacatgtccataatccttcaatggtaaaaggcaaaatttccccttggttgccatccctctttggaattaaagaatatggcccagcagaatctgtgatcttgaaggttggctgcgccagccgccagcgcccccatactggtcggagatctcgtacgcgcccagtcactagcaggtccttgtgaaattnctcacggaggcacttgcgagagttaatgggcagatggaaggagatggcaaggaccaatctggggccgagcaggaacaaaagcagcaacgctaacggaaaagggccgcgccgggctggtgggccagacaaaccagacatggtgctggagactc

SEQ ID NO: 311539 - DNA, 1971 bp, Homo Sapiens
ttaatgttttgtatggagcggcacttttatctgtgttttagcagaactgttcctctgtatcctttacggtttttctttgttttgttcccttttaaaattatgccatagagtttttttgtgtgtatgaaattaaagcctttattaaccttctttgatttgactgttatttctgaaaaggacacattcttgctgatacttgtaacaacctgttcaaagttgtggaaatcaccttctgttggctttctgacatggacttccttgcagcactgttacttcttaaaaggaacagaatggcaaaccagtgtctggccgtagtccccattgattcctgttattttcatctgaggagcctgtgaagctttgcagaggcttctgggtaagtttgtaaacctagcattggccttcactaggctcttgctttgcctcattattaagggttgggagagggagtgaagtagcatatgcatttcatacttgcctttaggtctcaagcctagccccagtggaagtgctgctctcactggtactgtttggaatttgtgaaacctcttaagagggtagtcttgtggaccattcaactctccttcagccctttaacttacccactgagtaaggcagtaaggaaagtatatgtgaaaaggaaaagctgttactctggggaagatgtaaacctgcaaagtgcttcagcctacctgccatagataaaaatgagtcatgatagaggacaagctagggtagtgcctcagaactctaatgttccatggagtgtttgtgctcttctaagaagagaaaactataggagtattaaaattgatgcaatacctcaggatagaaacaatctagcgaccttagaagttgaaatgaggaccataggctccttttggggtatcatctttctgaaggaataggtacattattaaacaaaactggcatttgccacagaagtttgtgctcataggcacatctgcaaaatttcacttcaattggtgtaggactaatatcggtgagaaaatgagaccctacaatcagggtagggtactgctttacaaccacagctattcttctcaaaatagtcctttttctttcttgaggttttgttgcttccatcgaggcagagcagagaaggcagctggagtcatcccaaaggcctgagtgaaatcttcaatggacaggtgttcctccttcctgctggggtccacaccctcggggagctcctctacaggcttgttcactagctgctccagggggaagatgggcagaggcccagaactgaggttgctgttagcattgaacacgtccactttggggcttgtgacctcagcagtgatctggctccagtccctagagttgccaagctccgccttcaggtcctcataggatttggtgttactccacttgaagggatcccaagccaggaaccagcctgtgaaggtggggggctcgtgtccctgcttcaccacaatgatgggggtctcagggtcacgcccgctgggatgggtcttgaggtattcctgtgcagtggttgctgcggccttcttctcctcctcgttggcatgtttcccaatccagaagaagacctggtcccagacatctagtaggaacacatcatcctcttccaagtcatcctgattgaagtcagggatctctgtggccaggaagcgcccagtcttgttggaacactcaaagagccggggggtggtgaccaggttttcttcctgtagtctcttggtgttggcatagggggccttcccacccagggccatccagaagttggctggctcctgcccttccaccaccacttgcttctccgtccgggagatggtgtcagcaaccatcttggccatctcccgctcgtccccgctacaacccttcccacaccatagatagcagcaagactgggtcttgaggacaaagacatcattggaacttgaggaaattggcccgcgctgggacctcaaaggccttggtgtt

SEQ ID NO: 311540 - DNA, 261 bp, Homo Sapiens
  misc_feature (110)..(160): n is a, c, g, or t
tgatttccacaactttgaacaggttgttacaagtatcagcaagaatgtgtccttttcagaaataacagtcaaatcaaagaaggttaataaaggctttaatttcatacacnnnnnnnnnnnnnnnnnnnnnnnnnnnnnnnnnnnnnnnnnnnnnnnnnnncgtaaaggatacagaggaacagttctgctaaaacacagataaaagtgccgctccatacaaaacataaagaatcagaatcaaaagtcactctgaacataaag

SEQ ID NO: 311541 - DNA, 1204 bp, Homo Sapiens
  misc_feature (541)..(554): n is a, c, g, or t
  misc_feature (1171)..(1171): n is a, c, g, or t
  misc_feature (1193)..(1193): n is a, c, g, or t
ggattttgttcctgtgaagaattaggagaaactggaatatggcagctgacggatccaccaatccttcctcttacccatggaccaactgggggcttcaactggagagagaccttgcttcaagaataaaccacaccagtgaacaagaaggaaaggccttttggagtgtgtctttctgtgtgtttaaaaacagtgggaaaatccacaccacactctaagtggacagctcagaataatttagcatatttcctttcacacttaaagttcttaagatgagactgtgtaaatgagagaaagacttgattcagaggaaaaaaatgtgttctctctggactcttgcctagctcacaaggctttgtagaattgtcttcctaaatcggggcacctgctacagaagagaatgtttcgttccctctgggtatgcacagctaaggggcctcatttctcccagagggagctgctggcccgctctaagtggtgcaagaggaaggagtgtgcccagaccagctgggggagcattgaaaggacagcttggggatggaannnnnnnnnnnnnnatctccattttccagttaggtagagccaagctgaggaatccttttaagattattagaaaacatgccctgaagagagttgttcttaggttacacatgaaatcctaccgtcactagcccccatacaccagtgttgctggctgaagatacccgcttaaggatgctaacatttaccctggtactgccacattttctctagagcagctggcccttcttgctacagccctatcccccctccttgcttctgtgaaatggggagacaaagcacttttgctctccaaagcacttttggatactcaggaggaaagataagatacatgtttgaagtattcaatcataggagcaaagaacttgcaaaatatgaagtgacttggaattaaccatgttgtagcctaacgtgctactgcatttctaaatcatcaatattcgcttgtctttgcccctagactctagactatgttaactagttaaggatgttacattttgaaaggatgtatgttagatatattatttgcagcaagaagttcattctgtgcaatatggacatgtttgcaaaccataccaaggggtcaggttgttgtacacttacagtatgtgtcaaccataatggaacatccacnaatggcatcataataccagggnatggtatagta

SEQ ID NO: 311542 - DNA, 1077 bp, Homo Sapiens
  misc_feature (926)..(978): n is a, c, g, or t
caagaactgttctccttaaagctgatactatgtttcacatacactggtattgccactagattttgtgagctgacacggtatgatatgagtcggaaatttccatctggaggaataaatgacaaaactctttcagattcccaacgcttgaaccggatgcaggggtgaaagctgacatcatccagaagcctagggttcatgaaagaaagggagagatcaggcattccagatagtttaatgcaagcatcaatgaccccctgaatttctgcaaagacctgtagatcctgatttattctataattgggtctatttcttcaacaacatccaaaataggcttcattggtttgtgtactttacccctgccggacgccatggtatgttgggacagctgcccggtggggagtgtgtccccaacattactactgcctgtaatagagttgacaacagagcgtagaattgttggtggtttaatcaattctttcaaaatgttagattcggtagccagtggaaatccattgtctaacatttcttctaagagttcatatactatgaccacattatccttaattgcagcctctgaacactcaccaaagtagtcctgaaaagtgtcagcaactcgatgtaggaactcaattacaaagagaggtggcacttcggtctgtatgacagatacaaagaagagcttatcccggtagatactgatgaggtagtggtgaggtgttgaaatgacaggtggtacattttcaacatcagcagctttctcttgagcttcaaagaaataatcacagacagactggctcacaacgctcttccagtgcttctctagaaatatgtcaccggaacagtttatgagaaatagactgtggatcattttctgtagtcctaggtactcaggaggatgaagcaggagaattgcttgagcccaggannnnnnnnnnnnnnnnnnnnnnnnnnnnnnnnnnnnnnnnnnnnnnnnnnnnntgaccaagtgagacactatcccaacacctgtgccagtcagtgattcggcgccggatcctctcctaccgaagctggagaagccgagaaggccgcgaggcc

SEQ ID NO: 311543 - DNA, 801 bp, Homo Sapiens
  misc_feature (226)..(273): n is a, c, g, or t
gggtccctggtactaaatgtaaggccccaatgagtttcgcctccattttgaaggaaacccaaccaaaggccataaccaaagtttcaggaatgaaagccacggtaaaaccgggcggggttagcaagcaagggccaacttacaaccctgaatgcaaccaaatctcaaatgaaaagaaaagaaactttttctgagttaggagacatttgtggagatgctcagtactggnnnnnnnnnnnnnnnnnnnnnnnnnnnnnnnnnnnnnnnnnnnnnnnntaagttacatttgcattttataatcttacaactatctgtttctaaagtactgtcttccagctattttagttgatcatctaataaaagcatcttatgttttaagattacaatgatgttctggctaggctaccccctccaaccccccaaaaaagtaaagataataaaacatgcttttgcggacattttcctcattctaccattaagggcaccatctaccaactggtagcaaatacttcccatattttttgtcacttgccaacaaggcagtaaataccctgctgaatgaaatcactgggaacattccaagttcaaaataaaatgtttaacttacacataatacaagttatgtacaagattaggaggggggaaaaacctgaacaaatcctggaacacacctatgtatttacgtcatgggaaaaggggagagaacacttcaaatatcaacaagttctgcgccattaactcattaatagctaaatggccacaccaaattgcatgtgaatgttagaacctctcagataaccaccc

SEQ ID NO: 311544 - DNA, 635 bp, Homo Sapiens
  misc_feature (57)..(57): n is a, c, g, or t
caagttatgccaccatcagttgcaaactctgatgttgactttatgagggatagcttncaaaactgaaaattcctttgacactggatttgtttgggattgtcaattgcattatctcaccttgttattctcattatatagaatttgaccatttcaaggactagacatgcagcaattcaatattcattaaaattattaacactgttgaagcattttacaaatttttcggttaacacctggcagagaacaaatataatagaaaacactgaccaatagtcttcctagttagtagtttgagtagtactttacttttcagtgctatggcatactaggtatcttatacattactgctatatttccctccatatatatgttttattacctttaagatagttgatatgtaaggtttattcaaagattatagcttcccattctatcaatgcaacctatacaaattctatttcttcttttcatatcgcattttgtgttttcaaacacttggaggaagcaagagtcttctccaccatgactttaatttaaactaaagccctcattctaaaatgtcttctgcccaccccagttgcttcatacatttgagagtatacttggaggctatgccttgtggatgactgtcaacc

SEQ ID NO: 311545 - DNA, 1235 bp, Homo Sapiens
caggctgcataagggcatcacgtacaatgatacttatatctgcccctgaataaccatctgttttcctcccaagttcccgaaagtctgcttccgtgagactgttctgagtggtccctaggtgcagtttaaacattgctgctcgggcatggggttccggcaagggaatataaattcgtttctcaaatcttcgcctaatggcagaatccagaacccagggtatatttgtagctcccagaaccaaaattccatcattgtctacaccaaccccttgcatttgcactaggaactccgtcttaattctacgtgcggcttcactttcattttcacttcttgaaccacagagagaatcaatttcatcaatgaagataatggagggcttgttctctctggcaagttggaataaattcttaaccagtttttcactttcacctagccacttagaaacaagatcagaggaagatattgaaaaaaatgttgagttgttggcttctgttgctacagctttggctaagtaggactttcctgttccaggcggcccaaataataggattcccctccaaggtgttctcttgcctgtaaaaagatgaggaaatttaataggcagtatcacagcctctttcagtgcttctttggctccttcaagtccagcaacgtcactccatttcacatttggtcgttctataacaatggcaccttgaagttgattctgtagtttctttttttcaggatcatcagattctccttccccatcactgtcattccccttctcatctgctggactcggctgtccttctttcactggcttctgtgcttttttctctttatttttcaggtactcctttagtttttctgctctatcaagatattctgtacactttgccctgatactttgcttggctttatcaccctgtgcttcatatttaacgacatgaagaaaatactgcacagcatgctgatagagctgaagggcttcttcgtagttcccagccttgtcttcttgcgctgctttgctagccagatctatcgctttctggaggttgggcgaagtggatgacatggcggagttcccaggcggttcccaagggaacgaggggcgaggagagccaacagcagcaacgtcgaagcgcgcacggggtaacagccctcaaactggggaggccggtggttctcggaccgcgaagggcagcctcccttccggaacttgttttagacaacactctctccaccagagcttc

SEQ ID NO: 311546 - DNA, 1206 bp, Homo Sapiens
  misc_feature (185)..(185): n is a, c, g, or t
catatccttcgttatagaggctcaagatttaaaaggaaaaaaggggaagatccctctaagcctgtatcaacctgtcgcccacccataacctatcttttcataacagagtccaactaaacctaaaaattaaaactggaacttagcagcttctacgcaatctaagaatactttgttccctctctcanaatctttccctgcttttgaataattgacttttgaatttcacaaaaacctttccttaattattcatcctattacttgcttcatagtaacccgtgatcaattcttaaaacattaaaagacattactatatttcttaatgaatacacaagacttttaagtacaaatgcttttatattcagcccctgtaaagccatcagatgtttgaaagtttttaaacacgaaccaaagggtttaattttaagaacttagctaggaatgggtgaaatcctacccaattaatagagttctgcaaattagtaacaaagtgtaaaatgaaaggaagggtcccttggagatgtgaaattcttctattgagagtcctgtcttctttattcaagaagtttgtagccattttcagaattcactcaagaaccaacttcttaatttagatatcagcgaacaagtcatggcaaaaaatacacaaagagaaacaccaccacatcgaaaaggatgaaaagccagaggtccaaccagtaggagtgtttgggaagcccatttgccccagactgaggcctcacatcgaagttctgcctccctccctcgctaaagcctcgccgctcccggagaccatctcgaccatcaacacccggtgcgtccacctccatctcgctcctgcagcttcgtaacaaccctagaaaccgaaaatgcttaagttcccggactttggtgttcgccgcaccggaaactgagcggagtccggccgcctgcgcagtgcgccgcgccccgggttccggaatgcactctgaacctactcttcccagcgcgcaggcgcctggctcggctttccgctgcctccgtgaccgctggcatgaagcgcggcctccgccttgacactaagtcaatgggcccgcctacttctgcctcgcggcgtcccaggcagatagctggttattcaggtttcgttggaagaaatacgttctcgtccccctgaaaggcccagtccagtcaggtgatggactcctccctgaaactgcacgaggtcac

SEQ ID NO: 311547 - DNA, 500 bp, Homo Sapiens
  misc_feature (28)..(28): n is a, c, g, or t
  misc_feature (112)..(112): n is a, c, g, or t
ttttttaagtacaaaatgccttttatanttcagcccctgtaaaagcccatcagatgtttgaaagtttttaaacacgaaccaaagggtttaaattttaagaacttagctaggnaatgggtgaaatcctacccaattaatagagttctgcaaattagtaacaaagtgtaaaatgaaaggaagggtcccttggagatgtgaaattcttctattgagagtcctgtcttctttattcaagaagtttgtagccattttcagaattcactcaagaaccaacttcttaatttagatatcagcgaacaagtcatggcaaaaaatacacaaagagaaacaccaccacatcgaaaaggatgaaaagccagaggtccaaccagtaggagtgtttgggaagcccatttgccccagactgaggcctcacatcgaagttctgcctccctccctcgctaaagcctcgccgctcccggagaccatctcgaccatcaacacgccggtgcgtccacctc

SEQ ID NO: 311548 - DNA, 799 bp, Homo Sapiens
  misc_feature (33)..(33): n is a, c, g, or t
gctttctgctctctgctcttgacttttccagancaagttcctttaaaagaatactcgcattcttatttgcttctgcagcttgctgggtctttagccttcacaatggtttcgacacattgatgacattttttcaacagttccttatctgtaattgttgctatgtatctcatgcattctatatcagaagggaactgatttacttcctttaccaaatattgaacaacttttacatgacccttgcgaaatgctgacataagaggtgtgattttccggttatctgctgcatccacatcagcacctgcttgcactagcaactgcacaacatcaaaatgacctccattggatgccagccaaagtggcgtatttccctttttgttacgaacatcaatgtgggctcccctatgaatcaggagttcacaaaatttgtagtgacctttgtctgctgctattgttaaagcagtatctcttgaggaaggcacagggggagcattaacatctgctcctttatcaagaagaactcttccaacctctgcataccctccagaagctgcttccatcaagggggtaagacccgtctttgccctatgttcaacattggcttttcggtccagaagcaaactcactacttctgctcggccctggaaacaggccagggtgagagccgtgttccgattggtctctatttgggcattaatgtctgaacccatatcgagcagcaattttactgcaggaacatgtccattcattgcagccaacatcaggggagaaatacctagtttactcccagtccttgaattaa

SEQ ID NO: 311549 - DNA, 588 bp, Homo Sapiens
gtcccagagcttcaggataaatttaatgtggatgagtactctgatttagtaaccctcaccaaaccagtaatctacatttccattggtgaaatcatcaacacccacactctcctgttggatcaccaggatgccattgctccggagcacaatgatccaatccacgaactgctggactacctcggcggggtgcccaccatcgagtccctgataggtatagttctaacttttgcctggaagatcaaaagggaatgtgacagaaaagtgttgtaattgtcacctcctctattttttgcactataccaaactctggatatacattgagaaataaaatagatgtgatcctgatagtttcataagagagaaaacaacaacaacaacaaaagcccagatgtgatcaatatctataaggaactggagtcagaggaaaagatcattttaaacgcagatacatactgccagcttgtgtttttttaaaaaaattgcagatacataaattaaaagtcctctaaaggaaagaatttttttgtttgtttgttatgagacagggtctccctctgttgcccaggctgaagtacagtggtgcagtca

SEQ ID NO: 311550 - DNA, 1547 bp, Homo Sapiens
  misc_feature (829)..(850): n is a, c, g, or t
tgcaaatctgccagcagctcttacgtaaggcatgttttattggggagggctgagcttttattttctcctctccagtggggttggcttttattgtttcttgtttgggtttggaatggaaatatggatagcagcataaagtacttttattttgacaaaattcatttttttcaacaatggagacatagatttgacccacaataacttctccccctctctttttactctgctcaaaaagcatctctcctcccattacccaaccttggtcataagtgtgcctggctggtttgcagatatttgttctgctttgtaaaaattggccattagtgcatttattgagatgatctctaaagagctatgccctgacctacccctgattctatgacattggggcccttcttttgctgaaactgccttacgtaatggttttactccttgaaagagatttgacggaatccattttatgccaagtgctgccctgcactgtttctgcaatatgtggtgtatgctgtggtgatcttgctgggaatgattataagtgtgtgtgtggtgggggagtgggtattacatgcattgctgaagagtcatcctggtgttcctcattcctcccaccttcccgtggtcattttaattacggggcagtgtcaccgcaaagggaggaaactcaaagccgaaagcaaaattccaggcctgattctggcttttgaggttcctggttcttgaagccaggcctgacccgactctcagatggggtcagtcccgtcgctttgcagactgaccctggaaatctacaaaatgcagattttcctgatttcctcttctcttgcccagnnnnnnnnnnnnnnnnnnnnnnaaagcctggattgtaaccagattttcttttttcccccttctcagctgtagatatgatatctcctttcagggccccagcttaagggcaaagtgagttaatgtgtagacaaaggcgagggacaagagagagttaacatctagacagtggaaaaagccatggtgtgtggtttctgggaaccaccaacacttgcaggtttagctttttcccagggttgactacaagaaagaaaaccatgtttttgcaagattaaaatgtggttgagtgtgcctaaattaaccatccccatttttatcatatttccaccatcacttcagggttttaagagtcagtgctcacctgggcggactgggtagtacattttgcttcttagaaagctaagtcctgggttccgtctgattttaggttccaggaacttcctgagaacacccgatcgcagagggtaattttctggagtttgttttgcagggatagctgggagtatggccaccctgctccacgatgcggtaatgaatccagcagaagtggtgaagcagcgcttgcagatgtacaactcgcagcaccggtcagcaatcagctgcatccggacggtgtggaggaccgaggggttgggggccttctaccggagctacaccacgcagctgaccatgaacatccccttccagtccatccacttcatcacctatgaattcctgcagga

SEQ ID NO: 311551 - DNA, 589 bp, Homo Sapiens
atgagcactgcacccagcctcagaattagcatttccaacacccctcaagatgtctgatgctgctggtctgtagaacacactttgagtagctccgagcacaggaataccaaaaactcttatgttcacgtccttttttgaggcctttgataacgtagtaaaaaattcaattcttctgtctggtctgactggagactaggagccgctctgcccaccttcagtcctctccactctcccacaaccattttttgtgcccctttgcacatcccctactgcccctccctgggaccatgaaacattaccttctgctggattcattaccgcatcgtggagcagggtggccatactcccagctatccctgcaaaacaaactccagaaaattaccctctgcgatcgggtgttctcaggaagttcctggaacctaaaatcagacggaacccaggacttagctttctaagaagcaaaatgtactaccagctccgcccaggtgagcactgactcttaaaaccctgaagtgatggtggaaatatgataaaaatggggatggttaatttaggcacactcaaccacattttaatcttgcaaaaacat

SEQ ID NO: 311552 - DNA, 1286 bp, Homo Sapiens
  misc_feature (261)..(270): n is a, c, g, or t
  misc_feature (461)..(461): n is a, c, g, or t
  misc_feature (1103)..(1103): n is a, c, g, or t
  misc_feature (1169)..(1169): n is a, c, g, or t
  misc_feature (1178)..(1178): n is a, c, g, or t
  misc_feature (1210)..(1210): n is a, c, g, or t
  misc_feature (1215)..(1215): n is a, c, g, or t
  misc_feature (1223)..(1223): n is a, c, g, or t
  misc_feature (1242)..(1242): n is a, c, g, or t
  misc_feature (1257)..(1257): n is a, c, g, or t
  misc_feature (1269)..(1269): n is a, c, g, or t
tactgttttcagtcactgcaaattttcttccctcctctgggatctaaggatccagggaggaggctgccacagtgaagcagaaaagctacattctgcccagggaggaagagaaaaagcaatttctcgctccccttcccaagtccttcctgtccaccaccacctcggatgtccccgcacacagtcttccggtgagcggccgtgccgtcaccctcctctctctaaggcattggggagcagagggcccataggcagcaccctgcnnnnnnnnnntgatctacgtgtgaggagagggcaaggggctggatgcaggcagagaatgactttaagaaaagattctatgatcccttcctttagtatggagctcgatttttccagctggcgcttggtgagaaagtacttgaagaactcatagacagaccaagaaatggcggtggagggcatctggtagatgacacgcgccntggatgcctttgaagtaggccggccaggccgttgagctggtacaccgtccggaaggcattggccatacccgacagccggccgctgatgttggccagcgagagggccacgttctcctgagtgttcagaagggtcttacagacgtccaggggggtcgtggcgccgcggcgaggccccggccagcccgcctgagatgatgtgggactgcgggttgtaggtccggtgggggttgacatgctcctgcaggaactcataggtgatgaagtggatggactggaaggggatgttcatggtcagctgcgtggtgtagctccggtagaaggcccccaacccctcggtcctccacaccgtccggatgcagctgattgctgaccggtgctgcgagttgtacatctgcaagcgctgcttcaccacttctgctggattcattaccgcatcgtggagcagggtggccatactcccagctatccctgcaaaacaaactccagaaaattaccctctgcgatcgggtgttctcaggaagttcctgggaacctaaaatcagacggaacccagggacttagctttctaaggaagcaaaatgtacttaccagctccgcccagggtgaggcactggactctttaaaaccctggaagtgatggtnggaaatatggattaaaatgggggatgggttaattttagggcacattcaaccacatttttaatcttngcaaaaacngggttttctttctttgttggtcaacctggggnaaaangttaaacntgcagtgtttggtgggttnccaggaaccacacanctgggttttttncatgtttaggtgtttaa

SEQ ID NO: 311553 - DNA, 447 bp, Homo Sapiens
  misc_feature (348)..(348): n is a, c, g, or t
  misc_feature (379)..(379): n is a, c, g, or t
  misc_feature (424)..(424): n is a, c, g, or t
ttaaagcctggattgtaaccagattttcttttttcccccttctcagctgtagatatgatatctcctttcagggccccagcttaagggcaaagtgagttaatgtgtagacaaaggcgagggacaagagagagttaacatctagacagtggaaaaagccatggtgtgtggtttctgggaaccaccaacacttgcaggtttagctttttcccagggttgactacaagaaagaaaaccatgtttttgcaagattaaaatgtggttgagtgtgcctaaattaaccatccccatttttatcatatttccaccatcacttcagggttttaagagtcagtgctcacctgggcggantggggtagtacattttgcctcttagaaagcntaggtcctggggttccgtccggatttaagggttccagggaacttncctgaggaaaaccccgaatcgca

SEQ ID NO: 311554 - DNA, 1065 bp, Homo Sapiens
  misc_feature (35)..(35): n is a, c, g, or t
  misc_feature (131)..(131): n is a, c, g, or t
accatatacccactggtatactgcagtggtaaacnttagatcacttacgagtctgaaccaatgcttcttgctatttcacagacatgcacaaacaggagagcgaatgtaagaatccatgagctttggctccnccacccaataaccaatattggaaaagtgataaacaacagaaagacatgagggaccaggttgagggcatccacaaagcaggaagtagtacaccatcgttgatattatatgaagaaatgttgttaccacaaaatgaaaggctcatttcttcttatatggtttactcttgggcaatagcttcacgctgcttcaaacccctgccggtgcacttgagctaccttcaaaacaccgacttcctacactgtcttaagatgtaaatttcaaacccggacgcagaactctccgatgacagttttcctcccctaggcgaagcacgcagtgcgccggaacggattatttttagggtggtgggagaccagctgctgcctcctatcgagtttctaaattgcacagactgctctgggccggggcagacaccgcggctgagaagcaggaaactgggcagaagccccgcgcgccgcgcctggggccggagaccttccccatccctgctctgctcagctttgacttggggcgggcgcgacgccgcgattttacaaactcaagtaataggcgtccccttaaacttcattagacactgaaacttggaatatgattccatgattctccggagtcgggttttcaaacgtcaaaacactcaaggtattcttgtttctttgttttgtttttccatgctctgtaagcacccctttattagccacgtaaggaagcggatttggggatttcgctgtttccccctgaacggatccgggaaatgaagggctcattctaggtagaggcacccactgctgggttatgagtgcacgaatgtctcacaggagcaaggctggctcaagtctaattttccgcttttccccggcgacctagaaaacttggtttctctggtggaccagccgccgcgctatcgaagggcgacccttgcccaccgtcccctaa

SEQ ID NO: 311555 - DNA, 1722 bp, Homo Sapiens
  misc_feature (18)..(18): n is a, c, g, or t
  misc_feature (47)..(47): n is a, c, g, or t
  misc_feature (60)..(60): n is a, c, g, or t
  misc_feature (66)..(66): n is a, c, g, or t
  misc_feature (73)..(73): n is a, c, g, or t
  misc_feature (134)..(134): n is a, c, g, or t
  misc_feature (152)..(152): n is a, c, g, or t
  misc_feature (191)..(246): n is a, c, g, or t
  misc_feature (501)..(521): n is a, c, g, or t
  misc_feature (739)..(739): n is a, c, g, or t
ggctcttttcaaataggnctcacatccaaggaatatgtcttctgtangcagtcttacttnctatgnttcaggnaaagacacacatctataaacatacatgtatgtgtgtgagagtgtgtgtaatttaaaagggnatccaggccccttcttgnttataaattggaagtaacaataggccaaactgtctcctnnnnnnnnnnnnnnnnnnnnnnnnnnnnnnnnnnnnnnnnnnnnnnnnnnnnnnnngacaggtggtggagaagaccccaaagaggagttacaaatttaacacatttgggaaagtaaagatgactttaaaacaaactaaagataaatcacaaacccaaactcagcagcctaagggaaccttcatagggggaaactaggaggctccagcactgtcaggtcacactcctttctagactatgcaaccctctagggtttcttccagggctgttgcattggcagcaaagcggtgacaggcagcagtaggcatgtgcnnnnnnnnnnnnnnnnnnnnnctctgcaaaggggcaattattcctggataaggcaagataattgtggtcacaagagaagcagccaaatgcagatctgttgagctaacagggggagtgtctcagtcagtctttcccagctttgcaatcagctcatcacagatttttgtcagttcttcaatttcttggttcttctgctgcagggccctttccagggactccaccttcatctgctctttgcngagtccagcatggagagctgcactctcagcctttgcttttgttcgaacctgagcaatctcttcattggctttgtccagtttctcttctgcgtggattttcagggcctggtatcgctgctcctcttgtttaactctggctaagtaatcctgagcacatttcttcaaggcttcttcattcttcttgaacccttccagagacacctttcaggttctcatatctcctgaagagatcagaaagggacctttccacagagttaaggtcagccagggcctgttccttctccatggtcagttgctggaagctcttctgagaggtcatacttgtcctttgttcatcttcaatcatttgagcaatagtcttttcatattcagctacaattttcctcatctccaaaacttcttgccgggtctcttcgtatttcttcttccattcatttgcttcaatctctttagtaattatctcttctcttattaaggtgagcacggctgtcttgtctgattcgctgaggcagatcccatccagggggctctcacctccacaggacaccgacacaggggccttctctgcagaggactccagcagcccaagcacagtggacccgtcttcttccatcttctggcacgtctccttctctatgcctgcttctgaggatgaaaacgcatgatttatggtagacacgggaacattggaacattcaaagtactccaggtcttcctctggctcacctttcacctcggcaccagctgatttctgaccacatgacgtggatgccagtttctcctcatcagtagcatggccatccctattagaaatgtctgaaatctgggagatcactgccccttcatcccgagaacatgcatccagggcgagagactgagtttcatgcttcttcaccttacagccactcgttattaaacgcgactttgccttcttgggtgattctaagatttcattaacgtgattaccagtgggagaacaaaag

SEQ ID NO: 311556 - DNA, 603 bp, Homo Sapiens
tacatatgagactcctgcgttttagttaattggagaataagaatggctaatgtttctttgaggaccagcagtgattaccctatcactgagattgaataaattgttgaacatctttatttttgttgtattaaaattttaggttaaatttatatatgtatgattagatattgaaggttgtgaaatgtgaatgaaaacgtgtaaagtgaggcttcacaaagaatcttattctctgtgtttcaaaagtatttgtcctattttaaaataattttttaaattgagtggttctggccacttaaatgacacgattggtactattttcctaaggtgggatttattcccttgaatctattaaccagttgtataaattgaattatggtgtccttcagtgtaagaggcattaagaaattctttgtgaaacatcactgcttgataaagtatatacgtatttagcatccttgtttttctttgtgctaaagtggatacagctgttggggcagaagagacgggaccagctgctggccacatttcctgctttattttaaaaggtagtataagaaatgaggaaaaagaggtaatatcagggcttctgctgttttttatttt

SEQ ID NO: 311557 - DNA, 397 bp, Homo Sapiens
  misc_feature (16)..(16): n is a, c, g, or t
  misc_feature (46)..(46): n is a, c, g, or t
  misc_feature (114)..(114): n is a, c, g, or t
aaataaggctggtganggcactgggaaacccaaaagaccaaattcngggtctccaaatcgtattaatctagcaaacaaaaacatttcacagttgtgccaagaacaaggattccnattttccataaccaaataacaaaataaaacattttatgtgtaagataacttacatctttggactgctggaaaatactttttaattatgaacatgttaaaaataaaaaacagcagaagccctgatattacctctttttcctcatttcttatactaccttttaaaataaagcaggaaatgtggccagcagctggtcccgtctcttctgccccaacagctgtatccacaggttgtgaggcgggaacgactgttctgtaacccctacaacggagcctggcaggaagg

SEQ ID NO: 311558 - DNA, 846 bp, Homo Sapiens
tccgacgctgcactgtgtaattagtcagagaactcgatcatagcaaagaaggtgtggaaaatttgagtttcgcgtggaggaccattccacaaacgaggcacagtaaacagcatcaattgctgaaaaaatacatcgaggaaatatacacagctgtagaaattttgtgatggtctcatttttggtagattttgctaaaaccagttgtccttttccagtttcatctctgtagaactctctgtacatgttccatctgtttcttttcttcttcaagaagcttgtcctgaagggcagtacagcgctccttctcttttttcgttttatttgggggcatttcctgattgtcatcaattgctttcatctggactttaagtttattgacttctcgttcatagctggtgtgtggaactgcaaggtcatacattgtcaatgaccagaatgtagcatagaattgagggctgatgtcatcccagactttggaaacatgtaaggagaccactgcttcatggacaggcgccatcaccatctcacatgatgtaatgtacttatgaactttatgttgctgtttacttcccttttctgattttttaagttcatcatactttgacgaaatatgatgggcatacattggcctagacaggaaaaatgctgcatcatggggtgtatgaaattcattacagagtacatcaattgaaggcactcgctttatataatcttctgtgctcagattagatgctaaaaacccaccaactgcaccagggtatcatgacactggtcatagagctttcccacaagtttcaaatgtttccgacgcgtggtcgacgatatcccgaacttccgggccgtacc

SEQ ID NO: 311559 - DNA, 1434 bp, Homo Sapiens
  misc_feature (580)..(639): n is a, c, g, or t
  misc_feature (643)..(644): n is a, c, g, or t
  misc_feature (647)..(647): n is a, c, g, or t
  misc_feature (851)..(860): n is a, c, g, or t
  misc_feature (1379)..(1379): n is a, c, g, or t
ttgggattataagcgtgaccaccatgcctggccccaatttaaaatgtggaattcagttggtgtccaagacttatcttgagactcttaaaatcatcagtctgtaactagaacaaatacagtcttagatttacccaagtgcctagatatcattttataatgattagaattgagtattgtgggtcccctaattctgtgggtgccttaagtgagaatttctaaatgattttcacattctaaatgactttgggttttgaactctccatctagtttacttctaaaatgggaacttgaggcaattcaggtatccaggcaaatctttgtatatatttttttgtgtacatgcacacatctcgaaatccatttccgtgtttaatgttagttgtttatgtgttagtattcctgtgtctactgttttgttgttgttaatatgggtaaagtgagccctgaaatacatgctaaacaagacatgaaatgcagaagggtacatagtgtttcaagtgcatggtagtttgatctgtgttttactttattgtgttttcttgagtgtaaagaaagaataaatcaaagttcttcatacccnnnnnnnnnnnnnnnnnnnnnnnnnnnnnnnnnnnnnnnnnnnnnnnnnnnnnnnnnnnncttnnccnacaaccccggacgaggagaaggataccaaacccatgcgaccggggccccgagccgaaaacggaaaaggacctgggcctgactctgtgcccgaacgagaccccggtaaagaactagcgtttgcatcccaacaaataaaaaccgcccgagcggaaacctagggtaccaaaacaaatccatatgcgagggcaaagcccggtgactgnnnnnnnnnnttgggagccccaccccgacatctaatttccagtctcgccccggcccctgtcaaccaattgtggggtattgtgtgaatccccttataggcgcccaggcgggaaacgctaactccatccgcaaagggtaataattgaactcggacatcgcccaacggaaattctgccccttggttggcacttggggattaaacccatggccccaaaaaaggggggccgggaggtaaaaataaccattcttggccacagggccacccaatttagaatctggggggaagagcggaacaactctgcgctccgggggtataagccccgcaataacccgaatattttttgattcctgccctttcaccccggtttaaagaggggaacaaaggtctttggtgatttttcaaccggggaaacaaaaacctttgtatcccatatacaaagttgtgtggggaattctctcccacgctagcacgcggaaaacgcgggccccgttgcgccctctctccaccctcccaaggacaaaaacgaganacgcgcttttctgggcgttttggggccccacaggggggaacaaaagacccgagag

SEQ ID NO: 311560 - DNA, 372 bp, Homo Sapiens
tgggaggagattgtataatatagtataatagtcttttgagcagttactctattttgtagaaattttttaaggtcttgggattttatttttctttacaaggaatattttgggttactttaggtgcagaaaagactgactcattttatcattcttctggtgggctggagttatatggagaaccaagacatactacgtatcgctcaagatcagatctggactatattaggtcccctttaccatttcagaataggtaagaatatgagaaaacctgcctggaattgttaaatgtattaatatttaacagagaaaaatggacatttttagggctttgacttctttgcattgagatagacatctttgttatatataatt

SEQ ID NO: 311561 - DNA, 1381 bp, Homo Sapiens
ttggtgaaaatggtgaagtcatttttatttcagtacttgacaaaataccccataaaattcaaaacttctaccattatacaaaaataggtctctacaagtgatattatctgtcttcatcaccagtagaatatattaggcaaaacatgtaacttcagtagccttataagaaaagtgcaggacacctcgagctacacattcagcagtattgtaatgcgtaaaagtttaatcttttcacccatttgataaatacacaaggtttataatttaatgttttaaattagcattccacaaatatacaggtaattcaataattattgtgcatgaatacatacacaatgcttatatatacaaattccagtttgttttcatgtgctggcaagggatttgtatacaatcataagctgtgttcatattggtcccattgaatattcacaatacaaaagcacaaaagagccattgatttacaaaaggaaatctatttaaaatcacttcaattaatgatgtttcaaaggattatcttctcatgccagcatgaaattgagtagttgaacctgactgtatagttccaagtcgtctttgcagtgcctctagccgagtgatataatctgttagggctctgtcaggatcgtaattctgaagctgagaacatgctaaagaaccaggattgaaatcagctggagtgcctgggtacctattctgaaatggtaaaggggacctaatatagtccagatctgatcttgagcgatacgtagtatgtcttggttctccatataactccagcccaccagaagaatgataaaatgagtcagtcttttctgcaccttgattcagtccaaagccatctctgttaatattgatggaaacagaacctgtgactcgatgccaccgtcgaaccaaaaatttcattctggaaattgcaatggatactctgacggccgaccgaaaccttggtgaagcctttgggcgattggtgatcacctctagatccgtgaaagctggctgcccccccatccgggcaagcagggccaaggtggcatcttcacattcctggaacccacccagtaacagcagcaggtatttcttctggtaaatgagagcctttcgaaaactttctgccctcaagtatttaccataaattctctttaaagtgacatgttcagaatcagggctcagagtttgaagtaaagagtcatttcttagttcagctttcagtttgtatacttcagcctctgcccttttcaaagatttctggagagtcaatttttctctgttccatacttctttttcagaggcaatgatggcttcaatgttggcaccaccattcaatgaaaacctggaagaattatctctaccagctcctgtctgtcgataccacctgacc

SEQ ID NO: 311562 - DNA, 403 bp, Homo Sapiens
  misc_feature (48)..(48): n is a, c, g, or t
  misc_feature (278)..(278): n is a, c, g, or t
  misc_feature (347)..(347): n is a, c, g, or t
agggaaaatgcaaaaattgaagcctctccccaagtccccaaccaagancgccctgggacatctacccaagtgccagtcggagccccaactcttgctttctctcaagctactcaagttgaacaggaccccacatatccaaacctgaagtcactgcgcttggagactaaagttttatcttcggtagggtaaacctagaagccagtccccgcctttctcttacgtcctccgagtccagcaaagccatacctgccaccctttcactgccttgctcgcagctncggctccaagcctgggatcagtcacagcgtcgtccagagacaggggagcaacactccgcccgcacttcncgcggcgctgatttgaagattgaataccggctaccgtcctactaccgtgtgcggaa

SEQ ID NO: 311563 - DNA, 1059 bp, Homo Sapiens
  misc_feature (489)..(498): n is a, c, g, or t
aaaagttcacatcaatttcaagcttttaaaaatgtatgtacacaagaaagcttcttttgcaatttatatgtttacaaatgttgccattagctaagctatattttggaatgtgatcaaacaatattgaatgtcaagtcttaacagcagggctggttctaaggaattccctctaagctaaatctgatcctttcatatgtggctactgctcttttaaactactgtatccctaaagggctaaaaggaagaaaatcctaacttaataagtgaaggcagcaaggcatagtatttgaatggctacctttcattttaactctacttcttaaattcacaattggatttgggtttgtttcaagttgttcacaatttactaacgaaatgtgcatctctcattcttcccccaaaagaaagaagtcatccactccagctacatataagtctccaatttctgtcttacaactaaacgtgaaaaccgaaaataccactcattgnnnnnnnnnntgtacagagaattggcaggctgcatgtttatgtgaaccttcagaaaacatggaaacacgcagccccaactcaccaggaaaatcaacacttgtgatcaaactattttgtgacattttatgtcttttatacatttcacttcatatccagtattccagttttgcaccggcttgcctgtatcaaccccaaatcgcctgagagcaatctagtactgtagcagaaccgtttcaacatgaagagttctgctcatcgcctgtggcatggtcttcgaaacacctgaatcaaacattgattcccctccccctgctatttaaaaccgagggacgtcaggcttgggttgtaggtaaagaaaagccacagtaatcaaacaagcaaccaaaatacccgaacacggaacacgctaagaacaaaggaaacacaagagtgtgaacaggaaatgaagcaactctacacccataaataccttctggggccgccaacataggtaaaagtaaaggtggagtctgagtacctgaaatctgaaacagaaagtcctgtcaaaagctacccctggagtggatttgt

SEQ ID NO: 311564 - DNA, 486 bp, Homo Sapiens
  misc_feature (159)..(159): n is a, c, g, or t
acgcagtggcacgcgccctgtaaacccccagctactcaagaggctgaggcacgaagaatcaccttgaaccccgggagggagaggttgccagtgagcccaagaatcgtacccactgcactcccagcccgggtgacagagtgagactctgtcctcccaaanaaaaactttgccttgtatattatttttgccttacagtggatcattctagtaggaaaggacaataagattttttatcaaaatgtgtcatgccagtaagagatgttatattcttttctcatttcttccccacccaaaaataagctaccatatagcttataagtctcaaatttttgccttttactaaaatgtgattgtttctgttcattgtgtatgcttcatcacctatattaggcaaattccattttttcccttgcgctaaggtaaagatttaattaaataattttggcctctcatagttttctctctctttaaagagaataaatagag

SEQ ID NO: 311565 - DNA, 815 bp, Homo Sapiens
  misc_feature (630)..(630): n is a, c, g, or t
  misc_feature (713)..(713): n is a, c, g, or t
ggaaccaagcagcagatgatgatgtaaaatgtcttacaagagatttggaccaggcaagcatggaagcagtagtttcacttctagctggtctccctctgcagcctgaagaaggagatggtgtggaattgatggaagccaaatcacagttatttcttaaatacttcacattatttatgaaccttttgaatgactgcagtgaagttgaagatgaaagtgcgcaaacaggtggcaggaaacgtggcatgtctcggaggctggcatcactgaggcactgtacggtccttgcaatgtcaaacttactcaatgccaacgtagacagtggtctcatgcactccataggcttaggttaccacaaggatctccagacaagagctacatttatggaagttctgacaaaaatccttcaacaaggcacagaatttgacacacttgcagaaacagtattggcctgatcggtttgagagattggtggaactggtcacaatgatgggtgatcaaggagaactccctatagcgatggctctggccaatgtggttccttgttcctcagtgggatgaaactagctcgagttcttgggttactctgtttgattctcgggatttactctaccaactgctctgcaacatgtnttctaaagaagtagaattggcagactccatgcagactctcttccgaggcaacagcttggccagtaaaataatgacattctgtntcaaggtatatggtgctacctatctacaaaaactcctggatcctttattacgaattgtgatcacatcctctgattggcaacatgttagctttgaagtggatc

SEQ ID NO: 311566 - DNA, 1000 bp, Homo Sapiens
  misc_feature (124)..(132): n is a, c, g, or t
  misc_feature (914)..(914): n is a, c, g, or t
gaataattgtaccaattttaagagcattccccccacctgtccccacacacccaaacaaaatgtggtggtgttgccttcaaaaaagagaagttttgtgtcattaacatgacagaagaactttttnnnnnnnnntaactgtcaactattctatttgcatttaggagactgttaatctatgctagattgtcattttccctccttctcccacagaagtttactggtagtccatgtcatggctcgtagctatccctctaaccataccatggaaatgcaggcacccaatgtgaaaaggagcacttgctgggcatcactgacaccgctcatgttttacacatagttgagtaatcagcatatctagaattatcttgcattgcctaaatcatatgtatatagtgaatgttatataatatacctggcaggtctgttttaatttaattgaataaagatacaaatactttgtttggctggcatatattaaattattatatgaagaaaatggttgattcttatttcttttagttgaaaaacacacaaaaacactaaacataaaagcacgttttgtggtacgccttggtttctagttctggatatatgtattaatcttaaagaatgatctaaagtcacagcttggcatataggaagatacttggttagaataggatgggtatcttttaagcagaactttgtaagtaagttttaagttcctaagcaacaagtatacagtttgttaaggtttatattgaacattctaccttgcttgaggttttctgctttatcaaaactattcataatagaacatctacctgcatcattactatcataatatggattattcataaagcgtatgtactgttcttctgagtctaacaaatactgtgactgaaatgcatgcaccttgttgaagagaaaacatnttattaatctccactataatgtctgtgaaatgtgcagtattccatccttagagagttatctggttcatcagcatctgcatatatcc

SEQ ID NO: 311567 - DNA, 634 bp, Homo Sapiens
ccacaccatgattcctgagtaccagcaccttacaactgggtcccagaaccttctgcagttgaattctctcctcctgttcttcaagtgaccgttggtagtcataataggcaacatctcccagaagaagagactcttgagaaattggaaggatcccacatttcatggaggatacagctgctgttgcaagggtatggatgtgtatcacacacttaacatcaggacgtgttgaatagattgcagcatggggaactgaatcctgtatggtcaattttcaaattggtacttccctggtcaaccacttctcctattatattgactttcacccaaattggaggctgtagcttcagaaaaagataggcctctgggaattattataatgtggtcttgctccttacttattcttactgagatataggtatttgccaggtgtgcccatccaaacaagtctacaagtctgtacaggctggcaagtttacagcgagtaagtttttctcccttcacatatgaggatgtatctgcaccaggaaggtcattgataggtgtgaccatgccaagactgagaggaggtgaagaaaaacccggagaaagaattggccatgatgtaatctgcaatctgctgtaatgctagtaatcc

SEQ ID NO: 311568 - DNA, 547 bp, Homo Sapiens
agcatgttcccaacatgacaactcccatgcctctgcacacagtggactatccagggacatcctcacaccgcggacagtgggagcccctcagggagtgcagatcagggtgctgcaggaaaaatgggggcgctggctggtgcggaaccagcaaagccatccaagggagagctgtcatctgtctccaggatagccgcacagcccacgaggcccgccagtctctttcccgaggacacgcgaaacccgaggggcccaccccggcagaggggacggaccactgcaccagcggctgggcctgacgtccagccggctcttcccactcccctcggggcctcagtttccccttttgtcggggaggaggtacacagcaccggccttgggaggccaccaggggttcttgggaagaccactcctcgggccctgcccctcattgactcatccggagcgccaggacggatggcggcgggtacaggggtaaccgcgcggaggaggctgaggggcaggccgcagccacaagacgctctctctagtgctcagcgcccgcggaaat

SEQ ID NO: 311569 - DNA, 690 bp, Homo Sapiens
aagtagctgtaaaacctccattttacagaccagttggctgaggtttaaatggaggacgctcccagggccccagacgcaaatgtccagactcctttgccaggaccttgtactaagccccttccctacgcttttccctgcctaggcctcgtgggctgtgcggctatcctggagacagatgacagctctcccttggatggctttgctggttccgcaccagccagcgcccccatttttcctgcagcaccctgatctgcactccctgaggggctcccactgtccgcggtttgaggatgtccctgggatagtccactgtgtgcagaggcatgggagttgtcatgttgggaacatgctagacctcagtatccttgagggatgctgccttggggtcttgggaaactgttagaggaaaccccaagaggtgcaggcactggagcctttcaggacaatgacctggggtcccagctcccctggaggggcctcctcatgattgtttgggggttgatcacagaccaagagtgacgagtgatgtcaccctgtgactcatggccggaccttcttgcccctattgtctcagcacaacattattcgacttttccctcagcgtgggtgggcagaggaaaagccctgtggctctggggacttgggatccagagttgaagacccttcagctggctctgccctgccagtgcc

SEQ ID NO: 311570 - DNA, 539 bp, Homo Sapiens
  misc_feature (22)..(22): n is a, c, g, or t
gcatgtttcaagatttattgangtgggtgagaggacaatggtccatagcacagaaaaagtcaacaggaacaaattcttggttttcagaagtcacaccaggaggaggcgggaggacacggaggatggccactggatggcctggcctagatggaagaaaacctgtcttcctgggccatggcactctgtggcactggcagggcagagcagcctgaagggtcttcaactctggatcccaagtccccagagccacagggcttttcctctgcccacccacgctgagggaaaagtcgaataatgttgtgctgagacaataggggcaagaaggtccggccatgagtcacagggtgacatcactcgtcactcttggtctgtgatcaacccccaaacaatctaaaagagaagacaaatgaagccagcgacctggaatttccacctcggaaacacaggccaacttaacctcttggcattcacttaccatgaggaggcccctccaggggagctgggaccccaggtcattgtcctgagaggctcagtgcctg

SEQ ID NO: 311571 - DNA, 1129 bp, Homo Sapiens
  misc_feature (774)..(782): n is a, c, g, or t
gaagccagtaaagtgcctgagtatattaagaaagctgccaaaaaagcagcagaatttaatagcaacttaaaccgggaacgcatggaagaaagaagagcttattttgacttgcagacacatgttatccaggtacctcaagggaagtacaaagttttgccaacagagcgaacaaaggtcagttcttacccagtggctctcatccccggacagttccaggaatattataagaggtactcaccagatgagctgcggtatctgccattaaacacagccctgtatgagccccctctggatcctgagctccctgctctagacagtgatggtgattcagatgatggcgaagatggtcgaggtgatgagaaacggaaaaataaaggcacttcggacagctcctctggcaatgtatctgaaggggaaagccctcctgacagccaggaggactctttccagggaagacagaaatcaaaagacaaagctgccactccaagaaaagatggtcccaaacgttctgtactgtccaagtcagttcctgggtacaaggtagaagaaaaaagcccctgactcagcttctttactgaccagcctctccctgaaatattttaacttgactttctcgattgtggagcttctgcctgctgtacctcactagctgttcttctatggtgtgccctttgtccgctgctttcttttttgctttatttccttggtggcttttctgtcacttttggctatggtttaccttctgttttctgtatatgtacaatttataagtcnnnnnnnnnctttgaaagaataaccaggcaagtatgggtttttaaaacattatttcataggcagaagtttatattttctttccttggagtaaagatcataattatttggcattttaaatgccccagcatttagtgtagctaaagctgctgagctataaagtatgagtggatatactgttagactaagttgcattttttttagtgcctttcattaagaaagatctgggtttaatctaaggattatttgatccatatgctaaatttagctgactctgggatagaaaataataaaacctgttacttacattgtagtgatttttagcataaccttgcgtaagagcctatatgattctatg

SEQ ID NO: 311572 - DNA, 1234 bp, Homo Sapiens
  misc_feature (564)..(564): n is a, c, g, or t
  misc_feature (1157)..(1157): n is a, c, g, or t
  misc_feature (1199)..(1199): n is a, c, g, or t
gggtaagcgtagcttttaacagaaataactgcagattttaagctcataatttgcaaaaaaaatcttttattggcatgaaaataatgttgtcaatggcaccaaatattccacttaaatgcatatacagtattagagtcaaaaactattttatccctctttgctgtttttcccccttctgcccactttcctgggtgttgggggggcccgcttacaacagtcacaaatccagcgacctaggaaaaaaattgttagtatagaatgaaaaattatctttactggactgaattttaagcccatctaaactcttctgccttagctatcattaatgatattcctctctggattttgtggtgagaaagggcactatgagttcccttaatttaaggaaaaaatgtaaacttaatcaatggtaatcaatgccatgcaaaattcattgcaagtcaagggggatgggagagatgcaatgccatacggtgatacggacctttaagaaagaacaatctttcctgaaattcaaacactatcatacttcaaaaggtcaaaacccattccggaatttggctnttttaagactttttctctcctgctctgtgtgtcttaacagcattctttcaagtcctggtgtactctgctgacagcactttaaaactttaacagcacaatgataacttgtactacatacttgatctgaattactacagaaaaataattatgttgcttgcttaatgattcccaggaaacttcgttgtaggcatatattttataagagtattatacagtgttaactatgcaagtaagttctaaaattacacaattatctgtgtaatgttttagtccaattactgtgatttattcaactctgttctaaagttatctggaattgtcatgctgcctcaatttacagaaatctataatagatttctatagaaatgtataaagacgtagcagtcattttgttgtttctaaatagataacatataaaaataaaggctttgttactttagtatttcagtagaaaaacaccagctcattctatagaactatacttccaaaacttagcaggggcattctggcctttcacttatcctttagttggaattgtctagggatgaaaagctggtggacatgacctgtataatcacagctttggtcatatntgcacataagagtccacaagctcttcatgtcatgatagcgtntatgcagccttttggagtgctgggagagtctcatc

SEQ ID NO: 311573 - DNA, 1389 bp, Homo Sapiens
taatttgcaaaaaaaatcttttattggcatgaaaataatgttgtaaatggcaccaaatattccacttaaatgcatatacagtattagagtcaaaaactattttatccctctttgctgtttttcccccttctgcccactttcctgggtgttgggggggcccgctgacaacagtcacaaatccagcgacctgatggaatagcaccaaggcccacacaaaaagtatgataacctctgtcacacatatcacagaacatcatttcttcttcatggtggggttgtccacatataatgcatgttttacattccatacactgccatgggtaggtcttaatcatagaaacaagctccattgtcatatccaggcaagaaggatggccactattctcacattgggagcagtgtataagtgattcagcctttcctttcttgttggactccttacccttcagacaaattccacatatagcatttggaatgacctttggcttgtacccaggaactgacttggacagtacagaacgtttgggaccatcttttcttggagtggcagctttgtcttttgatttctgtcttccctggaaagagtcctcctggctgtcaggagggctttccccttcagatacattgccagaggagctgtccgaagtgcctttatttttccgtttctcatcacctcgaccatcttcgccatcatctgaatcaccatcactgtctagagcagggagctcaggatccagagggggctcatacagggctgtgtttaatggcagataccgcagctcatctggtgagtacctcttataatattcctggaactgtccggggatgagagccactgggtaagaactgacctttgttcgctctgttggcaaaactttgtacttcccttgaggtacctggataacatgtgtctgcaagtcaaaataagctcttctttcttccatgcgttcccggtttaagttgctattaaattctgctgctttttttggcagctttctttatatactcaggcactttactggcttcaactttctgagtattctgttgttgcatttgggaatactctttataatggtctgtaattcgttgacgttctttttcttgtagaataacagaatactcagcatgtttggctggatattcttttatcattaaatcaatcacttcatcactgcgcaatgctgttaagcctagagtgcactgagtttcagtaatgacatttagctctctcaggtagagtttctccttgtgagacaaatctcgtcgctctaaatctggatatttccttttaaaggaggtcacacccaaatattcactgacttgttcttgaagcatatagtattctcctgtttcatcaggtggccatttgtactctatcaagttttctgc

SEQ ID NO: 311574 - DNA, 439 bp, Homo Sapiens
tctttttacgtccaaactcatcatattcaccatcagattcttctctttctatatattcaacattttctctttcattaaaaccaccaccatatcctgttctttcttctaatttagcatactttggagtattacacatattacactctgatcttctggcccaattcacattgctgcaagttttacattgccagtcattagcactaaataggcctcggctcttttctgcaagtgtctttcctatttcagtgcccccagctttcatcatcttggcctcagttgttttctcccgaccacatcgattacagctggttcttctagcaaagtttacatttccacattttttgtcagggcaaatccagtccccgtcactgactcggaaattcttggtcgacatcttgaacgccaccagcacagccacccgcagctatgtcttcacccc

SEQ ID NO: 311575 - DNA, 636 bp, Homo Sapiens
  misc_feature (598)..(598): n is a, c, g, or t
  misc_feature (613)..(613): n is a, c, g, or t
tgggaagctaactataaaatagtatatcttcacctgtatataatttggagaaactatctttttccctccagcgaaaatgttagtggagaaaaattggtccccaaagttgcatacaaagagttattaaacatgtgagggaggttgtcttcagctgattgcaggggatatggatggatctggagatatgctcataatatatttaaatcccagtacatgggtgagagtcaagtcttcagcactatggcaaacctgctaagattcaggcccctgctctctccactgtctctggctacttggataggtgcttagttctcccacataacatttcaagatctgtttagaataacccctcccaatcttatgcagaaaagcatccatatgctgtttttaaggatatagagactatgttgtagtctccttcgataatacattacctatttttaataactttaagcctcagaaatttcttaggttaatatctaatctaattttctctgtaaggcagttctcaaccttagcactattgacattctgggctggatatcctttgctggtggggagcaggggggacttgcctgtgcattatgagatagatgtntggcagcatgcctgngctctactcactagatgccagta

SEQ ID NO: 311576 - DNA, 444 bp, Homo Sapiens
cataacctttaaggcaatctacctaaaatgcttacagtatggtgaagccttattcagaaatatttacttaaaccataggtatagaatagctaccatttctgaataataatgtaaaatgaaaacagaaacagctttcaaatttgaagagaaaagtttccctgaccctagtcagctaacaaagcctatttctaacagtgaacttcctgaactcaagcagctgctcatgaagctttaagagttcacaggcatttcatatttcaatagttgttgaaacatggaagataaaacactgagaggatatttatcaaacacaaatttatatcaagattaactttttcaaccagcttacaagcagacttttccctttctttgttaaaaaatgaatggtatgaaactatatgttaaagatgtttctataataccttacatttacatagcgcttta

SEQ ID NO: 311577 - DNA, 503 bp, Homo Sapiens
agataattgtagtaaattcaaatattatgtttatttaatagtactaacattgatatgctggttaattatgattaggagcactaataaagcacaaatcagggattcccaaaaagaatgttgaaagggcagtcagcttttcctgtgccagaaatcaaagtcatagcagatttggggcaaatatgtcaaagtcaaacttacgcacatcactactgagaagacaaagatgaatgtgtgacagtttcctgcccccaagaatctttaagcattgtgaaggaagattaatatagccaaataactagagtgatcagttctaccagagaggaccagttttggaagccagaggtcaccacaaatatacagaaacaaaatgatgtttgaattaaatctttaaaagtttctcttataaatttaccaagccacatattgggaatggtaccccaggcagaaggagtagagtaagcaagccagaaaggaaatactatggtgcttttgagtaactgcag

SEQ ID NO: 311578 - DNA, 673 bp, Homo Sapiens
ccggctgcaggaattcggcacgagccggcaccaccatgtcgaaggtttcctttaagatcacgctgacgtcggacccacggctgccgtacaaagtactcagtgttcctgaaagtacacctttcacagcagtcttaaagtttgcagcagaagaatttaaagttcctgctgcaacaagtgcaattattaccaatgatggaataggaataaatcctgcacagactgctggtgagtatttgaaaactcatagaggagtgggtggggttatatatgtcaattgacactgaatagttaagctattctaattacacttgacagtattttaacataatggagctgttttttagggattatataccagtctttacctgtgtgtctgagtaataagttgtttcattgtgtatattgattgtagatgtttttggctacaagtaacagaaaacctaatagtggcttaagcattaagagtatttattatatataacaagaagtctgtagataagattgctttctaattggagtattttttgacctacctcttaaggtagttgtgagatagtgactgtaaagtgcttcatagcttggattatttatagaaagcattcattaagtgctattattttttttaaatatagtcatttacatttcaaggggctgagtctacattcagatcttc

SEQ ID NO: 311579 - DNA, 636 bp, Homo Sapiens
gacagcattatgtctcatgtatagattgatcagcaggaacatctgaatgtacactcagccccatgtaatgtggatccataatttccaaatgtcatagctcttatagatgctgtctatctatatccatgctatgagtcgctgtacagtcgagatctcgcaagttctataacaggtaggtcataccatgctccatgtatcgagccatctaatccccaggcttcatgctatacataataactgctagtaacgcgtaaacagctattagatcttctgagactagtagccaaacacatctactatcaagatacacaatggatctacatatcattcgtctcactaggtaaagactggtatataatccctaatagacagctccattatggttagaatactgtcaagtgtaattagaatagcttcatatactcaccatcagtctgtgcaggatttattcctattccatcattggtaataattgcacttgttgcagcagtaactttaaattcttctgctgcaaactttaagactgctgtgcaaggtgtgctttcaggatctctgagtactttgtacgtcatccgtgggtccgacgtcagcgtgatcttaaaggcaaccttggacatggtggtgccggctcgtgcc

SEQ ID NO: 311580 - DNA, 1248 bp, Homo Sapiens
  misc_feature (581)..(591): n is a, c, g, or t
  misc_feature (1114)..(1114): n is a, c, g, or t
  misc_feature (1130)..(1130): n is a, c, g, or t
  misc_feature (1136)..(1136): n is a, c, g, or t
  misc_feature (1149)..(1149): n is a, c, g, or t
  misc_feature (1175)..(1175): n is a, c, g, or t
  misc_feature (1192)..(1192): n is a, c, g, or t
  misc_feature (1207)..(1207): n is a, c, g, or t
gggggggcggtccccagcacactagaggaagtcgtgctacccccgcggagttgtcgtgtgttctggattcattccggcaccaccatgtcgaaggtttcctttaagatcacgctgacgtcggacccacggctgccgtacaaagtactcagtgttcctgaaagtacacctttcacagcagtcttaaagtttgcagcagaagaatttaaagttcctgctgcaacaagtgcaattattaccaatgatggaataggaataaatcctgcacagactgctggaaatgtttttctaaaacatggttcagaactgcggattattcctagagatcgtgttggaagttgttaatatctgctacttggaacatacgattgcctttcagaataaatattggtattttttgttgttgtttgaaatcaggcatttaacatactatggtccatactcttcctatgaagagggaatgcgtatgaattaaggctactactgtcacagaagatcatagtctttgatgctacctcacaacacaaacaggtagttcgttgggggctgaattagccaactgttaactggaagcttttgataannnnnnnnnnnagaacaatttggaacattaaaatttactgaatcgtatatattcatctgagataaaaatataaaaagaattatggaccctggatggcaatttgcttgatagcatctgatttgcagactcataatttgatttttaattaaatatataggttatgatgaagtgaatagacatatcagtgaacagttaactatattaaatttttatcatttactttttttaagattcagacctcagttatataaatttcagtttaatatcaaccaaaaaattaaaattttaatctaacccttatgtgtataaattggtgtcccataccagcttttaatggtggacctatagaatccagtacttttaatggtgggaatttacagtagaagcatcctttgctgagttatacattcctttatcaatctcttttgatacaacatttaaaacaagtagcttcaagaaaccactggtgttttgaggatagtatttctaaatagcattcaggaacagagtattattgcacagatctgaagatcnaaaaaaagctccaggnaatacngatcggaagtgcngatgagttatatttattggaaacccnacttttaagggagtgcnaagatcagtcacccntgtggataagaagcccggaaagggaagatgggggagcccga

SEQ ID NO: 311581 - DNA, 329 bp, Homo Sapiens
tcatttactttaagattcagacctcagttatataaatttcagtttaatatcaaccaaaaaattaaaattttaatctaacccttatgtgtataaattggtgtcccataccagcttttaatggtggacctatagaatccagtacttttaatgggtgggaatttacagtaggaaggcatcctttgctgagttatacattcctttatcaatctcttttgatacaacatttaaaacaaggtaggcttcaaggaaaccactgggtgttttgagggataggtatttctaaataggccttcaggggacaggggtattattggcacagatctggaggg

SEQ ID NO: 311582 - DNA, 712 bp, Homo Sapiens
  misc_feature (144)..(157): n is a, c, g, or t
  misc_feature (215)..(272): n is a, c, g, or t
  misc_feature (510)..(527): n is a, c, g, or t
  misc_feature (635)..(635): n is a, c, g, or t
cacatagtaactgtttcctgcaataaaaatcatgtgctgcataggacttcagaagtgcatcactacactgaatttcagagcactccctaatttctcttcttttgcaaagatacatttacctttaaactgttaatgtgtgtgttnnnnnnnnnnnnnnaaattcatttaaatagtcaatctgatccaaagtatatttttactgagaatatatctgnnnnnnnnnnnnnnnnnnnnnnnnnnnnnnnnnnnnnnnnnnnnnnnnnnnnnnnnnnggtgttttcaactttaaaatgcagtttagaagaatgaggatattgatagaactgttaatgtgtttattgtgtgacgtcaatagtaacaggacatttatgttgaatgatgttatgttataaaaatgccatggagcaagataaaattatatgtatagttatcactaaatcaataggcaaaatggaccaagatgttttgttccaggtcatttctacatggattcatttattattctgtgcnnnnnnnnnnnnnnnnnngccaaagtacctatctattacaaaatatgactgctgtctaccccatttaaacaaagagggaaattaagggtaatatgtaaagctgaatggcaatgttgtgattcactngtgatagtgccatggaaaggattacaggggtaattctgtcctctcatgcccacgtaaatggtgaaagggatcactag

SEQ ID NO: 311583 - DNA, 1320 bp, Homo Sapiens
ttgggaccaatttcccctcttaaaggcccgcgggagccccatttccttttgggggaagggtttccattttttcccgggccaccccaaggagaagggtttgtgctccctttcagggatactttaatggttcccttggttaaaaattccaatattccccattagaaggcgaattttaatgggttgagggagaaagcaatccccatgactcccatggtaccaagatattcctgcacccatcatgaaaatcccaacacccctaaatagcgaagaaaatatagcgcatatttggaaaatccgtacggatgagaagggatctggtgtttgaacagacttactgatgcccaatgctagtaaaccctgattacaagtatcagataatgagtgtatagcttctgagaacatacttgctgaaccggtataaatccaggcaagaaatttaaagaagcagtttaatccattgatgcaaattgcaaccatcaccacttttcctggtcccttaaaaaacactgatgctgttctggagcgtggcttggtatttcccaagaaatctctgtattctcttaatattttttggtttctaaatagcctttctctgtattctatttctgcttccttacgcaattttttctctctggcaagagcttcagggcttccccaaacttccaaagattttgcttccacatctgatctcaagtatacagtaaaagactcagtatcttcatggggacttcgtcgtctgatttttcgaagttgttctagatcactggatttgaggcagaactcatttatcgctctgactccagtgatgaaattattctgagtgtactttgatccatactcccttttcttaaggactgctttaactcttacttggagaggttcttgcttaagtggagctttgagttctgcgcctataccttctgctgtttcaaatgatggtactttttccactctgagtgtttgtgatccctgtccttctttctgaacatttgtggagtacaactttacttgactcagggtaccaatatatggatgactacagggaaccacgtttgaaaagcttccaaatgtcactaaattctgccactcctggcggtcgctgggattacaggccgccgccctgcatcgcagacggagccggcacagggaggaccagctacatctgtgggccgcggcggcggccaagcccggtaacatcctggtggggcagaggcccctcctcggacaccgccttctgcttccgcgccgccaccggtaccaactgactccatagactggacatcagcgaacaccgatggcttcgccgccacaagctgcctc

SEQ ID NO: 311584 - DNA, 656 bp, Homo Sapiens
agcacagtgggttctgtcagaaggggtgcaggttgccagtctctcctggtcagcctgggtaccatggacaggctggttgggagcaaggggtaccccaccttccttcccaggaaccatcagctgggatggtggggaggtggaaaaagaggtggtacacacttcttgagagtcttctacagacgggtatattactccagtgtcctcaccagcagttctgtaattgcaggggtgcatgggagaggagctgggatagggacggtccacaaagtgatcaataataatccccgtggtaggtggggtcctctcaaattgcctggtagacatgaatgccaagttaattctgtaagcacaagaaagagtgatggtgcccccaggggtgcccactgtcccaacacgagctgtctggaagccttctcctaagccactcagctgaacttctccaaaatatatcctgtataatatgacatattcatgcccttgtttcctggagagcctataggctggtgtcaccctagttatagcaagaagggacttcagcagcaatgacagtctgttgtacaccgtgtaggaaactttgatttctttatcacacttttcattcatttcaagacaccatatttccagctccatggaatctccctcagaagtcttataat

SEQ ID NO: 311585 - DNA, 511 bp, Homo Sapiens
ccagtccactgtttctagaaaggatgataggaacaccaccacaggcaccagcacctaaaacactatctccttgtgcattaaagacaattttctcctggggaagagaaaatttcccagttcctgtggagcacacatagacagcactttcgttatacagataggcagtctggtttgaaaagtttgggaccgtcaactgacacaatatcaggtcttcagactgaaaaggtggattatattgagtgacttctacagtaactgcatctgacatttggcaaccattatcttctattgttatcagagagtaatagatgagacatggattgtctgctgagtgccatgctgctgccaaaatcaccagcccatctcggttttgcttcaagtccaaatatcgaatgttgagtccttctttcatagcttcatacttactttcagatccccaaatagcatcggtaatgttttccttcagggctctatttatatcccaactgtatgcatgcttttctgccgaatc

SEQ ID NO: 311586 - DNA, 793 bp, Homo Sapiens
gcaaaaaaaagttcacagaagtacctgccaaatgtgccaactcgactactatgaactaatttacttttgagaaacatgctatttcttatatgctactgacagtgcctataaaaatggtgcacattaactggctgttttattttctccccaatcttaatatctaatatccacagactgagattagagcaccaacgtatacaatgtaacttcatactagagttagaaggggatacaaagtgtagaaatcataatcttctccataaagttcctgtcaccttggaattaacctcccctttacatagtctcattgttcaccttgttcacatcttcatgggttcaggctcaggtctctgtggtcgcacagtgtgtctttttaccaaaaggaacacctcatgcacttttccaaaaggagaaaagtaaaggtttgaatgggatttttagttctcggcatttttgaacagaaataatcaggtattaagttggctcaaagatccccacaagctttcataggagaaacatctaattcataaccaagagtttatgttattaagtaagctttcctttaacaggatcaatgaatgaagagtttaaatactcgctctaatccccattcagtcatctggtatactctctgtgagatatactctcagtcatctggtatactctctgcgtatgccagatgattaaatggaaattattgcaccactaaacaccagtactgcaaactcttatttaaaaaatcaacacctaggacagaaaaaaatgatcctaggctgggcgcggcggctcacac

SEQ ID NO: 311587 - DNA, 919 bp, Homo Sapiens
tgtgctagcacagtggtaaccactgtgaaaataagaatgacaaggcagttcttgtccgcaaaaaccttaaactccaatgaagataatgaattcatatatcagtcattaaaagtaacgtgctaagtgctgtgactgaaaaataacaaaggttattatgggagcagtaagagtcatctaagctatttaaaaataattgccagttgcacttccaataaaacagtatttttggttaatcaattcattagtattagaaaatcagttcaaaattatattaacttgtgcacttataaggggaaaaagtgcacatatctgtaaatcaaatataagctaaaatataaatcaaacactattacattctaatttgttaacaatatcttagctgaattaggcaagttatcagactttacagttattaaaatgcacaagatatcagttcaatttcttaactatattagctctaaagtgaaagaatattgatggacaggtttaacatctgggtatcgttttcacaaaattaatattctgaaaatctgaagtcgacataataagtggataaactgaatatttagttttacctaggttacatattacttaggggtggtttaatttaacactagaaacttaagtcatatgtttaaaacttaaatcattcttacacccaaaattgaaaccacaaaaccacaaaaccatcagtgtcggagtaattattatatgagctaatatttaacaaattaatcattaagaaaaagtttcatcatattggtgatatttatacttgataaagtagaatagaaattgacaaccaagattaataattatgctcggatggcaagtattctaagttacaaaaaatactaaaggaattacaataagcccgtccaagaaaaacactactatatacactactgtgccattcatc

SEQ ID NO: 311588 - DNA, 507 bp, Homo Sapiens
  misc_feature (120)..(170): n is a, c, g, or t
  misc_feature (256)..(256): n is a, c, g, or t
gttgcataatacttgtagataaactgctccaactgttggacaaaataaagaggggattgtgccagaccttgtgttttctgattcgaactttgccaaggcctggaacgctgaagaataatnnnnnnnnnnnnnnnnnnnnnnnnnnnnnnnnnnnnnnnnnnnnnnnnnnnccaaaaagcattaagaggtttttgtttgtctgtttcctttatcctcttggtaaaattttagcatatttaacatgattaagatttanatgtttggggtgatacaaaaaacaagaaaaatcaggtgtgttattttactaaatattaaaaatatgaaaattatagttagcattaatttcaatattatgctataagcacagttttctcccttctgtcttaaaatacataaaattttgactctgaaattgtgcagtacaaaaatgttgaaaatagaaataatccacaaaatctaatttatagcactgttcttccacacttacccaacttcacacatttgtgg

SEQ ID NO: 311589 - DNA, 739 bp, Homo Sapiens
  misc_feature (385)..(576): n is a, c, g, or t
  misc_feature (653)..(653): n is a, c, g, or t
  misc_feature (670)..(670): n is a, c, g, or t
  misc_feature (709)..(709): n is a, c, g, or t
tagagtgcaatctcagtcttcatctttttcacccatcagaatttgtctcaggattacttggtcttttctcagtcctcaagcgagaacttgcttttctttgttaatgtgactttcattactgagtacccacgtatttggagtatgagaaggtgggttatttctcatactctgtccctctctttttcattgaatgtaagagtacattttaatgttgcttcagtgattgtataatgtaaaattgtttctttttaataagaaactttgctattatttcttcaattgttgatcagaattttttaaagcagaatttgtcaaaagggtcatttttttgtctaccccttttacacttttcagattctcaaagtgtctcatctcaacttttaannnnnnnnnnnnnnnnnnnnnnnnnnnnnnnnnnnnnnnnnnnnnnnnnnnnnnnnnnnnnnnnnnnnnnnnnnnnnnnnnnnnnnnnnnnnnnnnnnnnnnnnnnnnnnnnnnnnnnnnnnnnnnnnnnnnnnnnnnnnnnnnnnnnnnnnnnnnnnnnnnnnnnnnnnnnnnnnnnnnnnnnnnnnnnnncttctcttaaaagtaaaaattaagaaaatctcaatctctttgctgtattccagtgattaatttgaacatagggaggnttttacagaagaaattntaccaaaaaatagagactgcaagagatgatacagattgnttaaaaagcagaattcactcaccactgagc

SEQ ID NO: 311590 - DNA, 479 bp, Homo Sapiens
gggtaaaaggacaaagtggcagagagcctaaatgcagtttcagtttaaaaacttcagtttaaaaacttgtattttctaagaaaagggcattaatgttcttgaaatggaaagcctaggttaatgttgggcacatctgatgtacttgattggttcagatacagctctaccacttgttgtctaatatgagattatgaacttactaggaacttgagggataggaaagaggaaggaaatacaaggaggcacaatattaaatgtcattgatcagttcacaggaaaacagtttggtttgaggctatgcacagtctccttataggccccagcttgaaggccccagaactcaatgacacaatgccccttcagggtgaatcatggcaatcaaatcaggacaatttaattgttatgaattctgggtgaggaggcatatctgctggcactgtgatctcctgcagcaaaaaagagaggttttattggttttg

SEQ ID NO: 311591 - DNA, 1257 bp, Homo Sapiens
  misc_feature (1039)..(1039): n is a, c, g, or t
  misc_feature (1050)..(1050): n is a, c, g, or t
  misc_feature (1056)..(1071): n is a, c, g, or t
caagtcaggagaacgggcagaggggcccccggaacatcgtcggccgaatcacgatgagatcagggggggttaatcgccaaccgtcacctctccccatcggtgcttgtggctttccctcaatgaagaaagtctccacttcaggccctccctttaaatagaccggtctagagccaagctgagccgttcttgcccgtgaccctaagccaccttctggtggggtacatcccggcccctcctcaggtgttctgaccaactctctgagaagagtaaacgcccagtgacccctagaacagctgagaaacctgagctggtccccgtccctttccttggaatgacagaatctggagtgatttccttgtttcttacttaaaacaagcccagcacacgatggctcacacaagcctctggctggagaagctgccctcccggaggctgcgcaggccctttggaccttggtcagccctccacccagcctcacctggacctgcccccgccgtctgaagacaaacgagactgatgcctactgcttagctcaggccctcctgtcctgacaacctgggtctgctgttgggagtgaagcaaaggaggaaaaggacaaactcccagtggcctcacttggggaccacacacgggtccactccctccatcaccaagtggtgttcacgatgagctgtgtgggaggtggagacaggtccagagaaagcagcaggctccggaagaggaaggaaggaaaatgacaggttacagaaggcttcagggaaagaaatgtgtgaaaaacacagcacccctgcagggcagggtatggagccccagaagcagagcccacggggcctgggatgggcctgtggtatgtcagctcaccccatctgggccaacctgggagccaccagcagccatctccatgatttgtctctggtgcccagcacatccactggctttagaggagcccaggacagggaccctgtgtgattctcatgctaaaactgtcatcaacttcatgggctgcctgtaagcgccctgggctcatcaagccaggagntggaacccaantatgannnnnnnnnnnnnnnnaacctgcctgctgctctgagcaccccatcgcttcccaggcggggagccaggcaccagaatgcttgcaatcggtgccctcaagaacctccttttctttttgcaaataacctcaagggtgaaccagctgaggaatcaggaggggatgcattcttaagagtcacctcttaaggtactgcagtgacgtat

SEQ ID NO: 311592 - DNA, 663 bp, Homo Sapiens
  misc_feature (99)..(282): n is a, c, g, or t
gaacattgtaaagttttgcgaagaaagtataagatcctgtgaaaggcgagagcctttgtccaggaatgtgactttgttcttatatttatttaaagcaannnnnnnnnnnnnnnnnnnnnnnnnnnnnnnnnnnnnnnnnnnnnnnnnnnnnnnnnnnnnnnnnnnnnnnnnnnnnnnnnnnnnnnnnnnnnnnnnnnnnnnnnnnnnnnnnnnnnnnnnnnnnnnnnnnnnnnnnnnnnnnnnnnnnnnnnnnnnnnnnnnnnnnnnnnnnnnnnnnnnnnntgggagtgggagtggggggcaaaattagttgaaatggaagtcatataaaatatttagttatggtaaactagaatttattttaggaaaaagattaaaaagaaagacaactgattttaaaggtgctatgagaatgcctttttctcgttgatgacattacagctatcttttaaacacctctgctaggtcactgttgctaaaacatcactttattcccagaacgttcaggcttagcaaaaaaatacagactgaccagttaaatttaaatttcagaggaacaataatttttcagtataagtctgtcccatgaaatatttggacatggttacaataaaaattgtttgttgtttgaattacagattatactggaagtcctgtaatgga

SEQ ID NO: 311593 - DNA, 524 bp, Homo Sapiens
cttcttgatcatttgaaagaaatgataaggctgtagtacaagcaagcagtttaaagataagactttagatttttgaattgagaatttgatgggaatattcagtcaaggaggagactttggtctgaactagccattgatgattgttaagtttcccgttcttagactgcatcaatccttgtgatccttaacaggttataatatacaattagcatttttctaattgttagaatatctgtcaattaagcatcatgactcagataatttttactagtgtaatgacagtaaaattacttcaattctctttgaaatgtagagtgcttcctcctaaccattctttaccgtttctgatcacacagaattgagaaagatctcttaggccactagttactagttgtttgttgagatgtgtaagtcacagtgtgcctgtaaaatgggcattccccaaggaagcagagtcaaggtataaactttcgttttgactcaaaagcagtgggtctcaactggggatgattcgcttatctgaa

SEQ ID NO: 311594 - DNA, 852 bp, Homo Sapiens
  misc_feature (199)..(200): n is a, c, g, or t
gttttttattggggtgggagtatcccaagccccttagtttcatggcccaggtttttttcttggggaaaccaggctatggccccattgttcaccttccctaactgggccccgggcgccaaagcgaatggttcttggaaagcttctggaggggccggaggcgggcccgacatttttatttcaaaggatttttaggggaatnnacggccatcttctatttcagctcccagaatcttcatcatcatcttcttcttcctccacctcctcttcttcttcatcatctgttgtatttcctgttttaccttccatattacttaggtctgaaatcagaagtgcctgcaagccattctgtaatttgatgtatcggtattgcttggggtcgctgggagacttgacgatctcagggtccccagcattactgagagaccccctccgtccctcttcctcagattcatccgctcctagacgggcaacccggctgttctcgcccagatcctgtccattgggctgcaggtcagggcagctgcaggtagacttcgccttgttccttccaggcatggccagaataggaaagggtctggcagcagcagagtcttcgcaccgaccccgcgtttcgattccccagagcgccgcgagctcccgcccggcctcacacaacttcctccgggtggcacagactgcagcaacagtgactctcctcagcattcaccaccaagctggagcgatggacatcccgcttcccaggacccacctcctccgcgttctagaggcggtggcggccggccctggtgctgccgcagccgcggggaacaggcctgaacccctcccccaacccagtctccctctcgccgactc

SEQ ID NO: 311595 - DNA, 1247 bp, Homo Sapiens
  misc_feature (738)..(757): n is a, c, g, or t
  misc_feature (1152)..(1152): n is a, c, g, or t
  misc_feature (1175)..(1175): n is a, c, g, or t
ggggccggtcttggggggatggttccatcatggcgtcaatgcagaaacgactacagaaagaactgttggctttgcaaaatgacccacctcctggaatgaccttaaatgagaagagtgttcaaaattcaattacacagtggattgtagacatggaaggtgcaccaggtaccttatatgaaggggaaaaatttcaacttctatttaaatttagtagtcgatatccttttgactctcctcaggtcatgtttactggtgaaaatattcctgttcatcctcatgtttatagcaatggtcatatctgtttatccattctaacagaagactggtccccagcgctctcagtccaatcagtttgtcttagcattattagcatgctttccagctgcaaggaaaagagacgaccaccggataattctttttatgtgcgaacatgtaacaagaatccaaagaaaacaaaatggtggtatcatgatgatacttgttgatgccactgttatcatcctcctagcagaagatagtcctactgagaaaatgagcactttgatcattcagtctttgaactttaacctttgactggaagtgacctataggcaatgaagactacttccttttactgcatttttactcgtgtgcattctgggcgcatgttgatcgctggttcagtccaggcaactgacatgcttttattagtcatacagtattaatgcaggtgtcaggaaatgtcaaatataattccannnnnnnnnnnnnnnnnnnnaagcttttggaaaagctccaggtcctcatgtattgtgcaataacaatgacttccttggcggttttggtacgttcattgccggcaatgggcgttgtaacaggaaaagttttcattaactcctgccattcaatgattaatgcatgatagggcctatgaaatgaacttactggttatagtgggaatataaataaagtgagggatccaacattactttaaaagtcaccccaactgtttatatttggattctatgcactgtgatcctaaggttaacagcatgaattaacatgcgtctttaaaggactgtaatgaaagatcattgcatatttattgaattgtttatatctactgtcaagttgttttgacatggaagattttcaagtaacattggcagagangtacagtatgttatccctatggngaaaataaattaatttggtgtatatagttcctcaatctctgaagtaaaggtatgagtaatatagggattgaa

SEQ ID NO: 311596 - DNA, 358 bp, Homo Sapiens
gggcagcgaagcagaatggccaacatgcagggactggtggaaagactggaacgagctgtcagccgcctggagtcgctgtctgcagagtcccacaggccccctgggaactgcggggaagtcaatggtgtcattgcaggtgtggcaccctccgtggaagcctttgacaagctgatggacagtatggtggccgagtttttaaagaacagtaggatccttgctggggacgtggagacccatgcagaaatggtgcacagtgctttccaggcccagcgggctttccttctgatggcctctcagtaccaacaaccccacgagaatgacgtggccgcacttctgcccatatcggtttctctttcgg

SEQ ID NO: 311597 - DNA, 543 bp, Homo Sapiens
gttctggctcactctctgcactggtgccttgttcctgttcatcttctgagggttcctgtttccatttttcttgttttttcagctgcctctggcctcttctttttgggctcccactctcagacccgctacttgcctcttccttaatattaaatcgcgatggttcttgtctgcttcggtttgaccgcctgaccccataaacatcaggatattcttcccacatcttcttcacatcagctatccgttccttcttagaggctggcttctctttggcttctgggaggactggctgggatttggaacctgctgattcgctctcagattccgactgactctcagaagattcagagctgctgttcgactcgctgccatgtccacttcctggatcacttccctgctcactttccgactgactgcctgagtctgaacccgaagcttcttcagaggctgagtgactgagtttttctccatcaaatgccaactgagaaaatgtacggtaccaagtaaaaacgcatggggacaagttcaaataatcttccctttgtt

SEQ ID NO: 311598 - DNA, 558 bp, Homo Sapiens
aaacatttgctctgtccctgcaggcccttggcctccatagtgtcggcactggccaggtagtggggtgtaactgagcttccacagagagacttctggactctggaagcccaagggtgcctttgcaacaggcttgagagtttcccacagccatcttttagatgaaacaagaaagcaagagtaagagtaactttcgtgcaatgtctagtcaatcccagtgaccatcccaaagtagagtggatattggtgtctgggctgctttataaataagttaataagacctgctttgacaaaccttggacacctcagttcacaaagaaacaaccttagacttagtaaggcatctcctgatactattgtcaagtgtctttatactataatgtctaggaaatatggggttaaactcttttactcttgcttaaaaactataatgtagtccgattaaattcacttatggaatagtcagaagtgaataacaactgaaggatgtatatagacaagaaccataagagatttaattctctcagagttttacacatccaccttttctagaacacatga

SEQ ID NO: 311599 - DNA, 707 bp, Homo Sapiens
  misc_feature (121)..(121): n is a, c, g, or t
  misc_feature (165)..(165): n is a, c, g, or t
cgttctccaactggcagttcagtgggccaccggagtccccattgcaggctgagatgacgccatcgcccccagcgcacaccatgttttcttcaccctgaagccccaccaggtcaatcctggnagcacggtggcgtgatccaccacgggctgcaggccctgctgcangcttatcagcaatggggccgttggtccagaggcggccccagccggtgacatagcaggggtagtccttggggagcagggagtccttctctggcaggcaggccacctggatggtgtcactcagctccacatgctctgcaagcttgatgagggcaatatcattgcgcaacaggagggcattccatctcttgtggacgtggatggtgtccacacccacaaacagggatccttcttcgtcttccacctccaggttgttctttcccacggccacacggtaggtccgggtgttgctgatgcagtgggcggcagtgaggacgaagttgctagcaatcaaagtcccgccacacgtatgcctccacgtgtcgttcttgaggtactggagggagatctgccagggccagctgtggggccgggcatcctctcctcccaccactcgggcggataggttgggcgggaagctgggcaccccacagctggaggcacaggccaagagcgcagcgaggacagtgatgcccaacagtggttaggtgctcaggactggctgc

SEQ ID NO: 311600 - DNA, 527 bp, Homo Sapiens
gcttctatggttcattaccccttcatttgataattcagcactagcttcagcattattctcatcgtgttcatcatgttcgttatctgttggaggaatgactggtggtggtgaaggtggagggggggcagaccatcacagtttttaactcttctttggtcttttccaagtcttcctgggctgcaaaagctttgtgttgccactcagtagcttcctcttcctttttcttcttggcttcctctagaagtgcaatcttggcagtgaattcagcaagttctgctgctagctgctcctgattcttcatctggtcggcagcttgttttgctatggcagactttgcctcttcagcagctcgacgctccttttcaagtcgttctgcttcttcttttgctcgttttcgttcttgatccagttctagagcttttcgagtctgttcttctagttctttctgagctttaattgtctgctcttcaatttgttttagacgttccattagctcttccttttcacgttctattctttccttttcc

SEQ ID NO: 311601 - DNA, 1823 bp, Homo Sapiens
  misc_feature (25)..(25): n is a, c, g, or t
  misc_feature (1358)..(1386): n is a, c, g, or t
gaaaatttaagaccccgggaaaaantccaaaatccaccttaaagggaaacccttggattgttttccaagttaacgaaagaaaaaccccaattccttcctgggccgcaaaaatgaagccaaggcatgcccctcctccccatttaagcctctggctgttcctaccccacacgatgaaatatattccttagggtcatccggagggtcatactgaacaatccagtcgacttcaggaatgtctagtcctctcgctgcccacatccgtacacaatagtgttcccgaatctgcattgcagaactggaagaatgtggttgtacgcttattttgcttttgctttccatgaatggccaagacgggcaaatcaatgtagttcagcaactcatagtggtatttcacagacatgcaagatgaaaaggaaggccataagcttcttctttcggttcttcttaaggaatgtaaagagcagaaggaatctcttttcagaaggacaaacaacatatccctgttcaaggccatccgctgttgcattcggtttatcatcatcaacgccaacatacaatggctcctttttcagagaaatccttgccaggtcttcaacttttcgagtttgggtggcagaaaagagcatagtctgtctacgtgttggcaaaagtttaataatttgctttaattcctcttcaaaccccacatccaagatacgatcagcttcatcaataaccagacactgcaggtttttatacataaatcctggggtattctgcatatggtccagcagacggcctggtgtggccacaatgatgttgatcccattaccaagtttctgtgcttcagcagatctgttactgccacccattatcaagccataggtatgcacgtggtgagtcatcagctccttaagaacaccaaaggtttgcatggctagttctctagtaggtgagagaataaggactcctgttccattcctgggcatgaaccttaacttaacaatgagttcaactgcagggatgagaaaagccagggttttaccactgcctgtttttgcagctgctagaagatccctgccttccagaagtggtctgatacttttatgctgaatttcagtcatgtttgtaaaacccatttcttttattgccttcagagtgttttcattgacaagattacatagagaagcaaacgaagtatcctcaaaagctcctgtcagtcccaggggcagactgggcacctcactctcatcttcatcattatctggcttctccacattattttctgtttctttagtagtctcggcactttcttcttcagatttccctttgttttcagtttttgcttttttcgtatcaggctcagcatcattcaccannnnnnnnnnnnnnnnnnnnnnnnnnnnngattctgaattggaagactgcattgctgcttctccattggttaatacagtggatttctggggagactttgtaacttttatatttcccactgcttcttgagacatgcctccattttgagtttctgataagcccacattcatgggcttttgttttgattttttaacctttctacttcccattgtttcttcagatacatctccattttgagtttccgatagggtcagatttgaggccccctgaaactttaggttccgctgccgcaatttgaggttccgcttctcgatcttcttacgcaggagtttcatcggcaggtgtgacattctgcccaacaagtgcctagaataaggcgccacacagtacagctactcagttctcaggctgacgttacttcccttccggccgcacgtgcgcagctcggccaacaggaaacgcgtccc

SEQ ID NO: 311602 - DNA, 1712 bp, Homo Sapiens
  misc_feature (1661)..(1661): n is a, c, g, or t
  misc_feature (1676)..(1676): n is a, c, g, or t
  misc_feature (1702)..(1702): n is a, c, g, or t
tggtaaccggtccggaattccgggatatcgtcgaccacgcgtgcgcacattcttccagttctgcaatgcagattcgggaacactattgtgtacggatgtggcagcgagaggactagacattcctgaagtcgactggatgttcagtatgaccctccggatgaccctaaggaatatattcatcgtgtgggtagaacagccagaggcctaaatgggagagggcatgccttgctcatttgcgcccagaagaattgggttttcttcgctacttgaaacaatccaaggttccattaagtgaatttgacttttcctggtctaaaatttctgacattcagtctcagcttgagaaattgattgaaaagaattactttcttcataagtcagcccaggaagcatataagtcatacatacgagcctatgattcccattctctgaaacagatctttaatgttaataacctaaatttgcctcaggttgctctgtcatttggtttcaaggtgcctcccttcgttgatctgaacgtcaacagtaatgaaggcaagcagaaaaagcgaggaggtggtggtggatttggctaccagaaaaccaagaaagttgagaaatcccaaaatctttaaacacattagcaagaaatcatctgacagcaggcagttctctcactgaacacatgccttcctttcatcttgaataactttgtcctaaaatgaattttttttccccttgatttaacaggatttttgtagactttagaatttggacttacctaacaagagtataaattgacttgggttgcaagcactgagcactgttacttctatcacgtctctcttttatttctgggatataaaacaggctttaagtttcttggttgcccaagggcagagcaaggaatatctggtgtttcttgtgatgataatattttaattttaaatatccctccctcatacaagtgtatgttaccattttaatataattctttttgtacctttccttcttgttttgtgaagatttttgtggcatggattgctgtgctcactgctgtaaaaggtgacctagtgtactgggcagctggtggcggtgcagaaaagagtctcaggttattttttgtttttagttatttcttggaccttgacagtatctaatgactcctcctgaaaatgctgcagtataaaagagcaaagagctttgggaaatacctaagaagcaccttaagattagggtggcattgcttttatagattcttgattttaaagcaacaggcctttctcaggtgttgcattttttggagcaaaaactatgggttgtaatttgaataaagtgtcactaagcagttataacgtttgatggctggggggtaggaagaggatggaattgagatgtttgagcctcatttacatcaatagaggtgtaatgtactgcatttcttcatttggtaacataacaaagactttcatacaaagaacgatgatgctcctcattaagatttgtttaattcaaggtggtttggatttggtaagcctttgcactctgtagagtacttagaagacaagggcaacttacttggagttagagccaagctgtcagacggtgcccagcacacattaatgttagcttctttctgaggaaaaaaatacctcttcccgggccctgaaacaaaaaatacntttgctgttgaaggnttgaaaatggaaccaaagtttagganaaaaaaacag

SEQ ID NO: 311603 - DNA, 829 bp, Homo Sapiens
ttcatattcatgttagacatcaaatgaagtgcattaactgaatagtcttaatcaataagcacgtggtttgtgtccaaagagtattttacctacgtgacaaaataaatattacatttaggtttcattatgcctttcttgtaaagactgattttccattttataaggtaaaatgcttgtgaaacttgatgcagaatatttgactacttgaattcagcagaacatactacatatttttctttgtagacatttttggcagtttcattctttaagaacaagtcgagaagtagataatcttctctacccaaattttttaccttttgagaaaaaatatggatttaaattatgagcaatattaaactctcattacatcatcagaaatctgggagctaaagtttatttcagaagtcttattagatggagttgcatttcttaaattaggagttatgttttatttaaatttcctgcctacccttggagttgtaaacatcaccttacttcataaaaccttccctgaagtgcctcgtagtttcccatctctctgtgcccatgtggagatactgctatttcttgtcttttatccaaatgggcctgaaaattcagagtgtagccacagtaacttctgtgctgtgaatgcatatggcttggatcccaagtagagcactcagtctgccttgctctttgatatcaattataatctattaacataactaaaatcccatatatggactcctttggctgttttcaatcttaaagccgtttatggtagaacttttcatgtaattctcttatctgcagtttgaatgtataaacaacttttcaccttggttcc

SEQ ID NO: 311604 - DNA, 508 bp, Homo Sapiens
gacaagctgattggaatttttgaatggtagagaagaaactgcacaaaggcacttgccacttttaagtgtttggagaaagagaaccttttaagtttggattgggtgagctttcttctaaaaggagcttctgaagtaattgcaaaggaatagaatcgactatttttatagtatatttaatatatttgtatataactataataggaaccctctacatgcctcccacttttctaatttacttccccttttgccatagcactagtatagcctcatccgcatgggtaatgtgcctattgtcagcctaccaaaagatagtgctgctgctttatgggacaggtgagaagacccaactctcatgcctggggatcctttacggaaggaatagcacacacttttaaaacaacataccacagtctaaaagcatcattttgaaatgtaacaagcactttattgcaattactcattttgataaagtttattcttaggcgttaaccatttctaaaggatcccc

SEQ ID NO: 311605 - DNA, 501 bp, Homo Sapiens
caaaagccacacctatgttttcttgcctacatagttccctttttgcccgtagttttagttaagatgttatgagaacaaatccccctatttttgcctagtcttagttaagatgttatgagaacaagcccttaatttttggatccctttttgtctagttggaaggatcttagatttgtagcttcagtaatgatgatgcaaagaagctgagaggtgaacttgtagaggtgacacagaaaactagtttaaaactagggacagtggttagaaacaaatctttcagcacagtgatatgaactaagcagaaaacaaaagcaaaggcagttattcctgaaaggtcataaagagcttggttaggaaattgtgggacaagtaagtgtccaaacatggggcttcagaaaggaaagagtgttgtaggcagaataaaaataaatattggctgtgtggaaactttccgaatttgatgaaaactttaacttacagacctaagaagctcaatgaaag

SEQ ID NO: 311606 - DNA, 2352 bp, Homo Sapiens
cctgtggctgtttggttgtccgggtggtgccctggttgttgctggggtgccggggtgtgggttgggtcccgctgggtgccggagggcgcgcggtgctgtgatttgttgccagtgctggcgacctgttgtgcgcggggtgcgggcatgcgttgcgcgccctcagcgttgagttttttgtccgggatttctcggtgcgcggtgggttcttgcgtcgtgggggtggcggtgcggtcggctaggtcggcggtgggtgctcacctatggagtaagtgttctgagtgttggatgctgtcgcaagttacgcaggagtgtgagcggagcggcacaggtgggcgcctgtggcagtggtctcgcagggggatagtgtccgggatagctatcgtgccggcaatggcatacaaaaggccctctgtgctcaaggtagtctgtgtttacgtaggctgcagctgcatggaagagttcgagtaagatgaatgtggagcgagacttcactttgtgagaagagttaatgtagctagcgttgcagaatagagtagtagtcgtcgcaaagcttcggagcatggacgagagagtcagctcccagttttgatgttgtttaactctgcgttgttcagctgagtagaattcctcgttcttactttttgacttgggagttttatctttagatgccaggctggcctgtgcagacgcttttcttgtcttgaatgttttagtcactgttgttggatctactggatcaggcatactgctgaagctttccagtgattcttcatcaaactggcgtcttcttccgtttgtatctaattgatttttgcggttactacttgtagatttttctacagacactgaaaatccagtcttgataaatggtttctctacttcaccttcttgttcatataaccatggtgtcctactgctttccacctcctcttcaggcagttttttattccttggtttctctgctccaatagaggaactgctttcaaaaggttttggaaaagccatatattctgtttttcctgaagaattctgggctaagggttgctgctgttcactgggtgtagagatattctgagaaaaatctccaaaattagaaggaaataaagggctgaaattcatacctggtgcaaatgatgaaaagttagtaaatccaggtatattgaagagatttacaggctgtgttggaaagctgaaaggacaaataaactgggagaaggagggtgcgatgcactactgcctctttccttgcctccaggtttttctggatgctgattttgctggcgcataagttcatttagcatttgtttcaacctctgaacattattctgttgccatgttagctgagtatagcactggttcaactggtgcattatgaagtgtacttgaggagatgcaacattgctgggcataacactgtaaggacccgtgagaagagtttgtagcagacaagatagagtctgctggtcttgcatcaaagtctgacaaatactgacactaaaatcaagctgtttctttagctgattgatttgttcttgccattgttctttctcttctacgtaagagagctctgacacccaacgaaggttttcttgccgttgcatgctgatattctgttgccttgtcttggctaaaggacgataattttcatctgccgaaaaagggcaattgttcttccacctatttttagtttcctttccattgtaggagttatgattcacactgttagaaggacacacagacaagttatcattggaactggcatcttgctcttcttcctcctcttcatctgtccgaacaattccttcagaaaggtaaccgtcttcatctccttcttcatctagtgcacactgggtagaccctccccaagttgccatcgttttttctgttctactttgctgaggagtacataggttctcagatccatcacttctcaatgacacagccactggagatgcagtttcagctagaccttgcctcctctgatgttcagccatcagagcttcaagctgctttcttctctgtcgcagctcctccctcaacatttcatgtcttctcatttctgaccacaactcattatctactattgaagaatcttcaggctcaaaaacagatttgcttgtactggtctcgtgttgattaacagttggggttgaagtaacagctggcatatattttttggtaggacagttacccacactagcagctgacagctgtaagtcagggcatgccgtttgcaatgcctgaattttctcctgaatgtcagtcaatttctttctttcttcctgcaattgttttagctctgctctgttgcagctgtagtttagcctcataaatttctctcgtgccttttca

SEQ ID NO: 311607 - DNA, 502 bp, Homo Sapiens
ccgtgacgtagcaggggtagttgttgggtagaatggtgccggcaggagggaggcaggccagctggatcttgtcggtgagggagacggggttagccagtttgagcagggcaatgtcgttccctttggagatttggttggagttccagtccttgtgcaccacaatcttagagacactgacggccagcgagccggactccgcaacgtagaggttgtgccggcccagccccacgcggtaggtcctggaggagctgatgcagtgggcagccgtcaggacccagctgttggctatcagggaccctccgcaggtgtggtaccacttgccattggagctgtactgcagggagacctgccagggccagctgttgggcctcgcttcttcaccgccaaccaccctagtcatatcaggtgggtaagtggggtccccacaactgagggctccagccaccaaagtggacagcagcagggtccttatcatggtgtgtccgtgggagttctgtcagcc

SEQ ID NO: 311608 - DNA, 959 bp, Homo Sapiens
ccactataatttgctctgatgaaagaaataattccctcttttaactcctaacaaatgctacattttcaagactaaaggaattatcagtaggcatttttcttcttgatctaagttatttgtctctaaaatatgtcaagtaagcttttaaagattcagggaggggcagcttcatgattttttctctcagtaaattttgaggtggctcctctggcttcattgcttcattgtgatctttttcctcctcttctttgttatcctcttccatttttttatcctcttcactgtctagaggctgaggaataagctgattacccacaaatacgtaagtgttaattctctgtttaactctctttcttttccttttgggtggagccctttgaggaatccccttggcctgcatctcatcatttatgaaatttctaagtgtgcgtcgaatgtaaatacgagccaagtcctgtagattcctgacagcacagggagggagtcccacagaatctggtttgccattatcattcttacttggttgcacaagtggagcaaatgaaacagcaaggatatttttactttcccaagtgttctgtccagttcgcataatctgtgttaactgatcctctataggcatgactaatatgcctccaacttttagtaatattttcatgtagttttcatggtctttctgtactccagctcctcaataaattcgatcatactgatgactgtcagaagctatctggaggcaattaccaacaacaaatgcaggttcacagaactcaaatctgcattgaaaaacaaacattttaattcaattaagcaaaacattagatctaaaaaatttaccataatccagtcctttgaaataatgacgttacccaaattaattataaggataaaatgattataaactttatttaaatatacatatttagttaagtttagcactcatcaagatgtattgttat

SEQ ID NO: 311609 - DNA, 1314 bp, Homo Sapiens
  misc_feature (57)..(57): n is a, c, g, or t
tgccgtatttttcagtatcccctgcaaatttagaaattgaaaatgagtgtaaagcanaatggttcctttcccaaaatcctttgaagccaaaggagtaaagaaagaaaaaaggaaggggtgaggaggggcttaactgcttcccagtaaagaccctggaaagcccactcttgcaggaggataagtgttttggagagttgtgcatgggagcgagcgcctcagtgttactctttcttgttcaggatcagtcagaaagcaacacaagtgttggcgacccctgttctcccttctccctctgtccactggcctgcaatgataaaagacatgcagaccaatgggaaaggccccaaatgcagtgagtggagaatgggacagtcatttttcaggagcagaatttaaaaatacagatgtataatacatatttttacaagcaagaagctgttgttaagacttttttttacacttagagtttataattttggggcaggaaggaagtaactgtaaaaagaaaaacaagtgcaagttttctttaaaaaaataataggctgatgggacttgctatcgaaggggttgagttttatgccctggaaagggctgggaaaaagccagtttttcccaacatgggtagaaattataaagcaaaatgtggcattttcacttcatggtagcagttctgaaagtttatttacacagtaagttccgagctagaagtggacagtctccagtcttcctgtcagactctgtagttatggggtgttcccagttcagccaaagcagcaccaagtgcagtgggaatgaagagaacccagataaaaaactgactcagtattcttgttttattggtttatggcttgtgggcagctggctgaggccgggaacaccagaggccctccttgtatttccctctcccttatcaggtaattccacacttagcaggtcccatacctggaagcagcgggttgaccaggtaggagtaggatgcagtgggtatactaggaaaacccagctcttcccactaacactggtaccgtagtttactatgctagaactgatagggaggtaatgaacttggtccccactacctagcccaagaaccagcctgggtacccacgtaccattaggagcggggaggggaagaacaggataggggaaaaagatgaccttcatcaaggagctcttgtggtggaggacataaggaagccctgaggctgccatctctttctccagggcagcctttgatacttgaaggcagtaatgttagagccataaagcactgtatttctcatactcttggtataatgctagtgccactgtgtg

SEQ ID NO: 311610 - DNA, 160 bp, Homo Sapiens
tagagtttataattttggggcaggaaggaagtaactgtaaaaagaaaaacaagtgcaagttttctttaaaaaaataataggctgatgggacttgctatcgaaggggttgagttctaaaacctaggactggtgagtggttgtgtttctgcctttcctagct

SEQ ID NO: 311611 - DNA, 459 bp, Homo Sapiens; identical to SEQ ID NO: 134388

SEQ ID NO: 311612 - DNA, 489 bp, Homo Sapiens
  misc_feature (468)..(468): n is a, c, g, or t
attcgtaggttgaaatgtcttccatgggcatggaaatctagacgtaaaaattggtcttcatgtgaggctgctcttttggcacgctggtgtttttggtgtaatgaatccacattgtaagataatccttcataatgtctgatatatttattttaaggattcccatactgacctcccattcccgccgcccaggagaggagcagaattaacactctcagcaacaccattttccgctgccgctgccgccgccgccgcctcctcacgggttaacagcagcacatcgattcggagggagaagctgaaggggcttggtccggagcctccacgggaagccgggacctacccctggcaggagaaacggcgaagcatcctccctctctgctccacttcaggggcctggcaacgctacactagctcctccataaacagggacctcgctctccccctcgttcgtttccttcctcctttgcnccgctttccttcccttgctcc

SEQ ID NO: 311613 - DNA, 1553 bp, Homo Sapiens
atgctcatattgttttatttattacatgtggggtaatgttagacaaatagctataatacagagattgtacaatttaaaaactgtaataaatatggtccattaatagcagactccaaaattcttgtccttcttgaaaaaaaggttcagtgatttacgataatccactaagaaacatcttaagtcatttgccaaatagttcactagctcagtgatattgttggtattcatcgcatgcatcttcaacatttgaaagtatttggtctttgccaaaatcccaaactccttcttattgatgatattattcaaaatcagacttctaatttgatgtgaaaatcctgctagctggcccgtgttcatatgctcttccaattgctttaaaataacctgagggtcacaggaacccagaaaattcttaatttgctggtgtcttttctctgagtggggcatgagcatcagacaagctaatgcaaatgccggaagttctaactggatatacttgctggcgactccgatcaggtcaagatcatctgagactggacattcgaggacagcgatgagactctcagaacaatctgacagctgatcaggacttaaaggacaagaggctgaaagcagtggtatctgtatcacacgctgccacgctttgctgaagtagggaacctgccataaagaatggatactggagatggcttttaaaactttccttagataaggaatcatattgaagcccagaagcttttgcaagagtccattccaaagctgcaggtcatagattttgtattctaaacacagctcagtcaccaatcttactgccatggactcgtggctgtggtttttccacagacccttaatcattccttctttaggactgctgcaaaataattcatatgtgatggggatattcaaagtctcaaatgatgccagaaaagttatacatctcaaataagatttcacttcttcaatgggttttttaaagagagattctatagtttccttgtcagccaaatagaagagacactgaagagctcgagttctatgggcaaaagttaactgatgcatacctaatgtggttgtagttgatgttgcaaatacaaacagcattcttgaactataatcaattggacgagacaggaggagatactgcactcttcgtagggcttcatcttcttgaagttcaaataattctgatggtttttcaccaggttttgttgaagggcatagccatttttccaacaacatgtcccagactttttccaaattaatttcattgacttcggctatttctttagctgctgcatgaatatcaggataatctgtgccagatgaattctgaattctttgattgatgctaggatgttcgtagagactgacaataagatgtgctggctttccgatcactcttaaatattcctcagtgttcagcttgtgggctatgagcacagcttctgtgcccgatcgccggtactggatatgaagcttcttcaacaaagcctcggctttttcacgtttttcgtcctgcgatgggatattctgtagccatctctcagctaccc

SEQ ID NO: 311614 - DNA, 520 bp, Homo Sapiens
  misc_feature (482)..(482): n is a, c, g, or t
  misc_feature (496)..(496): n is a, c, g, or t
ctgagaatcatttgcctactggtccatccccttctcctctctctgctccaactgcctcagaggacatttctataggcaagaacctgaagctaaaggtcatattgccgttagggaaattgcaagttcaatctagctagaatttagtgggcagaaggggtggtctgaccagagcatgcagccagattaggccttggtggagacttgtttgtggacagtttgtttggctcctggcttcaggaatgtggactgaccagggagttaaccactgtgaatgcagacagccagtggaaactgtcaataggtgcaccattcagcacgctaagcagatgttacagagaccagaactaaatgggagcatgggtgcaagacaatgcttgcttagggagatgagacagacttttgaatacatatgtacgttgagcatttatcttgaatcatctgttaatgcaatcaagcatgggtaaataaacagggaaaaaatnttaagcttgaggtncaccagaagagtttggggtttagt

SEQ ID NO: 311615 - DNA, 525 bp, Homo Sapiens
tgtatggggcaattatgctcatattgttttatttattacatgtggggtaatgttagacaaatagctataatacagagattgtacaatttaaaaactgtaataaatatggtccattaatagcagactccaaaattcttgtccttcttgaaaaaaaggttcagtgatttacgataatccactaagaaacatcttcagaatttcacagggagcagtgtctggaggcacaggtttcccgcagtgctttgaatattcagttatcaagactgaagcttcatctaaacttaaggtcatttgcccaaataggttcactagctcaggtgatattgttgggtattcatcggcatgcatcttcaacatttgaaagtatttggtctttgccaaaatcccaaactccttcttattgatgatattattcaaaatcagacttctaatttgatgtgaaaatcctgctagctggcccgtgttcatatgctcttccaattgctttaaaataaactgagggtcacaggaacccagaaaattctt

SEQ ID NO: 311616 - DNA, 468 bp, Homo Sapiens
ggaaaaaccatcagaattatttgaacttcaagaagatgaagccctacgaagagtgcagtatctcctcctgtctcgtccaattgattatagttcaagaatgctgtttgtatttgcaacatcaactacaaccgtaagctctagaaacttaatccaaactcttctgtgcatctcagcttaacatttttttcctgtttatttaccatgcttgattgcattaacagatgattcagataatgctcacgtacatatgtattcaaagtctgtctcatctcctaaggcaaggcattgtcttgcaccatgctccatttagttctgggtctctgttaacatctggcttaggcgtgctggatgggtggcacctattggacagtttccactgggctggtctggcatttcacagtggggtaactcccggggtcagtccacattcccgaaggccggggggccaaacaaactgttccacaaaca

SEQ ID NO: 311617 - DNA, 594 bp, Homo Sapiens
agtttacttattacatgctcaatatcagtagcatacaaggcacaccaggagaatagaagaagcctaagatttgtccctctcctctagtgtcttaaaagtcttgctctggaggcaaaatatacctatcccaacaatagaagtaacagtagtacgtgagttcatttgtgaggtatatcccaagagatttgttgattatgcttgttaaacataccaaagtttggggatgatataattataaagctagactgattccattgtactttgagtcatttgtatcctgaaatgtaccttcttgagtgggagggtttgggaattatagccagccttggaaatcgcatgtgaattgagtaaagggtatcatggacatgcatgtcatttgtcatctgtgtggcagtaaataaagaaatcagaaattgctgagagaaggcacagaactacgaagatgaaataaagagaatgacatttctgagaaacaaggcatccgtttcagatgaacactggtcacttcctcgtagtatgtctctggagtcttctgtcaactatctgtttgataagtaaatgatatctaataaggaggaagcaagtataataaat

SEQ ID NO: 311618 - DNA, 1239 bp, Homo Sapiens
tatgaatgttcctagggaaaaaaaagacagccaaaatataagaccatgtataagaactaacttcagtagacagaaagaaaaaagtaccaggggaagaagaaagagaccgcattttaaagcaactaccacaaatttgagctgtaagaaccactgacattttctataagcatgctagagcaaatgggagaaattcataagacattttctagaaaataaaactaatataaaaaaacttatcaagatttgtcaaggaaaaagacgaagaaaagttaaatataatgccaagaaaacattcctagccaattttatttatccaggcatgtcttaaatatggctgtttgttacacacagtgattctgcagacatcttgacatgacagtgaaatacataaatatgtaatgagaaaaggcttaactgtggataaaacaaagtcattacaattaaagactcacccctattagtgagtttttggcatttccaattgtagtcagggcactgaggtcaaatataactacaaattttgcattgtctacattgaacacatgattcttaaaagcctcatgttttatttcagaacaggcctcaggaagttgcagactgtgcaggaggttgtttagggcacaagtcatttctcccaatattaacttataggcagtctccaaaacaggaatattcttcaagctgagcattgcttgataaacagcatgggctacagcaacaacctctttttctttatgataacgcaagaatagtagtttagatgatggtataaacagtttttctacaaatgatgatggcagtttcgtatttatctgttcaacaatcagcgtgagtaaattcaagactgagatgatataatcggtaccacaagtctggcaattctccagttggtctaatccatatgtaatgaccatgtcacaatgtatagtcatgctaggatccaagctgccgagcagaacaccaacacgctcattagcagctgtcaacacagcctcagaaaaaatcacctggtttgcagccgtcacacatctcattactctgtacagaacctgtgtctctgaagcagcggtttcccctcgaacttggccgacaccaccagtactcggaagctacaggagcaacggttgagggtcgtgtcctccacctccacatgctccgcctacaggtaccgctgcagcttctcgcgcaggtattcggcgctgagttccatggcggcagtccagctggaacgtcagccct

SEQ ID NO: 311619 - DNA, 390 bp, Homo Sapiens
caggaatattctctttatgataacgcaagaatagtagtttagatgatggtataaacagtttttctacaaatgatgatggcagtttcgtatttatctgttcaacaatcagcgtgagtaaattcaagactgagatgatataattggtaccacaagtctggcaattctccagttggtctaatccatatgtaatgaccatgtcacaatgtatagtcatgctaggatccaagctgtgtctctgaagcagcggtttcccctcgaacttggccgacaccaccaggactcggaagctacaggagcaacggttgagggtcgtgtcctccacctcctaccgagcggaagaatatgaatggtgccgaacccgccccccgagctcttttccccttgtccggc

SEQ ID NO: 311620 - DNA, 886 bp, Homo Sapiens; identical to SEQ ID NO: 150634
  misc_feature (60)..(60): n is a, c, g, or t
  misc_feature (101)..(109): n is a, c, g, or t

SEQ ID NO: 311621 - DNA, 934 bp, Homo Sapiens
aggcttttaagaatcatgtgttcaatgtagacaatgcaaaatttgtagttaaatttgacctcaattgactacaaaatttggagttaaatttgactacaattggaaatgccaaaaactcactaatagggatgtgggcgctatctccaactgtctttgcacttctgagtaagaatctgatgattgtgctcagtgacctggctgttcacttccctgccattcagtatgctgtgctctacacgttgtatcctcattgtaccaggcatgatcactttatctttagtagcctcagttcttcctctccttctttgtttgatggagctgtgattggcactgttactatggccacaaagaaacatttctcaattatattaaatcttctgggaatgttacttaagaaagataaccaggacacgaggaaactgttaatgacttgggctttggaagtagctgttgtaatgaagaagtccgaaacatatgcacctttattctgtcttccgtctttccataacttttgccaaggccttttagccgacactctcgttgaagatgtgaatatctgtctgcaggcatgcagcagtctacatgctctatcctcttccttgccagatgatcttttacagagatgtgttgatgtttgccgtgtccaactagtgcaccgtggaacttgtattcgacaagcatttggaaaactgttgaaatcaattcctttaggtgttttcctaagcgataacaatcacacagaaattcaagaaatttctttagcattaagaagtcacatgagtaaagcaccaagtaatacattccacccccaagatttctctgatgttattagttttattttgtatgggaactctcatagaacagggaaggacaattggttggaaagactgttctatagctgccagagactggataagcgtgaccagtcaacaat

SEQ ID NO: 311622 - DNA, 627 bp, Homo Sapiens
gatgtgtagatagttttactgcagattgtgcttttaaaatgctttctgtctgactaggcctaaaattaccaaaagggattttaaaaagagcaaattgacactcgtggtggtcgaggatgatgatcagggacgtgagcaagagcacacgtttgtgttccggttagacagtgccaggacctgcaaacacctttggaagtgtgcagttgagcaccacgcattcttccgactgtggacgccaggaaacagcaaatccaatagatccgactttatcaggctgggctctcgcttcagattcagtgggcggacagaatatcaagctacacatggcttcaggttacgaagaaccagcacctttgagaggaagcctagtaaacgttatccattccggagacattcaacgttcaaagcaagcaacccagtgatagcagcccagctctggtcttccagacaggcccggtggcattctcactcttcaaatgtcaggccattctttcaggatgacaggtcgcattggaaagcattggccactggagatgacaggcattttgattatgtgcacgagcagaaccagaagaacttaggagggatgcaaagtatgatgtatcgagataaactcatgactgcact

SEQ ID NO: 311623 - DNA, 419 bp, Homo Sapiens
  misc_feature (331)..(331): n is a, c, g, or t
  misc_feature (373)..(373): n is a, c, g, or t
  misc_feature (381)..(381): n is a, c, g, or t
aaatcagaacatcaatatgattcctgagcctttaccttcattttaatgagaatgcagtcaacagtaaattatgacaagctatagtggttttatcttcaaatatttacatggacaccaaaaacacctttcaggactactccttaaagacactcgtccaaacacatccatccatctgaggccaagacacttttcatgggaatgcaatgaaactatgaaggtgaatgggaagagagatgcttcagtctctcaaagtgcagtcatgagtttatctcggatacatcatactttggcatccctcctaaggttccttctgggttctgggtcgtggggncattaattcaaaatggggctggtccttcttccactgggccgntggctttnccgttgcgggcccgtccttcccgaaaggttggggccct

SEQ ID NO: 311624 - DNA, 667 bp, Homo Sapiens
  misc_feature (208)..(208): n is a, c, g, or t
  misc_feature (213)..(215): n is a, c, g, or t
  misc_feature (221)..(222): n is a, c, g, or t
  misc_feature (224)..(224): n is a, c, g, or t
  misc_feature (231)..(231): n is a, c, g, or t
  misc_feature (256)..(300): n is a, c, g, or t
tttaatcactgaatgtattctgagtaactgtgtttctctgtcccatagataacattgttttgcagtttttagcaatgtaaagcaaatactgtcaccattttactggtaatccaagcccttgttaaatgttattccaaggcttaaaataacactggcatttagtgtcgataataaagtacaggttgagtatccctaatctgaaatctgnaatgnnnaaaaanncnaaaactngttgagcaccaacaggaaatgctannnnnnnnnnnnnnnnnnnnnnnnnnnnnnnnnnnnnnnnnnnnnctggcaagtatactgcaaatattccaaaatccgaaacacttctggtctcaagcattttgggtgatattcaacctatactataaactttcatgtatagtgactaagttactttatgaaccttatctgaaagtaccataattaacactgattattcccacacattagcaagtattctgagcatagtccacagataattgcaaacctgacaggttctcattgcattttcatagtgcagttcctacttatatgcattatcaacttagacaaactacaggagcttaataatgaaatttcatctaggaattttaagtttaggctgcatttaatccagattagcagttaacctacactatttggcatatgttct

SEQ ID NO: 311625 - DNA, 246 bp, Homo Sapiens
  misc_feature (162)..(172): n is a, c, g, or t
atctgaattagaagacattcttagtgaaattataggcagttctttggcttaaagcagaaatcattgagcaaaagaaaagtgcagcttgtcaaatttcgtggccttgggaaggacacatcagactacagtaacccttagtgaaagttaagaaaaagcaaaggnnnnnnnnnnntccagaattcataaagttacaagcaagtctttccctggactctgtactttttccaacattagtgacctgctgtc

SEQ ID NO: 311626 - DNA, 687 bp, Homo Sapiens
  misc_feature (101)..(137): n is a, c, g, or t
  misc_feature (146)..(177): n is a, c, g, or t
  misc_feature (508)..(516): n is a, c, g, or t
  misc_feature (615)..(615): n is a, c, g, or t
  misc_feature (626)..(626): n is a, c, g, or t
cgggaagtacgtccatttcattatggattttggagttgtgagtgataggaccccaaaatcatctctaatgtggtttttaaatgctggaggattccaatcannnnnnnnnnnnnnnnnnnnnnnnnnnnnnnnnnnnnaaaagtatnnnnnnnnnnnnnnnnnnnnnnnnnnnnnnnngcagagatttgctgccaggaatcaattttgagggttcagatttagcttggaagaaaaaaaagaaacatacatccttcagtataggagatgagggaatgagagaaaatattttttgaagaagcatttctgtaaaattagcaaattactttttttaatctatttaaagtttggcttgaagaatgccatctctgactatatggccttgtattgcaaagcagatcagtggctggggtgcctgttgtgggtgtgagtgtgtacaagagcgattgaagccaaatctgttgtcatgttagtaaatgatttgaaaactgaatgtaatacttgagtagannnnnnnnnctagtttgaaatttagtctgtctttttgaccttactaatatttcatttaacaagttgtaaaactctgattgtacttagagatgtgactaccaatcagtntgatactcaangaaagggggctattcaagaaattgaaaatttcatcttggacctcagtgcatcggtcaaatg

SEQ ID NO: 311627 - DNA, 865 bp, Homo Sapiens
  misc_feature (114)..(114): n is a, c, g, or t
  misc_feature (133)..(166): n is a, c, g, or t
  misc_feature (168)..(168): n is a, c, g, or t
  misc_feature (170)..(170): n is a, c, g, or t
ctcatctcctatactgaaggatgtatgtttcttttttttcttccaagctaaatctgaaccctcaaaattgattcctggcagcaaatctctgcaaattaaaaccaaaaacaaaantagaaaaattatacttttnnnnnnnnnnnnnnnnnnnnnnnnnnnnnnnnnntntngattggaatcctccagcatttaaaaaccacattagagatgaattttgggatcctatcactcacaactccaaaatccataatgaaatgggacgtactttctcttgtttccttcctgggctaccccctcccctccaaaacagttcaatatagccacagttcaagtttaatgggaagagagtgaagtttttgaatagttttgttgttttttactttggtgatctgggtggcacatattgctctttgccattacgtcgagtcactccctgaggtatagccctatggctaaactggcgtctctgttccctgatttttcctgctgctcccctggggattatattgcctcggaagccagaataatccttactagcccttgcttctggcttctcatgtggtttctcaacggagttctcaggagctccattgtcttcatttttggtgggagacaccacattggagcgaagttcccgtagtggctgcacaagaactgaagatggctctttagggggcttctggcacacttcagcataacttaactttcggggttcctgtagagccacagctgtagctgcatttatgttattattacatggtgaagcagtacttgccctcgatggctttgtagtacttggaggagaaactggtatagttgtctgattgagaccatccttctgaacagaggaatcttctattagatc

SEQ ID NO: 311628 - DNA, 1335 bp, Homo Sapiens
  misc_feature (631)..(672): n is a, c, g, or t
ggcagagaagagctgcggcagtcgccgggcttagtggtggccaccatcttctttgtcttctcctcctcactggagctgctctcttcctcactggagctgctgtcagcctttctcgtcagaagcttctggccaccgcccacaggttgcttgggggctgcagctggcttcactgcaggtgacttggtggtgacagctggcttatttgaagaattcttggtggtaccagctggcttagaaggagcttcatcatcctcagagctgtcagagtctgagctgtctgaagagctctctgctgctttctttgctggaggtggtttagtggttgctttagagactactgccttagttgggggtttcttctcttcttcagaacttgaatcagactcatcactgctgtcttcactgctttccacaggctgctgcttctccacagccttcttgggaggctgggttcccagagacttcttcatgggtttttgctcctcttcctcgtcactggaggaatcctcactgctagaactcttccgggtaggggtggtagctgctttcactggggccttggccacaacttgctttttaggtacagtcttcttgggggtggctgctgccttctcctcctctgagtcatcannnnnnnnnnnnnnnnnnnnnnnnnnnnnnnnnnnnnnnnnnttaccattggctattttaggtgctgctcgagctggtttgggaggggctttagtctgagctttaactgtcacaggtgttatctttggcttctggttctttggtggctcatcctcggagcttgagtcagaatcagaatcagagctcttggccttcttaggaggagctttggctgccttggcttggggcttaactcccttctggacaggctgtttcttttggtcctcctcatcatcatcatcactggactcttcactgctgctactctctgatgctttggctgcagccttcccaggaggcagaccgactcgcttggcaggtacagcagccttctttgctggaggcccttgaacttcctcctcctcctcgctgctgtcctcactgtcactggatgaggccttcttcttagctttcttagccactggtccatttgcctgtaactttcgctctgggaccttggcagacttgagccagaagctatagatgtctaagagggaagaggcattggcatcctgctgtgtagctcctgtcgctttggcgaacttattggccacctctgagagttggttatcgcgcaggaagccgagcacgaggggatacaggtcgctgggaaccacgcggcgaatgccggcgtccgccatcctccaggcaatacgcgtcactccc

SEQ ID NO: 311629 - DNA, 667 bp, Homo Sapiens
tttgccccatgaaccttcttctacgaaggaaatatctggcacttattgagggattctaattgaactgcagacatggttgaaggcacacacacattcgggaagaatttgcactttagcttgctggattccatctgactgtgttcttagctcaaggactttgaacctttgtcttccaattgctttcactttcactatctcaattccaaaatcctgttcttctcgataggcatatatctctgctgttgttccaaactgtgcttccctttcctgtacattgctgtatgcaagaacagcaaaggttctatctttctgaattaaattccgcaccatactgacttcttgagggtgaaaaagctgaagaggtaatgtctgtccgggaatcaggatcatcatcacttgtggaagaactggaatcacctgacagctgtcgtcatcgtgcaaagtcctgccatgaaattcttccatatcagcacctaggtatgtatgtgatgtcggcagactggtgtcaaaatttatgatgtttggttttttggcttctttactatcctggtcttcaacttccatttcatcttcttcctcactctctgcaggcaggagcggcaggtggttgcccatgttgtgcgcagcgtcctgctgatctccttcgccggccatgtctccccggccg

SEQ ID NO: 311630 - DNA, 372 bp, Homo Sapiens
gttgaagaccaggatagtaaagaagccaaaaaaccaaacatcataaattttgacaccagtctgccgacatcacatacatacctaggtgctgatatggaagaatttcatggcaggactttgcatgatgacgacagctgtcaggtgattccagttcttccacaagtgatgatgatcctgattcccgggacagacattacctctttcagcttttttcaccctcaagaaggtcagtatgggtgcgggattttatttcaggaaggataggaacctttgctgttctttggcttacagcatgttacagggaagggggaggcacgttttggggaccaccggcggggttttttggccttttcggggagggaccgggttttt

SEQ ID NO: 311631 - DNA, 517 bp, Homo Sapiens
gtggactccaggaaaacccatggccactgaggttgatcctgttttttggtgccctttttgggcatatctactgtctagaaacatttgtgggagaccaagttcttgagattgtaccaagcaatgaagaacaaattaaaaatctgctacaattggaggctcaagaacatctccagcttgatttttggaaatcacccaccaccccaggggagacagcccacgtccgagttcccttcgtcaacgtccaggcagtcaaagtgttcttggagtcccagggaattgcctattccatcatgattgaagacgtgcaggtcctgttggacaaagagaatgaagaaatgctttttaataggagaagagaacggagtggtaacttcaattttggggcctaccataccctggaagagatttcccaagaaatggataacctcgtggctgagcaccctggtctagtgagcaaagtgaatattggctcttcttttgagaaccggcctatgaacgtgctcaagttcagcaccgg

SEQ ID NO: 311632 - DNA, 711 bp, Homo Sapiens
  misc_feature (322)..(330): n is a, c, g, or t
aacttcagtggaatttactttagatattcattcatcaaatacatgggacttcacaaacaattttccataactttttagcctgtcttttgttatttctgcctaatatgatttgccccgatactcatcttgcacggccagaactgtttggttgattaaaatacatcagctcttaaaaactcattaactgagggtaattacagtagtagacatggtctgggtactatactaccatgtttatttgctgactgaattaagatttaagaatgattaaaaataagcttttactttttaaaaccacttgaggtttcataaagcttggggnnnnnnnnncctttgttaagaaagccaaccaatcacaatgatatagtcattgttgtgcactcccttttcaccatctgtcaccttcccttgcagcttaaggagcccagtaagttttgaaaatgtttgcgaatcaaactaaatttaagtgggatgattagatatacacaacaccaagtggtacatctgcagagataattcaaaattcctgcttttgagagagcaaatgagtgtctgctgaggaataattaaatgagaatttcataggagctccaccattcctgttactttcatttcattttggttaataattcttggatgcttggcatcgatcgtatcactgctcctagaagggtaagatcctttaggacatgagactggtagaagctggct

SEQ ID NO: 311633 - DNA, 721 bp, Homo Sapiens
agcagagtaagtccagtagtcttgataagctcggggcttgctacggatttgcccttacctctcactgcatgagccatctgcgttctgtgctgcctgaattgaatctctggctatgggtcttttcatcaaatgttttggcctctagtgaacaggtaattctccttactgtaaagtggtttgctcatgtcaatggtattctcagcctgtcacattcttgctagctaagcaatcactggtagatagagtttccctgctgtgaggtcctgaacttgtgtcacccttgccagcactctgggaaacctggggctcctctttcaactgtgacagattcctgctcatcaccagtactttcctcatcagtgtcatcttctttgctgctgctactctctcctgttgcatttttacagtctgtatatcccattttcaaggcttcagtgggactgcttagaccattacgatcttcagggtttacagaatgggtcctcctaaagctctctgagccccggccgtaggtagaaatattcagtaagtagtgccctgccattgcagctttggatgtccttctgccagctaaacccagcatgaacctctggcttgtggagatgtcttccagctggaaacctgagtgagcgatacgttgtactgtgagggcggcacaactgagagaagattctgcccggacgcgtggtccgacgatatcaagtggacttccggaccggta

SEQ ID NO: 311634 - DNA, 527 bp, Homo Sapiens
gggtggcgtccgtgttgttattgtggtggtagcggcgtctggctgctgcggaccccgccgagtcctagcgcctggcctgcgcgccgctgcccgcgccacaggattaatttatttttggaaatcaagtgcaatattggaagccatttctactaattttatttcacttttaaatttatgatttgatttgaatactatcatgggaggagctgtgagtgctggggaagataatgatgacttaattgataatttaaaagaagctcagtatattcgtactgaaagagtggagcaagccttcatagcgattgatcgtggagattactatttggaaggctacagagacaatgcttacaaagacttagcctggaagcatggaaacgtccacttgtcagcaccttgcatttattctgaagttatggaagcattgaaacttcaaccaggattgtcttttcttaacctgggaagtggaaccggatatttaagtacaatggtgggcttaattttaggtccttttggaataaatcatggga

SEQ ID NO: 311635 - DNA, 1221 bp, Homo Sapiens
taaattatgtaaattggattgaggtcagtgtaacacctggaatttacaacccctagcagaagtaccacctgctaataatgcttatactatatttgtagcttaaactagatgttaaaactatggaactgttggtgccaatctgcttataaagggcaatgctctggagacaaagtcttctcacaaacagtgggcaagcaggtttcattattatgtgttcaacaacaatcctcagttcattaaataaggtccgacaatatgggtttcttcgagacgaatatcgaagggtaagaaatctatagtatataaaaggttggagcaaacttccttgaccactaaaaagcataaaaactgtcgcaggcatcaggaatatttcattgcaagcaatgaatttcagaatattttgttgattagcacttaatttgtccaagacagatctcagcagaggtaaactatttgagccccttgcgtcaaggacttttttcgtatatgtggcagcatgaagcaaagagaataacaagactgggaagatactcattgtaactggataggaatttacaaagatgagtgaatacaacaggtagtggcagctgtcctctaacaaagcctgggccaggaatgctctgcttaactggaagtgtggtaatctttgatgcagcctcagagcactggtaagagcatttgccagcaaagcacgttggtaaaagcttgctgcttcatgcaacccaagaagaggcagaacaaacagagcagagcagtaaactgtgaacaagcgagaaagccacattgccgtgtccagtttattggtcatcatgaattgcacagcgcccgccccttgggggccgttcggggtcgtatctgccatgggggctcacactagcgtctgcgacgccgcaaccgcgaagagagaagaaaggggagagaaaacgtcagcgctggggccaggacccgggtaccggcttccctgcctcgcgccacacacaggccggatgcaccctgccggaactctgagcctccaccagggaagggtctcgctcgcctggtgcagccgactggatccagggcacccgcagcagccgggaggtacctgtcccgcaccgccgagatcaaagcggtgtttccagaaagacgggagcgaaggtggagcttcggggtgaagccctaaagagccaacctacgccgccggctccaggttattgccgaacccggaagtccccggccgta

SEQ ID NO: 311636 - DNA, 555 bp, Homo Sapiens
aataacctggagccggcggcgtaggttggctctttagggcttcaccccgaagctccaccttcgctcccgtctttctggaaacaccgctttgatctcggcggtgcgggacaggtacctcccggctgctgcgggtgccctggatccattcggctgcaccagacgctagtgtgagcccccatggcagatacgaccccgaacggcccccaaggggcgggcgctgtgcaattcatgatgaccaataaactggacacggcaatgtggctttctcgcttgttcacagtttactgctctgctctgtttgttctgcctcttcttgggttgcatgaagcagcaagcttttaccaacgtgctttgctggcaaatgctcttaccagtgctctgaggctgcatcaaagattaccacacttccagttaagcagagcattcctggcccaggctttgttagaggacagctgccactacctgttgtattcactcatctttgtaaattcctatccagttacaatgagtatcttcccagtcttgttattctctttgcttcatgctgccacatat

SEQ ID NO: 311637 - DNA, 679 bp, Homo Sapiens
  misc_feature (386)..(386): n is a, c, g, or t
taaggacatctggctcagaggctggttctgcaagttgtttttcaatctcagaaaagtcatcgtcttccaagggcaagaggaggggactgatagagtcactctccccttgaacatcaggcaactctttcaaaccagttcccaagtgctcaacctggaaagttgctctgcttccaggaggaaccttactaataaaagcccgccgagcatcccctgggaactctgtatccatagagctgggtagttgagccaggccaacagagtcatcatttagttgttgattaagaaaggcaatttcattgagcagtgaagtcagtgtctcatcagtatcatcctcatcttccatgttagtcagcagttcactggaatcaagagctgcttcaactatngacgatgttactttcctcagttccatctctatgcttgagtccttgagatctttcatctttaatttatgaaatgaagaatcctttgacttcactctctcccctcttgattcactctctttccatttatactgaatccctctcatatcaccagaaatctttttaggtaagaactcttgtgctttctgcatattggaaacgccaactatttgtggataaccagaatctttgtttgccagaaaaacctgcgttggacccaacgtcactctgccatctctgtttctcggaagagattc

SEQ ID NO: 311638 - DNA, 1407 bp, Homo Sapiens
  misc_feature (279)..(318): n is a, c, g, or t
  misc_feature (1292)..(1314): n is a, c, g, or t
  misc_feature (1349)..(1358): n is a, c, g, or t
atttttagaagcaagaagaaagccattgtgtcctctacaattaacaaaacttatctctgatatacaaagggatataaatatatacacttaaatagagaaaaagaggttgattgaattgtgcctttgagtgaacccagtttttaaataccgctgtgtttgtttcgccatggcttcagggatgctacatggctcttgcaccttttactcctctgctttatgaagtttgagttgtatttgtgcatcttaaagtaggttgaggcttgaggctgggctttcggnnnnnnnnnnnnnnnnnnnnnnnnnnnnnnnnnnnnnnnncttgtacttaaacctgcttgcttcctaccacagattctttattttcccaaacactacaaaaaaacttttaaaactttgccatttcatctgtttacactctttgccactgattagcagtatttaaatcttgcaagaatattttgtgctttctttagaaacacaagagtatagatttttctcactgaaaagtgagagttacgcattgcagccatgaagggatgctaggatcaattatggcagtaccttttttcccctcctgttcttgagccagttgtctcttttgttttgggtcccacttaggattaatggatgtaaggtattttcctgtgcctttattttgtgtcattctattggaaggaggtgtaacggcagaatagcatcgtgttgggggttttccttcaaacactgcaagtgatattgccaccatgtgaacctcaaatatgcaatccagttgtgttgggtttctcggtggacttggagtgttcatctcttcatgaattgtgagcactgaccatgttcttcagttcttaattatggtgagttgacaaataccaactactgcttttctttaggtggctataaatttcttactgtcaggaggaaatgacattatattctgtttcactgaacgtcagagatcagcaggcactgtactgggtagagaagtgcctatacttctctacctaagagggcaggagggaaaccctacagctccttgtgagcctatatattagtatatcggcctggagaggacaagggaataagaccactcatagtgaggctggccaagctgcactggtcggaccaggcagtggctgacctaaggaagacaacttgctttgcttaaaagtagattttttaagcaatgcttaacacaggcagcattcacctttgttcaggccatcgacatgtattgttaaaattactgcatatccccctcagatatcaagtatacactgttcatgttgggggtnnnnnnnnnnnnnnnnnnnnnnnacggcacggcatgtgtccccaaatcttgttttaannnnnnnnnnctggaatgtggatccatgttttgggatgatacctgaggcaggggttgcc

SEQ ID NO: 311639 - DNA, 1350 bp, Homo Sapiens
  misc_feature (292)..(301): n is a, c, g, or t
  misc_feature (307)..(307): n is a, c, g, or t
cagttaatactaaatatttgggcaactctgttttctctgttgtattatccactgagaaaagaaaattcctgtttgattatgctcttacagaagttataaaaaaccagattaggtatataactggttgacacttaagatactgtactgctttctacaacagaagaacttctggaaaatgttctatggaactatattcattgataccacctcattggtccattccattcactgatgggcaaagcactcatgttttgacaaaactttaaagcttccataaaggttaaattagagnnnnnnnnnnaaaganaaagaatgtaagacaaccacaaaatgaagtatgaaagtatgacatttttgtttctaagagtgagtccttgaaaatatacgtggtcactacagagatgattttaatcacaagacagcagatgaacatgtaagtaactccccaggatctgtctgtgtccagagtcatttgtggcgctgtatggttttccttttccttcgtttgaaaaaacagcagcacttggtttcatccatcacttctacttcagtaggggctgtgatgggtgcatttgaacgtcctgcggtggggtcatctgtgtttaactctccatttgtagaacttacaacctggtttttggattgttgcatcttatctctgtgttgatgtgcttctctgtttgatgacagagcaggatcttgctgaactgcacccactggagtaggcaactgtttaccaatccagtcatattcataatcaaacatatatccttttcgatcaaacaagtcagtaaaaagctttcttaagtagtcatagtctggtttttcaaaaaaatctagccttcttacataacgaagatatgttgccatttcttctggaaaattttcacataacacttctattggtgtagcccgttttgtatctccaattttctgatacctctcctttaatgtgtcagcctttaagccttgccaaggaagactgcctctcagaaaatacatgaacatatgacctaaagcttctaaatcgtctcttctactttgttcttttcctaaatgtgtgtttatgctcatatatctagctgttcctgtaaggctcttgtgttctctgtatggtatgtgtttctttgtctccggatcaatatattcctttgccaaaccaaaatctataatgtgaataacttgctgggttttgtttcctggtcgtcctattaagaagttctcaggttttacatctctgtatatcaagttctttgaatggacatattccatgcgagaaatcagttgtatagctatcatgagaactgttttaagagaaaatgttctgtcacacaagtcaaacaagtcttc

SEQ ID NO: 311640 - DNA, 484 bp, Homo Sapiens
ttttcagaaacctgaagtgggacatggggagtgaactcgatcttgctcttttgcaaattcaacgactaaagtatgacctaaaagtttcagttgatggagtcttgtcaatgcctttatagctgctttttcattagggaatgtggcaaaagctgtatgtttcagtcgccccttatctgacaggacccgcacagactgagccccgaagtacttcagcaagtcctctttctcctcagcagtaagctcagccggcaggtgcctgaccagaagggttcggtcgccccgaggcggggaaagcgaggaggagctcgtgcatccccttgataatcgcaagcggctgctcgggagctgccattttcaagcaaaaattggcccagagatgtgcgagggttaacacaagttgtcaatcaaagaaggaaacaggaaccccagccacttcagggaaagaaggttgacgctcaaggacaagagggctcacgactgcccc

SEQ ID NO: 311641 - DNA, 704 bp, Homo Sapiens
  misc_feature (593)..(593): n is a, c, g, or t
ttttattggaaaggaaacaatttattatatttgaggaaaatcattaaaatacatgtaatatgtttccaattcactgatttaaaggcatatagatttaatttttaaatacactttcaaagctgttacgcacagttccatagtccaggtggtcaatttcttcctctcaaagttagcaagcacttgaaggacacgggattcaaaaaaacctaaaacatcataaaagcccattaaaaataggaagtataacacaggtcattagtttaaaaataactaagagctgaaccatttatatttagaaaattagtgaatcatgtcagtataacaaaatttatctaaataaaccgcttataaagaaactgatttataacatttacaaaatctttttaactatgcctacagaaaaataattacattttcaaaatctataggttttgtacttttaaggtgataataaccgaattttcaatttgtttcacagatctaataatagtagcagatttttcaacaaagttacacagaggctccaaccctttattttcctagtgataatataaagttggatcgctatgctgatactaggcacctgatcattntactcttacacagcagtgtctaaactgttcaggccttaaaaatactaaagaaaccttcttacatttgattgtgtaccccttcccagagattaagatgcctaggtctagggt

SEQ ID NO: 311642 - DNA, 2100 bp, Homo Sapiens
  misc_feature (16)..(16): n is a, c, g, or t
  misc_feature (752)..(752): n is a, c, g, or t
  misc_feature (798)..(798): n is a, c, g, or t
  misc_feature (1376)..(1387): n is a, c, g, or t
aaatcattaaatactnttatatgtttccaattcactgatttaaaggcatatagatttaatttttaaatacactttcaaagctgttacgcacagttccatagtccaggtggtcaatttcttcctctcaaagttagaaagcacttgaaggacacgggattcaaaaaaacctttattaatttttaacactttctttttccttccttaggatcttgttttggtctagcagatcgagcaaactgaaccaccatgggttttccaaaaagcacatatccattagcttcctttaaggcttttgctgctgctttttcattaggaagtccaatgaaagcttgtcctttcatacgaccttctttcatcaaacgtatatcaaacatgatccgctgtgtttctgatgaaaagtcaacatatcttccaaaaatatatttaaggtccttttcttgaacatgtttagctaaattctttacataaattctacagtttggttcacccggttcataacttctgaaaactgaaagtgtttccatttcttctctagaaattctgcccttttccaattcccttctagaaatacattctgaaggcatttcatcagagtcttctttaatctcctctgtgatgtccaaattaggtttggggaagatttttccaaatcctatattggatgcatcaacttcagtagcaggtaaatcatgatttttttcctcacaattttgttccttttctaaatctttcttaaatgcagctggcatgtnggtagatatatggaattcaattcttttgttacctacaggttgtggntggtcaaatacatctgaaggtaacagcactggatgtaaactgctgtgtgagggacacaaaggtgtattcaacatatcctttatttttctcttttttctcacatggcgctgctttattgttttaggtcttttgggctgaagatttgctagttccattaatttgttcattctctgtcggtcctcatcatcagtgctttcatattctgattcttcactagataattcctcatcctcgtctggcaaaggaggttcctcaggtggctgaggagatgtgggtggaagaggtgcatgcaatggcatatagtcttcatacatgggaggtcgcgcagtaattggtccaaagggtgtgggcaaattcattttattcataagatgaaggacctgtacatagaacttaggcacgcttgccaaggcatttacaatgtttgctaggattgtgctggaaggtggtgggtacatatacttgaggcatgaatttaaaggaaaagtcaccccatggtttggtgcaattccattttctactgttaaataaccaagttcttttttttctttatcatcttcgacagggtcatcagaccnnnnnnnnnnnncagaacctgaagtgggacatggggagtgaactcgatcttgctcttttgcaaattcaacgactaaagtatgacctaaaagtttcagttgatggagtcttgtcaatgcctttatagctgctttttcattagggaatgtggcaaaagctgtatgtttcagtcgccccttatctgacaggacccgcacagactgagccccgaagtacttcagcaagtcctctttctcctcagcagtaagctcagccggcaggtgcctgaccagaagggttcggtcgccccgaggcggggaaagcgaggaggagctcgtgcatccccttgatattgcaagcggctgctcgggagctgccattttccttggagaagcaaaaacagaaatcgtgggaagaagtctcagtcaaaatcgcggcatcaacacaagctgggagaaatatttttttccgcctcgcgctaaggattctggaaaccccggaaataccgagaaagaaagtcacccttctcgcgagaactgcgcccaccgaaaagcggcaacccttcgaagactcttcggggaagggcgcggtgctaatgatttaaattcccaggggtctccggaaagacttacaagcaaaaattggcccagagatgtgcgagggttaacacaagttgtcaatcaaagaaggaaacaggaaccccagccacttcagggaaagaaggttgacgctcaaggacaagaggta

SEQ ID NO: 311643 - DNA, 520 bp, Homo Sapiens
  misc_feature (364)..(364): n is a, c, g, or t
  misc_feature (384)..(384): n is a, c, g, or t
ctgtttccttctttgattgacaacttgtgttaaccctcgcacatctctgggccaatttttgcttgtaagtctttccggagacccctggaatttaaatcattagcaccgcgcccttccccgaagagtcttcgaagggttgccgcttttcggtggccgcagttctccgcgagaaggaaaatggcagctccccgagcagcccgcttgcgatatcaaggggatgcacgagctccctccctcgcttttccccgcctcggggcgaccgaacccttctggtcaggcacctgccggctgagcttactgctgaggagaaagaggacttgctgaagtacttcggggctcagtctgtgcgggtcctgttcagatnaaggggcgactgaaaacatnacagcttttgccacatttccctaatgaaaaagcagctataaaggcattgacaagactccatcaactgaaacttttaggtcatactttagtcgttgaatttgcaaaagagcaagatcgagttcactccccatgtccc

SEQ ID NO: 311644 - DNA, 489 bp, Homo Sapiens
  misc_feature (474)..(474): n is a, c, g, or t
ttctcacatggcgctgctttattgttttaggtcttttgggctgaagatttgctagttccattaatttgttcattctctgtcggtcctcatcatcagtgctttcatattctgattcttcactagataattcctcatcctcgtctggcaaaggaggttcctcaggtggctgaggagatgtgggtggaagaggtgcatgcaatggcatatagtcttcatacatgggaggtcgcgcagtaattggtccaaaaggtgtgggcaaattcattttattcataagatgaaggacctgtacatagaacttaggcacgcttgccaaggcatttacaatgtttgctaggattgtgctggaaggtgggtgggtacatataccttgaggccatggaatttaaaaggaaaagtcagcccatgggtttgggtgccaattcccattttcctaccttgttaaataacccaagttccttttttttccttaancatctcgacagggtt

SEQ ID NO: 311645 - DNA, 519 bp, Homo Sapiens
  misc_feature (298)..(350): n is a, c, g, or t
catccaggtcaatgcatattgaaacatcaaaaagtatggataagccttgaagtttttatggaccataaatgtgagaaattcaaatgaacatcttgtaagattatgactgcactccaattctccaatgtcgaaaggaaaggaaaaaagagacaccaatgtgtctaactgttctaatatataaatgaccctgaccagatttttatgaaaaaaaggggaaattttattccactgacaaatttatattctataaatataatgtataagccttgaattagcagacactttattagggatgacnnnnnnnnnnnnnnnnnnnnnnnnnnnnnnnnnnnnnnnnnnnnnnnnnnnnntatgactattttcaatcaatgttggttatgttgccctcttgcaaaatgacaggcaaaatcatacttgtttttacatttgcatccacatatattacactgaaaaggattttcatacccatgacatcccatatgaatagtgtaaaggatgttgtctgcaaagtacatatcc

SEQ ID NO: 311646 - DNA, 1203 bp, Homo Sapiens
  misc_feature (71)..(71): n is a, c, g, or t
  misc_feature (898)..(898): n is a, c, g, or t
cttgtaccattcaacagtctcaataagggatttgtgtactacaggatctataccaactcgtataaggtttntccctgtcccacactgcacgtgtggttccaggtagcaccgtcagatctcttagcctgagtcaatcaaccctgaaaaagggtttggcagctcctcagggtaaaggctcacacctgtctttgttccttcacagcaggcacagcaggcactgtacagcatcagccttaatcgggtgctaaagacatgagtgaaggtggcaatagagaagtgggcctgtcagccaaaagggctgcccttcatgccccacaacaagccaggtagagttggagctcagtcctgtggacagactggttgacactaaggctccgaatcactaaaaacggcctaattctccctacctgctctcaggaaggattaacttccagttgcttccttccctacccaaactccaactgttgtaaactggagagccgcatcaactgggatgaccagggataacctggacatctatctctctgggaacaggacagccccatctcacctgaacctgggctgctgggagcccagtggccctcctcccctcctccaggcttccctccacgtgccaggcaggatactgaggacacagagcccaggaggcccatgggtcaacagctgtcatcccccaagattggtccgtaagggcaccccaggaggcccacgggttgatggctgccatcccgaggactgattgaccaggcacctgcccaggaacacagcaaatcccaacctggctcgcggccggcggtcccccttgaaggcggcgcagcaggatcggggtttgcccgcctggggcgtttggcttttgtcccgcgccgaggtccggcccaggagtgcgcttgggagttcnccggcgcggcctcggggacaaaggcccgcggagccgacgtgcagcagatttcacccaggcccgtccgaccagaaaacgaagaacgcccggaggcgggaggccggaggcaggctgctggctggagaaccgacggcaacgacggcgcaaagccggcgcggaaagggcaggcgcaggacccaccctgacgccgcctctcccagccggctctcctgaccccccaagccccgcagctacggcggccccacagcctgagcaaaggcctcacctcagccgcggacaatggcggctgcttccccggcgtcgac

SEQ ID NO: 311647 - DNA, 729 bp, Homo Sapiens
  misc_feature (466)..(466): n is a, c, g, or t
  misc_feature (663)..(663): n is a, c, g, or t
  misc_feature (667)..(685): n is a, c, g, or t
tatctagaacttagggtaaaacactgttcatagaatcatgaggctcttagccaaaaatgattttctgtcatgagttattaccaaataggaagagacataaatcttagtgtttggttgttccaaatgtaacgttcttatcacttttctattcaagctcttgtccatagtggccaatgggcttcagcattcctatcactgaacaaacaggtaggttgactcaggtcgtggccttggtctgattccttctgcttctccagtactgagactaatataaatccacagttacaggtagtaattgattgtatttttctttcaccttcatgggggaaagagctcctcccagcctctgattttattcagtgaatttggaaccagtcctctaactcccacggagcactgtgagttcctgttggccttgtgagttcctgtgaccttaaaggatactaatttctggcaaccccatgtnttgcttcgggaccagggctcagcaggagccaggttttgtctcccctatgaagttaggtgtacaatttctaacccatgaaaatacattcgccttgttttaagagtatggttatgtcttcgttttctcattttacactttatctgtcccgcctacatgtttgaaacatagaaggaggaagcttaaagactcaatgcccncttnnnnnnnnnnnnnnnnnnngtctttctggaattaatctgagggttaaggaataccataccata

SEQ ID NO: 311648 - DNA, 600 bp, Homo Sapiens
  misc_feature (32)..(32): n is a, c, g, or t
acaagttttgtatttgggaggggtgtttgttnttctttagagatcatacctactttcctgcctttttgataagtaaggcatgaaatgaaacaaaagttttgagctgtaaggtgcctataaaggatgtcactacagcattcacaatgctaggtgtgtaagatgacatggctgttaccatgtactaaagaaccccatcatgtgagagatcgctcaaagtcattaacacaaagcagtgaaaatcatccagcaaagcagtgcttatgagagactagaattcagagaaatgcaaggtacgaacttctctctaatccaagggtattctgctgtgatcttctaatcagtgatgattgtgcttatgcacacgacatcttcatgggagagaccaggctgattgcaaaataatgacaaccaaccagtttacctcaacatagctcactctgcaatgtcagacatgcagtgtagagcagtcacaaagtcaagccatgaatacagggatggaaaaacattccagtgagctggtctctacaatttttaagacacttcatcctcccaattatattctttgtcataaagaggaaaaacagcaagattattaaatcc

SEQ ID NO: 311649 - DNA, 288 bp, Homo Sapiens
taagctgcttttagaatgagctctaaccactcctctcaatgagcgtgacttttcttagcattttctgaatgctagcacggaacatagagagtccatcttggacttatttgggaaatttaaaaactgccacctaagtttgggctttgaggatggaaagaaccttttcatgtttgggttcaccaatataagtcattttgtgggaaagcaaatcttaatagtatgtgctttccattttgtccaagacatatttctagtaccctataaatatgtaaaaaaatgtaaaaatgt

SEQ ID NO: 311650 - DNA, 834 bp, Homo Sapiens
tgagtgacctttaccctttccctcttgtagtgtgagtgttgtcttgtctcgaaagaaaaatgggtcagacacaaagtaagcccaccccactaggaactatgttataaaaaatttcaaaaagggatttaagggagactatggagttactataacaccaggaaaacttagaactttgtgtgagacagactggccagcattagaggtgggttggccatcagaaggaagcctggataggtcccttatttcaaaggtatggcacaagattacctgtaagccagggtatccagacaagttcctgtacacagacacttagttacagctggttttagaccccccacagtgcgttgagaggacaggcagcagcagtgttagtggcaaagggacagatagccaatgagggatctctccccacccgccaagggaagtcagctcctaaagttctatctgacccaatgtcagaggacccatggcaggaaatggcacagcaatgccccccgtccttacctagaagagagactccccactcctgagcccacagcacctgtgcctcctctggacagatacacccctagaccacccagaacagacaagagagaatgtgaagctgcgggagaaacccctcccttggcagctcatttacgatctaagactggaaagacaagtgcccccagttaaagaagaaacaaaatggctccaagccagaggtctcaggcaaggatgaaagggccttgtttaatctggcagaagggctactggactaagggggaccaggctcaggtgcccctaacgagcccatggtcaggatgacagtcagggacaaggacatagagtttc

SEQ ID NO: 311651 - DNA, 565 bp, Homo Sapiens
  misc_feature (19)..(19): n is a, c, g, or t
  misc_feature (71)..(71): n is a, c, g, or t
  misc_feature (224)..(224): n is a, c, g, or t
  misc_feature (342)..(342): n is a, c, g, or t
  misc_feature (362)..(362): n is a, c, g, or t
  misc_feature (390)..(390): n is a, c, g, or t
  misc_feature (404)..(404): n is a, c, g, or t
  misc_feature (414)..(462): n is a, c, g, or t
  misc_feature (474)..(474): n is a, c, g, or t
  misc_feature (494)..(494): n is a, c, g, or t
  misc_feature (506)..(506): n is a, c, g, or t
  misc_feature (527)..(527): n is a, c, g, or t
  misc_feature (545)..(545): n is a, c, g, or t
ttttcagggttgagattcntttattcttggaggtaggaagggggtaacttggggtggttactacttgaatnttcaggataagtattgacaggaaactcaatgtccttgctcctgactgtcatcttgaccatgggctcattgggggcacctgagcccggtccccctcagtccagtaacccttctgctagattaaacaaggccccttcatccttgcctgaaacctntggctcagagccattttgtttctcttttaactaggggcacttgtctttccaatgcgctgtttctttacagtatgcacactgggttatgctgcaggcatgggttgggtcagactgagtntttttcccaggggtcccccnttcctcggcccttcgggggtaactcctntaaatagctgcagntagcagatannnnnnnnnnnnnnnnnnnnnnnnnnnnnnnnnnnnnnnnnnnnnnnnnacgggcttgcanaatttttacttacaaacatnttgactgggtantttttaaataactgtgaaggnttcaatacttacaaaccnaggcttgttttttaaaggtt

SEQ ID NO: 311652 - DNA, 1104 bp, Homo Sapiens
  misc_feature (961)..(961): n is a, c, g, or t
  misc_feature (970)..(970): n is a, c, g, or t
  misc_feature (983)..(983): n is a, c, g, or t
  misc_feature (1004)..(1004): n is a, c, g, or t
  misc_feature (1006)..(1007): n is a, c, g, or t
  misc_feature (1015)..(1015): n is a, c, g, or t
  misc_feature (1020)..(1020): n is a, c, g, or t
  misc_feature (1024)..(1024): n is a, c, g, or t
  misc_feature (1027)..(1027): n is a, c, g, or t
  misc_feature (1029)..(1029): n is a, c, g, or t
  misc_feature (1033)..(1034): n is a, c, g, or t
  misc_feature (1042)..(1042): n is a, c, g, or t
  misc_feature (1051)..(1052): n is a, c, g, or t
  misc_feature (1056)..(1056): n is a, c, g, or t
  misc_feature (1063)..(1063): n is a, c, g, or t
  misc_feature (1071)..(1071): n is a, c, g, or t
  misc_feature (1078)..(1078): n is a, c, g, or t
  misc_feature (1086)..(1086): n is a, c, g, or t
  misc_feature (1088)..(1089): n is a, c, g, or t
  misc_feature (1093)..(1093): n is a, c, g, or t
gttggtgttaaaaaaaagatggcacatttattgctacataaatgttatatacatattgtgttttctgttacagtgacagaaaaaaatttgaacttcttgctgctggttgaaaaggtttatcaataataccttgaatttgacacaggatacaaatctgcaataaaccaacaatggaaactggagaacaagatgagaagcaattcatctccaacaattagctcttacaatactccataggtactacacggtatgctagaatcctactatggtcttaaaatgctattgtaaatttctgatattaatgaacaggttatggtaaataaccctacattttttactacctaatataataaaataaagtaagaaactttttactgaaaactttttgatttcaaaaatctagaaagagtaatatttagaattcaagaaattttcttacaagattattgtataaaagactagctacagtgaaaaataagccaaatgtttttttctttctattttatgaaggaaagcttctgggcatactgcaaagtctaatatagcgaaaaagacaacaagctctgaagaaaaagaggccaggcagtggcatatgttcactcacacatcataagcaacaacttctgtttagctgattaacactgaaatgaagaacaaggccacagatagagtccgatgtaactggagaatatatgcaaattaaagtaaccaaaaagtccactaagttcacaaatgactgacttgttaggaatcatcctgattagagtaccagaagttctgtcttgtttttgttctttcaaattaacagaaatctttaagctacatagtgatttgggtccttcctctgtgtgctgattgccactgttgatattggctatgaggaattattaagccaagatacctcctttagcatgtttttctctcccagggttgttgtggtggaagacaggtttcatggagntcaaagtgnttatgtcttttanacaactcctaaggttaaagcngnncgtgcttnatganagtntangntggnngtaagtantggtttatnnatcnggtctcntttgggcnggggagnggttgcgntnnttancccccccattc

SEQ ID NO: 311653 - DNA, 869 bp, Homo Sapiens
  misc_feature (34)..(34): n is a, c, g, or t
  misc_feature (85)..(85): n is a, c, g, or t
  misc_feature (95)..(95): n is a, c, g, or t
  misc_feature (102)..(102): n is a, c, g, or t
  misc_feature (104)..(112): n is a, c, g, or t
  misc_feature (114)..(130): n is a, c, g, or t
aaaccggctagggcccaagttccccttcacctanctggggcccgcgccgccaaaacgaatggttttagaaagccttctcgagggnccgaggcggnccgacangnnnnnnnnntnnnnnnnnnnnnnnnnnttggaaaacaaaaatggaacatttattcgcaactcaaatactacgcatatacggtaagagattaaatataaacacagcaagttcccaccccagtcctatttgtccaaggctgcatggtcaaatggaatcttgaagagaacacctggacaacagaggacctgtcagcgacgtctccggtctggacttctgctgcgtcttcggccacctctcctcttgccttttggtggaccccgaacaaaacaccagtcaacgctgatgggctgtcccatcaaatcctggccattgagtccctccatagcagcctgggcttccttgtatgtttcatattcaactagagtataccccttcagatatcctgttcgcctgtcgaggttgagatgaatgtttttaatttccccatattctgcgaatttgtcgtgtatgtcttcttcggtggcttcctcatggactccagttacaaagagaatccagccttcaacagagcgttgtggtccgggttcatcgccatcctgctccacgctgtcataatcctcacgcatccgcgctcgggacccctcttcggagccaaagccgcgacccttccgtttcttcgctttttctttcagtttgtgaatgctctcgtccccatcctcatccatggcgaaatcttcgcccccagcctcgtgaagatctagcacgtccgccatctcgccttcgatcgagatctcgtctgtgccgctcagacactaggtacctcccc

SEQ ID NO: 311654 - DNA, 1670 bp, Homo Sapiens
  misc_feature (729)..(777): n is a, c, g, or t
aaacataaggttagactattgttgggtttactgaagaaaaaggaacgggaaaaaattaaatcacaacacacctctttaggtcagttaaaggccatatctctagctgggatattaaaaaaaattaatctcaccagcccaaattctaaaagttaatgccactagtaacaatcaacagcaggaaaaacaaacctgctaacaaccagcccactcattagcaaaaaagcagtttaactcaaatacttagaccaaagtataacactaaaccaaactgccccacccaccagcaagaagagaagatataattacttaaaaatcaacataagcttagtatttcttacaaggataacaatgttccaactcccgagagagtgctcagaaggactaaaggtggagtgaaggcaatgtctagggattagtatcccaaagtgtttaaaaacccaaagtaccacaaacacactcaacttgtctatgaattagagaacaagatactgctgctgcttctttttgtcttttgaaatatacaatgttttgtagtctctgcccttcaatgtgaaagcaggacattaaatttgaaattatttgacaattaaatgtttaggaccatctaacttcaactgcaaaactaaacagatctaccttgtccttccttcaaaccacctcacaaaaataagagaaaacaattcaaacatgattatttttttaaagtccttgaaagtattaaaactctcnnnnnnnnnnnnnnnnnnnnnnnnnnnnnnnnnnnnnnnnnnnnnnnnnctttaaaagaaaagtgttggggtgggggaggaatcaatgggcctctcttttatttggcgacaagcaagtgcaagaaagttcatttgtaatttgttcagttgtctgtcttttgcacatctgcattctgaccagaaggaactttgaggtttttctgcagcacatgagcatctgcgggctctatcctcttatagtagttcttctttgtctcaataatctcaaagccaaacttcctgtagaagtcaattgccgactcattgctgatctggacatgcagataaatgttgtcaaaagtaccatctttttcacagatgtttaagacatgatttaacattttagttcctattcctagccttcggtaaggtgccagacatcctagtgtcatgatgtaaagtctcttctgattctgtgaatgatccaccctacagcatactgcacctacagcaatatcattgaaataggcaagttttgctagctcgccaacctccagcacatccttgtagaacttgtcattgtagctgactggaaagatgacctgattcaatcttttcaactgtttaatattgtgtggtgtcacatctcccagctcgatccggcctttcatcttccccgcctgctgaggccgtcgttaccaccgatatcaacgccgtcgtagtcgccgcccttgggtctccgcacccttagctcgggccactcaaccccgcaagccggcctcctagcctgggcagggagctgtgcgagcaacgaaggccgcgagagtcgagtgagggcttgagtctggtgggggcgggagtgtctcccgccgccgcgcttgtgccgccgcttctccacacgtgcactcgggtctctcggctccctcccgccgctgccgccagccagacccgctgccgcgctgt

SEQ ID NO: 311655 - DNA, 1486 bp, Homo Sapiens
cttagtttattcgtgttgccttactggtttgtattctgattgtcgtattacttcttgagcaagagtagagtactcagatcgccacaagtaggtggaaggatggggagacagtgggcaagaagctcaagggccgggcagaagtggggtttccactgacaggggagaagccaactattgctagcacagtgacactgctcccaccctgggcagacctctcatggtgtgccacctgtcccctgtgctgtcatagaaaatccaaccaagggagtgccccttggatggtaagggatgagctacgtttttaagttatcggatctacttttcccttttactttagccaaggccatttccaaaagcatccagacatctgtgatggaggaggaggcctgagagcggaagtgctaagatgtgactcttaagccttcagaccagaaacctcaagtaggttttcagtggagaaatccagtgagattttgccctgatagtttgtagcagactccctctgaacacctgtggaacatgctgacctcccagtgtctttcgaggggaggcctgcagcacagcccctcgagttctcttccagctgcttctgtggagaggaaggtgcttgttgactgctgataatactggcggtacattcgtctgagtttgctaataactggaagattcgttggcagacgtacaaagcaaactgtgcgggggcagataaagcgacacgatgccagctgccagcaagctgttctgcgcagcaggggctagggccaagggctcggctgctggtcacagcagtgagcagccggcacacaggtcaggcaccctgccctcaggttaggcctccaccccccagaccagtgactggcagccctggcctttggtgagggcccttgggagcaagagaggccttcttgatctaaacactgcctccataggcagtaactacggacaaggaggaagactcgcccgttgctttgccttggtgtgatgagcccagtttctgaccgttcctgtgcttgtcacagtaagttcaaaaaggaggggttcagctcagaccttgtgggttttacaaagctttgcgttttaaacaaagcctctgaagttcctattctgtacctgctctcagacaccttaagaattatatcattcacagaaatcattgacttcctgaaaggtttttaaaagcccccgcccatgtgtgcacatgactgtcacacatgggttgtacaagactaccccctcctcccttgatagcaatgggtaatatttgctattagcttgtccagatgctgggggcaggcagggggagtggaggaggtaagcagtagcgcatggctttctacggcagcttctggtgcaactcaaactaaaaatgaagtgatcgcataggcgccagtggtaagctcttttacttttcttcttctttaatttttaaaaacacttcaatattttaatgtcctgatcagcagcagtacaaacactaaaagcaagg

SEQ ID NO: 311656 - DNA, 457 bp, Homo Sapiens
gaatttgatctaccttttggtaggaatatttcagcgggggcatatgaccttgtggcattgaatagatattcataaagttgcttagcctcaggacatatgctcaggagactttctacagaggtcgatgctagcagttgctggcatagtccgtgcaccaggcttccactgtacagtcgagttaggtctggctctgggagaggagtggacagcagctggttgagatacatccccatctggagacaggactgccactgacagaagatgtgagctgtgtctaagtccagtcttgtgcccagccgtgtctgcgccttcactctttggaactctgcatacaacatcttagcaccatcttcctgcagctcttccttaccttttaccaactagcgaggagcaagacactgagcctgcctgggtacagggtccacatttccagggctgttgattatgggcaatcaag

SEQ ID NO: 311657 - DNA, 679 bp, Homo Sapiens
gtgaacttcaaaccaggttgattttagtaacccaattgctttgatttgacattaatgtagtcttacagggctgtgcttgctgggcatgcttttacgtctgtgagataatttcggttcagtaaattggccaatctttttatttttctaagacacagaaatgtatttaatatattccattttgtttggatatagtttatagggtgtgtggatgtattatggcggaaggtttctttatgttattttgttaatttattgggactctgtgtaaggccaggctttagtggtcattagacaccacatgtgttatgagccccttacccatagggttgggggtgggaagagaagcatatttttttgccattccggaagcaatccatttttattcacttgtgtgtcatgtaatggtctttggcaggagagagcactgagtcattgctggagttcagttcaacagagctgcagcttgggaagccctgtaagcccacagcttcctctcttatattaattgatggaattttactgtatgtgcctctgtacaagatgtagctttgagagctacaaaatgataacactgctttattacacactggtttcattgtcattgcaaaaacttaccctggttgtgggggagagttctagatctgtgccatgatccatacactggctaatagagtacata

SEQ ID NO: 311658 - DNA, 446 bp, Homo Sapiens
ctcttagggcatctgttagatgcattccaagctccaggggagacctgtgtggaggtgcaagaaggaggagctctaaggttattttaatttagatttatctgagactccagaaaaatcacgtacgtggtgtggaaattatcctcacataggcagagggagaaaacactaaattcatattctacatgtatcttcttgtatcaagaccagtgttttcagaaatgagtttgccaataaatataaaaaccatccatcggttttcttcccaatactcattcttcccctaaacgttacataggtttttatactcttaattaaccacatccaataatttgtttcctaggctgggctagctggatgatgcctttttatctggttaaagaagagtcaccaggcaggaaatgatggtagagagatggaagactacaaaacccttgccaaattctgcc

SEQ ID NO: 311659 - DNA, 633 bp, Homo Sapiens
  misc_feature (121)..(129): n is a, c, g, or t
ttttttagaaaagttatgtgcaactttcaaaatgacatactaaccagatatcagcattcgaaagctaggttgaataggactggccttgatgcacatgcagatgatttgctttcataatatnnnnnnnnntggtaatgtcagctgtattactactgtttctatatttatgattaattactagcagtacaactcccagaaggaaggagatggatccaacagcgatgtaagcaatccccaaaaatggattttttcctcccatccatgaaatagtgctcaagatcatccgttttcgtccatcaaaataatgtacagggtaattgtatgtgacattcaaagagtatcggccagctggtaatgttggatgtaaatcacttttcctttctataagacgatacaacttgcgaaaagtaggtaatgctgcagtacgcatccaaacaataaaatcctcatttatgaatccattattatctgggtcagaatccagcatgtaaactggtttaagccagttcacaggctttgttgtacctttaaatcgttcttccaggttgtctcctccagggggatttctgaatttcacatttttatctgtccaccaagcaatacctttctttttcaaagcgataggtataggat

SEQ ID NO: 311660 - DNA, 571 bp, Homo Sapiens
aacaacccagggaaaggaaatggaataaaatagcctaaatgcatgaggtaggcccctaatctgacaacacgccggacagctcaacttaggacttgctctcaagccaacacaattttctacaaaatcgtaggcagctacaaccgctccttgattaaatgcgacaaactggagggaaaaagtcacttacaaatacctacatgctggtttttaatgcaactctcagtgtggttttccgagggggctgcaaagagggaagtagtggaagaaacgagttctaaaatgaggcgctctcgtaggaggcaacaagtaagctctgccccaaagctccttttaaaaccaacataaatgagtaacagaagaaaaggattttgggtccaggaagtaggctcattctccataaccatcggaaaggaagaggcccaggcagcgctccacatcctgaccctagcttttaacaccatcgttttggggagaggagaggaggaacgcacccacagtgaggtctccacccaacacttctccgaccccagcttcagcctggcgcaccttccttcccaaacccgcctctccc

SEQ ID NO: 311661 - DNA, 1030 bp, Homo Sapiens
  misc_feature (303)..(313): n is a, c, g, or t
  misc_feature (368)..(377): n is a, c, g, or t
ctttagccacttcagttggtgacagaacacaaaaggaaaaaattcctacgtatacacatcagtctgtctccactttttataaaactggaataaaacgggaaagtgccatctttattaatcctaattgaattttaaatgtccttttgacacaaaaaggtatatacatgacacagctacacaaccttttttcaactggacaacaagtgtcaaaaccctgtggatgtatagggtaaaacaagattggtcaggaaaagagaattgttcctataactggtaatctgacacaatgtcctattgccattnnnnnnnnnnnggtccattttcagtttattcaagtttattttcatggtgttttatccctcttgatnnnnnnnnnnttcagacttttgtaatttgtgtatgctgatcttcatcaaaaggttcattctctggatcagagtcagtggtgtcagaatatctataatgatcaggttcattgtcactaacatctggtgttacagaagttgaactgctagcctctggatttgacggctcctctactgtttttgtgaagtacagcttcaccttaaaatttggagaaaagtatcggttggctttgtctttatttgctttgtcaagatcattttttgttaaagtaagtactagatattccttgtcattatctgcacgctctatactgcaaatgctatcgatttcttgatcacatagacttccattttctactttttctgaggtttcctctggtcctggtatgaagaatgtatttacccaaaagtgaaacattttgtccttttttagcatcttgttctgtttgtggaagaactctactttgatatcaccacacacaggtaacggctgagggaactcaaagtacatgaacttgtcttcccgtcgtgtgggtcctgaattggaggaatatatcttcacctttagctggcagaccacaaactgaggattgcaagttccgccactgaacattggaatagtttcaaacatcatcttgtgaaacaacagtgccactggtctatcc

SEQ ID NO: 311662 - DNA, 1398 bp, Homo Sapiens
  misc_feature (209)..(209): n is a, c, g, or t
  misc_feature (211)..(214): n is a, c, g, or t
aaatacaaatacaaagtaagattttataataggtaagtatattcaaagatcgtccctcaaagttgaactcatttgaaccattaaatctaaagaaatccaatcaaaaaattaaaaagaaaacacataagattaataacttggattttcgaggggatatacagcaaagattgaaacaaggtctcagaagtattttggcttctgttaatttncnnnntgattacaatgaaaagaaatgaaactccaagttaaaagatatccagaaccactttaaaattctcataaagatagtcacataacatgggctaccccaaccctactataagtctactgtttgcccaatgccatcaaggtttattaccaatagtaagaaagattcaaatatctggtatccagacaatgttcacagctacttctcctttaagagaagcagaaaggcagttttaggtgtggtctgtctttattcccccgaacttgatcaatgtatacaatgcttacacattcaaatatgtgcaagattcaacaggaacactctccactgctgtgctgagtacgcaagtttccctgagatgtccgcatcaccgagggctccgttctaactctggtcgacagtttctgaacaatgcaatagtgtagctagaggactatataaaatataaggttctctcaaaaagattcatggtgtttggggataaaaaacatatcagtcttcttggctaaaggttggcaaatgtgttttcaactttaaaatgtctgaaactggctcttttctttgttgatagaagctgagtccagtgatgtgctcaacatctgtgatccgtgctctgtgtaacattaacaattcttcaacccatgaggagtcatgcttcccatgccacacagctctcgctgttatcagtcctgtgaggcaaaatgaaagctaaggtgtctaggttttcacagtgcaaaggcgtctgagatgtatctttacagcttgttagcacaataaagaagtgagttggaatcaaaatttcttggttacggatgactcttcttttttgcctcagattctctaaggaatcacaacgtccatcataatcaaagtcaaacacaggaccactgacgacattgacaccatttctttcttcagcatactttcgcagtagggtgtcatgaaagtagcgccatataacttgaaaactctggtacattggcactatatttgtagtaagcaaagcttcagaatatattccacttgaatttttatttagttgtggtggggagaggaacccgtaactcactttggtgttatttttataaaatgaacatttatggacaggactaagaggaattctaaagtcctggtacagacagttggagaagtcttccgtagagaaactgtcatttctgtccacggtatag

SEQ ID NO: 311663 - DNA, 1369 bp, Homo Sapiens
aaccctcccccccttgccctgtgccctgccagtgtcaccacccaaatgggggatcaaaaacccctttttcaggacttcagcatccaatttgaaaaaacatttcctgggacttctgaagccaaaattggaaaaattaatgaaaatatttttagcacatctgaccaaaaattacgggctttttgtacaccacaactagaggcgataggaggaaagcatacaggcctcccactcagactctgatcccaatctcgattctcaggctcaccaaggaaaagaccttagaggcatcatgtagctattctgggcttcagcagctatcaacgtcattatgaggactgaataaggtagtgtcggtaacacacctggaatggcatctggcacatggctgccattatcattagttaacagtactgataaaaaacagtgatccgggaggatcacttacatggaccaattcctcatcatctcgagcagagtaaatagcaaatctcctttccaatgtagtctgcaggttatcttgttcactggctgaaagttctgcattaactgtaaatgttccaatgaaccacttcaccaggtttgagaggtagtaggtgtccacatctcgaggcagcactctggtaaagcgggctgggatgatggacaggccaatagcatgcagatctggctggctgcagatgttatttcgatagaagccatttgctagcaggcagagaaggtgaaccttgtgtgtgtcctcatggacccctttattgaaacgtttcatcgccctccgaagatatgtctcaaactccagttttatcttttcacttctttctcttgtcttcgcctgctctggcgtttcaatctctatctccactggcttcacaggcagaagagatcgagagaaggctgtactttctctcacgtcacccagcacaggctcactaagttcttcaacctcttcccaatcattttcactttcttcctcttcttcattgctgtcttcattcatggtagcccctctcttcagatggtgtgccttcttgaggtcacttggaaagtccctgaggtcatccccatcgctgagggcctcatcctttataaccttgaggttttcagatttaacagtcaccttggccactctcttttttgctggaccatctgctgaacccccaggatgactgcagcctcttttcctctttccttgtgaaactttggagagaaggctcttctttgggggtttctcatcttcaaaggcatcctctctcctcctcctcacgccgggccttgctcttggccttggatttctggctgcgcagttcgcgtccccgcggctccccgccggccgcgcgtttccgagccatgttgcttgtctgggcaaattccc

SEQ ID NO: 311664 - DNA, 467 bp, Homo Sapiens
tttttgtcagtgtgacagctggatgacaagaagacctacaactgagtagaaggctgtgacttctttccttctcctccatgctatcaacatgagtctttaaatgtcctgtaagattctgagattttaattttgaatacaacctcctaaaaagtgaggtaaaaaactatcttcaacttctatattgcaaatttgttgatactatcaatgcacgtgtttaactgagatgcataaaagcctttctcctcaaaaggcttatgtttaactaaaattgtcacttttaaaagaaagtttatggctaaaatgtatatcatcattatcagcaggagtatgattgtgtctgggagcccatttcactagagtaggcccaaagtcttctatcaaatgggttagtaatgtgtttcttctattctggtgagttaaacagtaagctcttgggagtgatttgtttttatttttacagtgatcac

SEQ ID NO: 311665 - DNA, 757 bp, Homo Sapiens
gaaagaattattacaatcagttttataatactacagacttatgtttcctccatatctaggaataaaaatatccaccctccctcaatgattcatcatgtacacatctctactctttacaagcactatccttccagttgtactatgaggggaaatccctctcactcctgggtttttctacagtatacagaaatagcagtcactttagcagtaatgtacaatactattcaatctttagttgaaaaataaagaagtggattgccctatttatgtcctgatagtaaaaagacacacaccattgaaacataaaacgagtcaacaaacttctatttttattgacaggagtccaaaatgaatacaaaaaaagcttcctttgcatgttatacttactttccttaaaaagctcctgatagagtcaagtagactgaaaactaaggatgtagttcagcttttagagtgaaccttttttaaaaaaggtttaataacataagccaccagtatcagaaaacatacagtcccactatcacttttagagctagaacttatcaaagaattagatcctgcattgatctgctaagatagaggtttagaaatggtttaagccattaaaagccatttttataatctgtctgataactctgggcattaagaaaaggaaaattccaaacgtagccctctatatcatgtggaatgtgagagaatgccacttatgaccagataagtcaaaataaaagtttaaatctatgagtggagctgttgt

SEQ ID NO: 311666 - DNA, 550 bp, Homo Sapiens
tcctctccctctcgcttttgcttctcgtccaggctgctgcgcttgctcaccgtgcgcccgaagatgtcgatgcggtcgggcggggacgaggcgcgctcccggtcccgctcgcgccgggacacggccgtgttggtggagcgcgaacgggaccgcgactcccgccgccggttccgtttactttcccgagatttggaacgcttccgcacgcgctccttgtcccgggatcgcgaccgggaccggctgcgcttcttgttgtgcttgctgctcttggtgtgcttggagcgggacgagctccggctccgagaccggcccatccttccgggagacgctctaaccgctcgcctcaggcccctcacgcggccagttcccctcgcctccgccttcggacgcgggctggcggttctaccgaggccggaggaaagaaaggtgtcggccaacggactttatgccttttcccggcgtctacagctgccacgaaggccgcctccaacgagaaacccgtagcgccgggcgcccctaagatggcagctgcggctgcaccggccgcccc

SEQ ID NO: 311667 - DNA, 176 bp, Homo Sapiens
gtctcactctgttaccccgctggagtgcaggtggggaaatcatagctactgaagcctcaaagccttgaactccggggccaagcagtcctcctgtctcagactcccaagtggctgggaccacaggcatgcgctgccatgcacagataattttgtggtttttgtgcgagatggggtct

SEQ ID NO: 311668 - DNA, 618 bp, Homo Sapiens
  misc_feature (482)..(514): n is a, c, g, or t
atcattattctccgctttctctttctaatcaacacttgaaaagcaaagtgtcttttcagcctttccatctttacaaataaaactcaaaaaagccgtccagcttatcccatcctctgattgtcttctgacttaagggatttactgtggtgtaggttctgccagccaaccctacaagctgccatttccagtcctagcatttaagtaggatgttgttgcctttaacttttcttatccaggggaaaattgccattttagggtcagcatgaacagctctttcttgtatgcgatttaaaacaaactggaaaggaaacttcacacgtcaaaatccatagaagcgcctggacgaggcttaaagtgctttgtgagtgaataggagccattcgctaattctagacccacagtgtctggtggtggggcttcccttgtggggcttctggtggtggttttgccttttcttttccctcctccatgttcttctaaannnnnnnnnnnnnnnnnnnnnnnnnnnnnnnnnttcttcaggtctctaagcccctggaagcagcattgtgtgatattctcagaggcaggggaaaatagagggaaaaatagagactattggtatgttctccccatcag

SEQ ID NO: 311669 - DNA, 654 bp, Homo Sapiens
actgttcgggactgctgaattggcatggccattgaccagggcttctgtggagatactatcatcgccaccatctttcaaatagctgtaatatccaggtggccgctttttcttctttttacgctccctttgtccaagaccacctgagacaccatcattttccaaaacttccgcctccacattagaacttccttccaaagcgagggcagagcctgggtactggcagtcgatggagccatagcttgcttctttagtgataccatcaggggttattttggaagctgtacaaccgagaataaattcaggggcctgagggttcagtgtgcttgaaatactgtagctgggggttctcggcaaagtgtcactgggttcaatgacttcatcgacaccaaactcaattctctgatattcttgtccatcaggtagtttatccacagcctgtgtgccacacagaactgttccactgtatggaggaagctcaactgaagatcgaggagtcacaaagaattgattgaattcatcagggctaaaatctccaaaaatatactgcgggctgtggagggccatggctgcccgtttcattgggactccgcgatcctccggctgctcacgctgcttcccccgccgccgccatcttctcgcccgcacatacacact

SEQ ID NO: 311670 - DNA, 284 bp, Homo Sapiens
tctacaaaggaaaatatgcctccattatgaacaattgcttctagaggcaaatagctatgaaaaataatagttttcaagaaataattttaaaattgggaggaaaaaagaacaagtcttataaaaatctgaatttatcacaatattgtaagaggagtactgccttgttaaaacaatatcaaaaggaatagaaattacagaaataatgtctaatattcttagaaataggaatattgtcaatattgaacccaatcctataaagctttttacataatacactaaatatg

SEQ ID NO: 311671 - DNA, 1028 bp, Homo Sapiens
cccacaaggactgctgttgaaagagccatgcagcgctgaccagcagctccaaatgctgccccaaccagctggttcagggtattttccttattggcatctggcatgactaccccgtggttcttggctcccatattggcttgaaccctcttgccatgtcttgatcctctctcgaagatatactctcgtgccttgttggatcccacaaagctgattgctttgatgtccggatgatcgcaaataaactttacagcttcatgctgtccatggatgatgtttaatgttccatcaggggcaccagaatcctggagcaacttagcaagaagcatagttgctccagggactcgctcagatggtttcattaggaaggtatttccacacaccatggccatgggaaacatccaaagggggatcatggcaggaaaattgaatggagcaatgcctgcacacactcccagaggcagacggtaggaataaaggtccatgtctttggtgatggatggcatggtctctcccatcatgagggatgtcacactacaggcatgctcaaccacctgaaggcctcgaaatacatctccttcagcatcagctagggtcttcccttgttccaatgtgattaacttggcaatttctttcaagttttctttaataagttgttgatagcggagcaagacctgctggcggcttaatactgaagtgtctgcccatgcaggaaaagcacgtttgcaggaagcaatggctgcatccatttctgccttggtggcctgagggacccgaccaatgacctcattggtggctgggttgtggatatcgatccatttgtcacttttggattcaacgaatttcccaccaatgaagagctttacagttggcactgaagaagagaaggaagatgctgaataccaggtgggactggatttcaccttggaagaaacctgcaggatccgggctcgcactgccgccgccgccaatagcgccgccatggctctcggccgccctagctccgcaccccgcgcctctactgcccagaa

SEQ ID NO: 311672 - DNA, 849 bp, Homo Sapiens
acccgttgttgtttttcccgcaattctctggggaaacttgggtgcccccatgggtccaattggttggggaggaagaaggcgccaggaaaaagaaagtaacccctgccaagtggaggggggggataatggaggctacccagggaagcccggaggcagaaagggtgtaggtgggcgaagcaggtgccagcagggggttggtgctggggcccccttgtggggtaggtgctgctgaggaaatcccagtgtataatttttaaaggcctcaatatcctcaggcttgccaactgtgatacagatgatcgctccgatgggaacatccctggtaccttcagcaacaagtatctttgccatataacactcctccaggctctcaaatccaacagtggctttatcagtttcaacctctgcaattaggtcaccttcattgattttgtccccctcttttttttcccaacgggctatggtgcctgcctgcattgtgggggaaagagaaggcaatggaaccttctgatgcgggggaagactgtaatagcggcggccgggcgaccccaaaagctgcagcagtaagcggttccgcggcgtggccccagaactgggggtccagccgcacagtgcccggaccccgccataccctgtagtcacgctgttgcgacgagcgggagccgggccagatcgcgaggtcactcgtggagttccgggtacctcctgcaaggccgtccaccgagcctcgagtcccgcccatggggctacattctgagcccgtcgcgcacagacgcgccacatagtgccaccaaccccccacaccccaaaaccaacgccgtctccggagtgacctctccaagagcagcc

SEQ ID NO: 311673 - DNA, 347 bp, Homo Sapiens
gagactgcatagggctcggcgtgggggtcttcaggtgatggcagaggagccaggcacaacagggaagtaagaggaaagcatatgtggaggcatggaaggatggaagaaacagcctggagatcctgggaaactgctaccagttcagagaggggtgtggggggttggtggcactatgtggcgcgtctgtgcgcgacgggctcagaatgtagccccatgggcgggactcgaggctcggtggacggccttgcaggaggtacccggaactccacgagtgacctcgcgatctggcccggctcccgctcgtcgcaacagcgtgactacagggtattgactcatggtctcgtgcc

SEQ ID NO: 311674 - DNA, 735 bp, Homo Sapiens
  misc_feature (393)..(409): n is a, c, g, or t
aaaacagtgaggttaagttgttccacctccacagagtattctggtgtctatccctaagctctctttgggtcctctaagctggttaggagaaccaaagaggggaagggggaaagtaagaaagactactccaattgaaaaccatagacacatatgttttattttagtaaaaatttcaaattatgactttagtagtctttaaaaggttacaaccatatcacagaccttggcaaagctgcagtgtattaatttttatccccagtttccattctttaaccttcaaggaacgaaaatgaaatcaaaattttaaaacacatgattataagcctttgtatcaactgagaattaagaatttaagtcatgaatctttttcttaataagctacttgacgtaacnnnnnnnnnnnnnnnnngaaatcttactaacctctgtactcttagagtttgaaaaatattgattacagctcttcctacagaatcacggtcaccttcaaaatgctatccacaatataaagaaaattatgaaagtcagaaagcagcttgattgtcagtagtatcagtttccatcttctttaacccatgtgaatgttcaagacatgtggtagaagaaaaggaataatgctatttccaatgttcatgataacaaacactctaggaaaacatttaaagaaactccatgatttcacagttaaaattagagctctattaataaccaacaagctaaggtgttttctatatc

SEQ ID NO: 311675 - DNA, 1192 bp, Homo Sapiens
  misc_feature (22)..(22): n is a, c, g, or t
  misc_feature (37)..(37): n is a, c, g, or t
  misc_feature (146)..(147): n is a, c, g, or t
  misc_feature (309)..(309): n is a, c, g, or t
  misc_feature (709)..(709): n is a, c, g, or t
cataaggcctctgctggggtgnctgtggtgcgccagnttgtgttggtctatatcctccatactgctgaacttgttcctgtgggtagtagaatactgaggacctggacaccctgtgaaggaccgtagccctgctgctgtctgggtannccctgctgcctggggtactgctgctgctggggtggatatccctgttgtggaggtggtccctggtatgcatcttgctgttggccatactgtgaatttccatcagggtaatattgctggttcatgccttctggaggaccttgtccaccatgactgtattggtcnccgtaatagtcttcctggcctgagtactgctgtggtgggccctgttgaggaggtctatagggaggaatctgtctctgacccatcatatgattgccttggttaacttgacccatcattcccataggtggctgctgtctttggtaatgctgtccgcctccctgtggcatattgtattgctgagaaggaggctgctgatgcatcattggaccttggtttggctgcatactcatatttggtctgggaccatagtttcccattggttgtccctgactcattgtcatctgattctgtactggcatgctctgtgatgatggcacagaatggttgtaacctcccatggatccatggctacttgaaggcatattcatggaactgtttgtcatattgagttgattgggtnccaggtccctgcataggcatatggttaggcccaggcatctggccgttcatctggttctgcatgtgcggtgcaggaggacccccacctaccattccatctgaaggcatgttgtgagagcgtggaggtgggggagggccgctctgattcatccctccaggacccataggcatattctgtgtgggtggtgctggtaaaagagactgcatattttgattagaatctgctattgtagcaaggtataccaagtttgtgtgcaacatctgctgatactgagaacactctgaggtctttcctttattctgagagtccattatacactgaataagatggttattgtcatccaacatcttctgaatcgcagcgggagtgatctccctccttgcctcgctgcctcggggccgcgaaagccacagacatgttgccgccgtcaccactatcggcaagtcccgagcgctccggggtgaacggccaaactggggggac

SEQ ID NO: 311676 - DNA, 1107 bp, Homo Sapiens
ggagctcaaggagcagatgacagaacaaaggaagaataagcagagactgggcttcctcggatcaaacacaccccatgtgaatcatcacatgccaccacactgataccatggggggaagccgtgactagcctttcatcagtgtcctgcctgatcactgaataaagaactgagatggaggggagtgaacagtgcctattgttgaaaagttaaaaacaaccaagtgccaagatgttgagtgggttagctccgagaacaatttataactgtgttttcatggttgcgaagacctaacctcaaatgcatctgctagaaagcgtacatcacacattcgcaatgcatcaggaagaaaaggcttgcccaaaaggctggagagggcagggagcggcaggatggaaggagacacggggcagggagaactctcttctgctaaatcgataggagtcagttttgtcttaaatgctgactacagccactgacatggttggctggaatttctttcttttaattgtggcatataggtttgtgacacaagaagtcatactttggtggctaagttttactaaggaaaataactgaaaagattaaaagtgagagttgaaaagagaaatgataatgcttccaaactgtagctgtcacagggcaatttctttatttataacatgaagcacaatggatttacagctctaggaacttagtactttggagcttttgcctctcacactgacaacataacaggatgtgattgccttctctgggattcagacaggctctgtcaatgtggagcacaaaaggagattttcatataacttgttaaaaacatgttctaagtcatgtataggctaagattttaagaagatctgggggaataaaaagccaacagtaagccccaggaaagggttttttgagaccatatgtatgctattaaaatatattgagattaatacatgaaaatgcttagaagtgataggaattattgagaaacttatgatggtggcattgccttttataaacatggagtgaaagccatttgactcaacgtttgctgtgcttaaagaattgcttcaggacccgagcgtttttatgtatgctgttcctgcagttaggaaa

SEQ ID NO: 311677 - DNA, 687 bp, Homo Sapiens
  misc_feature (11)..(11): n is a, c, g, or t
  misc_feature (64)..(65): n is a, c, g, or t
  misc_feature (627)..(627): n is a, c, g, or t
gtccatatganacagaagccaataataagtttcttagggggattcgtctgctgaacactttgannatttttcaattagtttcttcaccattttatctgtgatgccgggacaggcggcttcagccacagcaatacttttctcgagttcttcaatcgcctgattcctgctagcgttattctcgtcctgctgtttaagttcagcaaatgccaggtgtgattatcatagacaaacaactcagggtttgcacaagatcttgctctgccccattctgtgctttctttggatcaggcttctttcgtacggtggtaaagctccattcaggatgagtattgttttccctgctggtagattccgaatcagagccctcggaatcagattcatcatcactgtgtccttctgccttccatctcttaaaacgatctatcagttcagtcagataagaagtcttctttgaattttttacaatgaatttgtgtttcagaagttcttttgctgtaggacgaaatgatggatctttgttcaggcaagcatcaataaactccttaaaagacttagtaaagtctccaacaagagttggaggattgtttttgggaataagaaacagaactctcattggatgcatatcgngagttaggtggctctcccttggctagttcaatagcagtaattcccaatgaccaaatgtca

SEQ ID NO: 311678 - DNA, 833 bp, Homo Sapiens
  misc_feature (36)..(36): n is a, c, g, or t
  misc_feature (38)..(39): n is a, c, g, or t
  misc_feature (41)..(41): n is a, c, g, or t
  misc_feature (44)..(44): n is a, c, g, or t
  misc_feature (79)..(79): n is a, c, g, or t
  misc_feature (88)..(88): n is a, c, g, or t
  misc_feature (94)..(94): n is a, c, g, or t
  misc_feature (103)..(103): n is a, c, g, or t
  misc_feature (149)..(149): n is a, c, g, or t
  misc_feature (157)..(157): n is a, c, g, or t
  misc_feature (161)..(161): n is a, c, g, or t
  misc_feature (165)..(165): n is a, c, g, or t
  misc_feature (190)..(190): n is a, c, g, or t
  misc_feature (192)..(192): n is a, c, g, or t
  misc_feature (197)..(197): n is a, c, g, or t
  misc_feature (215)..(215): n is a, c, g, or t
  misc_feature (217)..(217): n is a, c, g, or t
ccactcaaataatcgtctgacagtctgctagaggcncnnantcntcctcctatcccctactgatatatatcctctatcnatcatgcanggtacntcatgtcanttagtataccattctaaatatgtaagctatagaagaaggtcctgcnattctctntgcncctncaaatcattctagtctggttacccnancaganccacagctaggaggatananatacattcccatgttcactagccattaattaaacttaaggataagtccatttctacaagctaaacagctccttaatattcttaatctggacagttaattttgcagactttgttggtgtctgccttttcaattgttttacccaaaaagaggccttgaaaaaactttcaaattcaggaaaccccttaaacccctgcagagaaccctcatggtatgtgagtgtgagcactaagttgaagaatactcttatttcacagaaatctaggactgtcagactagggctgagttcattctcttccttcagagacaaaatttcaagctgagcagattcagagacaagggttcctcataggttatatactagtgctgggaaaaggagagaaaatgctatttcattgggtcttgtggttcctccagccgggttagaacaagacttgagagttgcaccctttattttcaaggccaagtggctgcagaaacatttcaagaattcctctggcaaggtggcaagtcagtttccttttagatctaagagtcttgtcgctttaagaaaaatttttttccccagaacctttcagagacttgtccatttgttcatgtgatgaaaaacgtctgcaaa

SEQ ID NO: 311679 - DNA, 488 bp, Homo Sapiens
gaacagaatgtacccattttggcaaggaagaatgctttcttactttaaaagaattatagatttcctttttctgtgcgcacatttccatgtgccacaagtccatgtgtgttctttaattgtcatgccttcaagctgtgaactgttaacgcagattacaccattttcactgtcaggcacccaaagctctttatcttaactaggagaatccggtgtcttggtctgaaacccaacctcagtgtggtcccctggtgtctgctcctcagccatcgcatatccggggcggcctgggctcacccggaacagattttttcctccttggatgactccgtcatggacacctcagcccaggacaagcagagagcaaaccctggcagcgagaggctggagtgcgggacctgctacaagccgagcacctctcggccagcgccctcgccaggactctcccgctcaggccccctgcgcagtctctgttactgtcacttccggac

SEQ ID NO: 311680 - DNA, 715 bp, Homo Sapiens
  misc_feature (611)..(611): n is a, c, g, or t
  misc_feature (613)..(613): n is a, c, g, or t
  misc_feature (634)..(634): n is a, c, g, or t
  misc_feature (642)..(642): n is a, c, g, or t
  misc_feature (646)..(646): n is a, c, g, or t
  misc_feature (671)..(671): n is a, c, g, or t
ctcttcttgactgatttcttctcctcggtccttcaatgaacaagcctactgtaggaaaaggaatgttgtccactttataatgagatcatttgaggatatgacttagaaacttgagggagaattgaaagatttgggttctatcccattactggtttgaataaagtagtttgaaaggaaaaggttcactgttgtcttgttcagtgttgtctggtaattgagagaggtgccttcgagtctgcagagagtcttcagctttcggaagttaatgaagccgtgaaggttgatagccataggggcccacgtgaaaggcatttacataaaatattcactttaggtaattaatttattcaacaaatatgtacattgaatgcctattgtatgtcaggagactgagaccttactgttgaaagaagagagaacatttagaaaacagatgaagagaccaccagtgaataatagttgcctgttgactaaaacgaattcaacagccagtagcagggaaatatggtctttcaaggcatcagaaactcatttacaaaaattatagagctgccaggaaaaaggctgcacaacaaaaatagttgagtaaactagaaacatacactgggaananagtatgggggcaagttgttanctggatanatangactgtgctttgacacctctgtggnctatgatctctgaacctggaataagggtcattttaatagcgata

SEQ ID NO: 311681 - DNA, 1132 bp, Homo Sapiens
  misc_feature (917)..(917): n is a, c, g, or t
  misc_feature (1011)..(1021): n is a, c, g, or t
ataaatgccattttttaattcaactttaataagaattacatttgactttggagaatacaggtcttgacccatgtgactgactagctgacccgatcgctgtaatttaacgtcatttataaattctgctgatggacaggaatgtatgaactcaattattgtcagcacaaagccttaaaacctgctgactttaaattaaatggtgcagtcctatgatgccctgcaccatccaggggactaacagggcctcgcagtgtagacagagggtgcagccacacgggcgggggcaccagccacctcactctgcacccgcggcctcacacatctcccagctcacactctactaatgcacagagtcattagatccaatttgttatttttctcacttgctttaaaaaaaagcagtttggataatcatgacattggaataaagtgggaaggaaaaattccatcagcacaaaatagggaagtaatcccaacttgtagtcacagttttctgactggctttgttttaaaagaggatggcagtccttgttcgtgtcagtgtgccactgggtttttgctgttccgtgtaattcatatcaactttgtgttgccatttgcaaggtaaaaggcaaagctgtagtgtattcacctatgtagacagattgctagatatctttttgatctggggcgagttcaatattgattccagacttatttggatttttttagtattattttcccctccctttctaatttaaatagacaaattaagcaaaagtgtgtgttcacaaccaaatgttgatgcccttatctactgataatatcctctcaatgttcactgaggcatagaaattatttcagagtagaaattgcagcatgaggataaactcacctctttgttctgaaaatagaactttatcactatgctttccggnggttttcccttttacaatcgaaatcttgtgcctcccaagtgcattggaaaatgacaaaagcctgtctctccaaattcctatttaacagtttgannnnnnnnnnnaatcaccatctttcaaatcttagctcaactctcaccaagtgaaaattggctacttgggagaaagttaactttctatggtgggatggtgaaggatgagggacagtttacata

SEQ ID NO: 311682 - DNA, 1711 bp, Homo Sapiens
  misc_feature (109)..(109): n is a, c, g, or t
  misc_feature (128)..(128): n is a, c, g, or t
  misc_feature (809)..(861): n is a, c, g, or t
  misc_feature (1175)..(1175): n is a, c, g, or t
  misc_feature (1566)..(1566): n is a, c, g, or t
tttaaatacacataattgaattcacatcccaccacgcataaatacccttccaagagagtaagttctgttgtgtttctgcaattcacttacatgtggaatgcagtacacntgtgtatctgcccaccagngggaaccgataagatgaacccaagaatcatgctgggcagagtttatccataaccaccgagcaactaagcagcacggcttgtgaggacttggtggctaacttcatgctgccagtgaaagacaccagcacttaattctgccgactaaagattctgggttagctcagttgctgccagggctcacagaactccttggcctctgttgaggccaccaatggtaccaatgattacaataaattttgagacacagacacctatacagtaggaattggaatgaaccctctactcaattcacctaagccacctccgtaactataaagggaacaaattttatcacctcccacctaggtcacttcaaattgaaaggctttgaattttcagtcaactggcatcttcccgttatctttcctattacatttcagactaagacaggtaaggcaaatggtcagtgatgggtctggaggtccaactgagcttggaaaataatcacattttagctgtccataaagagatgcgcttggcacccagaacaagcccccagcccccaagttacattgatttttaaggcagatttatccaccacaggagaaaaaagaatcccaagcctgtattcatgccaaaatttcctcttggctaaacctttgccatttcataaaattattaaaagcaaagtagttacagtcnnnnnnnnnnnnnnnnnnnnnnnnnnnnnnnnnnnnnnnnnnnnnnnnnnnnnaaatttaaaacctacagccagaggccactgaaggaatctgcaacagtcatatatacacaaaccagcaatggtgtaggataaggtttctgtcccaggattctttgctgtcacagtcccggcatgatgtaagcaatgttgtctaatgtgtttgacaagacctgtttgggacagccattcaattcaggtagttgtgtggtgagacatgccaaaggggccaagggcacagataatggaatccagaagcactgacaaactgccagacacagccaccataccctcagtttcctgcagacggtgtccaatgaggcttaggnactctcccaacagctgaagatgagcagcaacatcaatgggctctgtctcaggggctttggctggtgaggctggtaacagcatggtggtgggtggggacttcttctggggtgacagaactcctacagaagaggctttgactttcatggaaccttctgagctggatgctttccttttcacagttgtggcttctgctttgttctgtttgtgctgcagatactgagctttttgcttccaaatcagtttgtctttttctggtaattgcttccacacctcagccagttttttactaagttccccaaaatctatacctggatggtcagccacaatggtcacgcgatactctttacagaacacttggtaggccgacatgttcttcttttttggctagtnccgcatagaagatacaacagggtaagacttgattagaacccaggtttagtacccctgaatccatagtaataaaatagaaggatacctaaactttttcatcaagggaagagttccaaactactaaccagctttcctaaacaggata

SEQ ID NO: 311683 - DNA, 586 bp, Homo Sapiens
  misc_feature (24)..(24): n is a, c, g, or t
  misc_feature (79)..(79): n is a, c, g, or t
  misc_feature (134)..(134): n is a, c, g, or t
ttaaagagttaatgcgcatattanaaatcacattcaggcacacatgaattaacgtgcaacagagtcagtttgttatgtntctgcaattcactagcatgtggatgcacaccactgtgatctgcactccagtgganccgataagatgacgcgacaatcatgtgggcatagttcatccatagccacctagcatctaatcagctcgacttgtcaggacttggtggctactttcatacagtcagtgacagtctgcagcacttaaatctacgtcttaaagattctgggttagctcataatgtatgcaggtccaactggtggcattaacagcttcaccccacaaggtgttatgtgcagcagggctcacagaactgtgtggcctctgttgagtccatcaatggtatcaatgattacaataaattatgagacacaggcacctatacagtaggaatgtggaatgaaatcacctcccacgtaggtcacttcaaattgaaaggctttgaattttcagtcaactggcatcttcccgttatctttcctattacatttcagactaagacaggtaaggcaaatggtcagtgatgggtctgga

SEQ ID NO: 311684 - DNA, 1017 bp, Homo Sapiens
  misc_feature (726)..(734): n is a, c, g, or t
  misc_feature (978)..(978): n is a, c, g, or t
ttcccaccacagataggaggtgttccccctgccggaaggggagagtaccctggcaaagacatcgggccttgagcacccaaccaaagatgtttcccaagggggggaccattgttgacgtaggggagggcactggtgatgagcacttcctttctccagccacaggcaacactggattctgctggggccgcagcgggggcaaactttctaggcctttctcccaagcagtaacagccatagcaatctcctcctcagatagggtagccagctcctcctcctcaggctcattggtgacagcccttccctcagcggggctgggctggggctgcttttggaggtaaggccggagagccaggacaccttgctgtttcagtacagtctctgcagctcgctgacatggttcctgggtactcagtgtctggaaccagctgtgcagggcactcagctcctcagggaggtaggcgggatcttgcagtaatgggtatagggctccccacaaaacaatgtcggctagagattctgtctccccagccaggaaaggacagttctgacgactcaagctgtggtcaatgtgagtcagggctctccgcactgaaccaagaacatcttcccccttcttgccttggaccactaaatagtacagggcagcagacaaagctggctgcagctctgtcgcttcccattccagccactggttagtgaggtcatcttgctcccagccagataacnnnnnnnnntatcggcagattgcactagtggagaagaggtagttgccgctatccagctgcaagacagggaccttaggccgggtcaggaacgggaccacacaatcttccgggcctacagtgctgatgagcacctctgctctgccccgggctctcccggcggcggccagcaccggcaagcaacccgggacgccatcactcacgaacagtctcatttcgcccctcgtgccgaattcgccacccaggcctcacaccnaggaggaaagggcccatgacaagacagctaaccggacac

SEQ ID NO: 311685 - DNA, 2125 bp, Homo Sapiens
  misc_feature (2093)..(2093): n is a, c, g, or t
agaggtttgggctttaatggcagctggggtaaaaggaaacaaaaacagtaattctgaagagcacagggaacaggcagccaggaccagcctggcccattccaggccagctgagctgaaatgctgattctgtccagggggctgcctgtatgtgtagactggtggcagtcttggggactggaggcctcttggagagaagggaaggactgtcgggctcagaagtccatggggctgtgggccaggtagtccttgcgaccgatgttgctgacctgcttggtctgcatagcctcgagtttggggcagtcagtgatccgatgacccaggcccccgcagaaggcacagccgcgctctcctccaatgtccagcatggactcatccccgcaatgcagcacctgcagcacgggcggcaccttctgcttggcttctagcagcagcgctttgaggtccatcagcactgactcatcacacgctttgttgatgaaggtagtggcgatgcctgtgtttcccgagcgcccggtgcggccaatccggtgtacatagttctcaatctcctctggcatgtcataattgatgacgtgctggatggcagggaagtccaggcccttggaggcaacgtctgtggctactaggacatccttcttgccctcccggaatgcctcgatggccttagtccgttcctcctggtctttgcccccatggatggctacggcctcaacccccttgagcagcaggtactcgtggatggcgtccacgtctgccttcttctctgcaaagatgagtacaggcgggggtgtcttctgcaggcactcgagcaggtacaccatcttggcctcctccttcacatattctacctcctggatgacatccaggctggcagccccagcgcgccccacattgatggtcacaggctttacaagggcactcttagcaaagttctgaatcttcttcggcatggtggcactgaagagcagggtctgtcgctggcccttgaagtaggagaagatggtacggatgtcaccctcgaagcccatgtcgatcatgcggtcagcctcgtccagggccaggtagcgacagatgtctaggctgaccatcttcttctgcagcaaatccatgaggcgccccggggtggccaccatcatgtgtacaccgtgtcggatggtctccatctgctctttcacggacatgcccccaatgcagagggcgcagcgcaggagtggtgagctgtcctcctgcagcaggcggcagtagtactccaggatgccatgggtctgccgggccagctcccgcgaggggcagatgatgagtccatagggcccctcgcgctttgagaagggtaacctcttctcttgttccaggcagaacatgatgacgggcaacgtgaacaccagtgtcttgcctgaacccgtgaaagcgatgcctatcatgtcacggccagatagaatggtggggatgccctggatctgaatgggtgttgggtggtgaatgcctttcttcttcaggcctctcaggatggctgcaggaaacttcatttccttgaagctcttgatgggtggtgggataccgtctccctccaccaggatgtggtatttcttccgcacgcgctcatgtcgctcttcagacatgctcagaacataacggggtggagtccagctggttttgatggggtcatcatacgtaatgcccttagccatctccttcactgacatcaatgctcggccctcggcaacactctccaggatcttctcttcttccttcagctgcttctccttggcagactctttgcgcgcttcagccttctctttaaggtgctggtgctgatccaggaggctgacgttggactgagggcctagcgggatgtcgtcctcatctccccggggttcactaccgctgtcctgctgctcttcctccgcagctcccttgcgtcttcgctgcagcagcttctggagcagtagctgccggcgctgccgtaacggcacatagggcacgtagtcctcgtcgtcctcatcttccgcctcggagcggcttcctccggcaggcacctcgtcggtgcgagcccgcttccgttcgggttccgactcctccattctttgctgcancatgcgcgatcccgggaattccggaccggtac

SEQ ID NO: 311686 - DNA, 962 bp, Homo Sapiens
  misc_feature (183)..(204): n is a, c, g, or t
caataggaaactctttttaataacacatgctatctgtatgcatgtcacaaaatgtctccagcttttttcaatttttgccaaaatattatgtttttagaactcatttagaataagggaataaacaaaaagagaatgtgtcacatctaacaggtcacaaaacagatgcaaaactaatgtgcattnnnnnnnnnnnnnnnnnnnnnntatacttaaaagctagactgaatggcaaatacaaataaagtacagcaaataaagctggcaaatacaccaacaccttaaagttttggaatgttttctagtgttaaaaaaaggcagctatccacattcattatttcagagtggtttcagtcatctctggttgttacatggtgatttgtcgtttctatgtttgttggctgtggatttactgcccagactcacaatcctccacaactacggtccactggaattggaactcttctgtcgaggttctcttctgcagttttcattagtatagcaagccggcttccagatacccttcctttttgaatagcactcatcagctgcaaaaattcattgagttcaacctgtccatttttattcaaatcaacttcatttagaatttcatggagtgtattttcatccatttggacattgatactctctaatacacgctgaacatcaacaatggtaataaagcctttctggtctgcatcaaacttatgaaatctcttcttatacctgtcaatgtctgaaggcagtaggctaatttcagagcgatctgttaactgttctgatcgagatttatagcccatttcataatatagaaaattcctggctgtttcaagttgttcctgcttcttataatcatcccaattcagttccctgcccatcagttcaacaatcctgggtagggcttcctctgctgcctggacatttagaaaggccaggcgagtacgacgtgaaatcctgtgccgaat

SEQ ID NO: 311687 - DNA, 738 bp, Homo Sapiens
  misc_feature (409)..(421): n is a, c, g, or t
aattaaggcaataggtttcattttcatttggaaaaaattcaggttaaaagagccccaataaaaccagtttccaaacccatgttatcaacctgcataattttacataaacattaaaaccgcttgcacttttatagacaaaacacacttttgtaaacatggccactgggggagagaggctccctacctcattcatgattgaggacatgtgatcatttatattaaataaaattatttcactgcaaaagatctcaaacctgaccatgattaagcttcatttccccctgtttaacatttaagtattaattctaaaaatgtcacctaggatggtttcagggttagatgctaggaccacaactggtaatgacagcaacttctctctagctggcacagacctataaactttagtacnnnnnnnnnnnnntacagaaactaggtcaatttgttagctacatatttacagataattacatgatttttcactcacaagtgctgaacactttgagtgaaagaaaactgtgcaggttgaattacccgtactttggggggaattctgggtatcaagataccctttttcattcattcaaaagtctcatcttctctccactttttcatgacaaactacctacagatgttcagattagtatatccagtgggcatcctggtgtttcagtgaggattaacctttttctctatttaaagaattccttgtatatttagaaacaaaacaatacaatcacc

SEQ ID NO: 311688 - DNA, 668 bp, Homo Sapiens
  misc_feature (31)..(31): n is a, c, g, or t
  misc_feature (48)..(48): n is a, c, g, or t
  misc_feature (59)..(60): n is a, c, g, or t
  misc_feature (69)..(69): n is a, c, g, or t
  misc_feature (71)..(71): n is a, c, g, or t
  misc_feature (74)..(75): n is a, c, g, or t
  misc_feature (77)..(77): n is a, c, g, or t
  misc_feature (79)..(79): n is a, c, g, or t
  misc_feature (87)..(87): n is a, c, g, or t
  misc_feature (93)..(93): n is a, c, g, or t
cttcccaaattgcatctttctttcttcctcncactcttccttatgttnctctggttctnnctccttctntnttnntntntctttttngatctnagatagtgtcttgctctgtagcccaggctccatttcaaaaaaaagaactacaagttctgattccggactcccagatgtgagttttaatctcctctccactgattgatcctgactaatcactagccccctgtgcccaatttcaacagtatgctggagtcaaatctgaaccccaaactatgccctcttaaggggggtccctctgggatgccaacatgcattcacttcttcacctggctaggcattccatgagtattcacattgtagtcactcccctagggctatgcccgggagttagtactttcctaccacttggtgatcttgagtgagttttggatgtcctcaatgggtcctgagatgagtcagaggagagctagagttgggaactgatcaccagtggcccccccagtcctcagctcttgaagaaagggaatgaatgctctggccatttgcatctgtgcgaaggatcgaacaaagccactttctacaatgcaaccctgtccgacgccccccttcccaaagctgcctgcaactttcaaccccgctgaatggacttcgcactgggacagaggcaaaag

SEQ ID NO: 311689 - DNA, 662 bp, Homo Sapiens
  misc_feature (30)..(30): n is a, c, g, or t
  misc_feature (137)..(256): n is a, c, g, or t
  misc_feature (270)..(389): n is a, c, g, or t
  misc_feature (396)..(396): n is a, c, g, or t
ggatttgactccagcatactgttgaaattnggcacagggggctagtgattagtcaggatcaatcagtggagaggagattaaaactcacatctgggagtccggaatcagaacttgtagttcttttttttgaaatggannnnnnnnnnnnnnnnnnnnnnnnnnnnnnnnnnnnnnnnnnnnnnnnnnnnnnnnnnnnnnnnnnnnnnnnnnnnnnnnnnnnnnnnnnnnnnnnnnnnnnnnnnnnnnnnnnnnnnnncccaccaccacagnnnnnnnnnnnnnnnnnnnnnnnnnnnnnnnnnnnnnnnnnnnnnnnnnnnnnnnnnnnnnnnnnnnnnnnnnnnnnnnnnnnnnnnnnnnnnnnnnnnnnnnnnnnnnnnnnnnnnnnntgacacncatgcccagccctatagtagttcttcttttgccccttaatatcctcacccacatgtcctgtaccctgcctgaaccctcctcctctttttgttctgatctttgagctccctagagcccataattctttagagcaggtatgtcccgagtctgaaacatgcccttatttgtcccaagctctggacatttctcaccccaaggcggatcaatcatgattaaatcactccaattaaactttaggctccagtcagaccttcagccaaatggaa

SEQ ID NO: 311690 - DNA, 424 bp, Homo Sapiens
aaggcagctttgggaagggggccgtcggaaaagggttgcatttgtagaaaagtggctttgttcgatccttcgcacaagatgcaaatggccagagcattcattcccctttcttcaaagagctgaggactgggggggccactggtgatcagttcccaactctagctctcctctgactcatctcaggacccattgaggacatccaaaactcactcaagatcaccaagtggtaggaaagtactaactccctgcatagccctaggggagtgactacaatgtgaatactcatggaatgcctagccaggtgaagaagtgaatgcatgttggcaatccagagggaccccccttaagagggcatagtttggggttcagatttgactccagcatactgcactctagcctgggcagcagagcaagactccgcctc

SEQ ID NO: 311691 - DNA, 672 bp, Homo Sapiens
gcaagccccaggattctgttcctggtacactcaaactttatttggttgcctggatggggccagagaggaggacaagaagggtgtcaaagggtcagctcagtaggggtgattcagggtgtgctccatgatggtcagaagcgccagccacgtctccttggctgtggggatgatctgggaggctggcagcaggaagccatagcgcccagtgtcccggagctcgaaggtgaaggagtacttgatgccctggctgtaggtccagtcaatagtgcttccactggcttgatctggggcaggagtaaaataggagagaaggggccaatcactttgggaatatttacacgggttgggttaacgatccaaccctgtccaaagctctgtgccttgtgcaatgctgagtggagtcagtgtctactaaggtctgctgttgaccaagcagcctcacttccaagaaactcccactaaaaggtctaagccaagaggtccaaagaggagaccagcaatggttcccctattcactaggggatgcgaggaagtctctgcaattgcacaagcccctctgaaaacagcctctgtccaacagccctttcggtgaagcccctaaatataccgagttccctgcttgggtaaccaggatttgttcccctggggctctggtctgtgagggggaaagtg

SEQ ID NO: 311692 - DNA, 2572 bp, Homo Sapiens
  misc_feature (113)..(127): n is a, c, g, or t
  misc_feature (135)..(136): n is a, c, g, or t
  misc_feature (265)..(316): n is a, c, g, or t
gggggggaccacccccctttttggttccccgggtttttttggagagacaagaaagctccttgttgttctttgcgggggggccggcccccacaaaaggttgtaaaaattttttnnnnnnnnnnnnnnnccaaaaannattgtacaattaccctcccttggatttgattcagagaggacccccagagggtgtctccatttttccttaattatttttagctctttgagggtttcattgtagattaaattccaagtccctcaggatagnnnnnnnnnnnnnnnnnnnnnnnnnnnnnnnnnnnnnnnnnnnnnnnnnnnncgggttaagaaatacctttaaatttaggtaaataaagctcaaggaggtggggctgtcatctgtggtgtcagtccttctggccccctggctgtcagtgtcgctccagggccttgacaagcagctcattcaagcggcccaccatggccctagggtcgtcaacaagtccagcagcaatcatggcgttctcgtatatctgatccaccagcagctgagccaggccaggctcgcttgcgcgcagctgattcagcttcttgatgagcgcgtgcctggggttgatctccagcgtgggctgcaggagctgtgcgcgctcctcctgggtcttggccagctgctgcatgcgcaggaagtggcgggcagcccccatctccagcacggtgaccatggcagggtgggtgtccagtcggagggtcaccttcacgttggtgacacgcgaccccagcacatttctcatccaggccatgagctcctccgtctccttctctgataggcactcggcggctggggacctgtcctcaaacttctcctccttgtagtgatccacgactatgtccgtctccacagagatcagcttcttcttgtcaaactcacgaaggtgcagcagggtgagctcatcaaactgctcaaagcagaagagaacctctgtgtctttcttcttcatggcctcatagtagggtgagtgctctgccaggtgacggttgggggcgcacaggtagtagatgttgcgggtgccggcccgcatgcggctggcgtattctgagaggctggttagctgcccggagggcagcgccgagggactcgtagcgcagcagctttgctatgtcctccttgacctcctgctcggtggcggtcacaatgccctcccgcatgaacaggccgtaatcttcaaaaaactttgcatacttctcagcatcttttttactctggtcaatgaagaatttgatcagcctctgctgtaaaacgtcccggagtttcctgatgagtgcgctctcctgcagcagctcccggctgaggttcaggggaatgtcctcactgtccaccacacctcggatgaagcgcagccacttgggcaggatgtccgtggccttggtctggatgaggactttgcggctgtacagtgcaacgctggagcccagctcccggctcacatcaaacatggacggtttcatgtcgggcacgtagaagatgctgcggatgttgagcggtgcgtccgtcttatagtgcagggtgtagcggggcttgtcgtgagcctgcgcgacgtagcggtagaactcctcatgttgccactcacggacatccttggggtccatcatccagatggcctgcaaggtgttcatccgccttccattcaagtacaaggggaagctgacgaagttgctgtacttcgttaccacatctcgcacccgggcctcgctggaaaactccttgcagtcggatttcaggtggatgatgatttttgtcccggttctaactcccgaagcttcggcgatttcaaacactccagaaccatctgaaagccactggtaacccaggctccccggggctgccgagcgggaatagacctccactctgtcagccaccatgaaagctgagtagaaacccactccaaactggccgatgatcttgctgctggcctcagcctggttctgcagagcatccaggaaggcctttgaccccgatctggcaatcgtccccaggttggacaccagctcttcctgtgtcatcccgataccagtatcctggatggtgatggtgcctttctcggcattggtctgcaagtgaatctccatttctggcagtgcttggccgtcagacaccagtttgtgacgcagtttttccaaggcatcgctggcattggagatcagctcccgtataaacacctctttttctgagtacagggaccgggcaacaatgtccaaaagcttctttgtctcggcctggaactcatgtttggaagtggaaccctgcacgctctctgtgctgctgataatcgagtgcaggggttcctccttgtcctcggcggtctgcgtgctgaacagtcgtcctgcctgcaagctccaggctgggtttcgcctggggcccaactgggctgtggtcctccgaggacacagaattggttttcctcccggcacggccgccagcgccggcgcccgcagcaaaggccgcaggcggcggccccacagcagcagcgcccgcagctcgcgcgccatgtcgtactcccagagcgccgcgcgcagccacgcgggaccgtacacgatg

SEQ ID NO: 311693 - DNA, 935 bp, Homo Sapiens
  misc_feature (668)..(668): n is a, c, g, or t
  misc_feature (781)..(781): n is a, c, g, or t
ggcacttcaccaagcctcagacaggtcaggacatttggtaggggaaggttgaaagacaaaagcagcaggccttgggttctcagccttttaaaaactattattaaatatatatttttaaaatttagtggttagagcttttagtaatgtgcctgtattacatgtagagagtattcgtcaaccaagaggagttttaaaatgtcaaaaccgggaaaacctactctaaaccatggcttggttcctgttgatcttaaaagtgcaaaagagcctctaccacatcaaactgtgatgaagatatttagcattagcatcattgcccaaggcctccctttttgtcgaagacggatgaaaagaaagttggaccatggttctgaggtccgctctttttctttgggaaagaaaccatgcaaagtctcagaatatacaagtaccactgggcttgtaccatgttcagcaacaccaacaacttttggggacctcagagcagccaatggccaagggcaacaacgacgccgaattacatctgtccagccacctacaggcctccaggaatggctaaaaatgtttcagagctggagtggaccagagaaattgcttgctttagatgaactcattgatagttgtgaaccaacacaagtaaaacatatgatgccagtgatagaaccccagtnttcaacgagacttcatttcattgctccctaaagagttggcactctatgtgctttcattcctggaacccaaagacctgctacaagcagctcagacatgtcgctactggagaatnttggctgaagacaaccttctctggagagagaaatgcaaagaagaggggattgatgaaccattgcacatcaagagaagaaaagtaataaaaccaggtttcatactcagtccatggaaaagtgcatacatcagacagcacagaattgatactaact

SEQ ID NO: 311694 - DNA, 1029 bp, Homo Sapiens
  misc_feature (140)..(159): n is a, c, g, or t
  misc_feature (979)..(979): n is a, c, g, or t
  misc_feature (996)..(996): n is a, c, g, or t
aagagataggctttatatttccacagagtgaaaaatcctctgtcatggagcctgtcctgccaagtggcaagagtgtggggactgtctggtgatgatgtctttcatggcatctgagtgaagagtgacaggttggctcaacnnnnnnnnnnnnnnnnnnnnaattgccttgtattgtaagtattcttccctgcagtccaagtgacttttcattttttgttttaacttcaggcaaaatctttaaccactctggcctctgtttcccccaccaacggggagcagtgacatttacctccctcacagagtcactgtgaggattctatactgatttgaagtggagctgttcagaactgaaccttgtaggaaattccaagggcctttctactgaatctggtgatggggtggggccgtggcactttctctgccacagctgttcttcacaagtgttggtgctaatgaggccagggtgcagggttcgattcacacgtaggccagttaacttagagatctatttccttacctctagccagtcacttcctttttccgcagttgtgatgggttttgctgagccatccactctgactgatttcctctgaagtaaacatatttacaatccaaagcaattctactgacagaagtgttgccttcataatcaaacagcttgtttttccatctcctctgcaaccctaattaaatgagtacaggtctacacaatgttttcaaggagaaaagcagcatatccttaagtgaagtattatatttttcaataaccctgtagtggcttgatgcagggaaccctggggggctttcagcgaagagctgtgctcttttctgactagattagagcgtttggagtggaagacgtcaaatgtgtagtgagatggaggtttacattgttcttctactggctgtgatgaagtgccagaatgtctctttagaacaagagttagattccccctttctccttattgccccttccgtnttgacttcccctttatntatttgctgtctaattagggggcaagtctgtaa

SEQ ID NO: 311695 - DNA, 123 bp, Homo Sapiens
ggggattatttcgaggtatatttttattaagatagaaaagcttatattaactaatctttttaagtgatctgctgacagtaattgctttaatcaaacattttttggatattgttgacttatgtt

SEQ ID NO: 311696 - DNA, 1399 bp, Homo Sapiens
  misc_feature (669)..(709): n is a, c, g, or t
tccttttgtgactttaagatttttaaggcatcttaaaataagttatcatgaaaaacttccagtgattttattgaatttaagatatctactgaattcatatccatatttttgttaagattcttctcaatgttaaacttgtcaatgtaggttttgagttaatagaaaacccagtatctactatgatctagcaatagatttttgaacatgactaaagatagttgagttttagaaaactaatataacattcttttttctttaaagttctagaaatatgaccgacaatttccattttgaaaatgtaagctatcttataatactcaatagaactcaatactaattttacaaaactgtttttaggaaataaatttcctaatgctttgcatgtttcctcacataagtaaatcatataaaatatactgttggcattcattacacaaaaattaatatatcagtgaaaaaatgaaagcatagtttgaacatctgtgctccatttaggaacatatattgtagatggaaacttctatcattcatcatttattaaatatttattaaatgcagtgagcactgtattaagaatactatagtacgtggtgttgatattaatgaaccacagcgtattcagtatgtattgttactgaagattatatataccacaattaaaagctatcnnnnnnnnnnnnnnnnnnnnnnnnnnnnnnnnnnnnnnnnntgtacaaatagaaggtgacatgatttttcttttccaaactatggatttctaggcatttgaataattcttactgaactcaaacacatttcattggtaatgatatttctttctgattcaaattgaaatctacctctgtacattaaaaaaaatcaatgcttttacaatcttacctaattgagcatcaatattataataaatgagatttttaaaacaacttgagcctgtgcatataaggcatttacatatgatgaccttgcatcctataatacaagtaattgcatacttaatatctgtaataaactataaatcataaagtgtctcaagaatagtagcaattgaccaggcttgtgtttcacagctgaaaggacagtactgggcattctcattggtcagttctggaagtcctttccaaggggatctctcaagatgaacataatgtcgggaaagaacatttttaaccaaaactatagtctttgcagtagtctccgggcccatcaatctggaaaaatataattttgcacgaagaaaatacccaataggccacagccactcaggtccttggtgataattgaaacctttagcaagattgtagttgtcattgtctaatgcattgtcataaattccacagtaaaccatatcatctggatctaaagttttcatgccaaggggaccaagcaattttttttctgc

SEQ ID NO: 311697 - DNA, 759 bp, Homo Sapiens
cacaattaatgaaggattttatttgaagataaagtcaaaattatggcaccgaggaaggtaataaacatttgaaatttttattgatttttaaatttaaaatccagttttaaccacaaaattgtttgaatcacaagtggtaatacaatgtcttcaatatttttctaaagttatttttctatataataataagacaacagcatagcatataggaagttttcattccagtggcttttttatatatttatccttcttaggaaggacaaattaaattttttaaattaaacttttaaaatataacaacatctaacagaactgtacaaaacaaagagacattttttaaacaacttgccaaacttacttatgagtgtgttttaaaaacaactttgtaaatgtctgggcaaagaagcaagctgtcctccctttaccttcatagtgagtttgtaaggctttgtctttgtaagcagaaagagtagactgtgttgttttttgccaaaaactgtttatacttaatctcactgaagtattgctatatggagaacccatactctgatcaacttgattttttgtgtgtaatgcttgatctaccaggtaacttcccaactgctcctaatgctagcgggctaatcccacattattattccactatcatccctgcagaaaggtcttggttttgatgaaaatcagccctttccttacctgctactgcctcaaaaagggaccaggaagattctagctggctaattcactgttccctttgcc

SEQ ID NO: 311698 - DNA, 648 bp, Homo Sapiens
  misc_feature (539)..(539): n is a, c, g, or t
  misc_feature (563)..(563): n is a, c, g, or t
gttttaggaatgagtttttcttccttttcccccttaatggaacttcaaatatacacaacagtggggactggataattaatccccacaccatcacccaggcctaataaataacaatcagagttttaccatggctcatctattacgctttccctttttttaaaaaaagagtatttaaaagtaattcccaggcatcatgttatttcatccctatattcttcagtgatataactatgaaaaccttttagttatcttgtgtatctagaatgccattatcagatctaacagatatcttatgagcactttatcattttatttccatgcactgtaattttcttatatgatcaaaaacagcgtcatagcaaagcttacttgtattggaatactattttagaaatactctgtgtatggaatttagtttaaagattgtcagcatataaattggataattattggatagaaaattattggttagaaaaacttaaaactacttcccttattctgattcaactattcttaacttgagaattgaggctcatatntgactctctgaatctcaccatatntaaacttgatttcctttaacaaatatttattgaacagccagtacatacaactttgcttaaggatatgagttgacctgcaggaatg

SEQ ID NO: 311699 - DNA, 893 bp, Homo Sapiens
gtcctgttactaatgtgcaagattggaatgaatgtttagataccatcgcctatgagccccaaattggttactgtataagtgcatcaactttacagcagttaagtttcccagttagagcatacaaacgactagatggttcaactgaatgctgtaacaatcacagcctcacagatgtgtgcttttcctacagaaataattttaataagcgtttgcatacatgtcttcctgcccggaaagcagttgaagcaactcaagtttgcagaaccaataaagactgtaaaaaaagctcaagttcaagtttctgtataataccttctttggaaactcacactcgcttaataaaagtaaaacacccacctcagattgatatgttatacgtaggacatcctctgcatcttcactacacagtgagcatcaccagttttatcccacgttttaactttctaagcatagatctgccagtggttgtggagacatttgtcaagtacctgatttccctctcaggagctctggctattgttagtgcagtaccctgctttgctttggatggaccatggattctaaactctttcttggatgccacccttacctcagtgattggagacaatgatgtcaaagatctaatagggtttttcatcttgctgggtggcagtgtacttttggctgccaatgtgaccctgggactctggatggttacagcacggtaatgtttgcactcatctgacagaatccctgagttacagtatacagctatgtggtaatattcattgccattgaaattcttacttggtatgaaatataaagtgtttccttaaaattacatcttagccaacaaccctgagctcctcccatatccagagtacccaaactctgtggtagaagataagcagaag

SEQ ID NO: 311700 - DNA, 992 bp, Homo Sapiens
  misc_feature (159)..(211): n is a, c, g, or t
gaagagacaagactgccaaaaaacaaactaccctaactcaaggtagagctttccaaagaatgaatcagcatttttaaaatatttgatttttatagtcttacgaagtacattgatgctggcaggggtggaaaggattgatcaaaacaactgcttctagannnnnnnnnnnnnnnnnnnnnnnnnnnnnnnnnnnnnnnnnnnnnnnnnnnnnccaatggcatatagttcataaaaaaagggcacaatttatcttttaaaacagaaattcgatattttttaactagaaaattgtaaattcttctcactgaaaatatgattccttcctcatggaaaacatgtaattttggtttaatttccctacatattaatcaatatcaacaagaatacagttgaacctcttgcttttaaaacaactgtatttgcttaaaacctgcaatataaatctgttttgagtggtattaatttaataagctgtttctcattggggtatttttttcctgttgttgcctcttctcactaaactcatcaaagttaccagtacaaactagtcctatgtaaagctcagcaactaaactatgacattgacaatgaatctacccttgcaattgaaatgctggaagtagctgatgctgttgacctttcaagctacaaaattttgcaaatatcctgtctcttctccctcagctaacatgtctctcaaactacctttctatcctggctaacctttccttgcttatttcctccttctttccttttactatttcccccattaccttgctctatttcacattttctctccatggatggggttactgtacctcactatatgcatacagcctatctatctacctttctttctccattacagtggattctgtgttcttttacacattaccttacattttgtccataattagtatttcaacctatctccttgatcaatcccgaagctcccatgataatgccatttcctataacatctttttcacccg

SEQ ID NO: 311701 - DNA, 1282 bp, Homo Sapiens
  misc_feature (147)..(147): n is a, c, g, or t
tgggggcactgtccaaaattcaatactgatacaaaaatatgtttcttttaggtcaaaatacgtttcaggtgaattttctgaattttgttaaagagaattttaaaccatataaaacaggtgaatgagaggtgaacatgaacatgtgtnacataagccacagtacaaatttaaacagaacaatcaagccatgtcatttccccaaatcatttttgttaatatttaggagaatgcatatattttcaagaacttaaaagtgaatctctactcccatctcctaatactcccagccaggaagtacaactttcttcttttactagatttaaatattccaaatattactcctggtaggatactctggtattaactatagctgagtgtatcagaaatagaaaaaccatgaagatttataaagcatttaaaaaataatcatttatagcaagtccttaaaagccccagatgaaaaaggcagttctccacttctaataacacctatggtttatgttgcgtaatattattaaacaaaacagcattctgaccaatgataatttataggaaattcatttgccaagtcaatgtttcattaaagttaatattttggcttatattaaaaaaatttttaactctattaacttagcaaagtcatctttatgatgccatttaataaactgaaaggaaacaagatggtacattctgagtttttacttcttaagaagaaatttaattcaataatttgattcatcactactggaaaactacatctttcttccctgtcagtactggatggcaatgacgtgaaagcagctttcctggttctcaacttcccttcaatgggaagcattatggaatttcagcagtgaacatcatctggttcctattcaaaccccagctccaagaaaatgtgagagagaatctaagatataagttctgttcaaggcaagaagtttccaatctcaaatatttcatgccaacaacttatgttataccagctgttccatcattgaatgctaaatgatcattgaaaacaaacgaagataacagtgccctcgttgccatcattcattactaattttacataaactgtttatgtccaaaaatatgcatataaaacacttatacagataaattagtgttaagaatttaaaatgtgcagtaacatccacaaatgtcctttttgtgttgtgaaatctatacaattgttttcaaaactggaaatctgaacgccctggccacatattagaaacatgtcagaacacacatgttgtggtcagctttggtgctctcc

SEQ ID NO: 311702 - DNA, 1260 bp, Homo Sapiens
  misc_feature (1083)..(1083): n is a, c, g, or t
  misc_feature (1203)..(1203): n is a, c, g, or t
cggctgtgggcgaggtgcccccatacaacaactctcgggctatcatggcagttaccgtggccttggcaggattcggagctgccctggtaaaatctttggtgtgatgtccttgactaactcctacagcctgggcgacctcgggcaccatgggaagaattccagcaggcagctgctgatgacttagataaggcatcctgaactcatcctctttattactagtcccattttcatccccagagccaggttcaaaaaaggttacttttcttccatcccctggtttctttatgggtgtcttctcctctgacttgagtgcgggtttggtgggctgcgcctgcgggactttgaaaccaaggatctccagcatgttctcggctgcattgcgcttggccaccttcttgttggtgcccgttccttctgcagtgtggtttccaaccttcacctgcatcacaaactccctgcggcgcgggaggcctcgctctgtgaggagcgtgtactctggctccttctccttttttgcctgctggatctgggccagtcggctaatcggattgatcccctggccatattctgggcttgtctgtggcttgactatgggttttgttttctttttgattctaggctttactcgttcaactgcaggcaggggcggtaacttcttcagctcctcaagaacagctatggcggcatttttctttgaaatcttcttgcttttcccttcaccttcccccacaaactccccaaccgaaaccttggtcacaaagttcttcatgtggggtgggccactctcccgggccacctcgaaattcacaggcaagttccgtttaagtgcaatctcaaacacttgacttatttcagatttattgagattttcttcttcggattctcttccattcacctccagcctctctggcaggggctcattctgcaggatcctcaacgctttggcagcagcatcgtgtttcgcagcctgtcttgtctttcctttgccattaaattgctgtcctcccacagaaagttccacttgataaagtaaaggtggaactggaaatgggtaaaagtacctcgggggataagcacctcctntcatgttgtagttataggtggactgcatccgagagtaagggtcaacaggcttatacattggtttttttccaagtttcatgcacagtgcatttagttctacagtaggggttatgctttctngctgctgctccgagctcgtcccccggccggcggtcctgggcggtggcggcgaggagg

SEQ ID NO: 311703 - DNA, 903 bp, Homo Sapiens
  misc_feature (69)..(69): n is a, c, g, or t
  misc_feature (263)..(273): n is a, c, g, or t
  misc_feature (783)..(783): n is a, c, g, or t
aagaagacaaggtgacaaatgttaaaaatgccgaaaaggttactgcactatcactgtcaagcataaatnattatcacagggcaaaggtaggattgtctctggcaaggactagcagtctggatactgtatttctaatacatttactctgacattcttttgaggaatacatggagaactgacaattggttatgttagtttacatgttcccttgttcttattacattaaacgtatctgtaagaagggtttgcttagcatccccagnnnnnnnnnnnacagtgttcacattctttaggtctgacccgtggtaaggagagggaggattagagaacatctactactgaccatatggaagttttggatgatataaattcagagattcagaccagctgaatcaaattaaaatgtacatgtaaaaaatgtgttagataatgggaggcaggacagagagagagccaggtgagtggggagtcacgctgaggcaggacacagaggcaatcagactagcatgtggcgtttcctatggagggcaagatggtcagaacgggagaagctgcggtcacagtccgggcactggaaaggtttgattccagtatgttttcggaaatgtcttgttagttcatcagaccgagcaaacttccatgtgcacccttcccatgtacatttgtagggtttttctcctgtgtgtgttcttctgtgtgctttcaagtgggagcttttagtgtacgctttgttgcatccatcataatcacatctgtgtatcctccgcttcctttgagtatccnggggattccacaggtaaaggtctcttcccaggctgcacgatgaccgaaggtgattctcttgcaacaatgcttgcgggggggacactgagttcattaaggggggtgacatttcttcaggat

SEQ ID NO: 311704 - DNA, 390 bp, Homo Sapiens
  misc_feature (44)..(56): n is a, c, g, or t
catacattaaacgtatctgtaagaaggggcttagcatccccagnnnnnnnnnnnnnagtgttcacattctttaggtctgacccgggatgatataaattcagagattcagaccagctgaatcaaattaaaatgtacatgtaaaaaatgtgttagataatgggaggcaggacagagagagagccaggtgagtggggagtcacgctgaggcaggacacagaggcaatcagactagcatgtggcgtttcctatggagggcaagatggtcagaacgggagaagctgcggtcacagtccgggcactggaaaggtttgattccagtatgcggaaatgtcttgttagttcatcagaccgagcaaacttccatgacccttcctcgtccgaattcctgca

SEQ ID NO: 311705 - DNA, 487 bp, Homo Sapiens
  misc_feature (369)..(412): n is a, c, g, or t
gtggcaagagaacatactcaatatgatgtcttaacatgtcagtttcctgacatttacttacacttgttatagtcccacatctgtctattttgtgaatgttgtatgtgcacttcaaaagaatctatattctgtatttgcctagcattgtgttttctaaaggccacttaaattgactgaaatgggttcaaatcttatatcctttctgcatttttgtcttcttgttaggttatgttttagtactcttatgagggggaccattaaaatttgccaattataatgcaaagaaacaggagacgatcgtgagaataagcaatgtcacacacatttctctccaaactatatgtatcttgtcctttaaattctttgacnnnnnnnnnnnnnnnnnnnnnnnnnnnnnnnnnnnnnnnnnnnnctaaggcccttttctactaattccaataactggttatctgtgaggctgcttattctcactgtattttactgcttc

SEQ ID NO: 311706 - DNA, 732 bp, Homo Sapiens
acaaataagaattgaatgatgaatttctttggtgtcctctcatttgacaaagaaactgataacatatttctttgtatttgtaaaatttagctagcagtccagaatggaattaaaagtataagttcaactttctggaaattttgtgttttaaaacatgttaaaaaatataaaccagttaagaaataagcaaagtctgtttcctcattaatagttgcaattggcttggcagtcatcttgctcctgaatgagacagttgtcatgttaagtgttggcgccgaggctagggcagcgtgcgtagccctgagtggaaatgcctgctttaagctggaactcagtgtggaggttctttctgctctgttgatctttctggagggaagttgtaagcttctttggcctgggtctcactaaggaagtggaacggcagccaagaattattatgctgaaaatgttgtggtgatagaaaaaagatgattagaagtgaggctaaaattataatttaatatgttaccaagtgtaattagtcacttaacagtataagaaaataccattaataactgatgtggaaccttgtaaaatatttcttggcgaattttaatgtcttttttgtgtacttaggatcagttgagccccgtgggtaacttgggtgccctgtttgtgaccctggcttgctgtgcaggttccccttggacatctgtggagaggaagagtaagaaggagatggctgtgcccagc

SEQ ID NO: 311707 - DNA, 835 bp, Homo Sapiens
ccggaaatcggcatcactagacagtcctgtcctattggtcatcaaagatatggataatcagatttttggagcatatgcaactcatcctttcaagttcagtgaccactattatggcacaggcgaaacttttctctacacattcagccctcattttaaggtctttaagtggagtggagaaaattcatactttatcaatggagacataagttctttagaacttggtggtggagggggacgatttggtttatggctagatgctgatttataccacggacgaagcaactcttgcagcactttcaataatgatattctttccaaaaaggaagacttcatagttcaggatctggaggtgtgggcatttgattgaaattcagactgccttaaaatataacattaaaaagactgggttcgatcagccctcctaaagctggctggaaaaagaagccccagcccagcctgcctcatcccaccccaatgcttcctttctgccatcatctcagagcatgatcacattgcagaaagattctggaaggtccatgtagagggcagacattgaagaaagaaacttaaaatccaggttgttgaaaagactttgtactcccacttcctccaaatccatacagtgaggaatcagagtgtttatagatatatgagttgaatgcaatttttatttttggtaactgtgaaaaataagatactgtggatatatacatgccttgtgtatttatcagcataattttcattaccaaaatgtacagctattatttgccatggaaaaggttagtctcatttagaaaaatcgaaagtgcacagcacttaaagggaatatatgagg

SEQ ID NO: 311708 - DNA, 490 bp, Homo Sapiens
attttccaggtccctggctccagggcccactgtgacgcaggattcatcctggcattcaagtgcctacacaacctggttacctcattgattggcccttgccccgactcttccttaaggagaacactcgatacaggatgaccctcttctactttcttcctcaacttcatctttcagtttctccattgttcatttgttggctcttttctctgcctaaaacaccctattcctttctctgccactcaaatcctgcccagacttcaaagctcagaacaaattgcatcccctctctataatcttcactgagcagcttcagcaaacattgctattttcctttcctgaattcttactattgcactaactggaaactcccaattctgttctccttttgtatggtttctggtacccaagtcttatcatttcagtaggattgtaaattctcagtggcaggaaacatactttataatgaacacttaataggtgctcaatgaaa

SEQ ID NO: 311709 - DNA, 343 bp, Homo Sapiens
aagacattgtgactgagatctcttattaatataaatttccttctaagctctgcatttattgcttcccgtaagttttgggtgttatgtcttcactttaattcattccaaatattttctaatttcccttgtgattttctttaacccattcattatttatgaggtttgttggtttaatttccatatctgtgaatttcccaactttccttctgttaataatttctcatttaattcccttgtgaggggagagcatactttgtatgatttcaatccttttaattttataaggcttgttttatggcctaatacatggcctatctttgaaaatgttttacgggcacttgtg

SEQ ID NO: 311710 - DNA, 1337 bp, Homo Sapiens
ttcatttggcccatgttgattcatataatggaccagaaggagttggaaccaggtgatggaccaattgcagtgattgtgtgtcctaccagggagctttgccagcagatccatgcagaatgtaagcggtttgggaaaagcatataatcttcgatcagtggccgtatatggaggagggagtatgtgggagcaggccaaggcccttcaggagggggcagagattgttgtgtgtaccccaggtcgactgatagatcatgtgaaaaagaaagctaccaatcttcaaagagtctcttaccttgtgtttgatgaagcagatcgaatgtttgacatgggatttgagtaccaagttcgatccatagcaagtcatgttcgtcctgacaggcagactctcttatttagtgcaacttttcggaagaagattgaaaagttggccagagacatcctgatcgaccctattcgagtggtgcagggagatattggagaggcaaatgaagatgtgacacagattgtggagattctccattctggacctagtaaatggaactggcttacccggcgtctggtagaatttacctcttcagggagtgtcctcctctttgttactaaaaaaggcaatgctgaagagctagcgaataacctttaacaggagggtcataatcttgggctgctccatggggatatggatcagagtgagagaaacaaggtcctttcagactttaagaaaaaggacatcccagtcctggtggccacagatgttgcagcccgtggtctggacattccttcaattaagactgtcattaactatgatgtggcacgagacattgatacccacacgcataggattggccgcacaggaagagcgggtgagaaaggtgtgggctataccctactcagtcccaaggacagcaattttgctggtgacctggtccggaacttggaaggagccaatcaacacgtttctaaggaactcctagatctggcaatgcagaatgcctggtttcggaaatctcgattcaaaggagggaaacggaaaaaagctgaacattggtggacggaggcctaggctacagggggcggcctggcctgggctctgagaacatggtgagtctagactactacagtagtgcctttatagttggtctcatgtcctgaaagtcattaggaatattctcatctacccaggaaagcctcagtgagtttaaagccctgtctagaagggaatttgtatttaatctgatttgagtcaatgcagtgctcattcttatggtaactttctattgaagaagcatctttgtgtacttggttgactaggcttgctcaggaaattattctagattagc

SEQ ID NO: 311711 - DNA, 488 bp, Homo Sapiens
  misc_feature (38)..(38): n is a, c, g, or t
  misc_feature (62)..(62): n is a, c, g, or t
  misc_feature (97)..(97): n is a, c, g, or t
gggtaattttaagtagaagaaaagctgtgttgcccccnggctgcgaaactccctggaccctnaaagtggacccgccctgcctcggccctcccgaaantgcctaggattaacaggcatgaagcccactgtgcctggcctggggtttctaattttcttaattcttacaacttcttatgaagacttttactaatatggctttttccaggcttcccaaactgtatttcaggttataataattttattgttctgtttcttgcagagtaccaagttcgatccatagcaagtcatgttcgtcctgacaggcagactctcttatttagtgcaacttttcggaagaagattgaaaagttggccagagacatcctgatcgaccctattcgagtggtgcagggagatattggagaggtaaccctaagcagggctggatgggaccttaatgggtttatttctcatattatggaacacagaattaatttctcactattgag

SEQ ID NO: 311712 - DNA, 369 bp, Homo Sapiens
  misc_feature (180)..(240): n is a, c, g, or t
ttttcctctctactttcttggatttcttgttcatcagaaatgaagtgtctagcaggtactgagattgtaagcacggtgtggggatgcatcaccttcactgagtttgctttgatgatgctttgcatgtgggcctttggacgacagttttatagtatggtcgattataatgccagtgctatnnnnnnnnnnnnnnnnnnnnnnnnnnnnnnnnnnnnnnnnnnnnnnnnnnnnnnnnnnnnntatgttttaagatagtatattatgagcaaaggagaaaacgtttaaaatcatgtttattttgtaaactccaaaatgcatgttacatgtgaagtgactcactggaggaaggtgagtactttgccaactacg

SEQ ID NO: 311713 - DNA, 713 bp, Homo Sapiens
taaaaattcaattatgaacacctttctctttctacgaatttatattctattgatacagccccctccatgagaagtccagaagaggtacctattttgcaattttcagagaataggggtcagtccttatcttaaaaaaccatgttttagccttagaatcatcatggcaggtttctcaaatactgatgaccccacccattactgggaaagaatctctcagtgcgggggctggcatctgtactatgatgaagctaccttggtgattctgatgtgtacctctggttaagaatctcgatgttcaaacaggctccttgagggaggggagggagggagagacctcaactttgctcatgctgtgttctcagtgccagcacagtgcccggcataaaaaagacgcctaatgcccctctgaggctttatttccttagcttccaggacatgtctgctacagagtgggtgctcaaaaaatattgaattatttgtgacttttaaaaaacttggatattaaaaaatttacaactggctgggcatggtggctcacagccaaaaaagtttatctttcatgtttcagataaagccattgctctaataataataaaatatgatatgcaaacaaagtgacattgtgaatctgtacccaccaaaaaatagcacttagaatatgttttgcataggtttttcagtgatctgatttcaagtatgatgaaagctcgtac

SEQ ID NO: 311714 - DNA, 980 bp, Homo Sapiens
  misc_feature (83)..(83): n is a, c, g, or t
tcatctttccacaggctcaaagtctaactccccaggactataatctgaggtggtcaaggcccttttggtgacagtgggtgaangtcctggaaaagagtttactgaatgtcagccggactgattggcacatggcatttacctgggatgtcccgtcggcagatgatctacagtgcagccagagcgatagcgggcatgtataaacagcgcctgccacccaggacagtgtgagaggagacctacctgggagactgagactttcccccacttttagcttgatgttaaagaagtggttgtaccttcctaaatcgaatagtctaaatgaatccagtagtttttatcattttcctgtagcctgcaatttttctttctctagaaaggcatcatgtcattccaggagacaaaaagaaacaaatcctttttatagtcataccatttcacctatcatagtactcaaaaaagaaaatatacacatctatttacagcacactttaatataccagatttataaggtggaaattcatgtgcagagacatttaacttaatgccatgtacttgattattttgttctttaaagaagagattattaaagaacatgttggttgaatgtgtataaaagcatgatttgctttggcttcatctcttttctgtcagactttgactactcttgtatgtgcacacgatctcatggctggtgctgagcagcctgctcaacagtcactataagacacctacttgtcgggagatgttccacatttctgtgcatgtgttcagtaatatgggcctaatggaattgattattttcctttttggccatcacgtacacatgtgatctggactatgaactctgggggaatacatcttattttttcattgctatatgacagctaatgggcaaatgaatcaagtatattttaatcagaagaatccagggatttttgtttcccgtcagaactccaagataagctctgacacccttgttt

SEQ ID NO: 311715 - DNA, 694 bp, Homo Sapiens
cgaagatgctccaatgaaacatcacctcttgagtcatcccaagtcttggtttgaaaaacttggcgcatgcacttacacagcccttgaaccacctctgacttctcattgggtgccagcccttgaaaccaagctctctgtgttacttctgaaagtgcatcaattctgatttggctaagacacagaagccaaatcctgggttcgtgattctgtgtatatcctctagccacagcatagcagcttctcgaccggtttcttccttgtctacatttaaattgtcacttctgagaatatctatcagtaggtcatgtgacagctgcatgaacgcgtcctgatgatacacagcagtgaacttgtgctccaccattcttttagcactctgttttaattcctcacaactgaagagatcagcaaaactcaacaatcgtacacaattctctgcatttatttttttaattaaatattctcgacaacgttgtaacacatcttctacctgtaggaagcaagctgtttcataaagctgttctacagtgctgtcattcattgccaagttacccgtgtatgcataagttattattatctgtaaggtggcagcatcgacattcctcaggtgtacatgggtttgtttgctttcacttagtccactcataaacatggccctgaaataagagctacatgttgcaagaaccatattatg

SEQ ID NO: 311716 - DNA, 949 bp, Homo Sapiens
  misc_feature (795)..(805): n is a, c, g, or t
gggagataactattatttccccattttatataagagaaaattgaagtttagagatgtgaagcttctttcctaataagtagtttccaggtactaattggccaattaagttttaaatccaagcaacctgacttgtcagtgtaaacagtttctagttggtcactgtgatgctgaataagtatagtgggtagcacatctgattcaactgggatctaccttcttaagaaaaaacaaatctaggaagcttacagtggctaagatgggtcatttaaatgtaggtgatttataactgcacgtaagtctatttcgtgttgctttgttatcttacctctcgataagaatggcaaataactactcttactcattgtgcatgattttctggttttatgtgactgtgttcaaattgaggaaaccagaatccagttattcaacaacaataattttctctatactatgatttatttacattttttcatatagttctctcaattatatataaagtctaggaaagtatgacttatgtgtgaatttccttacctattctttaaggctgttttgttttttaagagcctatttattgttgtactgctggttcctaaatagaacagttaagtaggccactgagcaggaaaaaatactgcaaaattttatagtcttctgagtttattactaccagaagaccttatctcagcccagatgtgtgtatctgaaaataaaaattacactatgggcatctgattaatatacttacgtcttacataaaagtaaaatgtgtctgtcctggccctatcagcctgnnnnnnnnnnnccttctcattctaggtagaagatgtgttacaacgttgtcgagaatatttaattaaaaaaataaatgcagagaattgtgtacgattgttgagttttgctgatctcttcagttgtgaggaattaaaacagagtgctaaaagaatgg

SEQ ID NO: 311717 - DNA, 807 bp, Homo Sapiens
  misc_feature (621)..(621): n is a, c, g, or t
  misc_feature (743)..(743): n is a, c, g, or t
  misc_feature (788)..(788): n is a, c, g, or t
aaacaaaagccttctctagaatctgaaggccaggcttacctctgattctgattcatccatacttcatcttatgtattttaacagttgggttctgtggagtgtccagagaccttgggttaggtatatccatcttcagtacctcattggatcacttttctttcatcacttgagtattctagcagtcattctcctaatctgaccactttcaggtttagtttacctggcttacctggggaagttgacaacttgttggtagttaggcacccatgaatgtctccagagacatcctgagaggcaagattcctcttaattgataaccaggacaaccaggtagtcacccagtcctctctaagcagggagcacttgtccttctctcctctgctgcagctactgatatctggcccctggaataaaaccatagttcctaaaattgagcatccctaagagtagctgcttggtgggacagctgatttctttgattccctagctgcaaaacctgaaattgaccactaggtgacagaatgtttgccagtatccccacaaaacaagttaaaacttaagtgaaaatcattctgcttttgaatcttaaaagctagaaaaaccataatgtaatattctttntaaaccctcttattttataactaaattaatcacaggaatgatctgaacaagaacagctgaggctagtatctttaacagtgcttgagatgcttaacagagaaggcattcagtgcttcattganggctagtcttagggtgtttctgccgcttaggtatcttttggtcanaatgagaacctggcgacag

SEQ ID NO: 311718 - DNA, 847 bp, Homo Sapiens
ggattcttctctgttctattagggcttcttcatcttcttcctctacatcaaagtcttcaaggttatcatcagacgaagattcctgctcaactttcattccttcagaaagacttcctttaaatttatcttcctttactttgcttctgctccttcgtctacgaccaccgcgtgatcgagaccgccttcgcaagcgtgatctgctcctccgacctctgtcccttctccgaggagatctgcttcttcttcttggagacctgctacgtctgagtggggaacgagacctccttctaatgggagatctacttcttcttcgggttggagaccatctattgatggggctggcatcttttgatctttcacgtctactgaggatatcatctcgaggtcgtgttcttggagaagaaagtcgtctcctctctggttctcgtcgttttctttctaaggatcggctcttggctcttctcccaggagacagtgtccgcgagggggatttgctctgcttagatcttctatcattcaaaagtggagacctgcttcttcttgatttatcacgtggttttggagacaaacttcttcttttaggactacgaccaggtcttctgctgggtgacctattttctttcccagatgaagcatctttagagggagatttaattggcttcttttctttatcagtttcagaccgttttgattttctctctttggaccgtgaccttctgtctttggatttacgtcttaaatccactggggatgtggattttttacctcgattgtgacttgtactttcatttataattggggattttttcctatcttttgatttacttttatcttcaattttaacctt

SEQ ID NO: 311719 - DNA, 391 bp, Homo Sapiens
  misc_feature (15)..(15): n is a, c, g, or t
  misc_feature (24)..(24): n is a, c, g, or t
  misc_feature (31)..(31): n is a, c, g, or t
  misc_feature (74)..(74): n is a, c, g, or t
  misc_feature (93)..(93): n is a, c, g, or t
  misc_feature (122)..(122): n is a, c, g, or t
atgtcaacctttcantgtagtgangattaanccctgtaggttatggggtaataattcaggatttaactaatgtntctgcctattttcctcacntttcccttttgatggtgcggaaagagaanaaggaaaacggggcacaggcccattcgacgccttctccaaggggtctgatttgctgagacaccagcttcaccttcttaacaaggcacctaattacaacaagcatgcacattttggtgcattcaagaatggaaaatcagaatagcagcattgattcttctggtgggttttgctccatttaaagacatgaaatgaactacagccaggaaggtgatagatgatataataagccacctctgaacctacaccccgtctcttcacggtttagact

SEQ ID NO: 311720 - DNA, 451 bp, Homo Sapiens
ttgataataagaggcatattttattcagtttcccagtaagtcaattagaaacatgcactgctaaaatgcaagttacaattcaaatggtaccataaataattagagtacacactgagcattttcagaaatcagcttccatatcttgatcactaaatcggaaaggttcttcagaacagtcccttacccttagctcatgtcttctggttgtcatcatcttccactgagctgcaccagaagaatcaatgctgctattctgattttccattcttgaatgcaccaaaatgtgcatgcttgttgtaattaggtgccttgttaagaaggtgaatctggtgtctcagcaaatcagaccccttggagaaggcgtcgaatggcctgtgccccgttttcctttttctctttccgcaccatcaaaaggaaaagtgagaaaatagcagaaacattagttaaatcc

SEQ ID NO: 311721 - DNA, 545 bp, Homo Sapiens
aactaggggagtcttctcctttcctctgtctacccttagcaatatataggtaaacatatccagcttgtctaacacatcacagattattagttaacaaggtgtagattaatgagcttttatattgtattgctggatcttttgagttaataacaatggtaacttgtccagaaggcctatcatcattcctagtaggtgggcacagagtaacagatattaagaagcttgctgatgagtcgtcatctagcaaaggccctgtgtagggctatattataggagttacattgacttctggggcattcgaaggtctccccccttatccatgtctctgtcattttgcttctccagccacgacaacacactttcctctccaactgctccctccccaccaaaaaggaagaccctctaaaaggccaaggaataaatattcttagaagtaaattatcttcatcccatgctgcctttttcaaagaggtgttaggatatttatcctatttctgtatttcacagtagcttttcaggctgtcctgcttatgtataagctgatt

SEQ ID NO: 311722 - DNA, 588 bp, Homo Sapiens
cgtgcccggcctatggatttttttcttctaaaaattttataaatttagttctacacttagatccgtgatccattttaggttaatttgggtgtaagctgtgaaatttaggtaggtttatttttttgcatatggatgttcagttgttttaaaatcgtctgttgaaaaactctccattccccattgagttgtcttttcacctttgtcagaaatcaattgctatttatgtgagtctggttttggactttattccatcgatctatgtgtttatcctttcataaataccagattgccttgattatcacagctttatagtaagtcttaaaactgggcagtatgattccttcaaaatttttttgaaatctttttcaaaattgttttggctaatttagtttctttgccttccatatgaattttagaattagctactctgtatctacaaaaaatcctactggggttttgaatgcaattttgtgtcttccaatccatgaacatgaggtatctatttaggacctctttcatttcagttatcagcattttatgtcatttttcagcatatattccacagtgttcattttggaggaactattg

SEQ ID NO: 311723 - DNA, 524 bp, Homo Sapiens
tcaagaataatgacgccattatattttggaatacttaatcatatttagcaaaaattctcagactaatgtaaaagtatggtaataatgtattttctttgaaagagagggaagaagtggtttatgaaataaacaagtcctcttattggtattttaaaaatactcaacagatgtagcatatataataataaaggccggtgcgtctgatttctcagctctcgtaaagcatgaagtaggttgagaatgcctaatgtactctgacaaatgctcttcagacctctcaccatcagacaccaggggaaggagacccttaaaccggagaattataattcaacagaaactgtcatttccccagacatcatgggagtattacatgcaaaaaccagccctgcggtgagtgggcttaaactcaaacttaattcttcaatacaggattctttactgatttgttctaagttttcagtgatgaacccaaataagattgagcttcaagagacagggttctgagaatctttggagtcattctg

SEQ ID NO: 311724 - DNA, 1291 bp, Homo Sapiens
  misc_feature (257)..(308): n is a, c, g, or t
  misc_feature (627)..(627): n is a, c, g, or t
  misc_feature (918)..(918): n is a, c, g, or t
  misc_feature (1210)..(1210): n is a, c, g, or t
  misc_feature (1235)..(1235): n is a, c, g, or t
  misc_feature (1252)..(1252): n is a, c, g, or t
  misc_feature (1260)..(1260): n is a, c, g, or t
ctcgtgggtcactctgcaacaaatcactgaaccgatcatctcaggctttttcttctggccctttgtgtccaagattctttagtccatttttgttgggggacatctcagactatagataagtggactggaccctgtgtcttgggggtggcagttgggattactccccaacaaggctgattttaggcagcatgtgttcactgtgctgtgatttcatctactgtctcccagaaagtgtgttgggatcggccattagcagnnnnnnnnnnnnnnnnnnnnnnnnnnnnnnnnnnnnnnnnnnnnnnnnnnnngtccccccatcagggcaaatggtctaactggtgcaatcatgaagagagttaatggttaacagacattggccaataacaaaacaccccatggactgtgactcgagtatccaacaggcagtcagagctctcccggtctgaaagttgcattgccactgctaactttgggattgcatcagagaggccctgagtgggggttgagatgaggttggtttggtttgatgttacacactcctcacctgttctttctgagtgtcctttctctgaaaggatttatgtttttctttcgttagatagtggacttctgaggcaagctgatctncccctggcatgctcccaacctgatttggacaaaggaagctctatggcctgggagagagactattcttaatttttctttcttacaaaaactgatttttcccataaatatttttacttcagaggactaggaccattttgttttgggcccttctgctgaaaatttgtctcgtttaagaggcagctagaatctttaccatatgtatgaatttgtataatttcatttttggatagggataaacttttgcttctgataaaagcctggaatttcatctggtcctcagagcattgcgtngtgtgtcttgctgtagcccggaaaaggttttgtgtaaagattctgggatggcaagttgtttgccttttctgaaaagagaacatacagaacctgtccatctttaagaccttcatccatggaatctactatacaggaggatgcagtgggctggaggggatgggcgaaaatggggagcaggaagcctgggcctgggcttctggtcatgggcctcctaaaaccttaaacttcaagtagaaatgtactcaagccctatttattaaacaaatactttttcctgcctccaccaaacccntacagaacatcaccgggggatttgnccattcacatggggttnggagttcntgggggcagctgttgcctgttgcgagaggtg

SEQ ID NO: 311725 - DNA, 1305 bp, Homo Sapiens
gagaccaagatctctcaatgaggaatactttggcctgtggtaggaccagcagttaactggtaggcagcattctaagatcccttaaattgataagaatgaattcaagtttcaaaatgacacactaagttatacacggtgcaggatgtcattaaggcaacagtctcaccaagtccatgcacagggctcggatctcaccattcccctccccttgccctccaagactgcttagttctgcttactactccttctcctcaacgacagcttccagcatccagaagtgaacttgagcagccttcagcctcacaagttgggggtggcccaattaaggaacttcatggcaacttcaaagccaaggaaacaggccgcattggctgggaaggctcggatcatcactgcattgaaccctttgtacaaggatgtgactccttcatcccggatcagctccctcagcacatctctgaaaccattaggatatttcccaggaggtgcagtctggaatcgagacttgagcacatctggggggattgccacagcccagttgaagatccctgcaatgcccccagccaccaagatccgaggggcactgagctccactgaccctctttccctccggagtgaagatatttttcagccattcatatgtcatgaaatacattccactagctgggacatctcgcataagggtaagcacagtccctttgtagatgcctcggatcccaaactcctggtacagcttctttgcacagtccaaggtaccagtgtacttgctttctcctgaagaagcctgaatctgtaataagcacttgatccgttctccaggagtcatgattcctgtggtgaatacgccagataacatcccagctgcaaaaagctggggatagctgagcacatcttctgggtgtttctgttgtagtttcttccccaaaccaaacccaaagaagcacacggcaaacatgggagtgaccccgatgataggggcagccattccccgatatagccccgtgatgccctctctaaaaagagtcttccggaaacagtcaaaggtcccagagtacatgggaggttgtccaggcaaactcggtggctgtgtctgcagtcggaccttgaccgtgtccagagggtgaccgacgaacaccaggcacacgccgccaaagccgccggccagcaggttcttgagcgggctgatgggttttggctggtcggccatggtcagtccgtctgtcactccgtctgtcagttctcgggccgtcctggcttctcagccccagctgcagtgccggcgccgccgacctttcacccactttt

SEQ ID NO: 311726 - DNA, 503 bp, Homo Sapiens
tagtctccacaggttacagtgacaccacataagcaaaaacaaaagtattcaaaaacagagttctttatgggacaatttccattaaatatagttaagattggttaagtatgagtctgaaattaggccaatggagcaaaaataagtaattgctcggtaaatagaatttttattgtttttaagttttgagggatggagactcttggtgttatctgtgattctgctctttctcccgcatcccgtgtcagtatcataaacaaacatcttcaaaaggaatccacaattcagtcattcactgtcactctcactgccaccatcttggttctgacaacaaaaacttctgtctgaatgattgcaacagcctaactgttcaccttcagcctcttttcaacacagtagccaggaagattctgttaaaaagaaagttatgttataaccttggctcttctttttagccagggcaaaggccaaagttctaacaatggtatagccatctggcttgctgt

SEQ ID NO: 311727 - DNA, 845 bp, Homo Sapiens
ttttttgcagcagagaaggaagtttaatcataaggctgccgaataaggagacagggggaaacctcaaatctgcctgtctgagccgtttaggtctaggtattttaagggagttggagtgaccgaggtgggggatcactggttgaagaatacaggatggtgagatgaagaaactgcattttcatgctgattcagttcctcttggggagaggcgggggggcggtcttcaaactggttggcaatagctcttttgctggaattcaggatctgaaaaacatctgtgtcactgaaagtagacccgcagagctgcgccttctgctgccatttcctcctctgatctccaagaggcaggaaagtcctccttgtcatgtttctgggagcttcacagtctgtccggcttcggggccatcctgcatggaaaaggtgagagaggtcccatggaaatgtttttccaccactgtcccgactctctgggtcgtctgaaacaaatcggccacttcatcaggacgcaggtcatggaagcgctccactggccgcagcgggcacacaaggacatgtccctggtaccacaggtttccctattcacaagagcgaaggacagttctgttttgagaaacactacagagggcttgatgagatgttggccaaatctgaacgacatgtcctcacagttgaagtctttcagaagactgctacctcttcggagtcctcagtggcaggatgcacagagcttttatagagggtctaagcaggcaggtattcctaggataccttctttctctttctctcccttccaccgtctggatgtagatagcactacggacctttacagactgttctcagtggat

SEQ ID NO: 311728 - DNA, 939 bp, Homo Sapiens
ataattggtcttccctctatttatttgggtccccctaaaattttttaaaaatacttttttggggaacctggcttttggatttcagtcttcacagtaaaagtgaatgaataaggaggagacgctactgaaaaactaaccttgaatataaaccactttcagatttatgtagacatttatgtagacatttgtaaaagactgacaacctggctactaaccctactctttcaatatggaaagtcacacagaactatagactggggtggcatcaaacggcaataaactctgaacaaattaaccacttccattcaattagtacaagccaagaaaataaggtaaattatctagaagagaattatttccaacacaggctggttctttctaagcagcttactatccttttcttagcaatatggcttgttttctcttttgcattgtcattagctatttctattcagctattaattcgctgaatttaagttgaatagcagttactgatacgtttttccctacttggttgtattcgtattctaaataaaataacaggtgggaatcaaataatggataaaaatacatttaatttcatattacctgtatttccctactatttgagggatttttaatttttaatagtagtatataagcattcagaattttaaaaccaaaagacattttagagctgtagtttaagttcctcagtatgggaaaaacaaaaggaaagccatggacactaattgtctaaggtcaactagacaattgagaaacggccaaattaaggctcaaatccacttttttagatggctagcacaatattctactagatacaagacaccatgctgtatcttgcagtcactttaccccggcaaaatgtaaaatagcctttaggactgaattagagtgaagtttttttggttccaaagccgtagacaaaaagtctccctc

SEQ ID NO: 311729 - DNA, 370 bp, Homo Sapiens
  misc_feature (28)..(28): n is a, c, g, or t
  misc_feature (40)..(40): n is a, c, g, or t
atctatcaattctgcctgtacaaacacncaaacatcctanaatatcaattataagacagacaagtgtaatgtacctacgatatattaaaataaaaacaaagtttcagtctcttcacaagaagtaatttatattctctgaattttttcagccacaacaactggattctcttttctgatttttgctgcagcttctgctttgtaatcatacggacagttgtgcttgtcagagtaacggtgaagtccacaaaacaaatttccacatcgggcagtcaaaccctgtaaggaccaactttctttctgcacatgaaacatctgtttttctttggggtttgggcaattcagggagctttttcttcactctgagaagtac

SEQ ID NO: 311730 - DNA, 1570 bp, Homo Sapiens
aaagcaggctggtaccggtccggaatccttgggatatcgtcgaacccacgcgtcccggaaaaaattcagagaatataaattacttcttgtgaagagactgaaacttgtttttattttaatatatcgtaggaaaacattaaagagcagatgcatggccatttttctttgatgttctccagagttttacattacacttgtctgtcttataattgatattttaggatgtttgggtgtttgttacaggcagaattggatagatacagccctacaaatgtatatgccctcccctgaaaaaaattggatgaaaatctgcacagcaaagtgaaacacacagataataggaacaaaatgtagttcccatgtgccaaacaaaataaatgaaatctctgcatgtttgcagcatatctgccttttgggaatgtaatcaaggtataatctttggctagtgttatgtgcctgtatttttttaaaatggtacaccagaaaaggactggcagtctacttctaccatagttaaacttcaccctctttaatttcacaacatattctttggaagcaggaagaaatgctcataaagaggatcagaccttctttcccgtgaaaccagtatttggcgccatatataagcctggttaaattggtcatctaaagctgtcaaataagacattctgtgaaaggtaaacatcgaaactggttataagtaaaaccatcaagccaacaacagggtcttgagataacctttgaagcttattgtactggcctgcaccagaagatgtctgcattactcattgctaaaaatgtgtagcacagaactgcactaggattaatttgtttacaagaagaaatttaaactctacgtttggttttcacatacagcagctctattgaataacatgcatctgaattttaagttgcaaaggtatctgaataatttttcatgtgcatcttttgtcgaatggtttggttcaagaaagaatgtttaaagctttttaaaagacttcagttcttaatgtaactgtacccttctgcatggaaaatcataaccaacatggctgcagtagacttcttagtggtatccagcgccacttgcagagggctgctttatcatattgtacttgggtgtaggactctagtgttcttgggtgtattgcatgggctgcattatctacagcattgtacaataacaactagaaaaggcagtatacttcactgatgcttgtctggtaataatcacttctgtgttataatggaaggttttttgtgatgtatgaaacttgtgttttttatatataaatgagtatagttagtgttgtggtaatgcctgttttcatctgtaaatagttaagtatgtacacgaggcactacttctgatttattgcaatgttcagtcctagtttttacttttattcttaaagcattcagttttgctttcaattttatgtaccttagttctgagttagacctgcagatgtgtacagatagttcatatttatgtattgcacataatcatgctattcagcattgatgctatattgtattatgtaaataataaaagccatgtacagaggaa

SEQ ID NO: 311731 - DNA, 910 bp, Homo Sapiens
  misc_feature (825)..(825): n is a, c, g, or t
catcacatattaaattgccaatgaaaaatattcttttggtggccttttttcctgtacaattttgaaatatgcttctaaacataatttatataaaatctagtcatgtagcagttcacattataatcttatgtacatttaaattggtctgtattatcgatgcacaattagaacttgagtctaacattttcaattacttttttcattgaactctactccgaaagaactaccagtatactgaattgagtttttttcccttgtccttcagatcattgttatgtatttacaagtcttagaatgtgaacgtaatcaaaccctggttcaaactgcctggaattacatgaatgacagtcttcgaaccaatgtgtttgttcgatttcaaccagagactatagcatgtgcttgcatctaccttgcagctagagcacttcagattccgttgccaactcgtccccattggtttcttctttttggtactacagaagaggaaatccaggaaatctgcatagaaacacttaggctttataccagaaaaaagccaaactatgaattactggaaaaagaagtagaaaaaagaaaagtagccttacaagaagccaaattaaaagcaaagggattgaatccggatggaactccagccctttcaaccctgggtggattttctccagcctccaagccatcatcaccaagagaagtaaaagctgaagagaaatcaccaatctccattaatgtgaagacagtcaaaaaagaacctgaggatagacaacaggcttccaaaagcccttacaatggtgttaaggaaaaggacagccaaggagaagtaggaantaggcagaagttgccaagttcgattcgagggttcaaggaaccacggttccacgtttcttaggttccacattatttcccagggagg

SEQ ID NO: 311732 - DNA, 955 bp, Homo Sapiens
  misc_feature (682)..(682): n is a, c, g, or t
  misc_feature (800)..(800): n is a, c, g, or t
  misc_feature (824)..(825): n is a, c, g, or t
atcgaaaacatgtactacagccagtcttctatgtttccacatcggtcagaaaaagatatgctggcatcaccatctacatcaggtcagctgtctcagtttggggcaagtttatacgggcaacaaagtgcactaggccttccaatgagggggatgagcaacaatacccctcagttaaatcgcagcttatcacaaggcactcagttaccgagccacgtcacgccaacaacaggggtaccaacaatgtcacttcacacgcctccatctccaagcaggggtattttgcctatgaatcctaggaatatgatgaaccactcccaggttggtcagggcattggaattcctagcaggacaaatagcatgagcagttcagggttaggtagccccaacagaagctcgccaagcataatatgtatgccaaagcagcagccttctcgacagccttttactgtgaacaggtaagatgtttattgatactgtgtataattgtctttctgggtatactcagatttgccttttcatattttcactttgttcttgaggtgtggcttctctctaataagtgtgtttcatcatgcatttatgtccaaagattctgttacccatcacaaaacgatacgttttcttgaaaatcaggttgattttggaaagcacattaaaaacattttgttgttgtggttgttangaaaaggattgttcttggattcgccaccaggcaaattttgggttgatatgtcctctctttataaaataagttgattacctgttgtggtaaagagttctaggttttatgaatagaactnggagacatggtttgactattactnnactttgctttagttatactttgagtaccttctcaagtaagatttggttttgtgcattggagacttaccaacaaaagactttttaagatcacatctatagtatttgaaaaccgtatcatgtttagggattc

SEQ ID NO: 311733 - DNA, 1049 bp, Homo Sapiens
gggttttggagaaagtccccggggatggtccacttggccgggtttggttaccccttccccaccttaagggaggtcttcccaccccaagggggtttattaatgggagtttgggttaccactctccttcccctcctggtttcggtctgcttaatgctggggaaatctgaaaaggtccaatccctgtcacattttccctttccgtctgttccattaaaaatgttacttgataaggagttattcattccaaaatgcctgattcctgttcattcccaattccagacatactgttcacagtaaaaggctgtcgagaaggctgctgctttggcatacatattatgcttggcgagcttctgttggggctacctaaccctgaactgctcatgctatttgtcctgctaggaattccaatgccctgaccaacctgggagtggttcatcatattcctaggattcataggcaaaatacccctgcttggagatggaggcgtgtgaagtgacattgttggtacccctgttgttggcgtgacgtggctcggtaactgagtgccttgtgataagctgcgatttaactgaggggtattgttgctcatccccctcattggaaggcctagtgcactttgttgcccgtataaacttgccccaaactgagacagctgacctgatgtagatggtgatgccagcatatctttttctgaccgatgtggaaacatagaagactggctgtagtacatgttttcgtcatggtagtcactgtcgaccccctctacaaacttctttcttgaagcaccaaacatgctgtttgtcacctggtagtttcttttctcagataatgtatgtccatcagtcctcaccatagagtcgtgtcctttcctcacagtaccggaggcaatcaaatagaactgtcactcaagggtcgtgtcacaggaaggaccgcccaccacgtctccctcgcatgaattttcttgtcccgcggatccaagatggcctcgtgccgagttcgccacccaggcctcgatacgtaggggtgatgggggcagggagtgaagaggg

SEQ ID NO: 311734 - DNA, 1188 bp, Homo Sapiens
  misc_feature (1040)..(1040): n is a, c, g, or t
  misc_feature (1061)..(1061): n is a, c, g, or t
  misc_feature (1063)..(1063): n is a, c, g, or t
  misc_feature (1127)..(1127): n is a, c, g, or t
  misc_feature (1139)..(1139): n is a, c, g, or t
  misc_feature (1154)..(1154): n is a, c, g, or t
  misc_feature (1162)..(1162): n is a, c, g, or t
  misc_feature (1178)..(1178): n is a, c, g, or t
gatgtacacttgaatttttatgtttattatggtcctgatcgtattagagaaccggccttactttcaaaacaggatattgttttgactacgtataatattttaactcatgactatggaactaaaggagatagtccattacatagcataaggtggctaagagtgatcctggatgaaggacatgccatacgaaatccaaatgctcagcagacaaaagctgtacttgacttagaatcagaaagaagatgggttttgacaggtactccaatccagaattctttaaaggacttgtggtctcttctttcctttttaaaacttaaaccatttattgatagggaatggtggcatagaacaatacagcgtcctgtcacaatgggagatgaaggaggacttaggcgtttacagtccctaattaaaaatattacacttagaagaacaaagacaagcaaaattaaaggaaaacctgttttggagttaccagaacgtaaagtatttattcagcacattacactttcagatgaagagagaaagatttatcagtctgtgaaaaatgaaggcagagccactattggaaggtattttaatgaagggactgtcctggcacattatgcagatgtcctgggtcttttgcttagactgcggcaaatttgttgccatacttaccttcttacaaatgcagtgtcttccaatggcccctcaggaaatgatacacctgaagaactgagaaagaagttaataaggaagatgaagttaattctgagctcaggttcagatgaggaatgtgcaatttgcctggattctttaacagttcctgtgataacacattgtgcacatgtattttgtaaaccctgtatttgccaagtcattcagaatgagcagccacatgctaaatgccctttatgcagaaatgatatacatgaagataatttattagaatgtcctccagaagaattagcacgtgacagtgagaaaaagtctgatatggaatggacatccagttcaaagattaatgcgctaatgcacgcattgactgacttaagaanagagaatcccacataaaaggntngggttgttctcagtttacaaacattcttgcttaatagaaatacacttaaagcctctggatttgngtttactcgttnggatggttccatggnccaaaganaagagttgaatcattncagtgttttc

SEQ ID NO: 311735 - DNA, 431 bp, Homo Sapiens
ggcctgtggtggagttaccagaacgtaaagtatttattcagcacattacactttcagatgaagagagaaagatttatcagtctgtgacacattatgcagatgtcctgggtcttttgcttagactgcggcaaatttgttgccatacttaccttcttacaaatgcagtgtcttccaatggcccctcaggaaatgatacacctgaagaactgagaaagaagttaataaggaagatgaagttaattctgagctcaggttcagatgaggaatgtgcaatttgcctggattctttaacagttcctgtgataacacattgtgcacatgtattttgtccctgtatttgccaagtcattcagaatgagcagccacatgctaaatgccctttatgcagaaatgatatacatgaagataatttattagaatgtcctccagaa

SEQ ID NO: 311736 - DNA, 993 bp, Homo Sapiens
agtaatgcaggtacaatttttccatcttgacattgctggtgtgtgcttcctcgctggcagctggtggaagccggccggggtctgggcgcctcagggaactctgtggagccgtttcgtctggcttccaagcagacctttccgacctgcttgggctgcagcccttctgcagatggtgcttcagcaacttctcaagcttagacacggctctgctcagctccagcttctcctgggtcaccgtgctgagcgcttttgtgagggaaacattgtctttcagcaggacgtccacaaactggaactgcagctctgctgccatttttttctgggaggaggtgggcctgctcaagtcagacttcagctcctccaaacgtgtgcagtaaagacatcactgctttctcattggatgacgtccaatcattaactgtcctgtccacggcctggctggtgaagctggtgagcaagccgggcggcagagagcagccgctgcctcatcgcctccagctctcgctgctgttcccggaggtggtccgcatccgagccggcagccctgcgggcagaacctaggtggaggcggctgccaggcacctcgtccttcgactccaggtctctcactgtctgctgaagctgcttgatcttatgcaagtcacgctgacgctgcagttctaattctcgcagcttctccttgtctctctgccacttcctccactgctccgcagccgctgggctctgcctggcctccgcgctcctcctcgcagccttgcgtccttcttgctctttcaaccgtgggtgtgactgctctaattctgcctgcaaccacgctggtttctccctctctctctccagagagcatctcagctctcgtttttgagtgtgcagggcttccaccgtcgacttcagtgtggcacttacctccttctctctcctgagcgcctcacagtgcttctgagcctcagcctcaagctgctgctgagaatgcagggcttgctgctgcacctt

SEQ ID NO: 311737 - DNA, 866 bp, Homo Sapiens
gtgttgtctgtggttctccttttgttggcctctttggcggtgcgtgtgttgtgtatggtgtttttttctgtggcctgactttctctttgtctcttggttttccgaaatgttgttttatcccttctatcagcacggatatgtgtctgtatctcattggtttctggtcatctggtatatgcgtcatggggtatatgctaccctgctttgaccgttgaaatctgtgttgtctgaatggctgttatgcgtgcccaagtttggatgtttgaagccgttggataagtgtacggacctttcgcgctttgccgttcacgcttctccgagtaggccctgaaggatctggccagtaagctccattaagagatttattactcacaatttttgggggtatcctatgataacattctactttaaatatgtttaatccaatttgtccaacttccatttctgacacttacaagctgaacataccccaatatcacttttattttatatcttcttttattcctaaatatagtttcaggggtagagcacagaaaatacagaagaggaaaaatacttaggatacaatactaaatttggtgcctatcacgtgtaaagcatacatacctttttctgagcttagcctaccacatatacttagagtgaaatgatgaggtcagcgacctgcaaatcttccaaacaattgcaagtaagcttcccaactggcactaagggactagttttatgcaacagatgtagatgaaggaagagttaaagcttaactacaggaaattcttcctcgtgacaagttgaagagaatactgaatatatcaatattaatttaatagcagctctgtgttgtgattttaaaggaacaagataaaatc

SEQ ID NO: 311738 - DNA, 781 bp, Homo Sapiens
ctcttgccttggatctgagaaaggctaccagtgtgaatgtccccggggcctggtgctgtctgaggataaccacacttgccaagtccctgtgttgtgcaaatcaaatgccattgaagtgaacatccccagggagctggttggtggcctggagctcttcctgaccaacacctcctgccgaggagtgtccaacggcacccatgtcaacatcctcttctctctcaagacatgtggtacagtggtcgatgtggtgaatgacaagattgtggccagcaacctcgtgacaggtctacccaagcagaccccggggagcagcggggacttcatcatccgaaccagcaagctgctgatcccggtgacctgcgagtttccacgcctgtacaccatttctgaaggatacgttcccaaccttcgaaactccccactggaaatcatgagccgaaatcatgggatcttcccattcactctggagatcttcaaggacaatgagtttgaagagccttaccgggaagctctgcccaccctcaagcttcgtgactccctctactttggcattgagcccgtggtgcacgtgagcggcttggaaagcttggtggagagctgctttgccacccacaccttcaagatcgacgagctgtgtttcagatgactcggttaagcagtacacattccgggatcacctagcaaagcactttcaggtccctgtcttcaagtttgtgggcaaagaccacaagtgtttctgcacttggcggttcttggctggtgagtgttggacgagcgttcc

SEQ ID NO: 311739 - DNA, 953 bp, Homo Sapiens
ttttaaaattatatactgttttattgatacacttccaaattccctataattagtctgcatttgaattgaaatttcaaggtataactataatttacatatttaaggagtcattgggtatttaagtcataatttcagtaactgtttaatttttctagggtttgtaacttgaaatattatacccagcttctgattttgtggtctgattgcaccatacacgaggtatttaagtgtaggaaagaaatgagggaaatggggtgagtgtctttctgggtggacagtttagttttcaaccctagaaagatgaaaccccacccaggccacattgttcagcagtgctgtgacctgtgcccactgaatggaccagaatcagagtgagttggtgctgggagtctgaactcacagtgtgaagtctgaacccagctgttggcagatgttcttagagggcggtggggggagaagctccaaagagcagagccgtccaatgcagggactcgaggtatggctacgaactagtcctcccagtcgatgcggatcgggccgcctgttagcgtctggccctgtagaccggctgagtcctctcctcctgccccacgacgcattcgccggtggcaaccctgggcacagcgggaacgctcgtccaacactccacagacaagaacccggcagtgcagaaacacttcctgaagagatgatcacgactgttaataacaacaataactgctgccacttgtggggcacttacaagacacaatactaaatgttcctaaacattaagtcatgtaatcttaacaaggacatccacaagtagagtttatcatccccattttacagataaggaaacagagaggttaaggaattgcccaatggtcactttaataaaaaagggggaaagttgatttaagcacatgaggattaaaaaacccacttctttattctggctggagctggacaaa

SEQ ID NO: 311740 - DNA, 481 bp, Homo Sapiens
  misc_feature (30)..(30): n is a, c, g, or t
  misc_feature (45)..(45): n is a, c, g, or t
  misc_feature (92)..(92): n is a, c, g, or t
  misc_feature (439)..(439): n is a, c, g, or t
acttccagtaaactgtttaaatttttccanggttttgtaaacttnaaaatattataccccaccttcctgattttgtggtcctgaattgccancccataacacgaggtatttaaatgtgtaggaaagaaatgaagggaaatggggtgagtgtcttttctgggtggacagtttagttttcaaccctagaaagatgaaaccccaccccaggcccacattgttcagcagtgctgtgacctgtgcccactgaatggaccagaatcagagtgagttggtgctgggagtctgaactcacagtgtgaagtctgaacccagctgttggcagatgttcttagagggcggtggggggagaagctccaaagagcagagccgtccaatgcagggactcgaggtatggctacgaactagtcctcccagtcgatgcggatcgggccgcctgttntgcgtctggccctgtagaccggctgagtcctctcctcctgcc

SEQ ID NO: 311741 - DNA, 421 bp, Homo Sapiens
  misc_feature (178)..(178): n is a, c, g, or t
aacccggcaatgccagaaaacacttcccttgtggtctttgccccacaaacttgaaagacagggaccctggaaagtgctttgcctaggtgatcccgggatgtgtactgctttaccgagtcatctgaaacacagccatcccggatgaggtagtatttccaggacctcgtcgaatcttggnaggtgggggtggcaaagcagctctccaccaagctttccaagccgctcacgtgcaccacgggctcaatgccaaagtagagggagtcacgaagcttgagggtgggcagagcttcccggtaaggctcttcaaactcattgtccttgaagatctccagagtgaatgggaagatcccatgatttcggctcatgatttccagtggggagtttcgaaggttgggaaggtatccttcagaaatggtgtaca

SEQ ID NO: 311742 - DNA, 700 bp, Homo Sapiens
  misc_feature (28)..(28): n is a, c, g, or t
  misc_feature (48)..(48): n is a, c, g, or t
  misc_feature (68)..(113): n is a, c, g, or t
  misc_feature (115)..(258): n is a, c, g, or t
ggtccccccaaaaacaccagaataaagnatatagatatatttatttanctttatttaacttaattttnnnnnnnnnnnnnnnnnnnnnnnnnnnnnnnnnnnnnnnnnnnnnngnnnnnnnnnnnnnnnnnnnnnnnnnnnnnnnnnnnnnnnnnnnnnnnnnnnnnnnnnnnnnnnnnnnnnnnnnnnnnnnnnnnnnnnnnnnnnnnnnnnnnnnnnnnnnnnnnnnnnnnnnnnnnnnnnnnnnnnnnnnnnnnngtgttgcctaggttggtctcctgaagatgttaatgggttaaggagccctcaaattttaagaccaaaaaagcaaaaggaagattaattgcctatttagattagagaccaatggaagtgtctcagaacagatgaatttggtagtatattttgaaaatcaatcctactgtactcaccctcataacattattacaaatagctcactgaacctatttcaaccccagaaattcatgcatttaacaactttcaatttataaactttaacagatcacacaaagctattctctctaccaaaagatggcataagtgggcttgggcttgtatggccatttattctcccataattctgaaagacaaaaaaaatagaagataaagataaaaatcatgcagccaggcagtggctcatgcctgtaagtgccagcactttgggaaaccaatgcgggca

SEQ ID NO: 311743 - DNA, 743 bp, Homo Sapiens
attcccaggctattgtgggctatggtttgatgaatattacttataatactgtggatacttagagaaattcaaagcatatatatcattggaattttccgaaatcccttttatccgaaggatgtgcaaactgtgactgtattctttgagaagcaaactaggctcatgaagattggtattgtcagacggattttgctaactttaggtaggaagataaagtctattaaccttgtgttacaaatcatatcctgtaataagcaattcccaggctattgtgggctatggtttgatgatattacttataatactgtggatacttagagaaattcaaagcatatatatcattggaattttcctaaatcccttttatccgaaggatgtgcaaactgtgactgtattctttgagaagcaaactaggctcatgaagattggtattgtcagacggattttgctaactttagtatcaccttttgccatgatagcatttctttcattggacagttccttacaagggctccactcagtgtctgtctgtattggattcacaagagcctttagaatggtatggcagaatacagaaaatgctttattggagacagtcattgtatcaacagtacacttgatctccagtacagacatatggtgggacagaagcctggatacaggactcagactcttactggttggtatcatacgtgatcgtttgattcagttcatctctaaattgcagtttgccgggactgtgc

SEQ ID NO: 311744 - DNA, 643 bp, Homo Sapiens
tgtgtgaatattatgttggaatacagtgctgatatcttggaaaaccataactgcctcttaatttaacatagaataatacatagttctgtattttttttaaagtgagcttaatgggtaagtattttttatatgctttagctatagctaaagaaagctgatacttaacaaagttgaatagtattatacactggtgctcctaaaatattgtttttcagtgtaaaatatgcatatcttctatatttaatatgaaagtcttgaaatgtatcagacagaaggggatttcagtttgcaaataatgagcaatgtagcaattttaacacatttcataaatatatattttgtcattggtggagagcaccatttgttgttttgaatatactttaaaggaggaggtacaaggacataaatgttgagattacctacaggatggaaatagcagtacagttcattgtagatattttgaaatgtttttgattgttttatataacctagagtgacttcccttacccttatttagatctgcatatatagttctagtatgaagtttaatagttaaggagttagctatttgttatctttaagagtagggtattgacgtgaacaattgcagtattttgcatgatactgttttatagatgacctt

SEQ ID NO: 311745 - DNA, 585 bp, Homo Sapiens
  misc_feature (494)..(494): n is a, c, g, or t
  misc_feature (527)..(527): n is a, c, g, or t
  misc_feature (529)..(529): n is a, c, g, or t
gatccatttgatgattttaaacttcatagacaccagacaaagcctccgtgcatgctgtgattgcaggcgcacactcattgaatcggttgttaggttaacaaacgttatagacccctgtagtgctaagcactgtcctctgtgctgagagtagagaagcaaaatatagactgatttcttgctttcagagcatgtacattatagttggagaagataataagcaaagatacaaatgaaattattatgtcaggtatggataaggctagggagaaaaatatagctacatttttgctaatactttcaggcattctatgacctttaactaccctatgagatgatgactaggattttcattcccattttacagatgaggacactgaggcaaatatatgttaaagagtttgcacagggacagacatgcaaatggcagagccggggagtgacccccaagacccttctctgggtcatcgtccggtgctgcccctctttcaaacgtntgtaaagaaccagtgcaatgtggttacgacgtntnttcatttattctttacttttacacatttcttcggttattgctctatgttggtgttg

SEQ ID NO: 311746 - DNA, 1373 bp, Homo Sapiens
  misc_feature (461)..(461): n is a, c, g, or t
  misc_feature (485)..(485): n is a, c, g, or t
  misc_feature (529)..(529): n is a, c, g, or t
  misc_feature (554)..(554): n is a, c, g, or t
  misc_feature (563)..(563): n is a, c, g, or t
  misc_feature (596)..(596): n is a, c, g, or t
tatctaaataaatcattttagtatgttgtatgtcagttactgggatagctgggacatagagtgtaatttaaaatttgtcaataagtattcattggaatatatgtaaatgtgccttgccggttattgaaacttatctacaaaatgagtatggggtgacaaaaattagttcctggtgcttaatgaaactttctgccactgattttatatattaccccgtgcttttttaaagtacatctctctcaaaacttagtgtaagtttgagggctacacaaaacatttacatttcattctaacataatgaatataataggttgtggaaagtgggtaaactaaatgtagccttcagtaaaattgaatctcagtgtaatccttggtgctggcatttctcagttccgaggagttaaatgatcccatctaagaggtcattgccatgcctattggcactttactgtcatagcatntttaagggacactgtcaaggtgtntaagttctcagaattacttgttgggaatttaggacaggtttgtntacttaaagtaagaactgcattgtncaagttganagaggaacacttttgtgagttcacaaatgtgtncttaagaaaacattaaaatatggagctctgggttttcaagactatttggcatcttaatttggggacttgggagggaaactgataaaaagaaattgaagaattgatggttatacttaaagaagggtaatgtaaacagtggtgatgaaatatatacacatcaagtgaaattacttgacagtgttcatttgaatgactttgaattcaagccattataattacttttaaaattaaatatcatttgcactgttctgataatgggtgcagtttttgagcaatataatcagagctaaatatgcatgtagtgattagtgatgtgaacaattaacgttctgagaagaaatactaactgtggtattttcaaacttaaatttctgtagtaaaatcagtatcaaagtcttatcagatcaaggaaaaacaggcaatgcatataaacatacttttgaatgttgtgtggcctataaagcaataatgcaatttatatggaatgtcatgggatatgagaaatggaacatgcaaaaataactaatcctttagtaaaaatgtcaacatgttaacagggggaatgttaactaatgtaggttattgctatttgtgatttgttatgggttcttggctttgacagcttcaaagaatggacagctgataagtttaaaagaaatttcgtcatatcgtcaaggcaaagggtcttaaatccgagtcaagtcccttccttggggttaacaatgtattcttaaagcattctgatgttaaacacggaaacttaagttattctaacca

SEQ ID NO: 311747 - DNA, 599 bp, Homo Sapiens
caaccactctgtcatgcatatgagactctcctcagcggtgcagcacaatgaagcattctgagagtgctgctcgcatagcgtctcataacgctccacacagtcactaaatctacgttgtactgcaacctgttgcatctaagcaatggtaagcttgcctgtgatgtacctttgtaggctgcatatgcattcaatccatcagctatcttctcaggatcagttatgctgactgtcaaatcaaattgatcctcctgttcttcttcctctagctcctcataggttggggctagcaccttcttctgattattgtgtgtgctgtccaaggatagctccactgtggcatctgcaaagagatcctgtggctcttggtcttgttcttcatggatcccacggagccattgttgatgggaagaagggatgtagttatctttggagactgatgtttactgaccaccgcggcgccggtgaaaatgtcctccccctcggtgtcgctgtccccagcctcgggttctgatcccccggccgccccctcggactccggctccaggccggggaagggcggaggcagtctctccgaagcgctacagccaccaccacccgac

SEQ ID NO: 311748 - DNA, 1445 bp, Homo Sapiens
tcggaccactgttgaaatcctctcgaagtccctttcatattgagtcacccgagactcccactcgaggatctcgtccttggcctgctgcagcttatcaggcttgttggcccacagcagccgagcctcggcctcccgcttcttctgcagtgtggcttgggcatcctgccagcgctgccatgtcttcatgcgctggtcgaaggcagcgcggactatggccaggaggcgaatgtagtcactcaggagctcagcaaggaggaagaagtcattgttggcctgttcctggtggagctgctcaattttttcttccacctcagccagctgggagagtgcccgtgacaatgccgtgttgtcctcagagctcccaagcatggctagactctttgcaaactgggctgtgttcagcgctagctctttcctatggttgactagagtttctacaacagcatgcagtttccgtaagcgctgctcctcacactctacctcctggagcttctcctcaaaccaaatgtctgattcattcatcttgatggtcattttgctgacggcatctgtggctttgttgaacatcttgaggagaccagcaccactcaatgtctgggtacccacggcacgtggcagctcttctttttccaagaactctctgacgtcagggtcctgtaacatggtaggatgatttacaatcctctgaaggtacctttctaaagcggccctccgtttttcaagaaattctgcagaagaagaatcttccttcccaactttcacttttgtcatccctatgaggctcttctccgggggtggagggacaatgaagccattctgagagtgcttctcggaaagcttctcataaagacccagaaagtcactaaatcttctttttactgcaaactgtttgcttctgaacaatggtaagcttgtctgtgttgtaactttgtaggctacatatgcattcataccatcccctatcttctcaggatcagttataccgactgtcaaatcaaattgatcctcctgttcttcttcctctagctcctcataggttggctggggcttcgaagaatttgtggcttcctgaggaggaagagaaatgagtgttttggctagcaccttcttctgattattttgtgtgctgtccaaggatagctccactgtggcatctgcaaagagatcctgtggctcttggtcttgttcttcatggatcccattttctttggagccattgttgatgggaagaagggatgtagttatctttggagactgatgtttactgaccaccgcggcgccggtgaaaatgtcctccccctcggtgtcgctgtccccagcctcgggttctgatcccccggccgccccctcggactccggctccaggccggggaagggcggaggcagtctctccgaagcgctacagccaccaccacccgacgccatcttcttccacccgcggcccc

SEQ ID NO: 311749 - DNA, 838 bp, Homo Sapiens
  misc_feature (460)..(471): n is a, c, g, or t
  misc_feature (656)..(656): n is a, c, g, or t
  misc_feature (776)..(776): n is a, c, g, or t
  misc_feature (788)..(788): n is a, c, g, or t
gctctggagtttaattagaccctattagtcaatttttgcttttgttgctatagctttttgtctttctgtcataaagtcttttctcatgcctatatcctgaatggtattatctggattttttcttctaagggttttatagttttgggttatacatttaagtctttaatccatcttgagttaatttttgtatatggtgttaggaagggttccagtttaaattctctgcatatggctagccagttctcctagcaccattttttgaatagggagacatttccctaattccttgtttttgttgactttgtcaaaaatcaggttgttgtagggttttggctttatttctaggttctctactttgtttcatttgtctatgtgtctgtttctataccagtaccatgctgtttttgttactgtactcttctagtatagtttgaagttaggtagagtgacacttccagcnnnnnnnnnnnncttaaggttggcttggctatttgggctcttttttggttccatatgaactttaaaggtttttatttttctaattctctgaagaatgtcagtagttcaatgggaatagcattgaatctatgaattacttagggcaatatgcccatattaatgatactgattcttcctctccatgagcatggaatgtntctccatctgttttgtgtccactctgatttctctgagcagttgtttgtggttctccttgaagaggtccttcactttctttcttagctgtattcctaggtattttttttctctttgtagcnaatgtgaatganagtcattcatgatttgtctccctgcttgcctgttgcttgtgtatgggaat

SEQ ID NO: 311750 - DNA, 1541 bp, Homo Sapiens
  misc_feature (751)..(760): n is a, c, g, or t
  misc_feature (1105)..(1117): n is a, c, g, or t
  misc_feature (1368)..(1408): n is a, c, g, or t
  misc_feature (1427)..(1472): n is a, c, g, or t
cttaaacattttattcattttatagagagatttcttttttgtttgcttttgttccaatcattaggagagtggttgaggagtactgaatccatcactactttgatgacacaggtaatattccagattcacatttccaggtaccaagagttccctctaaatggcacaatcaagtcagccttcgtttacatttccttctactgaacacagcaatgcccattggtatctctgaagcgtaatcgcatcttaggtcggtatttctccaaataaagcagctgtttggaattgaacgctccccttcttttttgtcttataaactgaactgcatcttcgtacttcattccacattcaatcaaagcaagtgcaaccagcacaggtgcccttcccaatcctgcaacacaatgcactgcaacacagcaacctggctcttcacgaaatttggtttttaacaggtttaaccaatcatctactatctgattagggggtggagctccatcatcaaatggccaatctagaacgtggattccttctttttcaactggagctttatcatatgtagcatcacaaactcgaaccaaagtcgtcactccatacttcttaagttcctctgtgaacttgttgagagtagcattggtagggttgtgagttatcagaaaacgcatgttctcataggagatctccacaggggctggacggttcattatggcaaataaaaagtgtgagcgtgcgtgtgagtgtgatggggaaagtgaannnnnnnnnntcaataaatcttgaaatgtttcacagcagaaaacattaaaaagaccactaaaatgcctattatcaatcagtgttttctctattcaacttgtttattccttatgaagcttctctcttcaagataagcaaagtatttagaatccacttgaatccaaattcaatttgggcctcaatttctgcagatggataccttcggactccaaaaaatccaactacatacaaaacttaagcagcctttactacatttaggcactagtgagacaagttaaaagtgtaggtcactttccacttgtttacttgatgcttaattttactggagtcattaaaagaaatatgcttgcaattnnnnnnnnnnnnngccaactatttctgaggccagtctcggtgtccaggagtcttcaaggcaatgttaattatggcacatagaacctccaagctcacttgtcagcgaaaatgctgtgctgagcctggcagaagtctgccctcacactcagaatcgccataaatgtgcaacgtatattccaacgaaaaacgctggcgagctggggactgggcattgaagtccggcggtggcgggagcgaggaggcgcctctctcctcagtcacctnnnnnnnnnnnnnnnnnnnnnnnnnnnnnnnnnnnnnnnnnacgactcccccccagcctnnnnnnnnnnnnnnnnnnnnnnnnnnnnnnnnnnnnnnnnnnnnnntctccacgagtccgtcttgctgctgctgctgcggccgccgctgcgtctcctgctgccgccgcagccgtc

SEQ ID NO: 311751 - DNA, 482 bp, Homo Sapiens
cctctttaaacattttattcattttatagagagatttcttttttgtttgcttttgttccaatcattaggagagtggttgaggagtactgaatccatcactactttgatgacacaggtaatattccagattcacatttccaggtaccaagagttccctctaaatggcacaatcaagtcagccttcgtttacatttccttctactgaacacagcaatgcccattggtatctctgaagcgtaatcgcatcttaggtcggtatttctccaaataaagcagctgtttgggaattgaacgctccccttcttttttgtcttataaactgaactgcatcttcgtacttcattccacattcaatcaaaggcaaggtgcaaccaggcacagggtgcccttccccaatcctggcaacacaatggcactggcaacacaggcaaccgggggtttttcaagggaatttgggggtttttaacagggtttaaaccaat

SEQ ID NO: 311752 - DNA, 825 bp, Homo Sapiens
  misc_feature (621)..(631): n is a, c, g, or t
ccgaggtttataagttcccaccagtcaggaattcattagtccccattccaaaaggtggctcccattggggaaaatggcctttaggaaactttatttttttcctggaaattcccggtgtgggtacccttgggggggaaggctccatgaaatttcttccgggaataaaaggaagctttgaattgagtcaaacccactgtaatccttagcaaggttcaccagggggaaccagtgctttcagcaagagggtggttcccacatgtcttcaaaatgaaacgtctcttggagacaaacatgctactctcactgagtacataagcttcctgcttgtcagtttttgtcacacttatgattgaacattgcacatccttcaaaaggtatgtcccactcagatcttgggatagtgcgaagatccccagatccttggtttgcgtcgggctgctgccgggagaaccaaacctccagcagcttctcggtcccttcgaaaaaatgtgcagcttccatcaccgtgagactagcgaacaaccaacaaccacagaaaatcaactaaattaaacctcttctcccgccgctgccgccgccgctgcggattgttccagctgtgttactaaagttcaggttccnnnnnnnnnnngctataattttatattaactttttttaaaaaaaggactaataaaattttcccggctttgtgtgagcgaaagttgaacgtgagtcttttggaaatagaggcagatacagttcagtctcttgtattccgctgctttcccgttagagagagtagagcgagcgctagctaatgtcgccggccatactgtgtaagcccc

SEQ ID NO: 311753 - DNA, 772 bp, Homo Sapiens
  misc_feature (52)..(52): n is a, c, g, or t
  misc_feature (350)..(374): n is a, c, g, or t
  misc_feature (760)..(760): n is a, c, g, or t
caagtaagctttaaccattagttaagagtgcaattgagtaaatcagttctanatctataatacaagaagagtggtaatactgtcacaggtgttagaaggttagaattctacagattcgggtttgtctgatgtcagcggttaataaccactgaataagccctgcctcctaaccaattatactctactaattgtctaccaattcaaagaaccaaaactattataatgactttccagtatttaaatatgtaagaacacctaaatttggttttaaaataaagtttataacaaccattctcatcagatctcaaacttcaaatatctagattttacacatagatttgtaataattnnnnnnnnnnnnnnnnnnnnnnnnnctcattcaaaactggtattttttaggttcttgaattttcatatgtccacattcttggtggctattaaaattttaaaataaattcaaatcttgggaataatttaagtagtgaaatatgtgagtatttattttcaaactcccataagggtctatttagaaaaactaattatgataaatggaaactccagttgtgttgctggcagttttaggttaggcttaattttaagttgagaacctactgaaatgttcatctatttcagtaaagtgcacaaatatgagtgtaccctttggtttgggctatgacctcaaaggaggtgtaggaggtcaatgggcgctgggtgtcagattccaaactatattactgaggctgggcaatcttctcctccnggggggtaattt

SEQ ID NO: 311754 - DNA, 1032 bp, Homo Sapiens
  misc_feature (29)..(29): n is a, c, g, or t
  misc_feature (314)..(314): n is a, c, g, or t
  misc_feature (333)..(333): n is a, c, g, or t
  misc_feature (342)..(342): n is a, c, g, or t
  misc_feature (357)..(357): n is a, c, g, or t
  misc_feature (401)..(401): n is a, c, g, or t
  misc_feature (404)..(404): n is a, c, g, or t
  misc_feature (408)..(408): n is a, c, g, or t
  misc_feature (416)..(416): n is a, c, g, or t
  misc_feature (419)..(419): n is a, c, g, or t
  misc_feature (432)..(518): n is a, c, g, or t
  misc_feature (531)..(531): n is a, c, g, or t
  misc_feature (536)..(537): n is a, c, g, or t
  misc_feature (539)..(539): n is a, c, g, or t
  misc_feature (542)..(542): n is a, c, g, or t
  misc_feature (546)..(546): n is a, c, g, or t
  misc_feature (552)..(552): n is a, c, g, or t
  misc_feature (562)..(562): n is a, c, g, or t
  misc_feature (581)..(581): n is a, c, g, or t
  misc_feature (583)..(600): n is a, c, g, or t
  misc_feature (610)..(610): n is a, c, g, or t
  misc_feature (612)..(612): n is a, c, g, or t
  misc_feature (617)..(617): n is a, c, g, or t
  misc_feature (621)..(622): n is a, c, g, or t
  misc_feature (626)..(626): n is a, c, g, or t
  misc_feature (628)..(629): n is a, c, g, or t
  misc_feature (635)..(635): n is a, c, g, or t
  misc_feature (637)..(638): n is a, c, g, or t
  misc_feature (648)..(648): n is a, c, g, or t
  misc_feature (651)..(651): n is a, c, g, or t
  misc_feature (655)..(655): n is a, c, g, or t
  misc_feature (662)..(662): n is a, c, g, or t
  misc_feature (668)..(669): n is a, c, g, or t
  misc_feature (671)..(671): n is a, c, g, or t
tcagaaattttaatgctgctttgaaaaanacttctgtacaatattatctttctcataatgaaaaaaagaaatgacatctggtatgtcaatggtttgctgaaagcacattatattttttgtttccttgttttaggtcttccaaaaactctgctttgagctttttaagttcttctgctagaagcttcaagttgtgaggaagctctttttcatctcaccccgtgctcaatggcctcttctcgattctgcaacactgcaaccagccaacctttgcgcttctgcacttgatgtgttcattgcctagaaggacgcgcgcngagagcggcaggggggggnggacccagnggggcggaaagggcngggcggagaaggcggccggaggaccgggggcggccgtcaggggnggngagncaagcggnggnggggcggagcagnnnnnnnnnnnnnnnnnnnnnnnnnnnnnnnnnnnnnnnnnnnnnnnnnnnnnnnnnnnnnnnnnnnnnnnnnnnnnnnnnnnnnnnaaagcagggggcnagaanngnggnactnccaggngggccgccgngggacaggggggacgcggnannnnnnnnnnnnnnnnnncccaggcatntntgtcngggnngggntnntctggntnncttcccatcnggngggnggtctcngggggnngngcctgtgcactctggccattacctctgtaaacaggtctcaagaggacaatctaaaaagagctggcaaaagcccaatgaatctgaaaacagtttaaaatgatagaattactggtatactctttttccaaaatatgaaataaacatatattagacaaattatgacaattatagtaggaaaaactccatttgcaatactgaacatctagcttttaaaattaagtaaatctacataacctcctaatcaagttaaattctcattgaagacaatagtgtttttgatatgtgaataagtatctccatgtgtaagaaaaaaaagttttaattacatttccgagccagctggtagacttcatatctcata

SEQ ID NO: 311755 - DNA, 829 bp, Homo Sapiens
ctatatcgcagtctgctctttattggaatggagaatggaaacaggttataaggaatatataccatcccatgttccaagagtcactgagttctggagggcagagggagcacagaggcctgctgattccaacagtgctcctgatggctatcctcgagttgtagggatggttattcctctccagctggaagattgtcctcaatccgcctgatgaatctcatccggatttctgtcacaccgtctcctttcagggtgtcctggacaaacttggcctccacagccatctggaccatctccaaagctccccgcaacaccccacacaagagattggaataaataagggatgagtggttatcaggaagttccacaaagtccaccaaggggttattttccaaaatgagggagaattcatcaccagctgggctccaattagtaatgcttggagtgatgcccaagtacatcttgaacgccaccttggcaatgacatccgcagtttcccgaaagtcatggcacctcccaacatttgaccgagccaagaaatcttcaatcagccggactccaatgttaaagcccattttgtccagctgtttattcacatcttcatcattttcatagtccttacatagctgggtgaccagggcaccataggtcagggtgaagagctcagagctcattttcttgctctcggtgccacggttcgcctgcctcgacatggtgccggccgccccgccccactcgcctagccacgggttagctcggcgacccctgcagacgccggagcctaagccgctgcccctcagcccaccctcgtgccgaattcgccacccaggcc

SEQ ID NO: 311756 - DNA, 1071 bp, Homo Sapiens
  misc_feature (435)..(495): n is a, c, g, or t
  misc_feature (535)..(623): n is a, c, g, or t
  misc_feature (662)..(736): n is a, c, g, or t
cgcatgaagagagtggagacggggaatcagacggggcgcgagggagaagggcgcaacaagggggaagcagccagagagggcggacggcggaggcgcgatacgcgtgggcggcggggagaggcgaaaatagagtggtggggggtagcagggcgcggtgaatatacagatggcaagcggcgcgcggcgcgcgaaggacaacaggccgaggggagaagcaaagggtgagcgacgagaggccgacgggggcgtgggccatgaggcagcaaggtgtaagcgcggggctaggtgtgaaggtaaagggggcgggagtgccattgcggcgcgaacaaggggcgcgtagagaggaagaagcgatggtgagcgggtgagaggtataaatagtaggagggtgtgggaagagggagaggtgagtctaggagggcgtgattatgggcnnnnnnnnnnnnnnnnnnnnnnnnnnnnnnnnnnnnnnnnnnnnnnnnnnnnnnnnnnnnncggtgtccgctacgctgtacgcgcgtcgcggcgtcgacannnnnnnnnnnnnnnnnnnnnnnnnnnnnnnnnnnnnnnnnnnnnnnnnnnnnnnnnnnnnnnnnnnnnnnnnnnnnnnnnnnnnnnnngtggggcaccagagagggaagaccgggaaaaaggcggannnnnnnnnnnnnnnnnnnnnnnnnnnnnnnnnnnnnnnnnnnnnnnnnnnnnnnnnnnnnnnnnnnnnnnnnnnaacttctccgacgggtcccctcacctgcctggaacgcccccggagtgacccagcaagaggcttccccttggcagagctcacaggaaggcccttttccaaacgcacctcgcgctcggcgccgggccccttccctgtacgcctcaatttcgccccgcccgccgaggtcacgcgctccaagttaccattttcttgctctcggtgccacggttcgcctgcctcgacatggtgccggccgccccgccccactcgcctagccacgggttagctcggcgacccctgcagacgccggagcctaagccgctgcccctcagcccacaagaccgaccggcactccc

SEQ ID NO: 311757 - DNA, 947 bp, Homo Sapiens
  misc_feature (149)..(149): n is a, c, g, or t
  misc_feature (866)..(866): n is a, c, g, or t
  misc_feature (872)..(873): n is a, c, g, or t
ttgggatttcactcaagaatgtgtctttattgaagaatttgtaagaaaaaaggatgtaccctctgtaaaaagaggagatgttgcctccaacagcagggaggaatgagacctgggtggcttcccagaagtcagtgtttccggcatgactnggctcctttcctggcaaacactacaatgtgtcacactacagctagcaattcctccccactccctcccagcctttccttccctccacccccacaaccctatagccatttgaggcaaatggctttctaaaggcccagggatagatgtgccaggcttgcctcttaatggggtcaaagtgagttttgctttggaaaaattcaaacaggaatgtaaaatggtttgagctctttctagtccaaccaaaggtgattacatccagcccctctcaagggaatgggggcagagactgtcgctcctgaatgtgcacacatggggtaaatggactatatcgcagtctgctctttatttgaatggagaatggaaacaggttataagaatatataacatccatgttcaagagtcactgagttctggagggccagagggagcacagaggcctgctgattccaacagtgctcctgatggctatcctcgagttgtagggatggttattcctctccagctggaagattgtcctcaatccgcctgatgaatctcatccggatttctgtcacaccgtcatcctttcagggtgtcctggacaaacttggcctccacagccatctggacctgggggacagtgggaaaatgaaggggtagctgcctggccacagcctctagggaaccagtggggatggggcataactgactcatccacagcatccaaaaaaggggggctngtttcnnacaaggacaagattgacagcgccaacattctgttgcataagacaatggctccaacccttaaggagaaacttagc

SEQ ID NO: 311758 - DNA, 653 bp, Homo Sapiens
  misc_feature (13)..(13): n is a, c, g, or t
  misc_feature (52)..(102): n is a, c, g, or t
  misc_feature (129)..(129): n is a, c, g, or t
ttttgcgctattntaagactaccccattctggattagagatttcattgcccnnnnnnnnnnnnnnnnnnnnnnnnnnnnnnnnnnnnnnnnnnnnnnnnnnnctttcagtaaaatagcaattagaaaanatacacttatacctaattaatttctaccagtattatcaaataacgcaaaaagaatctagtattttggctgttttaattgctatcaatattatcaaataaagcaaaaagaatctagtattttgacagtgtagtaaatttaaattattttttgttcactttaaaaaatattttttcatatgcaaacaaattttaaaaactgtaaatctacaactttggaaatatctatacacatatgtatgtatgttctatgtatgaactccagttacggttaaaggtttagcaccctcccagccactaacactaacgagggtctgaggtgccttgagcagctgcctctccttctccctacaacataacattccttacagtgtgcaagaacgtctcctagcactcaccaccaccacaacctgataatgaggcatgggactccccagtgcactcatccaaggcctcaaggctatattgccccagagctgcctgcactgtccactgcaagtagcttgaccctgatattcacccccaat

SEQ ID NO: 311759 - DNA, 706 bp, Homo Sapiens
gagtctcgggcggcggtgtccggcgcgcgggcggcctgctgggcgggctgaagggttagcggagcacgggcaaggcggagagtgacggagtcggcgagcccccgcggcgacaggttctctacttaaaagacaatgactactgatgaaggtgccaagaacaatgaagaaagccccacagccactgttgctgagcagggagaggatattacctccaaaaaagacaggggagtattaaagattgtcaaaagagtggggaatggtgaggaaacgccgatgattggagacaaagtttatgtccattacaaaggaaaattgtcaaatggaaagaagtttgattccagtcatgatagaaatgaaccatttgtctttagtcttggcaaaggccaagtcatcaaggcatgggacattggggtggctaccatgaagaaaggagagatatgccatttactgtgcaaaccagaatatgcatatggctcggctggcagtctccctaaaattccctcgaatgcaactctcttttttgagattgagctccttgatttcaaaggagaggatttatttgaagatggaggcattatccggagaaccaaacggaaaggagagggatattcaaatccaaacgaaggagcaacagtagaaatccacctggaaggccgctgtggtggaaggatgtttgactgcagagatgtggcattcactgtgggcg

SEQ ID NO: 311760 - DNA, 916 bp, Homo Sapiens
  misc_feature (134)..(175): n is a, c, g, or t
  misc_feature (260)..(260): n is a, c, g, or t
  misc_feature (269)..(269): n is a, c, g, or t
  misc_feature (289)..(289): n is a, c, g, or t
aaaccggtaaaaacgaaacccttaagggtttagcccatcctcaacccccggcaaaattaaacttggccccgctgtgagtctgccttgtgtatacacacatgcagtatttaaccatgaagcgcaagtgggccccnnnnnnnnnnnnnnnnnnnnnnnnnnnnnnnnnnnnnnnnnngacagtatttatcaaaggggacgctgctggatttattgaaagaaatgaactttgccagggtctggcagactcaaccccagtaggnagttgttanttttaccctctgtgcccagnagtgctgttgctgttggctcaaggctgtttgctcactatgggcacagtttgctacgtacggatccctctccgctggtccagtgtgcctgcctcccagcagcctgcacctcgtgggatgtcatcagctccacctccatgtattcttcaaaaccttgtttatgttcccttcttttctgtgaagtctttgctacctaaacccaaggtcatttcttcttcctctgatctcgccagcctgggtccaagaacagctggtagaaatgcagattctcaggctccaccccagacatcctaaatctgcatgttagcaagatccgtgggggcattcaagggcacatggaagtgtgagaggtgctgctctgcctccacttaccatctctactggggtctctcagtgggagtcctgctaccccaacaggggcattgaaaatgtagagaggatgtttttgactgtcacaatgttgagtgctggcggggaggactactagcatccatcagtggggtcgatgctggacagcctgcgatgtacggtacactctcatatagggaagaactggttcatacgtcacacaactttctaaagagctgccaggcagtctctgccattgaatagctgctcgggtgactccc

SEQ ID NO: 311761 - DNA, 1765 bp, Homo Sapiens
ccatgggtgggaggttgacatagtgcctcctttgtgctgaaaaaactcaagtgctagaacttatccatacaccactggacaaatgcctgaaggccactggtgggcctgaccctattacagaatttacagctcaaggacattttgaagtcctatggtcatcctcttcccatcagcttggggtcacatggacacctggtcccctcctatttttattccagaggacactgaggttcaaatacacatgctgcggttggcagattttatccctagagaccaaagtatgaagaggctccatgacttgcccaagggcatttattgagtcaacagtagaaatgcgaagaaaattctgtcacctgatactggggccagctccccttcccttgacacatcatctaaagggggaaataatcttctgaagtatcaaataactctggtattttgatgagtgagcaagctggtaagcaaataatgagaaaagtgagtgttgaatttcccttgacataacccttttggaaaatgcagcggcagatcaagaagaatgtgacttatattataatgaaagcaaaaatattttcaaatagattcagggggctaataaacagaaggtctggctatgagtgtcagcctaaaggagagcagagaaaaagatcctagagttctcagccaggcaagatgactgcttacaatacacagctttcatatagggagtgagtgtccctttttcatcctcttagttacgtaaggggaaggggaaaaggcattcttccaaacacagatcacttcagagtagtctccacttgagaagctagtgacgtgttgctgataaaatgacgggtgctggattcttgttgagatgaggaaacaatgcctttgggggtagaggatctgtgaatcactccctctgtgccaaagaaagggactcaggagaagcctggcctgagtgctatgagtccactgacccctcagtcacactaaatatctatgaggaccatgaaggaatgggcttctacatttcagattgcgaattctgaaaagaatgaaattccttacagaagtttatctttattttctactgggtagaatttctagaagcttctttaaaaattgtggtttccttggccttaaagagtgataataacttttccctcagcataattctgccccaccctaaaacagcactgtgtctggtgcttcttgtttgtcccagtggcagcacctaggattaggtttcttcagtcttccttgtcatcccagcagtggaatcaaatttctttcagtgaaacatgtaaacgtaagacctgtgcatgtcttatgggagaaaatgtttccaggatgaactcactcagaggaggagacagcattacagtggcgccagacagctgcagttctacttgccctcagctcagagtttctcagcttccagcccattatgcattgttccaaatgacaaagccaccagaaaaaaagagacagcacaggctcaagggacccagttctccacaacaggttgccacatcttgatctgcatctgaagcaaagactcaaagtctactcttgctcctttctccctgccagaccttgagttctcttttccaaaacatggcttgagcacctccttgaagaagtcttcctcatgtctcttatcttgttctaatcatcccatggctagcgtaagtagcacagatcccatctgcattccagctatatgtgttcctgttgtttcttcctgtcttctcattagcctataagctctattgtacaaggt

SEQ ID NO: 311762 - DNA, 571 bp, Homo Sapiens
ccttaccagaagtttatctttattttctactgggtagaatttctagaagcttctttaaaaattgtggtttccttggccttaaagagtgataataacttttcccctcagcataattctgccccaccctaaaacagcactgtgtctggtgcttcttgtttgtccccagtggcagcacctaggattaggtttcttcagtcttccttgtcatcccagcagtggaatcaaatttctttcagtgaaacatgtaaacgtaagacctgtgcatgtcttatgggagaaaatgtttccaggatgaactcactcagaggaggagacagcattacagtggcgccagacagctgcagctctacttgcccttgctcctttctccctgccagaccttgagttctcttttccaaaacatggcttgagcacctccttgaagaagtcttcctcatgtctcttatcttgttctaatcatcccatggctagcgtaagtagcacagatcccatctgcattccagctatatgtgttcctgttgtttcttcctgtcttctcattagcgtataagctctattgtatgaagtctac

SEQ ID NO: 311763 - DNA, 731 bp, Homo Sapiens
  misc_feature (47)..(47): n is a, c, g, or t
ccggattagattaattgatggcccaggtgtactacaagctccacccncagtccagaagtgtcattcatcagtcccaagggctaaagaaatgtggaaaagtctcctgataatatcttggtctttgttagagatatcctgggcagaaacaccagaagctcactaaatggggactgaggagaattggacggaagacgcgtagtgggggttaaaagcgccccttggctcggggctgctggaagcaggtgctgtgcgatatcactgcttcatggttagcatgcttggggaccatctctactggggtctctcagtgggagtcctgctaccccaacaggggcattgaaaatgtagagaggatgtttttgactgtcacaatgttgagtgctggcggggaggactactagcatccatcagtggggtcgatgctggacagcctgcgatgtacggtacactctcatatagggaagaactggttcatacgtcacacaactttctaaagagctgccaggcagtcttgctcctttctccctgccagaccttgagttctcttttccaaaacatggcttgagcacctccttgaagaagtcttcctcatgtctcttatcttgttctaatcatcccatggctagcgtaagtagcacagatcccatctgcattccagctatatgtgttcctgttgtttcttcctgtcttctcattagcctataagctctattgtacaaggtctacacact

SEQ ID NO: 311764 - DNA, 1089 bp, Homo Sapiens
  misc_feature (442)..(442): n is a, c, g, or t
  misc_feature (449)..(449): n is a, c, g, or t
  misc_feature (466)..(466): n is a, c, g, or t
  misc_feature (484)..(484): n is a, c, g, or t
agtgtgtagaccttgtacaatagagcttataggctaatgagaagacaggaagaaacaacaggaacacatatagctggaatgcagatgggatctgtgctacttacgctagccatgggatgattagaacaagataagagacatgaggaagacttcttcaaggaggtgctcaagccatgttttggaaaagagaactcaaggtctggcagggagaaaggagcaagactgcctggcagctctttagaaagttgtgtgacgtatgaaccagttcttccctatatgagagtgtaccgtacatcgcaggctgtccagcatcgaccccactgatggatgctagtagtcctccccgccagcactcaacattgtgacagtcagagagaccccagtagagatggtccccaagcatgctaaccatgaagcagtgatatcgcacagcacctgcttncagcagnccggagccaaggggcanaatggaaagagtcagcanttctcttttaggttctctgcctctctagtgtgtaagcttttaacccccactacgcgtcttcgttccattctcctccagtacccattttagtgagcttctgttgtttttgccccaggatatctctaacaaagaaccaagatatttatcaggagaacttctcccactctcctctcagtctttggggatctgatgaaatgacacttctcggactgtggggtggagcatgtgagtcacacctgggccaatcattttatcctatttcgtgaccacatgaccaattcagggatgggaacatgacccaggtggaacctatgagaggcagtgagatctttccaggtacttccaggaaagagggtctcacttttccctctataatgtacaccagagaaggtgtgtggctgaagctgctaccatcctcttgtggctacaggaagctgggattaattgtaacaacgcaattggcagatctgaaagctgagaacaaaaaagcaaaaaacctgtgttctaataacactatatatgagccctaaatgccagctatgcctggagccagtcttactgtggaatttttaacctaagctggttgataaattatcttttcattt

SEQ ID NO: 311765 - DNA, 463 bp, Homo Sapiens
  misc_feature (416)..(416): n is a, c, g, or t
ctcaacagattttattctactactgaaatccagtctgcagaaactaaaagttgtatagtggatatgaaatttatataaccaccatagttcagtatctcaggggtaaaaataaaatgtgactatttatttccacaaaactgaacctatcaattcaagataacttttgctttaaaactcacgactccttgaatcaatagtcaatttctgggatctttctcctcctcctaggtcctcttctccctgaaggctgtcacagttcctgtgcagagagagaggggcactgcaggcacccagggcgctggactgccttttgttcagtcttcatttggcagggcccccagctgggaggaacccgggggggaaggagggaaaaaagttttttcctcctctacactccccatggcatggactaaagngtagggagggagttcaggcaagggcaggacatatatagttacccggg

SEQ ID NO: 311766 - DNA, 574 bp, Homo Sapiens
taatcttttaattttatttcattgagaaataataaacttctaattgttaaatttcattttctcaagagatgttaatttcaaacaataatggtataaaaatatccataggatgaattttttctcaaccttgacctgaaacatgtgtttttaggaaattaaaaataactaatagcttcgacaactattcagtaatacttcttcagtattacttcagtattcagtaatactactgaatatacagaagtgaaggtgagcttgtgcagaggactggccctgtaaatcttgcagtttggctaactccgggtatatagccccagctgggttattagttgtctgccctaggaccagtcacctcaaccttccatgcctcggtttactttacacaatacatacttgccttgcctacttttataataatcaaatgagaaaattcttattctatgcttagtcgaaaagaaaaactaacgaatcatgtacttgaggaaacagtgatgaaatagagatggtacttctttagccaatttccctgcaaaacaaatgttaccagtatttaatagatcaactttcactcccg

SEQ ID NO: 311767 - DNA, 774 bp, Homo Sapiens
  misc_feature (70)..(118): n is a, c, g, or t
tttcttctcgctcaggtaacttttcagtgccatcagatgaagattcatactgttgttccatttgaattannnnnnnnnnnnnnnnnnnnnnnnnnnnnnnnnnnnnnnnnnnnnnnnngctctgctttttatcatcttcagaagtttcatcgctctggtctttctttaggaatttctctgcaatatcagataagccatcctgtacttttttacatgttttggttttgagagtgcttgctcttttctttagtttcagcaacttttctaacttccaaagaagtaaagctctgctctttcccagaaagtttatcgacaccatcagtggaagcgcttgcttgctgcttcttaggaagtcgatctcttaattccatgatggtcgtgtctttatcaactgtgcgttctgctgaagagaaagtctctctctcttgttttctttcagcatcatcagatgatccttcttgtgaggtcttcaaatttttgtgcccttgattatccattccttttttgctgtgtttctcatcttcagaagagtcaaaatcttttgtatttggaattctttttttggtggttctggcagcaccaattttactcatgctctttatctctttttctaattctgagtcataattagaagactcagactgggtttgtcgtttctttttagaaattatagagctcttagctgatttgccctttttagtatcaaaatctgagccagatgtagaactttttcgtttcctttttcctttatcatctttccccgccttcagcccc

SEQ ID NO: 311768 - DNA, 1468 bp, Homo Sapiens
  misc_feature (140)..(198): n is a, c, g, or t
  misc_feature (720)..(775): n is a, c, g, or t
ctcttttctgtttttctccatcagttgttccattcttaatttgttttatgcccttaggaaaatgacaaatttcttctcgctcaggtaacttttcagtgccatcagatgaagattcatactgttgttccattttaattacnnnnnnnnnnnnnnnnnnnnnnnnnnnnnnnnnnnnnnnnnnnnnnnnnnnnnnnnnnntatcatcttcagaagtttcatcgctctggtctttctttaggaatttctctgcaatatcagataagccatcctgtacttttttacatgttttggttttgagatgcttgctcttttctttagtttcagcaacttttctaacttccaaagaagtaaaactcttgttttcactggatgaatcttcttgaaccttaatacgtcgccttttctttttctgtttatagctccgctgattttcttccaactctgctttctttgcagaccttgttctgggccgctgttcatcttcggattcactaacttcttcactaactcctgattcctgaaaatcagaatcttctgaatcttcactgctcacctttcttctgtttctgcctttgacttctttatgctctttaggctttgtctttttttcttctccagattctccgtcactcacagtcaatttgtgccgcaaaagcctatgtctgtatcttggcttcttagattcttcagaatctgaatctgattcagaattgacttgannnnnnnnnnnnnnnnnnnnnnnnnnnnnnnnnnnnnnnnnnnnnnnnnnnnnnnncccttcttctggctcatcatctgaagatccatcctcatcagaggaaagattggctttaatttcttctaaaagcatcttcttggcaattctattctcaggatcattgtcgtcatcatcatcatccactgtgacaggcactgatttagataaggcttcatctcctgaagattggcaaaatccagtatgtgaagacagcactaaattttcagtcacaggcttaattttctgttcatcgctgcttccctcacctatagaattctgatcatcatcttctatatcagaagaagatgaggatgtaatgtcagcttgcttccttttagtgcttgttcttagggagtttctctttttctccttgacaatgactgccttctttttagatgaagttctttgcttcttctttttattatcttcagaactttcctcagcatcagatgatgatgagccactttgtatttccttagtatttctctttgaacttaaatttcttctttccctcaattctattcttttcagtctcttatcagaagagttacaaccatcttctttcatggaatatttctcagtatcagatgatgaacaatcttgtctcttccttgaactctttccaagcaacttgcaccttttcttctctctaccatatgctccattcttactctttttatcctctgaagagtcacaactatctcctttccc

SEQ ID NO: 311769 - DNA, 816 bp, Homo Sapiens
  misc_feature (201)..(201): n is a, c, g, or t
gataatgtcttcacctcatctctttttctgattctggaacacctattagatggatgtggacttcccagagttaggcttttacttattttttctcttgcaaaataagtcattttgttctaatttcatagaaatttctttaacatattttccaatgcttctatttctttgggtaaggggctatcaaactttttaagttctaangaaacgtctgtaacttccaagttgtccttaagaggaaagatgaacatcctcgtaggtctgcctgtgactatataattaccggtggcacttctgtcccctggctctcaatcttgtttgggaccttgttgattaattttgacaattaatttttattatggcttgtcattcacacgggtgggtgtttatctggggaattcaagaagcaactgtgtcctagtaggatgaagtccatcacacagttccagaacagccaaggagggcagtgcgagcttgtccaaagtgacagggagctaccagaagaagcagttcagaagaagagaatgtgagagtcagccaggaagtccagctcttctctgaaatcctcaggaggaactgttttcccttttgtaggggtgcccaatatgcctttgttatcctgatttcttctaacgaggaagagggcctggtacccctattagtgttcatgaagaccctggccacaaaaacagaagagctgaacagcagcattgcctccgggagtaactgactcacacctcattttctttaacacaagacaacctgcttgtctgttcaatttggcagtctgtaagaaattcaagcacttccttgaattta

SEQ ID NO: 311770 - DNA, 494 bp, Homo Sapiens
tttggtggtttcagatgtgttcattttattatgcttttaaaacttaggtacatgttacatatattcattttaaatgccttgatacaaataaaaaaggaaagcacatatatacaaataagaatgccactatcatgggataactttgaacctgcttaaagttttctcaattaacgtattcacaagcttcagtactgtaactattagctggcaaatgtcttacaacacactatatacatgtcatgatgctagggttagaaatcatcgtcctgttagagtacttagaccagaacaatagtaatgcctttttcatgttttaaaatattatataccaggggtgattctctttcaacttgttatatagtctgtacttgccgtatgcgcaggcgggctactaaggtttctctcagcctctgtctctagaatttaaagcagtcactgagtggcagaaatttcttctaaaatctattatatatagactgggcacagtggttcat

SEQ ID NO: 311771 - DNA, 806 bp, Homo Sapiens
  misc_feature (352)..(370): n is a, c, g, or t
  misc_feature (778)..(778): n is a, c, g, or t
gaaggtgatttttatgtaggttgagaaatatcagcatggaggtcctagctgacctctctagagagtttccgagagatttgacaacaactttttctttaagtcatcagttatgccccggggtatgaaatttctaacatgatcctcagtaaacttggctgccttgctgaggatactctccatctgcctgagagacacagacaccattaattgggaattgacttgacttgtgtggttccttgtggaccagatggccactaaatattctcatttcaaggcaattggtaaaaactacacttcaagaaatttcattcttaattccccttagtggatgttattaaccaaaggcagaagnnnnnnnnnnnnnnnnnnntattctaaatgttaatatcaaaaatattattttcaattcaccccaggcacagagaactaagtattattattgctattgcaccggcattccccaatgagacagtgattttcttttaagacatttttaaataatataggcagaattaagtagacggtgatctggtaagtagatgtttcagggtaacagctgtgcaatgctccatgcagggaattagattgtcattttattccttaccaggaacatacattcagttaaacaattatttgacttctgctcttccactgatttctaagttgaggctctctcttgtgcctgtctgatcagataagtagagttgtgccttggtttatagatgagataaatgtgtatttgaataagcataagttaaagaaattttaaatcccttangaagctaggcttatcagagaaatcccag

SEQ ID NO: 311772 - DNA, 321 bp, Homo Sapiens
  misc_feature (33)..(33): n is a, c, g, or t
tgggcttgaatctcaggcctgccacacattggntttgtgaccttggaataggtaacttagcttttgagcctcagtttccctttttttattgtaacatatatacttcacaaggatgtgatgagaatttaatgaggtagaaagtataaagcagggaaataaaaaaagctccatagaataccgtacaaaccttattggtatttgaatggtgttgaacttgggtggtttacaatatgctgaacttcagcagaagcgacagatttattcataccagtttttcgtttcttggtgattaattttcctctgaggaaaaattaccaccct

SEQ ID NO: 311773 - DNA, 2039 bp, Homo Sapiens
  misc_feature (490)..(509): n is a, c, g, or t
gcaaaataccctcaggaaagtgaaagagctctagataggtcttccagaggtgctaaaccgacacacctttatcccaaccccaacccgggaaataaagaataaatattttttggtaattaaccattatgcaaacacgtgccacgcttgctttgtccatgcatatgcggtatatccaattttgaaaaaatactgtgttgtcctcttgttttaaaaagtcatatccaaaggtttttatgtttttcgtttgttgaatcctcttgctgcctacccctttccgcatcccaagattttctttacaaggaactaagcatcattcactcatgaccttggggtatgagagaaagagagtcagtctgtgtgtgggtgtatctgtatgtgtaggggaggaaggggaagaggtcctttaccaaagtacaacaaaatggctggtttgaacatgaaaagcagtgtcaaggagctgtttgaaattttaactgtactacactcaggnnnnnnnnnnnnnnnnnnnnggagtcagctttgagaatgaagctacgttacaagttaaagttggagggcttttagtgtgtctgtcacacttttgttggcggcctagaatactgttgtacaatggtttatctacctttttattacaatataatttacttaaactttccattaacaaaacaattctggtactacagaccagtggtgtcagaataggcttagtgcctccttgtttgtgtttgttttgttttaattgcatgagcactctagatggtaaagttttcagagttcattttatgcagggccattctcagtcctcaatgtactcccacagatctttttcatagccttcatgcacatgctgtaacaaaaccctttgttcgactctcacagtatctgtacttgtcttgtactttctgctttatatcctgcagagaatcttgggaaatatctcgttcaaggtagcccgagagcacctctgtggcattctctagatctgcttggttattctcaaagataatggactggttattctttttgaggtagaaagcgaagacataagtgtacatgagtgtggcacgacactggcagaggacatcaactgccttcttcaggaactgcacctcaatccaggacatgttgtgctgctgcatctcctccattttctgtttcacctgagcatatagtttgtgctcaaagcgcaggctctgcatgtggttcatatagcgattacagtagaacaggtacctctgcagggctgccctagatcgctcctgtgcatctcttgctgcctttgcatcatcctcattatagcggttacagttgtaccaggcagatccatgtggttcccatgggccaagacacacccagcaaaactctgctttacaattctggttacgacagaccatgtgattacaaccaccatccttctcaattgtgacatggcatttgggacattcctttgtgttggctgcaatccaattggaggtttcactgtcatcatcacactttttaatccatttctttaacccacttacatttaccaggatcatgccaattttctccacagttaaagcaaaattggcgcccacatttgcagcgaacaggtttagcatcaggatattggactttaacaacatggtggcaatctggggcaggacaccactttaacagtcgattgcactctacaaagctatttgttattaaatgctgatactttaatttaacttttgaatctgtgatcaggcgcataactgtgttgtcatccactaagatatcacaaccatgagcaggacacgaaatagtctgacccatgccttcttccattattttggtagttaaatattcactccagcactgcatacaaaacttatgtccacattcaaggccagtgaaatacgagttagggtagttcaagtagcagatctgacaaggcatatcctgtgctgatgaccttgtattcatctggcgtgttcgagactttttacttggattaattacatgacactcagcaaagagcttctccaggtttccatcaaagtcctttccattag

SEQ ID NO: 311774 - DNA, 932 bp, Homo Sapiens
  misc_feature (905)..(905): n is a, c, g, or t
ggcgttagccacaaaatgagaattatatttgtcaaccttctccttataaataagttcagacatacatttaataacatacggtgacttgtgtttttgggtatttaaataataaaatttcaagggatagtttttattcaatgtatataagacaggtattgcctgatttactactttatataaaatagtacctccttcaattactggttctgatttaatgtacggaactttatttgtcgtcgtcgttgtagatgttgtcgctgtataaaagcagtccaaatttggaccttagcaatcatgtcttttgtataggtacttaatgttaatacatattacactacagtttacttttcagaatactaaagactttataactgcatgaacttggatttttttaatcactcatatggtagaattttataaacacatacatgataccatccaaattcttgcttttaataacaaaggtacaatattttgttttagtatgaaaatctggtagatcctattacacttctgtttatattaaatccacaatattttattacatttttaacttgtataaattttaggtcaaatccttcaagccaacctatactaaaaattagttccataatcacaaatggctcttttgtgtaattgtttaatttcacctgaatatcataatgcttaaagccatatggagttggaaattatttccaaagcatatttattccattgttttagtctggctatttacagtataaaaaaagcatttttattaaaatactgtgtagttctttgagatagttgcttatgcatatagtattacattcttagagtagagcagagtttttagttagtattaatttattttcctccattcatgtacttttccttatatttcaaaactgttactgagaatgggntcagatcagtgagaaatctttacagtt

SEQ ID NO: 311775 - DNA, 1362 bp, Homo Sapiens
  misc_feature (86)..(86): n is a, c, g, or t
gtttgaatgttgtttttgtaaacagttgtagattaaagaagtttttacagatcaatgagtaaaatgttcatttaataactttctanctgtatacagtatatgcttgatagttcaaaattctccaaatgtagatattatacaataattattttaaattattaaatgagtatttaatccttaaaaattacattttgaaaatttaatggcaattacacacaaattttaatttaaaataatattaaggacttaatctgatttacagaaatgaaatgcaatgaagagattaagggctaacctccattactataaaattctctggctaccatctagcacaggagcaactggattgctttcagcagtcttgaagcactaaaatatcttaaaattcatatggagaaatagtatgtatctctacattaaatttagatttgatatttattctctgacagatcagacccagaatattaatttttatgtaattgaaccaaaaacatttagcaatccttcatttagtaatcttttgtataaatataaaaatctctgataagtgaaatgttttttcaaattatacttctatttttcacagctttataggtaattataattttcaaactttaaatatttcatgtgatttgatatatctgtacagaaagagtaagataaaaacatttaataagattaaatctaatttgcaaaaattggtatctgacatttgttgtgtgctcttgcaaagagtgcataggacatttctgcagcaatcaaaaaggtaaaatctttttaaactcagatttcaagtttcctctaatattccttctaatcctaatccctggaaatactttcaagttttgatttctagatgcaatgtgttttgttacatatacacatgtcttatccttaaacttttaaaacacagtatgatcagattcagcatgatgatatcttctcagactctgtagaagtcctctgtgcaagattaatgtcgagattcctagtgccccatcgtgaaaaaccagttaaagatagtatacaactatgctttagtgggatttcctgcaggtttgggatcataaccatacaaaaaagtagctgttattacaaggatggctccaaggaaaaagacactgaataagatgaagacaaaataaaaaagagaaaatcagattaaaagcagaacaagttccttctatttctttactataaaaacaattataatgtggggaaaaatgttccagtaacacggctaacaaatcttgagtacttactacattccaggtatctggctaagtgctttatatgcattatttcattgagttgtcacagcaaatctatgaagatgtattagtattcattttcctcgtgccg

SEQ ID NO: 311776 - DNA, 968 bp, Homo Sapiens
agtaccatactatagaaggaagagcaggggctttgcatggagacctacctggattttaatccccagtttgctacttactggttgagtgacttttgggaatatgaataatgctgttagaccagtttttgcgcatttagatcatcacaaactgtgggatcccaatgaatttgcagttcactgctttaaaattataatgtattccattcaggctcagtattctcaccatgtgatccaggagattctaggacaccttgatgctcgtaaaaaagatgctccccgggttcgagcaggtattattcaggttctgttagaggctgttgccattgctgctaaaggttccataggtccgacagtgctggaagtcttcaatacccttttgaaacatctgcgtctcagcgttgaattcgaagcaaatgatttacaggggggatctgtaggcagtgtcgacttaaatacaagttccaaaagacaatgatgagaagattgtgcagaatgctatcatcccaaacaataggattttttggaagtaacctaccagattatcaagaggtcagaaatccatgatgttcattatgggggaaagtacctgtctttggaacatctacccatactttggatatcagtcaactaggggatttgggaaccaggagaattcagataatgttgctgagatctttgcttatggtgacctctgggatataaagcgaagacgattgttactgcactgccagggtctttcctggatcctttgttatcaccatctctcatggaggactacgaactgagacagttggtcttggaagtaatgcataatctcatggatcgtcatgacaatagggcaaagcttcgagggatcagaataataccggatgtagctgacctaaagataaaaagagaaaaaatttgcagacaagacacaagtttcatgaaaaataatgggcaacagctgtatcggcacatatatttgg

SEQ ID NO: 311777 - DNA, 368 bp, Homo Sapiens
gcaccgtttttttcctccttaagagagcactgatgctcagctagagctgaccttagaaggtgagggggagaaaaggccactgcaacacactgcatttccttacagtggtctgtgccgattgacaaaaagaagaaggtgttccagtgtaacagatgagtgtcccagtaaaggttaacactgatcaggtaaaccgggggtgggggtaacaataacacattgattcagctcaagaccaggttccattttttcatttgccagagtgcccacgcgtcgtcctgctggctgggaccttgcaggtcgtcctggtttggagtgggggataggaggtgaaggatgatggagggggctatgttgcaacgcttcccctg

SEQ ID NO: 311778 - DNA, 672 bp, Homo Sapiens
ccattctagttgttttctgaccacataactgctaacaaagatgcttcactctggctacactgatgtgaactttgaactttagcagaagagctcagctctagagaacaatgagctcctacattaccttttttcctcaaagaataagtaagtctaagcagaaaaaaaatatgcaaagaattttcagtatgaatgaaataagacaaaccatcaggcttgctgtattgtaaaccaacacaatatagttataacagatctgtagaaggatccttagaataagagagtcatttgtcgggggtcatcagggagaatactgatagtatcttcggctttgccgcataacagacacagcatggtatactcctgaaattcatccatgatactgaatgtatactcatgtctggctattacatgatgacaattcttacacaaatgatcataggtaactatttcttctccatcttcttctttcaaggatttgtttgtgatcagcataaaatcccgcttactgcacactgcacagcctgtaaagttcagtaagaaagatccattctccaggcaggtattaccccggttgggatattccttctccacacagtcgccacacatcgcgacgcagtcaacagggaatgtcctccaacgcttccgggaagacgaaacctcgcgagcactccc

SEQ ID NO: 311779 - DNA, 481 bp, Homo Sapiens
  misc_feature (21)..(21): n is a, c, g, or t
  misc_feature (52)..(52): n is a, c, g, or t
  misc_feature (352)..(364): n is a, c, g, or t
  misc_feature (451)..(451): n is a, c, g, or t
ggtttgtcctatttcatccanacggaaaatccttgccataatttttttccgnctagaacttacttattctttgaggaaaaaaggtaatgtaggagctcattgttctctagagctgagctcttctgctaaagttcaaagttcacatcagtgtagccagagtgaagcatctttgttagcagttatgtggtcagaaaacaactagaatgggagcacacctggtgcccagattttggtttccaataaaagcaaccagggctccttagaaaatgaactgattctagagctgggatatgaactatacaagatgagcctagagtatcttgtgccacagaaaaatgaagtactgaaattnnnnnnnnnnnnntcatagtgattgggagtatgtcagcatgatcgaactgaaggatctctgaaaggccacagctggagcaatttgagtaacaaaataaangtagtattgggttataacccaaactatata

SEQ ID NO: 311780 - DNA, 1006 bp, Homo Sapiens
cctgggtggcgaattcggcacgaggcctgtgctctgcgtgctggatgtcgagagtggcaacatctctgtgcttgagggggtccctgagaatgtgtcccctggacaggcattttgggcccctggagatgctggtgtggtgtttgtgggctggtggcatgagcccttccggttgggcatccgcttttgcaccaatcgcaggtcagccctgtattacgtggacctcatcggggggaagtgtgagctcctctcggatgactccctggctgtctcttctccccggctgagcccagaccaatgtcgcattgtctacctgcagtacccatctctgatcccccatcaccaatgcagccagctgtgcctgtatgactggtataccaaggttacctcagtggtggtagatgttgtgcctcggcagctgggagagaacttctctgggatctactgcagccttctgcctttgggatgctggtcagctgacagccagagagtggtctttgactcggctcagcgcagccggcaggacctgtttgctgtggacacccaagtgggcactgtgacctccctcacagctggagggtcaggtgggagctggaagttgctcacaattgaccaggacctcatggtggcacagttttccacacccagcctacctccaaccctgaaagttgggttcctggcttctgcagggaaggagcagtcagtggttgtgggtgtcccttggaggaggcccgaagcctttcccgacatccactggggcatccggggtgctacaggccaccccccagagcaagaagaatgtggcacgaatgcttggcccttgattttgaaacaatccctttggaagcctggacagccctccccataaaaacccaagtggcccatggtgggtcctggcccccccgggggtgcgcccatccacccttatacaactccctggaagccctttcccaaaccctccattcgtaaaaggggcttttgcgcgggatatcaattaacacttcctcgc

SEQ ID NO: 311781 - DNA, 2004 bp, Homo Sapiens
tttctgtgtcctaatttattatgactacatagcccacattcctctgcccacgcatccgtggagtccagagcccagaaagcctcctgctgccctgccagaccgttgagctcctcaagagcgaagtgtggcacaggctgatcagctcatgcagaatggcagggcttcagctgcccaagtgtgtgcgtagccagagcacagcattcatgaagctgtctgactccacctccacctctgataatgcgtgggtgcttttgggatagagcaggagccgaacaggcacattccgggtcttgagggcacggtaatactccatgccctgcttgaagggcacacgccggtcctcctggcccaacatcagtaacagtggtgtcttcacctgagggatgtatctgatgggcgatttgtccagcatctcagcccacacgctgaggtctggcaggcagtcactgctgaaaggaaagccagcctccaccacgcaccagtcagggatgtcagtggagcccaacatggaggcgatgttgatcacggggttccgggccacgcaggccctgtaggtctctgggtactgaccaatcaagtggcaggaaatgaagccaccatgggaaccacccataagggccacatggcttgcatcaaagtgttcctcctggagcacctgttccactgcaaactggacatccttcacatcctggtggcccacattgcctgggagggagaggatgctgtcctggccaaagcccgtggagccacgatagttcactagtagtaccgcaaagcccatcttgcaaagcatggctgggaacagcatccaggcagtgacaaaggatgaatggggccccccgtggggcatgaccaccatgggcacttgggtcttatctggagggctgccaggctgcagcaggattgcttcaaagtcaaggccagcatactgcacattctcttgctctgggggtggctgtagcacccggatgccccaggtggatgtcgggaatgggctcggcctcctccagggacacccacaacactgactgctccttccctgcagaaggcaggaacccaactttcagggttggaggtaggctgggtgtggaaaactgtgccaccatgaggtcctggtcaattgtgagcaacttccagctcccacctgaccctccagctgtgagggaggtcacagtgcccacttgggtgtccacagcaaacaggtcctgccggctgcgctgagccgagtcaaagaccactctctggctgtcagctgaccagcatcccaaaggcagaaggctgcagtagatcccagagaagttctctcccagctgccgaggcacaacatctaccaccactgaggtaaccttggtataccagtcatacaggcacagctggctgcattggtgatgggggatcagagatgggtactgcaggtagacaatgcgacattggtctgggctcagccggggagaagagacagccagggagtcatccgagaggagctcacacttccccccgatgaggtccacgtaatacagggctgacctgcgattggtgcaaaagcggatgcccaaccggaagggctcatgccaccagcccacaaacaccacaccagcatctccaggggcccaaaatgcctgtccaggggacacattctcagggaccccctcaagcacagagatgttgccactctcgacatccagcacgcagagcacagggatgcttttggaaaccatgttttctccccagtcttcataaaacacaaactgatcccccttgatggcttggtctggcttcttcagcctggctatctcatcatcgctggcactgacgtccaaggctttggtctgaaagaaggactcggccttggggcgcttcttctctgccacatacaacaagtgtgtctccgagtgcgaccaggacaggcagccaaagcagtcatcctcataaacaggcccatgtttctccagcgctgacaggttgaagctcttgagcttccggttcttctccctcgtgccgaat

SEQ ID NO: 311782 - DNA, 1446 bp, Homo Sapiens
cattttgaatgactttattgagaacattttgcaaattagattttacaatttaacattttacaattagaaattttatctgctattacataagctgcaaacttttcaaaaacactacagaaaatcttttatttctttggatttttctgttccatgttgagctcctgagatatattttttctttcagcttcattttcatcttccttggaagatgaagaatcacattcctgacatatccatccgtagcctgtctgtttaggagactttttcaaaggaggatccaaacagccaaaatggtagcagagtctgcattcatcacacctgacaagattttcattgtctccagttcccttgcaagttgcacattcagttcttaaatcttcagccttgggtttctttttgcaacacagactggtctttgtcttctctctctaggaactctttcctcatgtttttcttcctcaggaacgaagcttcgttttcgtcctctggttctcgtgtttcttatcggaatcttcttgggttctggtggcacatcctgtggaacaaatttcactggttccttaatctgcctccttgatcgtttggttccatctggtagggtttccatggccatatctgcttccatgtcactgctccctgcctggtcacattccgagcactgccaataactgtttttggtctttcttggcatccttgtaagaggaggatccagacatccaagatggtaatgtagtttacaggtatcacacaataaaagaagatgctgatcatggttcttcttacaaatcccacaactataaagtactgcaggaagagtagatgtcttttgtgtgcctccttcttttttacttggttttctctccttgggtgctcgcaaaattgccggtatattcaacttctgccctgtgattctgcctagtaaagcccatattccttgtccttcacttcgaagttttccattcaggttttgtagttcttctaaagattcacatagcttattatattctacatgaagcttttcttgttcattctctaatttatcttttatattcttttgttcagccatattttcctgaatttgaatcatgcgcatatttctctcaaaataataattcacaaaatctgcagtgagagctggttgcttatgttttctccttccatccacactagaactagtatctgaattgtccactggaaagatatctgtactgatccccatgagttctgctttccgcataagtttacgaatagctgaagcactgctggtgagtggtctgggcaatttttcccttggaacccaggcctggggtctggtagatcgagctagttctgctttggcacgatactgctgaagccgggcattgatccttgcctgtgcttctggtgatagttgccggacgcgtggtcgacgatatcccgggaattccggaccggtaccgcctgctt

SEQ ID NO: 311783 - DNA, 1086 bp, Homo Sapiens
  misc_feature (10)..(10): n is a, c, g, or t
  misc_feature (15)..(15): n is a, c, g, or t
  misc_feature (36)..(36): n is a, c, g, or t
  misc_feature (45)..(45): n is a, c, g, or t
  misc_feature (47)..(47): n is a, c, g, or t
  misc_feature (51)..(51): n is a, c, g, or t
  misc_feature (54)..(54): n is a, c, g, or t
  misc_feature (57)..(193): n is a, c, g, or t
  misc_feature (961)..(961): n is a, c, g, or t
ccttctggtnaatantctctgctcaccccccagtantggataacngnatcnccncannnnnnnnnnnnnnnnnnnnnnnnnnnnnnnnnnnnnnnnnnnnnnnnnnnnnnnnnnnnnnnnnnnnnnnnnnnnnnnnnnnnnnnnnnnnnnnnnnnnnnnnnnnnnnnnnnnnnnnnnnnnnnnnnnnnnnnnngaatgcccttctaaaagacatgcggactaaacgtggatgagcgaaaagccctttgttcacttcaagttgtcaagccttttgggcagagggttgggaatggaaggggcagatgaaattctttcagaaagtgacaagtaatgtgttgccatcctcttcatatctgtagaaaaattcccaaatttaaagtatttcagtgaaatcaagtaacacttcgatctttataaaactgtcctcagctcacagcacctgcagcaacttcccctcaggctctctacatttcagagagttcagcgacgtcagccctttgcaggaaaaatgaggtaaggcagctttaaagaggtaaagcccacggtctctagccacgaagtggcgggtccataacacgctttccggccctttagagtacagatttcccactgattctttgcaaactcacttttcacatactacgggccgatggcaaccccaaaacacacgccgacggaaagcgccccaccacggggcggagcctcgcccactatcccttctaggctcccagccagcaaacgcatttcagagacgggattaagctgtctctggcgaaccagggagcagctgggtaggccgcggggggcgcctgtcatcgacgtcatttccttcagcaagagcgccgcaggaaaccacttccacaccactgctcccctctcccccggaagcccttgttgctagtagggggctgcatggcacgcgcccctttgcgtccagagaataccatagtgcgggggagcnccaaccagtgccaggacacttaccgagctgaagagttgacagggaagtgaaatctcagaaagaaagcctttctgggttggcctggttacggtcacgcttccttccacagaaacattcaattccca

SEQ ID NO: 311784 - DNA, 945 bp, Homo Sapiens
cagtgttagcttgctattccaaagtttttgtcctcatccaccataagccgtgtaaaagacaaatacatttttgctgtcatctttgtaagatttgtattccttgtaatcttttggagttttttcctgctttcttgatccactggattccctggagcccttggaatctccccgttctttacttctttcttttctacggcgatcaatgtcatgccgaaggtcagcagagtcacaccttaattttttatctcccttttgattttcttctttaaaaactctctcttcccctgctaaacgggtatgcttcctcagggtacttggtgagatgtcaattctcctgtgtatttcagggctcttttgccgagtactatgttcttcagtggctttctgatacgaagtgaaccgctcgtttagggtcattgcagctgacttgaagtattgctctttaacatgatgaaccaaggacacaatgtgttgaataaatgactctgaagtgcttttgctggcctgtggcaacttaatgtggtcaaagatggatcggaattcttgctccttcttgacagaatggacaagtgtactagcaagcagcctgtctttagtcaaggaagcaggtctgttagaatcatcaagaggaacaggtgccattttgagtttgacttcaggacggtgagaatcactcgctatcattttgatcctaagtgggctttcctctctgaaggtagacttttctcgtgcatccagattcttgtgtagagggggactgtaatcaaagaggtctttgagcttttcagactttacctgctcaggtgactgagtttctttctttactgttattctttcagaatttttgtcttcttctttgtgcttatcttttgtagtgctaggcctttccactacatatccagtctctttaagtttataatttttttcttctctaaatccatcact

SEQ ID NO: 311785 - DNA, 1253 bp, Homo Sapiens
  misc_feature (113)..(127): n is a, c, g, or t
  misc_feature (136)..(247): n is a, c, g, or t
gtggggaatcccaacccttttccttgcccggttttctcttgggaaccagtatttgccccgtttcccttccttttggggccccggccccaaagaaaggtttttaaaactttttnnnnnnnnnnnnnnnccgccaggnnnnnnnnnnnnnnnnnnnnnnnnnnnnnnnnnnnnnnnnnnnnnnnnnnnnnnnnnnnnnnnnnnnnnnnnnnnnnnnnnnnnnnnnnnnnnnnnnnnnnnnnnnnnnnnnttacttaaaaatagttgtatttatattccacaatttgttcaaatactggttttcttataaactttctacaggatgtttttaaacaaattcttcacattgtgttttgactatgtacttacggaatttcagggaaatagttctgtgtatttttaatagcttaatttgtactaaagggatggtaggtggtcacatgcagtccatgtgggattctaacatgacatttagtgagttttctgatgtggaccatccctttgatgctgaaggtaatgcatctgttgaaagaagtgactgtagatttggattactgctctctgcatcttccagtttttctgtgttatcttcccaattaatgtggaatcttgtgaccctgggattagatgccaaaatattcctttgaagcttagaaaagtctggttttactggtggattttcccttaattctgtctcagtatattcattatttacataatagccaactctaataaattcttgtcctcgataggtacaagtaattagcacaacagttacgcctactgcatctgcatctggaatgagtcctggattaggtgcatcagcctgaaatacaaacatatgccttcctgcgggaacaggacccactaaaacagagtctaaaacttgatcgtattcttcactttctgcagagcccacatagataattttccattccaagtcttcagacaggtcctcgatgcactcgaaggtgatctcgaactggaacgggttgtagaaaggagaagggttatccagcaccactacattgttcacctgaacctttgccatattttgaaaaaaacacaaacaatgggaactggggctggttgcggcacaataaagtccaagcgcgcggccgctcgggagagcgcagacccccgctccagcgccggccagacgtcgtgcagcggcgacttgagaaacttttttcctctttttatttacacgggagcactccacagtgttttgcagctttcctatttccccccggccg

SEQ ID NO: 311786 - DNA, 459 bp, Homo Sapiens
catctggaaatgaacccctggattgggtgccatccagccttgaaaattacaaaacatatgccctttcctgccggggaaacaggaccccacttaaaaacaggagtcttaaaaactttgatcgtattcttcactttcctgcagagccccacatagataattttcccattcccaagtcttcagacaggtcctcgatgcactcgaaggtgatctcgaactggaacgggttgtagaaaggagaagggttatccagcaccactacattgttcacctgaacctttgccatattttgaaaaaaacacaaacaatgggaactggggctggttgcggcacaataaagtccagcgcgcggccgctcgggagagcgcagacccccgctccagcgccggccagacgtcgtgcagcggcgacttgagaaacttttttcctctttttatttacacgggagcactccacagtgtt

SEQ ID NO: 311787 - DNA, 417 bp, Homo Sapiens
gaccttttcttaggcttccaagggaatattttgccatcttaatccccagggtcacaagattccacattaattgggaagataacacagaaaaactggaagatgccagagagcagtaatccaaatctacagtcacttctttcaacagatgcattccctttcagcatcaaagggatggtccacatcagaaaactcactaaatgtcatgttagaatcccacatggactgcatgtgaccacctaccatccctttagtacaaattaagctattaaaaatacacagaactatttccctgaaattccgtaagtacatagtcaaaacacatatgtgaagaatttgtttaaaaacatcctgtagaaagtttataagaaaaccagtatttgaacaaattgtggaatataaatacaactatttttaagt

SEQ ID NO: 311788 - DNA, 830 bp, Homo Sapiens
aaggctgtggtgccaaccgggcggcctaagttaagtctggattccgggaacttaaaaccttccctgttgctccagttattttcgcaaatagccccatgggatttattatcttccacatctcaaaagagctctttttccagtcatttgaggtaattaggaaagtccctgatgaaaagtgcagtcctctcaggtccactgctctgtaacagggctccaataactgcaaagaaagtctgctgtaacacagctgggggcactgggaattcttcactcagtgttaactgctccacagccaagtttctagccacgtgacacacgacttcctcaccagtgagaaagtcaacaagattttttatgccttcagtgggcatgtctgggtactcgtcttcaagaaactgtgtaaggcaagtctgtgaaaaagatgtcccttgttcggatagttcttgattacttttaagattcagaagaacagcttctttctctatcccaagttgttggcgtttggcctcctcacttttaatatagcagctattaacaaatgcagttttgagaagatctaaggaaaagttttcctgtaaccgatgtccaaaagcttgtatttctgcatggtaatcccagttcggcttctctgaacggcgcacgggcggcggcgggcaccgcagaaggcgctgccgctctaactccttctggaagcggaaggcggcgcggaatcccttcttcactccccgaaccggagggaccagcttgggggcgactggagccaggaggcagcgatgtccctgctgcagcaatcttaccagcccggacgccattgcacgagagaaaacgat

SEQ ID NO: 311789 - DNA, 921 bp, Homo Sapiens
ggttttcatatcatcatttattaactgccaatatgttccaaattattattttagaaatcaaagctgggcagtcatttatttccgtactttttaaaaagattagctctggtaatttcagatgctgtggattaagttttttcttccaaatgtgggaaggtgctcaagtccgcccccttccttctgtgctgttcacaccgaccacgtgtatggccttgtggggagctctgtgggggcacagagctaaggctgcacaaggagggaggtggaggctgcggagtgcgatgagggtgatgagaagggcactggccacccattgccctccaaggatccagccatggtgcttggtgagcacatggggcattgctccatcactccaagtgtggttgcaaacatcagcgcgatcccgattggggaggccaaccacatagtacccattggtattcacaatggctccaaccttctgatttccactccccttcagaacaccaccactcgtgcaagcaagagcttcaaagaggtgggaaacagcataaattggaaccacttgagccaccagattaatgatgtctcatgtacacaatgatggccagttcatacacgatggactgagcgcccagctccaccatgccgaggatgccactgaggaagctcccgacctcataggcccaccactccatgcacagcatgagcatgctggggatggccaggcggaggaaggaggccttcccgaggatgtagagaaagaggagtagagccagggtgtactgggaaatcaagtttgccagtgcagagcctatcaccccaagatgcagttgatggagaaacagatagttggcgagggcattgacaaggttggctgcaactccagttacgatctggggcagtacaattccctggttgagcaaatatttaacttgtaac

SEQ ID NO: 311790 - DNA, 276 bp, Homo Sapiens
aggcattgtattagttagggtcctgacagggaaaaaaataactgtaatgaaagataacctgcaaagatgtatacttcagagtgcaattgctaggttttgagcatgtttatctttaaatttactgagggacaaatttttccacagtgattgttttcaatgtaagagctgacatcatcaccaaaacttagtatcattagatcatttcatttttgcaaataaggtaaagatgtaatacctccttgtagttttattttttacttctcaaatattaatatg

SEQ ID NO: 311791 - DNA, 735 bp, Homo Sapiens
  misc_feature (644)..(644): n is a, c, g, or t
ggttcccccaggagaacaatgatggggcggagggagctggaaagaccatattaggaacaaaaggtggagctatgagcacagataaagactcaagtctggggacctcctggtcactcaggcagcagccccttctttcttgccccagtctccagttctccagtgttcacaggtgagcctaccaacagccactgctcatgatggaggccatcaagaaaaagatgcagatgctgaagttagacaaggagaatgctctggatcgggcagagcaagctgaagctgagcagaagcaggcagaagaaagaagtaaacagctggaggatgagctggcagccatgcagaagaagctgaaagggacagaggatgagctggacaagtattctgaagctttgaaggatgcccaggagaagctggaactggcagagaagaaggctgctgatgctgaggctgaggtggcctccttgaaccgtaggatccagctggttgaagaagagctggaccgtgctcaggagcgcctggccactgccctgcaaaagctggaagaagctgaaaaagctgctgatgagagtgagagaggtatgaaggttattgaaaaccgggccttaaaagatgaagaaaagatggaactccaggaaatcccaactcanagaagctaagcacattgcagaagaggcagataggaagtatgaagaggtggctcgtaagttggtgatcattgaaggagacttggaacgcaca

SEQ ID NO: 311792 - DNA, 632 bp, Homo Sapiens
  misc_feature (524)..(536): n is a, c, g, or t
ggggggactggttttttatttcaaaaagacccttgtcaattttcagtttcaaaacagttgcccttttgatttctttttttcccaatcggccccaaagagacccccttaaaggggagtcctttttaagccaataagctgcaggatgtccacctaacaaaccttctaaaaaccttaccaaaaaatggggactgggttgggaaggaaacttaaaagatcaacaaactgccagcccacggactgtaaaggctttcacaaccaaatggggtggcccgggtgccacaaacccaaagcaaagttttaaaataattttaaatttaaaaagttttttccataagcttttcaagattttttccagcacttacttgttcaaaacacaattgagatgggccttcttgagccggagttttaaaccccaaaaagggttatgggatgagttttacatggttaaacaagggcaaaaaccacgtccccgccctaatgggccgatttcccgggtcccaacaccaatggcccctttccgaggnnnnnnnnnnnnngcttggtccaaactctggagccttgtgggagaacatagggcataacgtgtttcccgtgggggaaaatgttgtcccgtccacatatgcttagagacg

SEQ ID NO: 311793 - DNA, 1836 bp, Homo Sapiens
  misc_feature (53)..(53): n is a, c, g, or t
  misc_feature (196)..(196): n is a, c, g, or t
  misc_feature (366)..(379): n is a, c, g, or t
  misc_feature (435)..(435): n is a, c, g, or t
cacccagtgggtggcagggggcccaaacccaaacaaaggttcaaaataatttnaattacaaatttggtactaagcttatcaaattcttccgcctgtccttatcaaagcccatttggggggctctttagagcgagcagtttcaacccaaaaaagggtaatgagtttagtttcacatggttaaatcaagggacaaaancccagtttcctttcttttttctttccaagaaggcaggaaagcaattaagtggtccctccaacataagggggacatattccattcctgtaagcagttgtgaggggggtaagagatggcccaaaattttggtctcagaggtcttccatttttaatttggtaacgtctaatgnnnnnnnnnnnnnntagaaatagcattatccaaagatatcttaaagctgaaaacttgaacagcacatttnttgtttttgttgttgtttggctaactcctcctggaatcacctttctggtttagctagtactttgtacagaacaatgaggtttcccacagcggagtctccctgggctctgtttggctctcggtaaggcaggcctacaccttttcctctcctctatggagaggggaatatgcattaaggtgaaaagtcaccttccaaaagtgagaaagggattcgattgctgcttcaggactgtggaattatttggaatgttttacaaatggttgctacaaaacaacaaaaaaggtaattacaaaatgtgtacatcacaacatgctttttaaagacattatgcattgtgctcacattcccttaaatgttgtttccaaaggtgctcagcctctagcccagctggattctccgggaagaggcagagacagtttggcgaaaaagacacagggaaggagggggtggtgaaaggagaaagcagccttccagttaaagatcagccctcagttaaaggtcagcttcccgcaggctggcctcaggcggagtctgggtcagagggaggagcagcagcagggtgggactggggcgttctacatctcattcaggtcaagcagggtctggtccagcatcctttgtgtacagaggtgctcctctttggtgcatttcagtttatcttccaggtcatcaattgtcttttccagcttggctaccgatctctcagcaaactcagcacgggtctctgcctccttgagtttatcagtaagaatcttgatttcttcctcatatttatcttctttttgagagtacttttcttcagcagcactcagacacttcaggttctggtccatcagtctaatctgctcatccatctctcggcaacgggactctgccagctcagctcgttcctctgtgcgttccaagtctccttcaatgatcaccaacttacgagccacctcttcatacttcctatctgcctcttctgcaatgtgcttagcttctttgagttggatttcctggagttccatcttttcttcatcttttaaggcccggttttcaataaccttcatacctctctcactctcatcagcagctttttcagcttcttccagcttttgcagggcagtggccaggcgctcctgagcacggtccagctcttcttcaaccagctggatcctacggttcaaggaggccacctcagcctcagcctgttcccgggcccgcctttctccctcaacttctcgctggaggcgctcagctcgctcctctgcatcatctgcctgctgctgcagaacctggatcttgcgcttcaccgcctcgatggtggtgatcccagccatggtgcccacccagctactgctcgcgctccggttcctgcctcctccgctcggcgttgcagcctccatcccgggaattccg

SEQ ID NO: 311794 - DNA, 1729 bp, Homo Sapiens
  misc_feature (7)..(7): n is a, c, g, or t
  misc_feature (15)..(15): n is a, c, g, or t
  misc_feature (87)..(88): n is a, c, g, or t
  misc_feature (115)..(115): n is a, c, g, or t
  misc_feature (369)..(391): n is a, c, g, or t
  misc_feature (444)..(457): n is a, c, g, or t
  misc_feature (1086)..(1183): n is a, c, g, or t
tcccganaatcagcnggctagagctgagcaccttgaaacacatttaaggaatgtgagcacatgcatatgtcttaaaaagcatgttgnntgtacacatttgtattacctttttgtnttttgtagcaaccatttgtaaatacattccaaataattccacagtcctgaagcagcaatcgaatccctttctcacttttggaaggtgacttttcaccttaatgcatattcccctctccatagaggagaggaaaaggtgtaggcctgccttaccgagagccaaacagagcccagggagactccgctgtgggaaacctcattgttctgtacaaagtactagctaaaccagaaaggtgattccaggaggagttagcnnnnnnnnnnnnnnnnnnnnnnntgtgctgttcaagttttcagctttaagatatctttggataatgttatttctannnnnnnnnnnnnncattagaagttaccaaattaagatggtaagacctctgagaccaaaattttgtcccatctctaccccctcacaactgcttacagaatggatcatgtcccccttatgttgaggtgaccacttaattgctttcctgcctccttgaaagaaagaaagaaagaagactgtgtttttgccactgatttagccatgtgaaactcatctcattacccttttctgggtttgaagctgctgtctctagaagtgccatctcaattgtgctttgtatcagtcagtgctggagaaatcttgaatagcttatgtacaaaactttttaaattttatattattttgaaactttgctttgggtttgtggcaccctggccaccccatctggctgtgacagcctctgcagtccgtgggctggcagtttgttgatcttttaagtttccttccctacccagtccccattttctggtaaggtttctaggaggtctgttaggtgtacatcctgcagcttattggcttaaaatgtactctccttttatgtggtctctttggggccgattgggagaaagagaaatcaatagtgcaactgttttgatactgaatattgacaagtgtctttttgaaataaagaaccagtccctccnnnnnnnnnnnnnnnnnnnnnnnnnnnnnnnnnnnnnnnnnnnnnnnnnnnnnnnnnnnnnnnnnnnnnnnnnnnnnnnnnnnnnnnnnnnnnnnnnngaacccacggatctagtggtacacgacgaaggcccacacaggagcacaagacatacacaaaaccacagggacagcagaaagcacaaaacagaagagacgggagaaacaggagaagaacagagccactaccagtgaacgaagggcagagcacacaagccgcacggaacatgcgacagaagaagagacagaaacgacagcggtcgatagagagccgtacgccggcacccgcgcggcgatcactcagagcaaacggcaagcggacgcaagacggaagacaaccgaaagacaggcagaacgagaaggagcgcggaacgaggacaggggagggggacgagagcagcggagaccgcctaacgagcgaaatcagaagtagacacggggaactagagataaaacccagggccgaaagagacagacagagcaagaccagaccgcgcgcaaaagaaacgaaaagggaggaagagaacgaacaaccagaccgcacaggcccggctgcgacacgcaaggtaggggggcgcgagcgcggggacccccacgccacccacc

SEQ ID NO: 311795 - DNA, 1170 bp, Homo Sapiens
  misc_feature (12)..(12): n is a, c, g, or t
  misc_feature (16)..(17): n is a, c, g, or t
  misc_feature (31)..(32): n is a, c, g, or t
  misc_feature (36)..(36): n is a, c, g, or t
  misc_feature (45)..(46): n is a, c, g, or t
  misc_feature (58)..(67): n is a, c, g, or t
  misc_feature (76)..(76): n is a, c, g, or t
  misc_feature (101)..(101): n is a, c, g, or t
  misc_feature (105)..(105): n is a, c, g, or t
  misc_feature (139)..(139): n is a, c, g, or t
  misc_feature (484)..(506): n is a, c, g, or t
  misc_feature (559)..(572): n is a, c, g, or t
  misc_feature (1113)..(1113): n is a, c, g, or t
  misc_feature (1140)..(1140): n is a, c, g, or t
gccagccgcggnagtnncttaactgagggtnntttnactggaagnncttctctttcannnnnnnnnntcccttttnttttcgccaaacttttctgcctctncccngagaatccagctgggctagaggctgagcaccttngaaacaacatttaaggggaatgtgagcacaatgcataatgtctttaaaaagcatgttgtgatgtacacattttgtaattaccttttttgttgttttgtagcaaccatttgtaaaacattccaaataattccacagtcctgaagcagcaatcgaatccctttctcacttttggaaggtgacttttcaccttaatgcatattcccctctccatagaggagaggaaaaggtgtaggcctgccttaccgagagccaaacagagcccagggagactccgctgtgggaaacctcattgttctgtacaaagtactagctaaaccagaaaggtgattccaggaggagttatcnnnnnnnnnnnnnnnnnnnnnnntgtgctgttcaagttttcagctttaagatatctttggataatgttatttctannnnnnnnnnnnnncattagaagttaccaaattaagatggtaagacctctgagaccaaaattttgtcccatctctaccccctcacaactgcttacagaatggatcatgtcccccttatgttgaggtgaccacttaattgctttcctgcctccttgaaagaaagaaagaaagaagactgtgtttttgccactgatttagccatgtgaaactcatctcattacccttttctgggtttgaagctgctgtctctagaagtgccatctcaattgtgctttgtatcagtcagtgctggagaaatcttgaatagcttatgtacaaaactttttaaattttatattattttgaaactttgctttgggtttgtggcaccctggccaccccatctggctgtgacagcctctgcagtccgtgggctggcagtttgttgatcttttaagtttccttccctacccagtccccattttttggtaaggtttctaggaggtctgttaggtgtacatcctgcagcttattggcttaaaatgtactctccttttatgtggtctctttggggcngattgggagaaagagaaatcaatagancaactgtttgataggaatatgacaagtgtc

SEQ ID NO: 311796 - DNA, 1215 bp, Homo Sapiens
cagcgatgatgatttctcccccgcggacaaaaatgggacgcaggggcgcagttttgcgtgcaagaaaattagaacccacagcggggaaaaaaaacgcgggggatagtgtgaacaaaaggaacaaaaagaggcggcgcgtttccaagttttgaaaggagtgcaagccccgtctcaagtttataaagggttcccgaggtttgctccccacaagggctggggcccttccacgtcaccgaaagttttagttgttccggagggcaaaaggaaccacgccacagccacgggcgctgggggatcttgggcggcgcattttctaccattctcccaatttcaagggttcaaaagccaagggggtgtgtgggttccacaaagcaatcccctgtgggtgggacccaaggagggtggcttcctttcttgtggggggccattttcaaggggttttcttcaccaggtgcatcaaagtgttcttttttccaggctttggctaccggttctctcaaggcaaacctcaggccgggggtctctgccttcccttgagtttatcagttaaggaatcttgatttttttcgtcatatttatcttctttttgagagtacttttcttcagcagcactcagacacttcaggttctggtccatcagtctaatctgctcatccatctctcggcaacgggactctgccagctcagctcgttcctctgtgcgttccaagtctccttcaatgatcaccaacttacgagccacctcttcatacttcctatctgcctcttctgcaatgtgcttagcttctttgagttggatttcctggagttccatcttttcttcatcttttaaggcccggttttcaataaccttcatacctctctcactctcatcagcagctttttcagcttcttccagcttttgcagggcagtggccaggcgctcctgagcacggtccagctcttcttcaaccagctggatcctacggttcaaggaggccacctcagcctcagcctgttcccgggcccgcctttctccctcaacttctcgctggaggcgctcagctcgctcctctgcatcatctgcctgctgctgcagaacctggatcttgcgcttcaccgcctcgatggtggtgatcccagccatggtgcccacccagctactgctcgcgctccggttcctgcctcctccgctcggcgttgcagcctcctctcaccctccagtaggccaacaag

SEQ ID NO: 311797 - DNA, 784 bp, Homo Sapiens
  misc_feature (147)..(147): n is a, c, g, or t
  misc_feature (209)..(222): n is a, c, g, or t
  misc_feature (476)..(476): n is a, c, g, or t
agaggagaggaaaaggtgtaggcctgccttaccgagagccaaacagagcccagggagactcagctgtgggaaacctcattgttctgtacaaagtactagctaaaccagaaaggtgattccaggaggagttagccaaacaacaacaanaacaaaaaatgtgctgttcaagttttcagctttaagatatctttggataatgttatttctannnnnnnnnnnnnncattagaagttaccaaattaagatggtaagacctctgagaccaaaattttgtcccatctctaccccctcacaactgcttacagaatggatcatgtcccccttatgttgaggtgaccacttaattgctttcctgcctccttgaaagaaagaaagaaagaagactgtgtttttgccactgatttagccatgtgaaactccatctgcattacccttttctgggtttggaagctgctgtctctaggaagtgccatctncaattgtggctttgttatcagtcagtgctggagaaatcttgaatagcttatgtacaaaactttttaaattttatattattttgaaactttgctttgggtttgtggcaccctggccaccccatctggctgtgacagcctctgcagtccgtggggctggcagtttgttgatcttttaagtttccttcctacccagtccccattttctggaaaggtttctaggaggtctggtaggggtacatccctgcagctttattggcttaaaatgcactctcccttttatggggggccccttggggggccgattgggg

SEQ ID NO: 311798 - DNA, 960 bp, Homo Sapiens
ctctctcaagcatcgactcactatatctctagacacgtccacgaaccaggtctccctgaagttgaactctgtgaccgtcgctgacacggccgtttatttctgtgcgatggcggaggtactgtggctcggggacaatctatcctccgtcggcgagttcgacccctggggccagggatccctggtcaccgtctcctcagcatccccgaccagccccaaggtcttcccgctgagcctctgcagcacccagccagatgggaacgtggtcatcgcctgcctggtccagggcttcttcccccaggagccactcagtgtgacctggagcgagcggacagggcgtgaccgccagcttcccacccagccaggatgcctccggggacctgtacaccacgagcagccagctgaccctgccggccacacagtgtgtagccggcaagtccgtgacatgccacgtgaagcactacacgaatcccagccaggatgtgactgtgccctgcccagttccctcaactccacctaccccatctccctcaactccacctaccccatctccctcatgctgccacccccgactgtcactgcaccgaccggccctcgaggacctgctcttaggttcagaagcgaacctcacgtgcacactgaccggcctgagagatgcctcaggtgtcaccttcacctggacgccctcaagtgggaagagcgctgttcaaggaccacctgagcgtgacctctgtggctgctacagcgtgtccagtgtcctgccgggctgtgccgagccatggaaccatgggaagaccttcacttgcactgctgcctaccccgagtccaagacctcgctaaccgccaccctctcggagctggccctgaacgagctggtgacgctgacgtgcctggcacgcggcttcagccccaaggacgtgcctgttcgctggctgcaggggcacaggagctgcccccgcaggc

SEQ ID NO: 311799 - DNA, 1091 bp, Homo Sapiens
  misc_feature (429)..(429): n is a, c, g, or t
agaagccgaccagacaggcaggctgacctggcttggtcatctcctcgtagatggctcgatggggtctgggagggctttgttggagaccttgcacttgtactccttgccgttcagccagtcctggtgcaggacggtgaggacgctgaccacacggaacgtgctgttgtactgctcctcccgcggctttgtcttggcattatgcacctccacgccgtccacgtaccacttgaactggacctcggggtcttcgtggctcacgtccaccaccacgcacgtgacctcaggggtccgggaaatcataagggtatccttgggttttggggggaagaggaagactgacggtcctcacaggagttcaggtgctgggcaccttgggcacgggggaggtgtgtcacaagatttgggctctgggcaccgtgggcatggggnaggtgtgtcacaagatatgggctctgggcaccgtgggcacgggggaggtgtgtcacaagagagctcaactctcttgtccaccttggtgttgctgggcttgtgattcacgttgcaggtgtaggtctgggtgcccaagctgctggagggcacggtcaccacgctgctgagggagtagagtcctgaggactgtaggacagccgggaaggtgtgcacgccgctggtcagggcgcctgagttccacgacaccgtcaccggttcggggaagtagtccttgaccaggcagcccagggccgctgtgctctcggaggtgctcctggagcagggcgccagggggaagaccgatgggcccttggtggaggctgaggagacggtgaccagggttccctggccccaatagccccaataattactactatcagtccctctcgcccccgcacagtagtagagggccgtgtcctcagacaggcgtcgcagttccatgaagactgtgctcgttgattcgtccgcggtaatcgtgagtctcccctgaaacctctgtgcgtagtcgagaccagagttaacgatgatgcctcccatccactcaagtccttgtccgggggcctgtcgcacccagctgatagcataggtgctgaaggtgactccagaggccctgcaggagacct

SEQ ID NO: 311800 - DNA, 424 bp, Homo Sapiens
cgggctgcaggaattcggcacgagccctacagaagcccccagagcacagcacctcaccatggactgcacctggaggatcctcctcttggtggcagcagctacaggcacccacgccgaggtccaactggtacagtctggggctgaggtgaagaagcctgtggctacagtgaaaatctcctgcaaggtttctggatacaccttcaccgactactacatgcactgggtgcaacgggcccctgggggcttgagtggatgggacttgttgatcctgaagatggtgcagacacagcctacatggagctgaccagcctgagatctgaggacacgggcgtttattactgtgcaacagttgatagcagtgtcggggtattggactattggggccagggaaccctggtcaccgtcttctcaaccttcaccgggc

SEQ ID NO: 311801 - DNA, 1447 bp, Homo Sapiens
tcctcgcgcgaccccgagagcccggggagcaggggcttgccggccctggcactcatttacccggagacagggagaggctcttctgcgtgtagtggttgtgcagagcctcatgcatcacggagcatgagaagacgttcccctgctgccacctgctcttgtccacggtgagcttgctgtagaggaagaaggagccgtcggagtccagcacgggaggcgtggtcttgtagttgttctccggctgcccattgctctcccactccacggcgatgtcgctgggatagaagcctttgaccaggcaggtcaggctgacctggttcttggtcagctcatcccgggatgggggctcgatgggggctgggagggctttgttggagaccttgcacttgtactccttgccattcagccagtcctggtgcaggacggtgaggacgctgaccacacggtacgtgctgttgtactgctcctcccgcggctttgtcttggcattatgcacctccacgccgtccacgtaccagttgaacttgacctcagggtcttcgtggctcacgtccaccaccacgcatgtgacctcaggggtccgggagatcatgagggtgtcctttttggggggaagaggaagactgacggtccccccaggagttcaggtgctgggcacggtgggcatgtgtgagttttgtcacaagatttgggctcaactctcttgtccaccttggtgttgctgggcttgtgattcacgttgcagatgtaggtctgggtgcccaagctgctggagggcacggtcaccacgctgctgagggagtagagtcctgaggactgtaggacagccgggaaggtgtgcacgccgctggtcagggcgcctgagttccacgacaccgtcaccggttcggggaagtagtccttgaccaggcagcccagggccgctgtgcccccagaggtgctcttggaggagggtgccagggggaagaccgatgggcccttggtggaggctgaagagacggtgacctttgtcccttggccccacatatcaaaaccaaagtgcgaggcactgccgccatctctcgtacagaaatatagggccgtgtcctcagatcgcagaccactcaggtccatgtagaagatccgttgagtcgtccgcggtaatcgagagtctggctcggaacttctctgcgtaggtagtatgaaatgttggggtcattcttcccagccactcaaggccttgtccaggggcctgtcgcacccagctgaaagcataggtgccgaaggtgcctccagagggcttgcaggagaccttcaccgaggacccaggcctcttcacctcagccccagattgcagcagctgctcctgggactggacacctgtagctgctgccaccacaaagaggaacctccaggtccagtccatggtgatgagctgtgctcccaggggcttcttgagaggaggaatctg

SEQ ID NO: 311802 - DNA, 1180 bp, Homo Sapiens
ctcgcaggggcccagggcagcgctgggtgctttatttccatgctgggcgcccgggaagtatgtacacggggtacgtgccaagcatcctcgcgcgaccccgagagcctggggagcgggggcttgcggcccgtggcactcatttacccggagacagggagaggctcttctgcgtgtagtggttgtgcagagcctcatgcatcacggagcatgagaagacgttcccctgctgccacctgctcttgtccacggtgagcttgctgtagaggaagaaggagccgtcggagtccagcacgggaggcgtggtcttgtagttgttctccggctgcccattgctctcccactccacggcgatgtcgctgggatagaagcctttgaccaggcaggtcaggctgacctggttcttggtcagctcatcccgggatgggggcagggtgtacacctgtggttctcggggctgccctttggttttggagatggttttctcgatgggggctgggagggctttgttggagaccttgcacttgtactccttgccattcagccagtcctggtgcaggacggtgaggacgctgaccacacggtacgtgctgttgtactgctcctcccgcggctttgtcttggcattatgcacctccacgccgtccacgtaccagttgaacttgacctcggggtcttcgtggctcacgtccaccggggggaagaggaagactgacggtcctcccaggagttcaggtgctgggcaccttgggcacgggggaggtgtgtcacaagatttgggctctgggcaccttgggcacgggggaggtgtgtcacaagatttgggctctgggcaccgtgggcatgggggaggtgtgtcacaagatttgggctctgggcaccgtgggcacgggggaggtgtgtcacaagatttgggctctgggcaccgtgggcatgtgtgagttgtgtcaccaagtggggttttgagctcaactctcttgtccaccttggtgttgctgggcttgtgattcacgttgcaggtgtaggtctgggtgcccaagctgctggagggcacggtcaccacgctgctgagggagtagagtcctgaggactgtaggacagccgggaaggtgtgcacgccgctggtcagggcgcctgagttccatgacaccgtcaccggttcggggaagtagtccttgaccag

SEQ ID NO: 311803 - DNA, 607 bp, Homo Sapiens
ctggcggtcacgccctgtccgctttcgctccaggtcacactgagtggctcctgggggaagaagccctggaccaggcaggcgatgaccacgttcccatctggctgggtgctgcagaggctcagcgggaagaccttggggctggtcggggatgctgaggagacggtgaccagggttccctggccccagaggtcaaagcaccagtcccgaggcgatcgttttctcgcacagtagtatacggccgtgtccgcggcggtcacagaactcagcgtcagagaaaactggttcttggacttgtcaagtgagatgatgagtcgactcttgagggacgggttatagtcggtggtcccactatgatagatttccccaatccactccagccccttgcctgggggctggcggacccaagtccaccagttagtactggtgatggagccgccagagacagcgcaggtgagggacagggtccccgaaggcttcaccagtcctgggcccgactcctgcagctgcacctgagacaggacccatctgggggctgccaccaggaggaggaagaaccacaggtgtttcatgttcttgtgcaggaggtccatgagtctcagaaagtatt

SEQ ID NO: 311804 - DNA, 836 bp, Homo Sapiens
  misc_feature (131)..(133): n is a, c, g, or t
  misc_feature (135)..(135): n is a, c, g, or t
acccaatggtcccacttttacccttactgggggcccccgggccgcccaaaaaggaaatggttctaagaaaagctttcttcgaggggccggagggcggcccgaccatgtttggtggggttgttgtgtgtggnnngnggtttgaccagtacgcaccttccatggaaatgtttgtatccaactttattgagtgtggccttttcccactctgtgaatttggcttatattacgactcttgaaatggaatatttatcttaaaattagagtatgtacttgtttctcctgttctttttttctcaaatatataacccattttgtaaacagccttaaacctaataacccctgtcatctcctcagcccggcacagctgccttctgcctcagggtttctgacactctcaggatgtgggttttcacactgtgtctctcgcacagtaatacacggccgtgtcctcagatctcaggctgctcagcttcatgtaggctgtgctcgtggattcgtccgtcgtaatcgtgactctgccctggaacttctgtgtgtagtttgctgtaccaaagatagggatgatccctcccatccactcaagcccttgtccaggggcctgtcgcacccagctgatagcatagctgctgaaggtgcctccagaagccttgcaggagaccttcactgaggacccaggcttcttcacctcagccccagactgcaccagctggacctgggactggacacctgtagctgctgccaccacaaagaggaacctccaggtccagtccatggtgatgagctgtgctcccaggggcttctttagaggaggaatctggttgttatgtgatgctccc

SEQ ID NO: 311805 - DNA, 492 bp, Homo Sapiens
gggggagcatggagtttattcaggggtggggacaggcgggcggctcagtagcaggtgccgtccacctccgccatgacaacagacacattgacatgggtgggtttaccgccaagcgtgcgatggtcttctgtgtgaaggccagcggaggggctctgtggcacccatgcaggagaaggtgtcccccttcttccagtcctcggctgccacgcgcagtatgctggtcacacgcaaggtggtggtgccctggctgggctcctgccgggatgcccaagtcaggtacttctcgcggggcagctcctgtgacccctgcagccagcgaaccagcacgtccttggggctgaagcacgtgccaggcagtcagcgtcaccagctcgttcagggccagctcctccgacggcggcgcacgaggtggacctcgggccggaatgtgttttctgattttgagagggtggggttacggggtcttggctcggggtaggcacagtcaaatga

SEQ ID NO: 311806 - DNA, 2150 bp, Homo Sapiens
  misc_feature (929)..(986): n is a, c, g, or t
  misc_feature (1005)..(1022): n is a, c, g, or t
attttattctttgtgccataccagagtacagtatcagctgagctgaccttactctgaggactaactcttttgctggaagcggtttctgatttacagctcttggtttctcccagacatgttggtgggagagattttggtttttaaggggttgttagatggagtaaattttcctttttgtggtttgttcttttaactaaaaaggggtcacagaatttcagcagttctctgatttttatattttattcctcttcctatccaatccctgccttttgagtccaggtggtaagtacattttctttaacgtttttcctgcttttcttcccaaatgtgtctttttctttgggctactgtaccctgcttccagtgctgtccccggcataggtccatctctgcagaagccatttcaggagtacctggaggctcaacggcagaagcttcaccacaaaagcgaaatgggcacaccacagggagaaaactggttgtcctggatgtttgaaaagttggtcgttgtcatggtgtgttacttcatcctatctatcattaactccatggcacaaagttatgccaaacgaatccagcagcggttgaactcagaggagcttaattagtagagaaaggtttaaactgcagaaattggaatggatgggttctgccttaaattgggaggactccaagccgggaaggaaaattcccttttccaacctgtatcaatttttacaacttttttcctgaaagcagtttagtccatactttgcactgacatactttttccttctgtgctaaggtaaggtatccaccctcgatgcaatccaccttgtgttttcttagggtggaatgtgatgttcagcagcaaacttgcaacagactggccttctgtttgttactttcaaaaggcccacatgatacaattagagaattcccaccgcacnnnnnnnnnnnnnnnnnnnnnnnnnnnnnnnnnnnnnnnnnnnnnnnnnnnnnnnnnngcacgagctagtctcgagnnnnnnnnnnnnnnnnnnggaagacaaggttttcaactttattgtattgaaaaatacttgtcacttggttcagatggcaaatctaaaatgagcccacaatgattatgtaataaatgcagaacgtaccacaacaaatcgagactaacacagaaacagaagatgtgactttgtgaatacaacgccgctcagcgcttcactgctgatgtaggagtcgactccctcaaccattgtcctaggtttctataactcatcgcacagcatttgtattaaaaacaaatcattggtcaatgctttccaacagaacactgagtgatcctgcaacccaaagcagatttattgccctattaaaatacataatgagtataaaaatgttcctaagaaaatgtaacatttgacctgaagtctaagccctctctttccttccccaccacagtcacccctgtgggagggaaagagaaaggtaaaatttgtatgttgagagggaaagtatttacatctatgggtttatgatgtgtagtgagggcaacttctttcagcaaaataaaacaaaatagtgggcaccgactcttctgaggatgccactgtcagttgagaattctgtgtgtgtgctcatcacaggtagggccaagtatctgaactgcctccatgaagggagctgagggcagggatcatctctagtgcagaaaagaaaccagtgggaagatgaagagtgagcagagacaaactcagagaggcgtggagtacattcaccccagtaccctgacatttgaggatgactcctgtgactttggtaggggcgcgtggggagaggaggggcagtcatgagtagcagattccaagaaactgatgtggagagggatgtgtaactttgatttttctcttaaattctattgataattgaggccaagcaattgtattttgtgtctactgtggactggccagaggggtaggggctgggtcagctgctccccagccttgactttctgcttaagggcatgaggccattacactctcctctcagctttgcaaaaggaactgtgtctccatgccctgccccctgccttgaagcaattcagaaacttgggaaaacctagagcatttccaaattcaagttagcttgtctctttgagtttttacactctactt

SEQ ID NO: 311807 - DNA, 374 bp, Homo Sapiens
  misc_feature (185)..(199): n is a, c, g, or t
ctgcacgagattttattctttgtgccataccagagtacagtatcagctgagctgaccttactctgaggactaactcttttgctggaagcggtttctgatttacagctcttggtttctcccagacatgttggtgggagagattttggtttttaaggggttgttagatggagtaaattttcctatgnnnnnnnnnnnnnnnaaactacctatccaatccctgccttttgagtccaggtggtaagtacattttctttaacgtttttcctgcttttcttccctgtgtctttttctttgggctactgtaccctgcttccagtgctgtccccggcataagtccatctctgcaggccatttcaggagtacctggggctccg

SEQ ID NO: 311808 - DNA, 650 bp, Homo Sapiens
  misc_feature (174)..(191): n is a, c, g, or t
attttattctttgtgccataccagagtacagtatcagctgagctgaccttactctgaggactaactcttttgctggaagcggtttctgatttacagctcttggtttctcccagacatgttggtgggagagattttggtttttaaggggttgttagatggagtaaattttctttnnnnnnnnnnnnnnnnnnaactaaaaaggggtcacagaatttcagcagttctctgatttttatattttattcctcttcctatccaatccctgccttttgagtccaggtggtaagtacattttctttaacgtttttcctgcttttcttcccaaatgtgtctttttctttgggctactgtaccctgcttccagtgctgtccccggcataggtccatctctgcagaagccattttaggagtacctggaggcttaacggcagaagcttcaccacaaaagcgaaatgggcacaccacagggaggaaacttggttgtcctggatgtttgaaaagttggtcgttgtcaatggggtgttactttatcctatctttcattaacttcatggcacgtatgcccagcgaatgcagcaagcggttgagcttagaggagctgccttaaattgggagacttcaagccgggaggttcctttttcccttatttt

SEQ ID NO: 311809 - DNA, 721 bp, Homo Sapiens
  misc_feature (261)..(281): n is a, c, g, or t
acaagcataagtcatttccttattaattggttcaaaccagttcttacaggaactagtggtgataaatgtgggacttctgagaagtcattcattttattctttgtgccataccagagtacagtatcagctgagctgaccttactctgaggactaactcttttgctggaagcggtttctgatttacagctcttggtttctcccagacatgttggtgggagagattttggtttttaaggggttgttagatggagtaaattttcnnnnnnnnnnnnnnnnnnnnnaactaaaaaggggtcacagaatttcagcagttctctgatttttatattttattcctcttcctatccaatccctgccttttgagtccaggtggtaagtacattttctttaacgtttttcctgcttttcttcccaaatgtgtctttttctttgggctactgtaccctgcttccagtgctgtccccggcataggtccatctctgcagaagccatttcaggagtacctggaggctcaacggcagaagcttcaccacaaaagcgaaatgggcacaccacagggagaaaactggttgtccttgatgtttgaaaaagttggccgtggcatgggggggtactttatcctatctatcattaaactccatgggacaaaagttttgcccaacgaattcagcaacgggtggactcagaggagactaattaagtgagaaaggtttctggcttt

SEQ ID NO: 311810 - DNA, 2566 bp, Homo Sapiens
  misc_feature (149)..(158): n is a, c, g, or t
  misc_feature (175)..(267): n is a, c, g, or t
  misc_feature (343)..(351): n is a, c, g, or t
  misc_feature (377)..(390): n is a, c, g, or t
  misc_feature (399)..(543): n is a, c, g, or t
  misc_feature (1556)..(1556): n is a, c, g, or t
tgggggaaaaattatttttccccaacgcgccccaagggttttttatatcccgggggggttttaagggtttattaaacccgttgtgggggggttccccaccgggcgggaaaacttttaaagattccccccagttctccaaaaaaagccannnnnnnnnnaattttaaataagaccnnnnnnnnnnnnnnnnnnnnnnnnnnnnnnnnnnnnnnnnnnnnnnnnnnnnnnnnnnnnnnnnnnnnnnnnnnnnnnnnnnnnnnnnnnnnntggggaaaccaacccccagcttttacccgggtttttttgggaccacgatagccccttttccctttcctccgggggnnnnnnnnnaaacaaaagttttaaaaaattttttnnnnnnnnnnnnnnccgccaaannnnnnnnnnnnnnnnnnnnnnnnnnnnnnnnnnnnnnnnnnnnnnnnnnnnnnnnnnnnnnnnnnnnnnnnnnnnnnnnnnnnnnnnnnnnnnnnnnnnnnnnnnnnnnnnnnnnnnnnnnnnnnnnnnnnnnnnnnnnnnnnnggaatgattaaagatgtctttataaagtttttttcaagacttcattctaaatacacagaataaaaaatggtgtcagctcacttgtaagacaccaaccagattttccttatactgtctcaaaatttaaagatcaatttccccagagggtgtgcaatgcatcataaaatggcccttttttgaggatgggagaggaagggttgggcaggatggaatattaaattgtaacatgataaacatgcaagactgttatccaatctagataatttatatacattttgatgacttaggaaaacaaagcaatcatttgtgacaagcctaaaaagcttgacatatttaacatacttaggaactttttttgtgcggtgggaattctctaattgtatcatgtgggccttttgaaagtaacaaacagaaggccagtctgttgcaagtttgctgctgaacatcacattccaccctaagaaaacacaaggtggattgcatcgagggtggataccttaccttagcacagaaggaaaaagtatgtcagtgcaaagtatggactaaactgctttcaggaaaaaagttgtaaaaattgatacaggttggaaaagggaattttccttcccggcttggagtcctcccaatttaaggcagaacccatccactccaatttctgcagtttaaaactttctctacttatttagttttctcctctgagttcaaccgctgctggattcgtttggcataactttgtgccatggagttaatgatagataggatgaagtaacacaccatgacaacgaccaacttttcaaacatccaggacaaccagttttctccctgtggtgtgcccatttcgcttttgtggtgaagcttctgccgttgagcctccaggtactcctgaaatggcttctgcagagatggacctatgccggggacagcaccaatgaaagccaccatttgctccactatgtgcttgctgaatgttattataacaaaaattttctggatatgcatttttattattgctnttccaattagggttgcaccaaagaaggtccaaaaaggtaccagaaagtgtccacacgttattccagccagatcaaataaaggatttggaattgaagcacaggccaaaattccaaaaaatccaactttctgtactagtttttgaactgccagtttggcccgggaggcaaagtcttgtgcagactctgcatgttccagcatctcttcaaattcctgatactcttcatcatctggttcagcacctgagaggcgagctgctctggccatgaaatatggaggcagctctccgattgctgtaccgataccccacatgcaggcttcaatcctaacttttgagatgatactccacaaagaaatggttccttcagtgccctcttcatctggacaaataatctgatcaggatagggtggttcgggaaaattaactgaattgcattcataagcagctaatgtaactgaggctatatgtggacccagataaagcagaaaggtgtgcagccctgttccaagcccaacagaagacaaaattcctaagcctatccagtaggcatacaaaagaaactgtttctctatacgttgcacatactgttgatgcactccttcaacataatacgtagctataagcacagcaagcagcagtaaaaaagacaccacaatgctttgacgatgccataattttgaggtccattccttcaagattacaaggatttccagagaaaaatactgcaaggtaatgagcggctgtctccacaggacaatattctgcctttcttcccgctccctcctcttcttttcattcactgaagaggggtctgtgaaatttccattatgatgttccttgttcattgctacacgtctctggtcacaattttttccattctctgccatttcatagatcagtaactcttgaggagccgctccgaccccggctgctccggatctcaggatcctggaagctgctccttacggactctcacacccgccgctgggctccagacaaccggaacccccc

SEQ ID NO: 311811 - DNA, 497 bp, Homo Sapiens
  misc_feature (409)..(432): n is a, c, g, or t
gactcctacatcagcagtgaagcgctgagcggcgttgtattcacaaagtcacatcttctgtttctgtgttagtctcgatttgttgtggtacgttctgcatttattacataatcattgtgggctcattttagatttgccatctgaacccaagtgacaagtatttttcaatacaataaagttgaaaaccttgtcttccacttgctttggtagttgtcttcatatctccctgtgcttattgccctgtctgaatcagcccatctgtcactcacttagacctatcccttccccactttttctactttcactacacttttgaccttagctattgtttgagtgtgactcagtttccctgttcaagttagcttgatggtttattatgtaaggagggtgcctaagacaatcatcaggnnnnnnnnnnnnnnnnnnnnnnnngatcagtagagtagaaaatcttccaagagcagagggagttcttccttagcaatgaaaaaaagaca

SEQ ID NO: 311812 - DNA, 715 bp, Homo Sapiens
  misc_feature (12)..(12): n is a, c, g, or t
  misc_feature (36)..(36): n is a, c, g, or t
  misc_feature (89)..(89): n is a, c, g, or t
  misc_feature (119)..(119): n is a, c, g, or t
  misc_feature (136)..(136): n is a, c, g, or t
  misc_feature (147)..(147): n is a, c, g, or t
  misc_feature (190)..(190): n is a, c, g, or t
  misc_feature (601)..(601): n is a, c, g, or t
  misc_feature (691)..(691): n is a, c, g, or t
tacaaacgcccntcagcgttcactgctgatgtgggntcgacccccttcaaccattgtcctaggttctataactcatcccacagccattnttttaaaaccaaatcatggtcaaatgcttnccaaccggaacactgangtgatcctgcnaccccaaagccagatttattgcccctattaaaaataccattantgggtattaaaaattgttccttaaggaaaatgttaccatttgaccctgaaagtcctaagcccctctctttcccttccccccacccacagtccaccccctgtgggagggaaagagaaaggtaaaatttgtatgttgagagggaaagtatttacatctatgggtttatgatgtgtagtgagggcaacttctttcagcaaaataaaacaaaatagtgggcaccgactcttctgaggatgccactgtcagttgagaattctgtgtgtgtgctcatcacaggtagggccaagtatctgaactgcctccatgaagggagctgagggcagggatcatctctagtgcagaaaagaaaccagtgggaagatgaagagtgagcagagacaaactcagagaggcgtggagtacattcacccncagtaccctgacatttgaggatgactcctgtgactttggtaggggcgcgtggggagaggaggggcagtcatgagtagcagattccaagancctgatgtggagagggatgtgtac

SEQ ID NO: 311813 - DNA, 622 bp, Homo Sapiens
  misc_feature (488)..(559): n is a, c, g, or t
agctgcaacatcgtatttataacaggaagaagtctctctctttcactacctggtttcaagaaaatgaactgcagcaagacgttcttcaagtattccaggttagctgcagacttctctcgctcttgatttttttcagggctgagctgcaacatcgtatttataacaggaagaagtctctctctttcactacctggcttcaagaaaatgaactgcagcaagacgttcttcaagtattccaggttagctgcagacttctctcgctcttgattcctttccaatcttcttatttcacttttgagaagcttaatttgctccataaggactgcattggttgcctctatttcccgaagcaggccgtttaagtgatctgcactttttgtggtggaacggagcttctgaaccaattcttctttggtaaattcagcatgccataatggaggctctttgctctcaggctgtgaggaaggggtgctagtccaaaaggccannnnnnnnnnnnnnnnnnnnnnnnnnnnnnnnnnnnnnnnnnnnnnnnnnnnnnnnnnnnnnnnnnnnnnnncttcaggctttttcttctcttttgctttgctctcaggctgtgaggaaggggagcaagaccaaa

SEQ ID NO: 311814 - DNA, 913 bp, Homo Sapiens
  misc_feature (887)..(887): n is a, c, g, or t
gggagtgcgtgatgaccccagagcgtgcgttcggtggcccataggggaagatggcggctgctcctttggaggagcgggattgagaggatcggggtggggagaccaaacaagagagacatttctggctctgaaggcgaacgcttcgctggccatttaggagctctgctcaaagccagacgaacagaatatggcaaagagaccagagagatatgcgggcaattcagcctgatgcaggttattacaatgatctggtcccacctataggaatgttgaataatcctatgaatgcagtaacaacaaaatttgttcggacatcaacaaataaagtaaagtgtcctgtatttgttgttaggtggactccagaaggaagacgcttggtcactggagcttctagtggggagtttaccctgtggaatggactcactttcaattttgaaacaatattacaggctcacgacagcccagtgagggccatgacgtggtcacataatgacatgtggatgttgacagcagaccacggaggatatgtgaaatattggcagtcgaacatgaacaacgtcaagatgttccaggcacataaggaggcgattagagaggccaggtttatacacaatataccattttctgtagtccctattgtcatggttaaattattctctaagtgtattctgggtgcagagatgcatgggctctgtcagtttctgggaaactttctgcaccctataaacacaatatttttctttgttttcacacattcaccattttgctggcacctttctgaagtagtgttgtcccggtatcagcctttgcaatatgttagagatgtactgtctgccgcattttgcactggttttctcttttcatttatgattaataatgtgtatacnttattcctttttattatctactgtgt

SEQ ID NO: 311815 - DNA, 789 bp, Homo Sapiens
gggaaacatcttgacggttgtttcatgttcgactgcccaatatttcaccatatcctcccggggtctgctgtcaacattccacatgtcattatgggaccacgtcatggccctcactgggcggtcgtgagcctgtaatattgtttcaaaatggaaagtgagtccattccacagggtaaactccccactagaagctccagtgaccaagcgtcttccttctggagtccacctaacaacaaatacaggacactttactttatttgttgatgtccgaacaaattttgttgttactgcattcataggattattcaacattcctataggtgggaccagatcattgtaataacctgcatcaggctgaattgcccgcatatctctctggtctctttgccatattctgttctccaaatacttaattacagatggattgtagtctatggtttttcggttcacagcttttctcattcgttttccatcaaaagtaagctgttgcattgcttgctgttgtgcaaaatcaggtcgcttataaaacagctgtcgaggtgcctggtgctggaaccttggcatatggaaaaaacgaggaggagaaccaatttctgtagccatggtgatgttttccttctaggatacgtctggctttgagcagagctcctaaatggccagcgaagcgttcgccttcagagccagaaatgtctctcttgtttggtctccccaccccgatcctctcaatcccgctcctccaaaggagcagccgccatcttcccctatgggccaccgaacgcacgctctccc

SEQ ID NO: 311816 - DNA, 1360 bp, Homo Sapiens
  misc_feature (265)..(284): n is a, c, g, or t
  misc_feature (295)..(548): n is a, c, g, or t
gaacacaagggtcagtttcttcaattcatgagcagtcagaacaggagatgcttaggaaggaatcgtggctggtgcctcttctccatgctcatcccataccccagtgacaggataccgcttccctgaagttaaaaacacgcaccacacttccggtaaaggctggagccacagagggcacctagcaagcttgctttcaaggtcccatcgacagatgagaagggctgccgaggacagattgacagaaaccccactatgttgcttttcnnnnnnnnnnnnnnnnnnnnctgagacagannnnnnnnnnnnnnnnnnnnnnnnnnnnnnnnnnnnnnnnnnnnnnnnnnnnnnnnnnnnnnnnnnnnnnnnnnnnnnnnnnnnnnnnnnnnnnnnnnnnnnnnnnnnnnnnnnnnnnnnnnnnnnnnnnnnnnnnnnnnnnnnnnnnnnnnnnnnnnnnnnnnnnnnnnnnnnnnnnnnnnnnnnnnnnnnnnnnnnnnnnnnnnnnnnnnnnnnnnnnnnnnnnnnnnnnnnnnnnnnnnnnnnnnnnnnnnatgagccactgcgcccagccgagagttttaaagaaggtgaaagctcttcccttttcctaacctagcctggccttgattctgttaataccaagcctgtgtgaattggagtggaaagcagaagtgctgaagggagccattgccagagggaagaacacaaacttcaaggccagatgctcagcggagctctcagaacagccaagccaggaggacagtcaggaggaccataggccaggccaccaggaaccctgagatacaagaaatatgactgtcaagtgttgggctttgggagtcaggagcaaacataagttggcctctttgtctttcacaacacaaggatgagaaaggcaaagcatctttgatatctggcctagttatagtctctgggactcacacggtagaggcaatctaatcaccaaccatttttttcattttcctctggacacacaggaatgcaatttttcccagtgtcctttgcaactaggtggggccatgtgaccgaatctggtcaatgaaatgtgcatagaagtcatctgtgccatttctaggtctgatccttaaagcctcctatatatcctgttgctctctcatcgaccatctagggagcagatgcagaggatccaagataggacttgcaggggatagtggagttaccagaagttaccagaaggtagtagaagcctgagctcctaacgactacatggagcagaactgcatcctctcccccagtgatttagtgggaaacaatactgtcgtctaaagacacagaagactggggactgtttgttacagcagctagcattatttatgctgac

SEQ ID NO: 311817 - DNA, 973 bp, Homo Sapiens
ggtttttatgggtttgcgggttctaagatttaaatgattctttatttcaataaactttaacaaacaatatataatatttcttccttaaaaagctcattcaaagatcataggcagacttcttccccattgtattttagttggggagataaaggcaaaaagaggaaatgtaagctatcttacagtcattctgagaacctctggtttcatgctatactttcccagctaaaagttactaatttacgaagttcagatactgaaacttaaaaatcaagatccatatattaggatgtcctgctgtcacactggtggtggcccattgtgtcggagtctggtaaatggccacaagatatgttctagagacgtccatgagtcctcttgctgtgtgggagcggcatccacagacttctggaataattggcctgtgaggaagctcatcaaagctgcaaacagtacaatgaatgcaatagagagccagagggccttattagcctttctgatggaggacttgagatttgttgcccaggaagctattgtgtcataaactgaagagacatcccactttgatggattatttttcttttcagaaagacttggcttccttgtcctttctactgtttcttctccagatggctctgagtcatctttagttcaactgcttgaccttctacgtgaatcgatcattattttccatcccagccaccattcctgcatttccaatatttctgggtaaaaaggcaatagtcactcttcgtagagaagatggcttggagtttagagaagctgaacgttttttaatttggcagtcatcatcatcttcaagaggattgaaagacctttcattctgcagaagaacctgtttcagttcttctaattcagcgtgctctttggcatacatcctcttcaagttttctacgtgctgaatcatcacttcaactgctttactaacccggctttcctgattgatggctcccaa

SEQ ID NO: 311818 - DNA, 1090 bp, Homo Sapiens
cagttccgctcaggaaaaagcccaattttagtggctacagcagtagcagcaagaggactggacatttcaaatgtgaaacatgttatcaattttgacttgccaagtgatattgaagaatatgtacatcgtattggtcgtacgggacgtgtaggaaaccttggcctggcaacctcattctttaacgagaggaacataaatattactaaggatttgttggatcttcttgttgaagctaaacaagaagtgccgtcttggttagaaaacatggcttatgaacaccactacaagggtagcagtcgtggacgttctaagagtagcagatttagtggagggtttggtgccagagactaccgacaaagtagcggtgccagcagttccagcttcagcagcagccgcgcaagcagcagccgcagtggcggaggtggccacggtagcagcagaggatttggtggagggagctcaaggtcacaagaagaaatgaaaggaacaatcagcagccctgttcagaagttggtttgaagatgtcattgctgtagtttggattaactcttcccctcctgctttagtgccaccccaaactgcatttataattttgtgactgaggatcgtttgtttgttaatgtactgtgcctttaactttagacaactttctattttgatgtcctgttggctcagtaatgctcaagatatcaattgttttgacaaaataaatttactaaacttggcctaaaatcaaaccttggcacagaggtatgatacaactttaacaggagtcatcaattcatccataaatataaaaagggaaaaaaacttaaggcagtagtctgcattaggactgtttgagttttgcagacttggggttgggagaacatcttaaagcattaaagcatagttttttgtatggccaaccttactaaattaagttctgacttgctcactctatcctggataggcacttgggaacttacactctttaagccattccagtcatgattaggtgtaatgtatcagtataccaattaatatttttgaaagagttcctttaggttaatttaagtacagcaatttctcatgtaatgtttagggagtt

SEQ ID NO: 311819 - DNA, 369 bp, Homo Sapiens
gtgatattgaagaatatgtacatcgtattggtcgtacgggacgtgtaggaaaccttggcctggcaacctcattctttaacgagaggaacataaatattactaaggatttgttggatcttcttgttgaagctaaacaagaagtgccgtcttggttaggtagcagatttagtggagggtttggtgccagagactaccgacaaagtagcggtgccagcagttccagcttcagcagcagccgcgcaagcagcagccgcagtggcggaggtggccacggtagcagcagaggatttggtggagggagctcaaggtcacaagaagaaatgaaaggaacaatcagcagccctgttcagaaggtggtttgaagactta

SEQ ID NO: 311820 - DNA, 754 bp, Homo Sapiens
actaatattttttaaatattacaaagaaatgacagagttgtactgaatatcatggataaagcaaatctacaaaaagtaaacaaatcagcactcaaaacaatctttataaaaaatatttattcaatcttcaaattaaaattataaaagttcatcattttaagctgttttaagaaagcaaaagaaatatgtctatattttccaaatgaactaaagtggtattcccctcctcccaactactcagataagaatggtaacaacccttttaatctttaaacccaaattagtttcaggaacatttcaaaaaattgttttggtgacaatgtctcaacagaaagcctctccgtttatatttcaaaagtttcaaatagtgtcaataaactgactagtacaaaaaatatacactgtatttttaaaggccttttggattgcgtttagtagtaagcaggctgctggtgtatcttgggagaggtcaaacggcgcctggggaaggggaaaaggagctcgctttccattcctgtgtgcatgcaacaagcagcaaaacagcaaagttactccagttagcttgtactcagctgtgctttctgccagcagaagatccatttaatgaattctgaagacttggaatatttgaacctagggaaggatttgaggttccctgctgagaactcccattgactgggctcccattacctttcaaaataccagtacacttccaattgtccatataattagctttccacaatcttacacaccc

SEQ ID NO: 311821 - DNA, 508 bp, Homo Sapiens
  misc_feature (421)..(421): n is a, c, g, or t
ctttctggtggagttggtgggggctaactgcagaggaatatggaggaaataatatcgggaagtgctttggtgcttgtcagctgggtgatcaaggctcagtcacttcacccaagatgttagactttagttttctcacatgtaaaatgggactgttcaaaggcaacttctaataccacttttagctctgaaacgctataaatatgtgaccagatggacaaaacaaacggctttttggtctctgggatttctttcctttctgtccgtgtggctttatgattagtgaaccaaaaagttgtgaggggaattgcgtgatgaagcctttgaaaattgcagggctacagggagattagtagaactgcccccaatggtcttgtgagaatttttcagtttattcatacaagtattgaatttattaagtatnagctatgtactatgcattattcttggtgctagtactacaaaataagtatagaggagaatccttgtctttaaagtgtttgtagtttga

SEQ ID NO: 311822 - DNA, 2051 bp, Homo Sapiens
  misc_feature (748)..(756): n is a, c, g, or t
atttggttggaataaatttatttcatctgtctgtaaacaaggtgtttaatagttatggcatttttttaaatgcatattaaatcagatgagttagactgtatcccagatgtaacaaagtgcagggaaagaaatggacaaatcagcaacaagatttgtttttaaatctgtacattatccacaaggcccaaacaatagaagcaaatactagaatgtccctaaagtagtgccattcgaaagaaacccttaataggtcagttaaaatccatctcacaatagcaacagttcattttaacaatagtatggcacagaatacatatgaaaaaaattcatcacaagacagccaagtccacaataatgcaacttcatataaaaactcaagctgcaaataaaaattggtcctatgaagaacaaactggacacactccagatggttatgttgggatacctaatgtccataatggcagccttttacaattttactaaagagtagagctggtgtgcaaagaaaaaggaagaaaaatctgagctattgcaatgatggaatgtcccctggggattcaatcagtatggttactgtaaggtcatgggaggaatgtgctttttgctcttgttttgccattgcactcttcatatgtcctgtagacactatgaataaaggtttgtctctgctcaagtgcaacaacaatactaaaagcaaactactgcagctctcaatagctcatcaacaaaaggggattttaattggttnnnnnnnnncaggcactgcataaaaaaagatggaagcaaaccaaatgcctatgtgcgaagggaggggggggcgggaaaaagagaagagtgaaggaatgatgcatgcactttttcctcccaaccatgcgctacaaaaggaagactaaatgagccaagtaaatgctcaaagtgctgaaaagacactgatcagagattgtacaaccggcaccttgcttaatattaacttattttagtaatcaatatcccattaattgctaagacaaagtgatgcccaacttggcatgccccctccccccaatttcaaggtatcatgcaaatcattattgtgctgcaattatgttgccagataagggttggttacatacagtggttaacatacaaatgatccattgggcaaacaggaatcatgacattagaaaataggtaaagaaaaattagctaccatctacagtttggtagcattgtgaccataattagggttgttgatgaagacagttgctaggtagatggggagaggctgcttacacatcagacctcctcaggtataaagcgagttcatatgctttcttgttaagtgtgcctccgtggacaccttcctttcccatgactataaccaatgctggagtacacaaggaaacaaaacaaaagtgaacagaattattttggggggggagggcagaaagaaagacacctttccccaccaacagagggatacaaaggagacacaggttcataccccatcaccctgcattgctaataaaatttccagaattaagacttaagcttatagctaggaaagtttaagagcaattttcccctaatacttaacagtctgcctagcagctagaacccagagtctctcaagtattttgccattgagtatgccttcttattcaatccgcctccatggaccccttcttttcccattacaaagaccaagactctaccagctctgccgacagccacattgtatgttggctccccaccttgactctttgtccggatgtccattgtgcagtcaccatcgacgtatagactatctctgatcactgagcatttcttcgcgccaagagtcaaaccgttggtaaagaaaccttcccggtcttttcctacaatcatatctatttctattggcgtaatgctctgaaagacgcccccggccgtggctgcccagacgtatttggcgtcgcagtagccgacaatggcggcctcctggcagcagccatcgcacatcaggttatccacgtagctctgccaaccggccatcttcgagcccttcgcactgcagcgcggacggcgagtca

SEQ ID NO: 311823 - DNA, 611 bp, Homo Sapiens
gacttcatgaaacgccggggccaggtgtgctcttctatgctggggtcctcttcggtccattgccacattgctgtttgtattcttcttctgctcagcctctggctctgcaggcagaatgctggtgacggtgtggagaagagcttcaatctgctcctccgtgagccgctcttcactctcttccaccatcagctggatctccacagcagtcacaggccggtggttcagcagctggagcttctcagctttggtcaacttgtggcttttcaatgctgtgagaaattctctgacaatttcaggactctggtgcctgcatggtgtttttgatatgtattttaacgtttcataggtgatagtgttcaagttctgttgcccagagctgtgtttattctttccactttctttacgctgctctttcagatcagttagtaactgaaatacctcgtagttactgagaagcgcagaattggcatccttcacttccatgacgtcccgcctcgtcgcccctagctgccagcagacaaagaacctcacacttcacagctgtctccgccgccaccaacagcgccaaggtgccagctccgcgcgccaaggtgctcgccgggatcgccccc

SEQ ID NO: 311824 - DNA, 1247 bp, Homo Sapiens
  misc_feature (20)..(20): n is a, c, g, or t
  misc_feature (36)..(36): n is a, c, g, or t
  misc_feature (48)..(48): n is a, c, g, or t
  misc_feature (53)..(53): n is a, c, g, or t
  misc_feature (75)..(75): n is a, c, g, or t
  misc_feature (85)..(85): n is a, c, g, or t
  misc_feature (112)..(112): n is a, c, g, or t
  misc_feature (164)..(164): n is a, c, g, or t
  misc_feature (765)..(765): n is a, c, g, or t
cctttaaaaattgggcaaangggaaacccctcatgnccccaaaaaaanccccngggtacccaactgcttgtaccnaaatgcagangccaagccattgggtggatgtccccanagccaaaggaagtgatgaggccccgactttaaatccatgcctttaaagtccnacgcattgccttgaaagacctaaggtccccagcccaacccagagagccattcacagtggcataggcaagaacagactgtgctccagagttgaagtgatgcatatccacaacacaaccgtcctccttctgatctagaattctgctttgtagaggatggattttaggagacttgggcagcttagaagcctcaattccaagaagctggacagcaccattatcagatgctatggctaaatagtgggagccttggcagaatgtgagcgtcttgactcgtcctccaattcggctgtatgtaagaatagatctggtagtggtggtcttcccctccatcttttgactgttccggattttcactgtgccatcatttgaacatgttgcaaaaagtgagtgttcatcagagactctaattcgattcacagcagatttatgctcatgaagatgggcaactaacagccctttaggacgccatccaggtggtggtggtttactctcccattcagcattttccatcatctgcttagctgttctctcagcattgcactgctcccgcttttgctggatgagttgctgaagttcagttttacaagttgtaattcgaatntgataggtggatggtaagattgtactacttaaaaccggtattactggttttttattttggacagttgtcacttctggaacctgtgaagaagttgaacaaagggacacaaatgccggcagaggactcggaacgaggaggtttcccagtctgaatcacctcctgatcactccctttaggtagggcctgtggcatgtttggtgggtccagtgacccaaacatgcttttccattcttcatttacatttgagtcttgttttacatgttttctggcctgtttgtcatctggttcttgtttggttttaacaagatcaacttgtctcccagttatgcctaaagctgccaagtcaattacacctttctgactactatcatgaagatggctctggtccactatattggcctttgctttattagatttcatcatgaagtctttcagtgccagaagtttgtcttcctcttcctctgtcattccctgtgagagca

SEQ ID NO: 311825 - DNA, 2300 bp, Homo Sapiens
ttttgagtgaaaaacagatgcttttatttattgtattggaaacaacttaataatttgcatctctacatatagaaagctgctttgaataactgggaaaacaactattgcataggaaaacatatgcaaactagcatcattgtctctagactaggttcttcttattgatctcacgtcatcacaaagcagcaacagcagcttctagaaaatggagaaacagtaaagtcctgcaatgaagctataattaaggttgaaccatacattccgctaatcctgcaactttcctacaatcatttttctgcctatacaatcctgcttcttataggatgaacacctagcaaaacaatataaatttgctgaaaaacaaaattacaaacaaatgaaagaacttaacagaacacacagcattaaaaggactaggaagagcaaggtcttaatacccagtacaataaagccaagaattttctaatgctgaccagtctgaagactgaaattaaatatcagttctttttacttctctaggagtgattctagctcctcttgcaaagagctgagttgctccttttctcggtcttccttttgtttgagctcatccagtacagcctgaaatctgttcttgagagccagattttccactttcatgatgagatcctcttgtcgttttgccctgtcctgggtctcttggagcttgcctttcatgttgtcaatctgcttctgaattcccataaccagctgattggttccttcattttcctggtgctgttcatctgattcatttagcttgtcctgtagctgtctctccagatcttcctccgtgtcaatgatgtttatatcttcttcatcttgatgctgggtctcatcttcatcctcactgctgctgctgaggtcattgaatatctcccgaagctcatcatgttctaatgagtcatggccctgcctgtgaccagacattcctggagaagagatatccaggccttgattttctgcctcctttgtttcatcttcggcaattatttcccaccgagtactaacagcttcagcatctgtactcagcaatcgtttcacttctttttcaacatctggagattcaatatatttcttctttgctgtcttccggaaccttctcttcctgacattctttagaggcagagtaattccgtggttcccagataaacttttttctctttgtccttatcctttttcttgcttgctttaggatcagtgctagcaactgggctcctccacaggaggatagagatcaccatcaactgtggatacaagcatctgacagatatcagctgtcttgtaaaaagtttttttatcaatggttttcaagctttccataacacagggcaggtctactaattttgaggccaatggaacacggtccactctgacgattccatgacgcccatcaggatgtaactcaattgtcagtctgtccttgaggttgacatgaccagactgtactgcccttctccccagtagaggcatattctggaggcagacgtaagataaactggctctccagttcgtgaggagcatcatctttgcttttactcatctttatttccttgtgattcacttctccaataaatgctggttacactaaaaagttccagctactgcaatagtttaaaacaccagtttgctatgaattgaaatcttttaattacaagaagttctctgtaggtcagcagctaagcgtctattttgccttagtttttatttaagctccaagtcttttctctaaatatgctgtgaccgaataccagtcgttaacacaaaggcttattcacagacttaagttcattaaatcagatgcaatgccaagtcccaacctctaggtgccgctgccggacaacgcggagagagctagctagctagctagggaacaggaaagcaaatggcggctcccccggaacggttttcggcccagaaagcccagcagagatactttcaactcacaaactctcccggaacaaagacactcaaaaaatcagggctcagcgagctctcttcgcctcgggtacttacaatccagtgacgattataagttcagtttcaccgggccggagcgaagggaagaggaggccgcaaggagccaagcgggagagagccgagcgtctccttgtcgtttccttaattcttcctgccgcttggcagagtgatccactaccgattactgatgaaagggcccgggatgggcagcgcgaaatcttgccgagaggcgcagctcgcatcaccagaccccgcacctcgccggccctccgtccgggtcgcctcgtgccgaatcctgcagc

SEQ ID NO: 311826 - DNA, 1738 bp, Homo Sapiens
gacaaacatgtttattagaaaagtaaaaaatattgcataggtcttaatacttgaacatcaagtgtattcatgaacagtgagtatcttatcttcatgtaaacagttctagatggaagacccagatggcactcctcccggggaggggttccaggccccaccctctcagcccctcccctgccagctcaactctgcagtacacgatgggggaaggcttaaacgcagctgccaggtgtaatttttcaagtgtcaaagatcccaagtgatccctgacacccaccccttcctactcttacattcatgcgtctgtaagatagctgcctacaacaggtcagtagtgatgctccgatcagaaaaacaagatcaaaacaaacaacaaacacacttggtcccttcagaccagtaagatacacaaaccacctccacgacctccgacctcccccctccctccggctgctctgaggagcacgtgcctcttccttcaccctgggccgggctggggcgggagcagcccagctgctctctggatgtcacaccactgttaactgtcagtaacaaaaataataaggtacatgctacacacacatccagctggaagccttgttggcccctaagcctttgtttcatgctacagtactgaggggtatgtgtccccaatgcacagccacccgcacacaactcaatgagcttcctgggaaacactattcccccacctccaccttaggtggctgcctcagttttccaaccacaggaatcagtccctcagctcctgcctctagtctccaccccaaaagttcagtcgtctctgtcttggagggcactgtcggccccctcaggttgaagttcaacactcctcaatgagcagctgttccgagctgtacagttcttcttgatgactcggaagccagttctcagcgtcagggactgctgaagccagggaggaagggagagttggcggagctaaacagcccctggatcttgggccagagtcgtgagtccaggcgcagcacgagggtcagctggaaggtgggcaccaggctggggtcgagtgccagctggcccacgctgtggcagctcttgccctgctccacgcagacgtccagcagcgccccccgcaggccgcacggctcgctgtaggccaggcgcagtagttctttgcccacctggcttaccaactggctaggcatcagcaggcgcgcagggcgtcgagagcccagccgcgcctgggccaggctctcctgcagcagctgcatcaggttggcacacaagtgttcatcctcagggtcactgagcagctcgaagtcgggcaacgacaccccatccaggtaagccgtgtcttcctccggcccgaagccactgttgctgctgtccagggactcgcagtccgagctctccaggctcgtggagcggtcaaacccctcctcccgggtcgccgacccccaggctgagcgcggcggccgatctggggtgggagttcggggcaaggacgagggcgaagaggaggtggacgacgacgagaagcggtcccaaaggctaggcatggtgaggacagacgccagggcgtttgctgatgaactcagagtgccggagcgtagaagccgcagctagcgcggtcagcgagaactgctaagacaagtgcgtcctgccgcttgaatgggtgtgcgaacccgtgccaaccaccgagagccgcccagacccgtcccaggtccacgctcgcacctcccccttggcctgctgcccc

SEQ ID NO: 311827 - DNA, 1009 bp, Homo Sapiens
  misc_feature (107)..(121): n is a, c, g, or t
  misc_feature (317)..(317): n is a, c, g, or t
  misc_feature (363)..(363): n is a, c, g, or t
  misc_feature (427)..(441): n is a, c, g, or t
  misc_feature (757)..(757): n is a, c, g, or t
cctgatttagtggaggcaactatttattccctcccttgttccaggaaaaatgtaaggtggcttagaagatagactcagaatatactagaaagtataattataggttnnnnnnnnnnnnnnntagagaaagcagaatttgggggaatagcacatgaagccatttaagaaaaggtcaggaaatatatcctaaagtatattacattattctcccacagtgattttctggaaatattgcaaaatacattaatttgtaagaaaactaatattaaagttactggtaaactagagatgcctgatccaaatttgttaaattattntatttaccctggatgaagcagatggattataaaaaatgtgtgtgcnttttctttgtgcttggataaaagaagttttccgtaaataccatatattggtagagtataggtgnnnnnnnnnnnnnnntttgggcacccttactgaatttctactgagaattccatcaactgctgtctgctgacttgcgactggatggcttcaactcaggtgctcatgtgttacatggctgttttgtgagcacaaaacagagcaacatcaattccagggcatcctgactattggttcctccagctcacctcatcaggacccaggaagagaaatgggaggaaggtaatgcagaggagacctgctcaggttggcatgttgaagccacagtctcctgtgttgggttgagagctgcagaggttctgactgtgcttacagtctgcatgtgacagacctnaaccccactcctaggggcagggaaggaatggtatggacagaagactgggagcagcattaaatagcttcatggaaacatgcatggtctgtccatctctattttacaggcctagctttcaacaaataatagaaagaagggtcttgtatttatatgctgagaagtaagaatgcagggagtgatgatgaaggaaagggtttgtgggaaatggagaggaaagaaaggtagtaggatgtttccctttcaagtgtggca

SEQ ID NO: 311828 - DNA, 1244 bp, Homo Sapiens
cccaattccgttgggggcatcttttggtttttcctgcttttttagcgccaggccagttccaaggtttggcccactgcttcggtttcagcttttctccatagtgattccaatctttgttgcagtcatagttacataactcggctttacatcaaatcacacccccataatttcacattttgatcaaattccttttctccttcaaatacaatatgcccatttaacaatgtgctatttgcttctattcggctaagttctggaagtgagtttttagcatatactgaaatggtaacttcacctccagtctgatgccagtcatgtctacatggaacaacttttttcccagcatcttttttagtccacatgtgtttcccttttgtacagccctcttgggctaagaatgtattaaaatcagaagtttttcttctacaacagctccagtatttcatcccctcatggaaaataggtactccagaatgatatacacagacttcttctagactctctagaccctggtatgtctttgaacaccctccattcttacatgaggtcccaatcttaatttcatcattgtcttcttctttctaattttcttcattccctgatgacagtttaagtttatcaagtgcttgttttagggaggcagatatttttaattccaaatttgtcattggttcatctgggcttggtctttttattgcttctactggcttaggggcttgaatgatgtgttcctgaaatttgggttttaattcacatagctccttcttctcagtagtcttgacttcaggtttgactggctcaggtggcttctcactattatgtctaccttttgtacagcctacaatgcttaagaaatcagaaaaatcagttgttcttctcttacagcaagaccaaccctttaatgcatcgtgaaagaccggaacacctgggtggtatgtgcaagcatcgtcggaattggtctcaggatcgaagcgctgaccgcagccccggttgtagcacagcaaggccattttcttttcccaccgtcacaggcaaggcccaaacaccgggaacggcaagaggatgcgtttgccactcccgtgtcgctagcaccggtctccatacctcagttttttaaagtgagaaaaaaatcaattgaatgccaaaataaatagcctgaattatttatgtgggataaattataggtgcaacatgaattttaaactattcactggtaggatgaaaaagaaaaagatgctggcaac

SEQ ID NO: 311829 - DNA, 642 bp, Homo Sapiens
  misc_feature (78)..(87): n is a, c, g, or t
  misc_feature (601)..(601): n is a, c, g, or t
tcatagagtcatcaatgtatttgttgctgacatggttttattagatactgtagtgattcaaataagttttctatttgnnnnnnnnnntcacttgattgtatccttgcccagtgaagccatcctaagacttagcaatatggattgtacatttggctgcatgagcaagtcggccgcacacttccagacagtgtgctgtttgaattgactatttgcactcaaagtctgggtattcattggttattggcctgaaatgatcaaataactacaaatgatctgttgaataaaaatagttgagctgatatatgttaagcagatattcaatcagaatgaacaggttccggtggttattttgccgtttgacattttttatggttcatttatttttaatatagagaggaatattgaatatttatctagagaatacaaagacccacatgtaaatgataggtattatctccatgtatatatgtacccacttagtcatgtaagtgcatatacacatacacacacatgagtgtagacatgtgtttattaattgacaatgacccaaatctctttcacaagacttaaaaccaaattcagggacaaatggatagagaanaaaagggtcaaacatcgagattacatggatgttaaattata

SEQ ID NO: 311830 - DNA, 1091 bp, Homo Sapiens
  misc_feature (115)..(115): n is a, c, g, or t
aagagacaagacaataaacgctgtaaaggtatagtatgcacatacgtaagacaatctaagtgctttaaaaaatgttttagatattttaagatatttaactgtcccctgtggcttntaaggaaaaaataagtataaattcttgaatattaagaattttaaatcagctaaattcagggccaagaactatttaagatgattcaatgagaaagaaaaggacctaacctggaaaaagagtttcaaatatgccagtacgtagggtatttatggaaatacacagtctaaaattaaaaattaaaactaatcaatgaatttaaatctatagcactttaaggctgtggagccaacaatagggaatactttgggaacacatgatctttcaaaacataaattagggccttagatgttgactattttgtgaagtattctacacgtgataagaatgtgaatgtgcaaacatttagcctatgtccactagtatagcaatctaagtgatctgtctgtccctttgcacaaataatgattccaatatgaaatcactgtatcaaaaatattaattacacattgttgagatactatcacttgtaaaatattctttgttaagtacttaatgattatgggttgaattaagaagacttgatgtctttttgtttttctataaaaaggggtctcagcatttttagttaacagcacaactgtgacaatatactgatacatctttagataacacagaacaaattcttattttatgaaataatgttgatgatttaaccctacaccaatcccacgaatacaggttggctgcaaggaatacacaaatgtatccaaatagtacaatagatttatcaataaaacacctttcatattaaatgcagaccatattattaagtatgagggcaattttaagttcagaacccaaacatgtaaagggtactgtaaagaaatgcttccataaccactgtgtctacttaactaacaaaatataattcttctctgaagtccccagatgtaggcaactactagttaaaagcagatagcatttagaaacaaaaaaaaccaactccattttcaaggacttaaagagcccggccgta

SEQ ID NO: 311831 - DNA, 757 bp, Homo Sapiens
  misc_feature (100)..(100): n is a, c, g, or t
  misc_feature (529)..(538): n is a, c, g, or t
agggggcatcagatcaggctctaactcttcaggctgtgaaagcaaaagtggttacttctaatatgttgttgaaagtgaaagtcactttgaaactttgcanatgtgttagaaagtcaaatacaattataagtttttcctgtaatacatttctgtcaagtttcacaacctaagcttggtaaaatggcaagaatcaaaaaatagtaggaaagtggcaaagagcttgagagttttccagttttaacgatgctaaatgccaccacgacagtctcaccagcatctcgctgcggtgactaccggggaatacacacaggggaggaaggttcaggctaagatttagtcaggatgatgtctctttaaaaatgatttgaaaaatcaatttgaatcccaagttccttttctgtttctaaacttacttggaacacttaagaatgactcacataacattgctttcaaatacctccgtgtcaacttcttactggcaagaaatggcaaagaaatgccagttttgtgctggaacttgtagtcattnnnnnnnnnnttagatgatgctctgagttttataatcgtgagggattttttacttgtgaaaacacaaatcccacccaaaactccatgtgaagtttctgtactacaagcatggcaaacagcagacttgtttcaaggatgatcctttcacattaactcctaactttggagttagtttacactaacactctaatgaagctgtgtccctgtactgctgggcataagtcaaccc

SEQ ID NO: 311832 - DNA, 588 bp, Homo Sapiens
  misc_feature (488)..(488): n is a, c, g, or t
gtgaacttgagtctactgataaatagggaatcactattcagggtgtactgtatatacaatctgggtcagctgcagctggttactgcatttctccatgtggcagacagagcaaagccacaacgctttctctgctggattaaagagggcccacagaccagaatttccactatactacttaaaattacataggtggcttgtcaaattcaattgattagtattgtaaaaggaaaaagaagttccttcttacagcttggattcaacggtccaaaacaaaaatgcagctgccattaaagtcacagatgaacaaacttctacactgatttttaaaatcaagaataagggcagcaagtttctggattcactgaatcaacagacacaaaaagctggcaatatagcaactatgaagagaaaagctactaataaaattaacccaacgcatagaagacttttttttctcttctaaaaacaactaagtaaagacttaaatntaagcacatcattttacaacctcatttcaaaatgaagacttttacctggaccctaggtgtgctattcttcctactagtggacactggacattgcagaggt

SEQ ID NO: 311833 - DNA, 693 bp, Homo Sapiens
  misc_feature (61)..(62): n is a, c, g, or t
ttagttgtcaatactttagcaagcccactaaagataactatattccttttgcatgtgcttnngggtgatcagtttttatacagggttgcaaaacatagtattcattaaagacatgaatttagaattgatttctttgagtggtatttctcttgattgagcagctagacaaaataatctgcaaatttaaatgtggcgcatttgactcattcttgagaaattctcataagtgaagaggattagcccttaaggtgtttaatacctggtacagtagtgaaccgcacagatttcatgaacttaggatgtgttttttattcatgaaaaacttagaatagtgaactattaatatttaaaaacgagaaatacaacatttaaaaaattaagagtattttgcattagtgattatgattcttatcccaaaattctagaaagtaataaattctgtatgaataagcataaaaaataaataaatatgcaataacattaaattaaatgtctttacaagaagcagtgaaggcactggtcttaagtgagaatatttgcctgggagtagagataaagacacaaaccgaatgtgaaataccaggtaataattattttgcattaaactctttttatcgggaatagtatgatattttcaatgtcactccattcatgttgatttggagctgacagttattttggggtaagcagagg

SEQ ID NO: 311834 - DNA, 1173 bp, Homo Sapiens
  misc_feature (1103)..(1103): n is a, c, g, or t
  misc_feature (1139)..(1139): n is a, c, g, or t
gtcaggttctggtagaagacagctgttgagtgactgtgaggatgatccttcataccctttccaagacgtgttacacagacagacctttttaagtgctggacttttaaatgaccatgaagttatcattgaatgttaagattttttcttcttgattttttaatacacgtaatctttttgaagcagacattgtatacagaatcttacttctctttgttcctgatatattaaaatggccagttaggctctttttgtagttgaattgtcttctatagagattgggtggcctctatagaggtatgtgtatctttatttcagatgtcacccagagtaaattataattagaagtatagctagaatgagccccaaaccttagcctcatttattttgttctgttacataagtcattttccccttagagtgcttgaagaaatgccacctacacgggttgtgtacttcttcataattggtttccatgaatgtagtacgttcatacaggctttattcaacctggcgttcccctccatatttaagatgaaacattccggttttctcatcacacattatcacatactgtgcattagcatatctgggataaccaggttttgggggttgagttttggccttcatccttgtagatccctttcctattgatttcccaccttccagtgaaattctgaaagtcttatctttaaaatcgatccgcttaccatgggcctattcttgtaagtttcagttagcatttgcatgtgtaatattaaaatgaaagagcttcttacccagtgctgttgcccttttgagtatttttgtttttaaaataatgattgtaaaatgttttacaagtaatgtaaaagctagtatcattcttacatacttctgtgtttaaattttcattcttaccaaaacagttaactctttctttccaatcaatttatacaaaagaggtcgctccagccctaccacaggtctgactggcactgccttttgtttgcccttgaacagggcagtgttgtggggactgcaaaagagaaaacgtccaggcgagcccagttgtcctcgcccacagggtcctgcaggctccatcagtcaccgctttctatggcgtntgtagttgtgtcttttaagaagtgagtgtgattgtntacttgataaatcagctcactctctgggtgcttt

SEQ ID NO: 311835 - DNA, 2224 bp, Homo Sapiens
  misc_feature (674)..(676): n is a, c, g, or t
  misc_feature (679)..(679): n is a, c, g, or t
  misc_feature (2099)..(2129): n is a, c, g, or t
ttaaaattcaagctactcatgtttattaactgatctacatttgacaaaacaaagataggggcacaaagagctgtttgacaaagtcaaatcccaggtatcgaacaatagtattcccctggctgccctagaggcactttgtccacttctgagggggatgtcctctgccatgcgaccgctcagttatcacactgcactgctgttgggctgcatgtggagtacaggtctgcatgcatctgacatcagagaagtggcccactaaacactaagagccctagttctagatgtcacaagttgatgttagtaaccaccaagtactaattctgtactaaaatggtcagaaaagataacaagctttgagtactgtgtaaaattataccctttatagggaataggctcttgtaagctgccttttaacttatttcctcccttgccaaagtctattcatttatgtcaaatcaagaacatacagcacaacattttctaaaaaagcactttaacaatggtcattaacttctccctaaggactcatgcctaaggttatttacataagatttgggatcttcataatttaggagaacttttaattctgagctcgggaagatatttctcctattagaccataggacactcagaaatacctgaggtataatcactgaaaaccttcttaaaggcgnnnaanaaaaagattgaggtttcctatactggcatgaaagtacacatacaatttttatcgtagaaaagactaaaatgtgaatagtgacaaaacataacagataaattgggaggaatcagctattaggctccaattcttcttagtatattttgcagacaattctagtattatagagattatcaggatataccaaaaatgattttaggtagaaacttcaaaaaacagcaaaacccagttttaagacaggattcctttctagagacattacacaacagtatacacttaaggtgtttctggtggaacatcaacatcaatgtacttaaaaaaaatctaagcctggttctttttgatcagatgtgcttatttggctgctaatacacccccaccaccctgcctccaaagtgatcatttagtcattaattataaaaaagtatacaaattatactcaatacagagcacggcaagatctagttcaatttatagctttaagtaatacacataaatcggacaatttaacgttgtactactctctggccctacagtttcctacttcctgatgtttcctggaaactgtaactgtccaggcaacagaaacagtaattactttcttagggaacaaataaaaaattttaagaattgactaaagtaagcaccccagagtcactttatgaaatacaaattcaaatggtattttttaaaagtgaattggaatatgcgggaaatttaaacagcagggattcttctatttaatgcctgccccattcagggacacttatattcacatataaacctgctggaatcctttctgaaactctacactctattgacctcagcacaactgagtgaaggggaacgaaagggagagaccatcttcaccctttgtttttgtggaatttatttagaaaaattttattgagagattctaaaaagtataagaaactaacaaatttttaccactgcattcatgttggctttttgagcacatagctctaagtggggggatggcggggatgcctcaaaaggggagaggaaggactctccttggcctgggaataggtgtgcctatgggaaccataggagcaagagtcaagagttcttcagaaaactgcctttaagtcaggacaaaggaacaaaacatttgcaaattaagcaccaaaaagatcaagtaatttacttgccattttcataaacaaaataattagtcccctctctcatcttttctctatcatgtcttttgtataaagacatttctttctgaactgcgtgctgtctagacaaagccacgtcatctgatgagaagcagaccttgctcagcaacattgagaaaaaacagatctacttctttccatttcttagcctgtgtcaactgctgaatgctgaaatctaaccccagagcctcactttgccatttcatacagtttgaatnnnnnnnnnnnnnnnnnnnnnnnnnnnnnnnctttgactcccccattaaaaagtttattctctaattctataaatatcaagaaggcagatgtgttttactttattttacattaggaagaaaaagcc

SEQ ID NO: 311836 - DNA, 790 bp, Homo Sapiens
  misc_feature (284)..(314): n is a, c, g, or t
gtaatttaactgggcccattttccataaaacaaaaataaattggtccccctcctcctcatccttttcctcctaatccatgtccttttggtataaaggacatttcctttcctgaaactgcgtgctgtcctagacaaaggccacgtcatctgatgagaagcagactttgctcagcaacattgagaaaaaacagatctacttctttccatttcttagcctgtgtcaactgctgaatgctgaaatctaaccccagagcctcactttgccatttcatacagtttgaatnnnnnnnnnnnnnnnnnnnnnnnnnnnnnnnctttgactcccccattaaaaagtttattctctaattctataaatatcaagaaggcagatgtgttttattttattttacattaggaagaaaaaaccacaatctcaaagcaagcacccgggttttacttcagtttacaataatttaatgtgcctgagaatttttgtgcaaatacatgtcatctttcattaaaaatatgcatagcgcactttggaaaaagttggtttagttgtcaccaacttttcttacaaaaaaagtttacatatataaatatacaacattccctaattcctattgattgcacttctggcttaaccccttccagcctccaaggaatttttaaaaacatgcaattatgtttgtattccttggctactgtacttattcagacgaaatattttaaaaacaagttttcttggtttcaatttactcacattttgcctcttaaaagtaaatccctcccaccctctacccagttg

SEQ ID NO: 311837 - DNA, 1334 bp, Homo Sapiens
gtaatagtggaaatttttattttacaaatgaaaagtcaaaatactgctttgaattgacccttaagtcacactctgaattcataccatgcagttaaaattttcccagttcatcaatttattccactgaaaacagactaagcttctgtctatggaagaagcacagaccagctttaaccatgatgacaatcactggtaagactaagcaaaggaagtgactgtatctctgtttcaaattctttttcttcttgggcacattctccatggccatgtgaaacttaaaacaaagattgcgactgtcctggccagagaagaaggttaaagctgtgtcatagagaattgcagattatagttctaccttcatcctgtgatatccatgtctctcagagaggtctggctacaccaggatgttctttgcgatagcattcaaagtccttactttggtcacatctgttacctttagggaatattctgagcaagaaagtgaggctcccatggcaacagatgaatttcgaaacttcattcccgagtctctagtagaccgagcagaacagtggaattctgtagcacctgaacccttcaaggatcctttgtagatttctgtctgttataccacctcctggcattaccacaatcctgccttttgcctgctcaatgagtcgctttattaggggtagcccttctaatgctgaactgtcacatccactggtcaacacgcgttcaaatcccaaggttaagagggtctccagagctgccattggatcatgaaccatgtcaaaggctcggtggaaagtgactggcagagggcggcaaatagccataagggacatacacagctctttgtcaatgtgtccatcttcagtcaatgccccaaaaaccaaaccatcagcaccataaagcttggcaagacgaatgtcagccttcatcacctcaatttcacgatctgaatacaaaaaatcacctccccgcggccgaatcatcacaaaaactgggatctgaacactctgcttcactacttgaaggacacccatgctgggtgtagttcccccctctgataaaccagaacataattcaatccgatcagcacctcctctttctgcattcacagctgattccactgaatcaacacaaacttccatgagaaatccatttgctgctccttttcatgctccacgcgttcctccctcgtgcgcctgcagtttccacttggaatttgggctccggcgcgcaccagctaagaagcgcgtcaacagctgcgcgcgcccgtgcgcgcgtccccgacacctacgccccagcgccacccaggcctggttgggttggttagtaagagggggtgt

SEQ ID NO: 311838 - DNA, 911 bp, Homo Sapiens
  misc_feature (892)..(892): n is a, c, g, or t
gggacgggcgcgcgcagctgttgacgcgcttcttagctggtgcgcgccggagcccaaattccaagtggaaactgcaggcgcacgagggaggaacgcgtggagcatgaaaaggcagggggcctcctctgagcgaaaacgagcgcggataccgtccgggaaggccggagcagcaaatggatttctcatggaagtttgtgttgattcagtggaatcagctgtgaatgcagaaagaggaggtgctgatcggattgaattatgttctggtttatcagaggggggaactacacccagcatgggtgtccttcaagtagtgaagcagagtgttcagatcccagtttttgtgatgattcggccacggggaggtgattttttgtattcagatcgtgaaattgaggtgatgaaggctgacattcgtcttgccaagctttatggtgctgatggtttggtttttggggcattgactgaagatggacacattgacaaagagctgtgtatgtcccttatggctatttgccgccctctgccagtcactttccaccgagcctttgacatggttcatgatccaatggcagctctggagaccctcttaaccttgggatttgaacgcgtgttgaccagtggatgtgacagttcagcattagaagggctacccctaataaagcgactcattgagcaggcaaaaggcaggattgttggtaatgccagggaggtggtataacagacagaaatctacaaaggatccttgagggttcaggtgctacagaattccactggttctgctcggtctactaggagactcggggaattgaagttttcgaaatttcatcttgtttggccctggggagcctcacttttctttgcttcaggaattttttccccaaagggtaaccgntgttgacccaagttagggg

SEQ ID NO: 311839 - DNA, 491 bp, Homo Sapiens
  misc_feature (418)..(418): n is a, c, g, or t
  misc_feature (443)..(443): n is a, c, g, or t
  misc_feature (460)..(460): n is a, c, g, or t
  misc_feature (474)..(474): n is a, c, g, or t
ttgtaatagtggaaatttttattttacaaatgaaaagtcaaaatactgctttgaattgacccttaagtcacactctgaattcataccatgcagttaaaattttcccagttcatcaattaattccactgaaaacagactaagcttctgtctatggaagaagcacagaccagctttaaccatgatgacaatcactggtaagactaagcaaaggaagtgactgtatctctgtttcaaattctttttcttcttgggcacattctccatggccatgtgaaacttaaaacaaaggattgcggactgtcctgggcccagaggaaggaaggggttaaaggctggtggtccataggagggaattggccggatttataggtttcttacccttccatcctggtggatatcccatggtcctctcagaggngggtctgggcctacaccgggggatngttcctttgcggatcgntttccaaaggtccnttacctttggggcccca

SEQ ID NO: 311840 - DNA, 880 bp, Homo Sapiens
  misc_feature (870)..(870): n is a, c, g, or t
ggacatgagcaggggtgtgggcttggagggtgaagaggatgtggtcctatcagatgctgggcctcctcagccatagccccctgctcctaccccctgactggctcttgtgtcctcacctctcaccctctccttcctgggaggccctgggaggtgatcattgacacccagccaagcagacagctgcgggtgcccaagcccttgctgggcctgcgcgtgaggagtcccactgcttctaaaggaagtcctgggcaggaggtggctttggtggttggttccaaagttgaaaatgcttgcagtttgaccttagaagaagtgggaagaagaaggagctctacagggtcagctttgtttgatttgtccagtctaagaagtcccattgccaaagctttctgcaggagggtgaatgccgcagcttggcagcccctgggtttctcttggaaatggtcagtttcccctcaaagtacccaaagtagccttggcttgagtttttgtccttgcctcctttttagagaagagggcatttagactgcattttcctggttaaagaaggttaaagcaaatgtttattgccttttctagtgaactaactcgtagagatgttctcagcaggaagacagtcttagcactgtcacttagcagattgcacttaagtcccttgtgctggccagatggcgtggctggttgccttaatatgtcccaggacccctgacagggctgcctggcctctccctcgtgctcctcaagagcccagtccatacactgtggatgtcattgctgtcgggttaggaagtcttgtcctagaacgccctggctggtatgaccacagttcatggcggctcttctcgcttgggtcatggtcatcttccagcnactgctgtgc

SEQ ID NO: 311841 - DNA, 923 bp, Homo Sapiens
  misc_feature (252)..(290): n is a, c, g, or t
  misc_feature (299)..(551): n is a, c, g, or t
gttttcccagatttacaagccactggagaccccttttttctgatacaatgcacgattctctgcgcgcaaggaccctcgactcacccccatgtttcagtgtcacagagacattctttgataaggaaatggcacaaacataaagggaaaggctgctaattttctttggcagattgtattggccagcaggaaagcaagctctccagagaatgcccccagttaaatacctcctctacctttacctaagttgctccnnnnnnnnnnnnnnnnnnnnnnnnnnnnnnnnnnnnnnngagatggannnnnnnnnnnnnnnnnnnnnnnnnnnnnnnnnnnnnnnnnnnnnnnnnnnnnnnnnnnnnnnnnnnnnnnnnnnnnnnnnnnnnnnnnnnnnnnnnnnnnnnnnnnnnnnnnnnnnnnnnnnnnnnnnnnnnnnnnnnnnnnnnnnnnnnnnnnnnnnnnnnnnnnnnnnnnnnnnnnnnnnnnnnnnnnnnnnnnnnnnnnnnnnnnnnnnnnnnnnnnnnnnnnnnnnnnnnnnnnnnnnnnnnnnnnnnatgagccaccatgcccagctgctcctttattttaatccctaaatataatccctaaatatagttatatttcatacttagtttgtttttaaaaagttttctctgtagaaaattttaatcattcataccctttacctttaggtttttctttctatacattcagtcaggcactgggatcatctgtttacaggcattatatttatttggcactcctggaacaagtatatctaacccattcttgatttttggactattcaggtgaactatttgaggggtatggggtctagaagttaaaagatacgcatgtcttctgtcttttcccgacatcttctctccttcatgttctcgcgctctagcgactgtagatgcttagtc

SEQ ID NO: 311842 - DNA, 994 bp, Homo Sapiens
tttccagaaaagtgtttcttcaatggcagattctttcaactttataagggagatttcccccacaaaaacccgatctcttgtctctagatgaggtctcagatgcgagatcaactctaatacgaaatccatctgcaatctgggccccatttcttttcaatgcttgcgtggcagcactctcctccttaaacacaacataggcattaatatttttctgatcaggatgaattttacgttttattgctgccaactttttggatagcgttccctctgctggaatcagagaacgaaatcgtacagattctatttgtccatactctttaaaaaacgacttcagcttcttcttattacatgtaacaggcaaattcccaacaaacacagttctctcattctttaatctctcttcttcttggttgatttgaattttctttctttgactgacaactgtgtcttctgtgtcatcaagtatttttctatctgctactttaacaccaggttgagaatttttccttttctgcccttgtttctggtgaatttcttcttctaaatcagcactcgctagagcgctttccctgtctgccaactttttttctgcgttagtgtgtttcttcttcgctttcacttttttggcaggttcttgcgaaagtggtctttcaatctgggatgtactttcttcctcctcattccgtttcgtttttttgatggtttgtttaggcacaggcacgtacacgggttgaatctggggctccagagaactgaagagggacgccagccgaccggtgccacctctggaatggtgttcgccgcgaaataagctactggcgacctgtccaagcctgtagtcttccggcggactcccgcgaacgccgtcgtcaggattctctccctcctggacacttctctttctcttccgtttgctcatcccttccaaggccattcttactccaaagactcccagactgcagctgcgcgccagctcgcacttccggggttcccc

SEQ ID NO: 311843 - DNA, 1042 bp, Homo Sapiens
  misc_feature (15)..(15): n is a, c, g, or t
  misc_feature (43)..(43): n is a, c, g, or t
  misc_feature (56)..(56): n is a, c, g, or t
  misc_feature (201)..(262): n is a, c, g, or t
agggaaatccaacgngccaggggcccctttaataagccccttngggaaaaggaaanggaaacctatttccatcctttgggacttttcaaatactaattgggagtgatttttttcctttcctaaacagggaaaataatgttacaaaagcatccttttttgttatttgtttgcatcccctccccccacagccctggtgttttnnnnnnnnnnnnnnnnnnnnnnnnnnnnnnnnnnnnnnnnnnnnnnnnnnnnnnnnnnnnnnaaacatattggccttgtcatttgtgtgaaagtgggcaaagactggaatagagtaagacaactgaaaccaattttcatccttttactgaggaaaaaaatatttaatatttttgttatataaggaatagtgcctaaggcaggtacttatactcctgacctcagccccacacactctggttttataaagctataggacagagcagagatggaactgaaaaacagggtagaaaataacataaattggaggggaacagtgggatgcagaaagaatgacaacagccacatgtgccccagtcaaatacttttagtccctgcagcagaagatgccaaccaagtctctatactggctggggatcctgccatggatgcaggagaaaaaattcaatcacaagggagtaagtgacaacaaaaagaaaaaactctgagccacagctacactgggaggggggaggaccagattttgctacttctgtcacacaagctagaaaaaccctacctctcccattgggcaggcaacctgacattccacccagttccttgccttaccatactatgtattcctcctcttggagaattaagacctgggctaaatgctccactccaggataaggctgagcagtcctagttctctagactgcctcttttataaagattggattaaggtacgtgaaatggtgagaactgtaaagattttaaaaaataaagtagaacccagagaaaatgtcaaagctgccgccatgtagcaccagcaaccaattcttgcacttctcttccctgtctc

SEQ ID NO: 311844 - DNA, 772 bp, Homo Sapiens
tgttttttaatcattaagagtttttgtacaaaaagtgatggttttttttcttcattttaaaacaccagggtgtgggggagggatgcaaacaaataacaaaaaagatgcttttgtaacattattttccctgtttagaaagaaaaaaatcactccaatagtattgaaaagtccaaagatgaaatagtttcattttcttttcctaaggcttataaaaggccccctgcctgttgattccatccctcttttgtgtccagtggagccatgttactcttcagtggcccaggggttcactattaaagaaagatcagtccaggtttctgggcacatggcctaaacaggaagatggaagcatcagaggattaaaaacctttccccacagaaatgtgggcaagaagacacttccctgagccagcagaagggacaggtgcagcagcattccacacccagcgcagaggacagcagagccctcgatgtcccacttctgcttccgttccctttctagaagattgaaaaaaaggtcaaaaccacatgcctgtggagaaagtgcgacatgtttagaaatactggtagggaaccaggagtaagaaaagctttaccagcttttactacaaatggatgaaagacatcaggatcccacctccgcaaggtaaagtgacttcccttttctggaacccctgtggcacaggagtgccaattttcctttccaacgaactggatttctggataggcattttggctatgtggacagataagaccacagtccttagccccc

SEQ ID NO: 311845 - DNA, 608 bp, Homo Sapiens
tacagggttgattgctttcatgttgttattctgtaccctatagtagcctccatgagaatctggtatttcttgctgcttggaactactttgcagtgattacttggttgcagtccaagtactctcgtttagtctgagcctggagatgttctagacttgcttctcccacctctgagattaggacaggaaaaatgtgaaatttcccaattacaggattatacggtaccatcacatcatttgtggaaattggggtgactgtatagctgggattgggctaaggactgtggtcttatctgtccacatacagccaaaatgcctatccagaaatccagttcgttgggaaaggaaaattgggtactcctgtgccacaggggttcccagaaaagggaagtcactttaccttgcggtggtgggatcctgatgtctttcatccatttgtagtaaaagctggtaaagcttttcttactcctggttccctaccagtatttctaaacatggtcgcactttctccacaggcatgtgggttttgacctttttttcaatcctcctagaaaggggacgggaagcagaagtgggacatcgagggctctgctgtcctctgcgctgggtgt

SEQ ID NO: 311846 - DNA, 366 bp, Homo Sapiens
  misc_feature (284)..(284): n is a, c, g, or t
  misc_feature (295)..(295): n is a, c, g, or t
  misc_feature (297)..(298): n is a, c, g, or t
  misc_feature (304)..(305): n is a, c, g, or t
tttttttccaattttcatccttttactgaggaaaaaaatatttaatatttttgttatataaggaatagtgcctaaggcaggtacttatactcctgacctcagccccacacactctggttttataaagctataggacagagcagagatggaactgaaaaacagggtagaaaataacataaattggaggggaacagtgggatgcagaaagaatgacaacagccacatgtgccccagtcaaatacttttagtccctgcagcagaagatgccaaccaagtctctatanctggcttgggngnnaatttnnccccccccttttttggccatggatgcaggagaaaaaattcaatcacaagggagtaagtgac

SEQ ID NO: 311847 - DNA, 983 bp, Homo Sapiens
  misc_feature (400)..(400): n is a, c, g, or t
  misc_feature (509)..(518): n is a, c, g, or t
  misc_feature (936)..(936): n is a, c, g, or t
gttttggtctttttgtattttctgctgtaagcctgtatgattatgtaatggtgagtaaaattgctaggccagatatgcagttctaggaagttatgcaaagatgtgctttagtatattattttctacctttttaaattcattttgagcttggcttttgagcctctattttccaaggtggggtgtatgtttttataatgttatgcttagcccttgtgtattttcatctctgagtttgaaatttggggttatattggcaaagggaggtttgggttttaattaggtgacctgttagaggaaatgttaagcttctgtttctttagggtagacagtgagagatttatcaagataaagaagaaaaataaatcctagagttaatattcaatacatgatgatgtcaccncttactaaagccaaagagggcattatcctatcattctcatcgctaagaactcttctcctcttggcacgtgcttattcagttaaagataagccaagcctttcttttgtannnnnnnnnnaagagaacaaatttactttggttttgagttttattcctggccctgggtagcttatttttttgacccttattttccccaatttataaaatgaaatagttatcttcactccccaggattgttgtgaagagtaagtcaaaagataaaatgaggtgactcaggcaaaagtacctggccctgtgtagtgagtacattgtatgtgttacatatattcttattgctgagaatccacgaaagaatgaattaaataatgaggaccctttcatcaggcttttttgagtgagttttttaaaatacaaggtagtagtttgtgtaaatactaaatccattggtacctgtgcagaatgtaggaaatggagttgctaattccaaaaaaacagcacatatgctgaggaaagtataatacctaatatatatggtntaagcaatgtaaaattccatgaatatgttccttttcatcttaaaatt

SEQ ID NO: 311848 - DNA, 520 bp, Homo Sapiens
aagctaaaggttttgaatttttcttgtgacatttaagtcttttattgtatgctgatttttatgattatctaactgtttcataatggttattcttgcctccatgaaagggaagtctagaccaaaaacctgacaagaccaagttctagctccatcacggacttactgaatgaccctaggcaaatcatgtgggctctttcttgtgttttaagttttacctccaatgaagtaactacctcagactagctgtgaagctctcataaggtgatggatttgaaaatgccttgcaaagtatcagctattcatacacagaaaatttcacgtacttctatatattgcatgatgcccacccagggttaggttaacagttgttgatccaattatgaaagaaataaaaagaactctttaaaataatgaagtaaaatagctaattttcccgttggtttaccatatgctgtatttaaaagttttaaaaattatactaactatatagctaaacatatttatgtttattatatataat

SEQ ID NO: 311849 - DNA, 711 bp, Homo Sapiens
  misc_feature (17)..(17): n is a, c, g, or t
attggaaagtactttgnacataatagcaaaaacttatattaatattaaagaaatgaaccaatagtttttcattccacaactacactcatcccaaggatacccaaagtgaagtcgtctgtgtttgacagcagccacaatcaatttaattttagaggctgaaataaaataaggcttgtggcttttgttcattaaagatgaaaaattgtttcattaatttagaatttggaaataatattttcaaatctgaaaggaaccacatcttgttggctaaacaccccttttagttatcctaacactaaagagtaaaaacagtctttgcttgacttctgcctatcataatgtttaggttaaattcagactttgcttctactattgacgaggggttaaaatccaaagattccctaaaaagtggtaaaccaagggaaatataagaaaaataaatgggaattagatttggcataatagaatatttaaaaatgtttatttaacatgaaagccacaaggtcatttagataactacaaaaggtcaaagttcccacatagccatcaccataagtatttcagggtttaacatgtgagttataaactctgtaaattaggcacagttggtttaaagaatcttgagattctgggctggctaattagttatcttgcattcagactgcatgttatctaagatactcactactgcaactttcacttaatttctta

SEQ ID NO: 311850 - DNA, 1107 bp, Homo Sapiens
  misc_feature (1028)..(1028): n is a, c, g, or t
gggaacaacacccttgatgcagaagatttagcaccactatccccgttccatctgggcttatatgtactttatattatggtggtgaaattgactgatgattttcctttctcttcgctggactattgtgccaactgccaggctgcctcctacccttacagccctaagtggctgccttctttccatcaactcccaacttcttcctgtgaagtttaattgtctcaacgcctccccctcccccattccctccatttttctcccaagaatcctgactcaattatttgcatattttgagaaactgctgcagattatttctttttgccagttttccctggaactcctgtccttttgtggaggggagggatggagagaataggaatcttcactagaagccgtgggaagaattggaagttacatgctgtatatgcaatgtccagcagtctgataaactgacgattcttaatcaagatttttttcctgatggggaagggacttttattttcttttagagaggggaaagtgtgagctcttcccttattcctaatggctatttttgaagcaaagaaggccagcaacattggcacatgccacctggcaaaggacccttgagtaagtgaaggtctcctaaaactgggattaagaaaccttgctctcctcatctccaaggcagggaccatcaagaacctacagactccatctcttctgcaagcctcatgccaaccctgggctattgctgctgccccttaaacacaggctgtccttaacccacctctcctgccctgtgatatgtctgctgagttggcctggccatttccaagaggctgtagaaaggggagaatgtcaaggaagacttttggtagagaaggagcagaaagatgtgtttttgggaagaagaagacctctaggaggagctagtaggaatgtacatgaagcaattagtctgaaactggcttccccactcccccgtttctccttttcctatccttataggcctgtcccttgcctctgccctggattggttgggcaaactnaaagggacttggatgttacataaacttcctgttccctttttccctttacaaggtgggggattggcccctgggtttggct

SEQ ID NO: 311851 - DNA, 597 bp, Homo Sapiens
  misc_feature (502)..(521): n is a, c, g, or t
ggggaaatacagagtgctcctcattctccactgtgtgttcagttcattctccagttctgttaatttacgagaagctttcactttattggatacatcttgaccttgtgaaaaaagacgctggcgttccttgaatgtcaagcaggggccccagaacttccaggtgaatctgcatcttggcttttagagcgcttctcttttgcatcccgacaggcgtcatgggctccaacagctgctccagtagatcctgggtaagagtttggtcctttgcagtggctgggatggtaggagctggatttttttggagggggcaggggctggccttttttgtgagcagtactgttggctttggctgagggtggctggaatgagttggagagaaagacgccatcggaggccgggcgtggctggcaggggggtgaccgtggtttaagaggggcaggaagaaggtccccatgagactttcttgtgctggagtacttatcctgacctgctaggctgcagnnnnnnnnnnnnnnnnnnnnattgtatgcaacaaacttggcagtgaacagcgagtcgggggagaggacctgtgttttgaggtaggaggcgtttcgc

SEQ ID NO: 311852 - DNA, 1395 bp, Homo Sapiens
  misc_feature (27)..(27): n is a, c, g, or t
  misc_feature (44)..(44): n is a, c, g, or t
  misc_feature (60)..(60): n is a, c, g, or t
  misc_feature (78)..(78): n is a, c, g, or t
  misc_feature (85)..(85): n is a, c, g, or t
  misc_feature (369)..(369): n is a, c, g, or t
  misc_feature (386)..(386): n is a, c, g, or t
  misc_feature (1200)..(1219): n is a, c, g, or t
  misc_feature (1301)..(1343): n is a, c, g, or t
ttccggagtgaacagctgtgcctgganggggtcccccaactccncctcccccatcctccngtccatccccagtccacnggaaccntgccccccaataaagatatcttcttttaacagacgccttggagcgaagtattagtgaactttccaaggtaactgtcatctttaaatttaacagtgatttattaagtctaacaataatctggtatttataaaaataaaatcccctaagcttaaatcctcaaaattttctttcagaattaaaattaatcaaatatttagaattgatcagaagagctcaaatttgcgaggaatgagatggaacagtctcggacgtgcgtcatcacacaggaagctttgcctaagccnactttcacgatgcaganctagaaggatattgtgggaacagacaccatcaggggacatgggaggagcatgtcgtcatatgttccttcccgggtagaagagcgtgtggtcactactaaacagtgccaacaatagtctgaatagttcaagctattctctgcttgacagctaaaataaagtttctgaaaaaaacagaaacagaacttctttgtgctcctcggtcgatgatgaggggaggatgggggagaagacacatccattctcttctcctgcccttagttctgtcccctttgaattcaggcctccaaaaaagaaacccaacaaaaaaacttaccctcgtgtgagttagataattaagaaactagacagtgtttaaattacataaatggcaatctcatggtaaagtaaaataaaatttcttggaattgaaacatttctaaatcccaacaattttagaaacagaaattgtaaatcacttagaaatataacccccttcctcttttcctcttcaaactcgcacctacaaacccacaactgaaaagattttggggtaaatacaaagtgttctcctcattttctttcactttgtgttcagttcattctccagttctgttaatttacgagaagctttcactttattggatacatcttgaccttgtgaaaaaagacgctggcgttccttgaatgtcaagttttcaggggccccagaacttccaggtgaatctgcatcttggcttttagagcgcttctcttttgcatcccgacaggcgtcatgggctccaacagctgctccagtagatcctgggtaagagtttggtcctgctaggctgcagnnnnnnnnnnnnnnnnnnnnattgtatgcaacaaacttggcagtgaacagcgagtcgggggagaggacctgtgttttgaggtaggaggcgtttcgctgaggnnnnnnnnnnnnnnnnnnnnnnnnnnnnnnnnnnnnnnnnnnntcgtagtcccggggaagcggagggcggcaccctcgtgccgaattcgccaccc

SEQ ID NO: 311853 - DNA, 990 bp, Homo Sapiens
  misc_feature (783)..(802): n is a, c, g, or t
  misc_feature (884)..(926): n is a, c, g, or t
ccccgggtaagaaagaacctttgggtcccttatttaaaccagggcccaaccaaatagttcggaataagttccaaggttttctctggcctggccaggtaaaaataaagtttttggaaaaaacccggaaccccggaccttcttttgtcctcctcgggtcgatgatgaggggaaagatggggagagaaaggacaccatcccattcttcttctccctgccccttagtttctgtccccctttggaactcaggacctcccaaaaaaagaaaccaacaaaaaaacttacccctcgtgtgagttagataattaagaaactagacagtgtttaaattacataaatggcaatctcatggtaaagtaaaataaaatttcttggaattgaaacatttctaaatcccaacaattttagaaacagaaattgtaaatcacttagaaatataacccccttcctcttttcctcttcaaactcgcacctacaaacccacaactgaaaagattttggggtaaatacaaagtgttctcctcattttctttcactttgtgttcagttcattctccagttctgttaatttacgagaagctttcactttattggatacatcttgaccttgtgaaaaaagacgctggcgttccttgaatgtcaagttttcaggggccccagaacttccaggtgaatctgcatcttggcttttagagcgcttctcttttgcatcccgacaggcgtcatgggctccaacagctgctccagtagatcctgggtaagagtttggtcctgctaggctgcagnnnnnnnnnnnnnnnnnnnnattgtatgcaacaaacttggcagtgaacagcgagtcgggggagaggacctgtgttttgaggtaggaggcgtttcgctgaggnnnnnnnnnnnnnnnnnnnnnnnnnnnnnnnnnnnnnnnnnnntcgtagtcccggggaagcggagggcggcaccctcgtgccgaattcgccacccaggcctcgcccc

SEQ ID NO: 311854 - DNA, 547 bp, Homo Sapiens
agttgactctcggattgctgtacctcatatgtcaacaccgcagacggaggcaggaagtggcatgttcagtgattttgctaattatacttacgtagatgcagctgtatggtttaatgcttatatgaaagttgcatgaaatttgtgtaacatttagttttaagatgatatctttaaatagataccttagctgttaaaactaagtgatatatctgcactatatgctcaacaataaaaaggaacaaactagtgatacatccaaagccttggatggaactcaagggaattatgctgagtgaaaaaaaagccagtctcaagagggtatatattgattccatttatataacattctcaaaataacaaaatgactgagatggagaacagtaagtggttgtcagggattaaggagagggccagggagagaggtggcaatgattatgagagggcaacacagggggatgcttgtaatggaagtcttccgtgtcttgcctgtggtggtagtcacatgaatttacacacagggccaggcgcagtggcccatcccttaatc

SEQ ID NO: 311855 - DNA, 698 bp, Homo Sapiens
gatttcctgttgtttgttctactaggttgaaaatgtgggccagactacttacacatgcggtacatgctgaatataactgaatatatgcttattcctacagacattctgcaagatagggatcacccaaaatagggtcttcaatggactggaccagtgtttcaatgcaaattccagccccccaaaacaacatggttttgatttcacagtatgaattccctggaatccgggaaaaggtaattggttaactgaggtcctccctcagcagctcggtccctcgacattctgagaaatcaggaaggactgcaccacttcttcagtggactgggggctggtgctgacatcttcaagagcatctgtcactgaatattgccgatctcgcaaccggttccagttagacagaacattgtgatattcacacactttctcgtaatttccaatggagttgtaaagtttaatgagacctcgataatcatattctagtccactgtagccctcaccaaaaagtttcttcccaattgctatagatcgcaaataaagtttctcagcattttcatactgattcatgtcataattatataaagaagccagatgtccccctgaaagggctacttcataatcttcttgaccaagaagttgttctttaatctgaattgctttgatgtgcatttcttcagcttccttaaattttcccattgact

SEQ ID NO: 311856 - DNA, 1062 bp, Homo Sapiens
  misc_feature (82)..(82): n is a, c, g, or t
aatttaaccattctactatttcccctaatatatatggctgggcaccccagagaaaagcttctgcccccgaaaagagactttntacataggggtaagcttcattaaatgaggtgcacctttcatttttcagggcatctcttttcttgcaaggtctttagaggcagaagttccacttggattctaatacacatctctgtgagctcagtttcctgaaaatatacacctactgggttctaggttctcccttaccagtgactgtattcattatttcacagccaccagaatcggacatacactattaacatgatgaaaaatacagctactgctgcaagtttggcataagtggaacgccatgttcaaagtacttcgcatcctggcggtatttcttggacagactggaccaaattgttagcctttgaatccaatgctgagagtgcttctcctcgttgtaacacttcttcaatattggccaccatgatcctctgcacatcttgcaattcagtgttgatggagcctagatttcttcgagcacgactgtcaatgtagagcttcttggttttctgaatgaaagtatcaaattcaataaaggaatagggtcgggacacagtgggcaccttctttccatgctgttcatcaaattctgagtgcaaatcttctaggtaggcaaaagccaacttcttagggaaggcagcttcacataaaaccaaataacacaccccctgctcaataatgtagtgaaaagtcatggctcctgcttccaaggtacatctggtaggggactgttcattcaactttcgaaagagttgcttagcctgactctgatactgttgaaggtcccggccagactgttcgtcctcctgcatcgaggcggccagcgggagcccgtccgccactcgggcgatcattgttagcaacaccatcttcacaaactacagggatccaacactggcccggaaggcccttggcgccgtcctcacttcctccgccgcgacaacagttataccctatgtctcagttaccggagatccagctgcttgcgtctccgcttcccgctgaggtccc

SEQ ID NO: 311857 - DNA, 899 bp, Homo Sapiens
ggcactttatggttgcgttcatggtcatgacagtttggggtactatgaataggatactcatttccttccaaatctaatctatatctggaacggtcactaggtgttggaagcaactgtacatcatccccaattggactataaggaggtggtgtcttgaacttctgatagaaatgctcgaagcattcccatcgaagctttccgttttgcagagtaaactaatatatacccatgaactagttcatcttttcttactccaattgaagagtggtatgataatattgtgatctgtattcgcctccttttttcaccaatgattttatcaagcattagggaattattctgtccagcttgagcagcactgcaagaatgagaatcaaggaagggtgaaagaataagatccacactaaatggatctccacacatggcgcacatgacaattctcaagtcagcttctgaataagtccttattggcaggaattgggctcaccacatccaaattgtgtttaactgattccaatactcctctgagagcttgctttatttgggtttcattaaatttacgaggatatgtaccagcaggtacatctacaaaaggacattgcaacttgtttcccaactgctgcccttggtgcctgagaattggtagattcttactaatggaatctctctgattagccagaattaatgtaaatggaagattagccatgtatttatcttttctgatctgagaagcttcagttcttattttcccaataaattccccaataaaactcaatgactcaatggaattaaatacacagaagcacccatgtggtttaaaggcggcagtccataaccgactcaaaaagtaaggcgatttggcatcaaccggccgaagatcaagttcataaatttttcca

SEQ ID NO: 311858 - DNA, 1108 bp, Homo Sapiens
caggaattctctatatttgtgattatgaatccttcatcagttatttgtattataaatgtcttctcaagttgtggatcatcttctcacttcaagtgtttgcttaatataagccttgagttttaacagaattgacttaaccatcttgtcctttatgattactactttatgtctcaagagattctttcctgccctaaggcttttttcatcccaaacactgacaatttttgctttttgtattaaagcccttaacatatttgggaacttatcacccgggtaaggtgagagaaagtaaaatttctttttttcccacatggaataggccattgttctgggattacttagggagtggtccttcctgtccccactgacttgccatgtcaccaggtcattttgcaaaggtcaacatatgcacgggtgagtttctaggcccttattttgttcccctgctcagaatgcctacctctgcaccatgacactgtcttgacaataaaacttggtatcacatagggtgcgtgtccccaacctctccttcatatttagaagcatttggtaattttaagtcctttgctactccatataaacacctgcttgtttcattcaataaaatctgttggaatttccattgaaaatggtattaaatccataggtcaattttaggagacctggtacctttataatcttgaatattcctattcatgaacaaagatggttcttcatttgttcctcccttgcttcttcgtcttcatccttcgaatcaaaccaggactccaatgctaccttctcctgactattgccaccaccatcttgaagtaggatgagtgtatattttgcatgcaaatttttgaaataactgcaatcatccaagaaaaagatgacatgggtgagtttgaggcttgttgcttgagtggtggcaccattcttcattactgaatatattgagaattgaggggaataaaatggtaagaaatgagtgactttatgctgcccacttgtccaactccgcacgggatatcagagcccaactgagaacctgctcaatcctggaaacaattaaaagatgttaaccggccaggctcggtggctcacgcctgtaatcccagcattttgg

SEQ ID NO: 311859 - DNA, 355 bp, Homo Sapiens
  misc_feature (304)..(304): n is a, c, g, or t
  misc_feature (325)..(325): n is a, c, g, or t
  misc_feature (331)..(331): n is a, c, g, or t
ccaccactcaagcaacaagcctcaaactcacccatgtcatctttttcttggatgattgcagttatttcaaaaatttgcatgcaaaatatacactcatcctacttcaagatggtggtggcaatagtcaggagaaggtagcattggagtcctggtttgattcgaaggatgaagacgaagaagcaagggaggaacaaatgaagaaccatctttgttcatgaatagggaatatttcaagattattaaaggtattcaggtctcccttaaaatttgatctatgggttttaatacccttttccaatggganttcccaaccggttttatttgnattganaccaagccggtgttttttatgggg

SEQ ID NO: 311860 - DNA, 899 bp, Homo Sapiens
  misc_feature (44)..(53): n is a, c, g, or t
tgtgtactgtaattctttgattgggatagtggaaactctagccnnnnnnnnnntgaacacagaagtacaagacaaaggcgaatgagacttctcttatatctgagtaacattaagatggacatcaaatttaaatgcagtccactctgctttttgaagaggctttggttcagctcccaaatctcgattgcttgacgcagtctcctatgagaatactcagaaggtgtcttcttaaacaacaaacctatttttagtggtggagccgctcttagtagctgtgtctgcgtgggactgataaccaatcactatctttggaggaagtcctaacctttccttgtataccctccctatatgtgtaacagcttctctgttttcacattcagtagtccatattgctatcttatcacctttagctctaacattaacaacagcgccacatacatcatcactgtagtcatcaaaagattctccaataaggcacagaagtgtctctagccaaaagcgatcgaggtcacttcgtctctgctgtttgttcaatgtaattagccatcgtcctccccgtttgtttttctcatcttcccacataggctcaataccatccttaaaaagtgagtagtcacagccaggcattaaattactagacaactggatatggttgtacagagcccaaaagtcttcaacagtatcaaacttggagatcagccgcaggtttgcttgccaagttttgcttttatcatttttaaaaaaccagagtgcccatctgttctgtaggggatgtttaatatagtgttctgggttagcaacctcctgattagattccgttttctcctcttctgtagtcgggggattaggagtaggggtggtttccggttcgacagtcgccatcttagatcgatctcccc

SEQ ID NO: 311861 - DNA, 1260 bp, Homo Sapiens
tgggccccttcttaggcggggaagttcaaatattaattggaattttacccggggaaggagtagtttaagggccgaaggtaaactgccatgtggtgcccaaggtaaattaaccccgggatgcccaccaaagcaaaatgataagccagaaaacccctggcacccaaataaaccaaaggcaagatttgccaataatggcaaaaatggaacttttatattgggaccatcctttttccccacccaattcagttgagacagaccaacagaggcactgtaagagactatggctgtcttccttgatattcagacatcctagtttccaataatttattatggacctgttacccatgaatcaatataaacctattcatatttagggattagtttccacaagtacaaagttgaatttccttttatttgtcctaaaatgcttactttcaaacttgaagggacttcaattattccatgtagttttcgataacattcttttatcttttcagaccagagtcaaaatattcgtacagtattcatactgcagcaccttccacccaccctttggtcgcttgaactgcccttctttggttctttttccgctttcagatctttcttgaagtgtagtaagcagaactgtactgggtattccagctgcagtttggtctatcattgtcggaatggcttctgctacgccgtggtcttccagtcggtctactgtttctaggactatacgatcttctatagttgtaatcaaaagaccgacttcttgatctcctcctttcataacttcggcttctagaacgtctgtatctgtcataatcatcatagcgtgaagaactgtacacattcctcccttccttggctttcatctgatttggtgtctttcgatccccctgggcaaactgtatttcaatctgccgtccacaaatccactttctgtccaaattatgtaaagcgtcttcagcatcacgaacatcctcaaattgaacataagcaaatcctcttggacggcgagtgtagaaatcaagtggaacatacacatcaactataggaccataacgaccaaattcacgccgcaagtcttcagacctggtgtcgtcggccacgttcctgacgaacagagacgtgttggggggacgcaggtagcgggacatggcggcggcgtgtctcggccgggcgcactaacgggctcagcaaaccgtccgcggctcaggcggccgagcctcagacacacacagctagagggctctgctacggcaaccgactctt

SEQ ID NO: 311862 - DNA, 434 bp, Homo Sapiens
aaggatcttaataatttaaacattttattatggacgaaaaggagaggcttgaggactcaagcttaaaggcaactccccaaggccaagatgagccagggaaggtgaggttatacctgagccttagcaggggccatgcagagctgggatgtgatcggtacatggtggaagtctaccgtccgtctcagccaagcctggagagaccagaagcaacacaagaccctacaaacccacctatggaggggcagggagaggcccaggtcaggccaccctcacctttcagacaggaggcacttggttctctaagatgaagaagggcggctcccacccagaacattctgtgtcgcggagaggaggtttcgcaatagcatcttccccaacctagaaatgtctgaaacctggacaaagacagacactcaaagaggatctctgcgggc

SEQ ID NO: 311863 - DNA, 914 bp, Homo Sapiens
  misc_feature (168)..(178): n is a, c, g, or t
aaaatgtaactttttaagggagaaaaaaagaataaagaatccatgacaacccagatttgaaattcttaggtatcacagaaatttaaaacaaggcctttttaggtaacaacaactagagctcagtggtacaacctttgcctctcaagctggtcttagaacatgaagggnnnnnnnnnnnctgaacaaatactacctgaattcaactactacctgaaaggtaccagctgccttgcattcacttgtcatcaagatgacttaaggaatactgcggtgtgtgcccctaactaatgaaggctttatctccacattacagttacgatactgaagagacgtaacctgaccaaggccacagagctggaaaaagaagcaaagccaagccgtttttctcatgcactgctcacaacaagcccctccttccactgactcatgaaaaacacactcataatgcccagcccgcaccctaatgaacagccctcttaagagtggtcatcagacttcaatttcacagactagaattgagaaatggaacaaaaccttgggataccagccttccattttggtagggatcatttaaaaaatggtagggatcatttaaaaaatgtgttggtgtctgaaacttactttgaagtggttaaaaaacataaaatgtatagattgtaacaagcaaatatgttaaaatgtactgtacaattctttctttacaatttatggatgttcgaaatttaaaaaatactagaaagagaatggtcttatttaaaagaaatgcatcttcatttaaagtttccactgcagaccattgaaaacaccatcatcaacatttaaaaacccctaaatgtgggagccactgatctagatgccatctggacatcccatattgagtatgtctcctacccaactctactctcaccaccctc

SEQ ID NO: 311864 - DNA, 721 bp, Homo Sapiens
aggccccccatcttatgagtccaaaaatgaggtgctcttacactccaagtcctttagaccttccatacaaaaattctgacaaattatcttcaaaggaagatatctagctcaggctatcctctaaagcaaagagaaagtgattgatttctgctcagtcattacattgggacctttccgaggcacgtggttaagtcccaggcagcactgctagccggtctgtgccagaaatttcacgtactgccgcgggcttcaaaatggtcagcgggccggttgtacgctgtccacaccggttctcccacaaacagccgcatggccttcgtgtagttcttctcgtccaccgtgacgcggtgatagatccccgcggggagcgtcaccatgtctcccctccatgaagatccggatccactggtcctccttgtccctcacatcgaagtacccactgccatccaggatgtcttcataaggtagtttatctttgcatatggttatgatgtccatccaggagtagttcctctctcttcggatcctaattctggatcattctcatatttgtcagcatccagcttccagtagagcaccccgagccgccgcagctgctccaggcccactgggcggccggggtcggggcggtggggttgccgcgggtcgcccggggcgtcgtccatataccaggcctgcaccatgacgcacagtgcgggtgccgtgttcgcctgcagcccgg

SEQ ID NO: 311865 - DNA, 1693 bp, Homo Sapiens
ctccatttaaaaaaaatcagtagatcagcacttattttaattactgagatagagtcacacttgacagaagcaagccctgcggtatatggcatcatcacaccaccggtgggtattttaatcctaaaactgagacagagtttacttaaacatttaaggcttgagtttcctctgtacagtgtggaggtgattaagaaaattaatcctaacatgaagatttttcatccagttaaaaaaagaaatactttaaaaacgacctgcccttccaaaacatgaagttaacttggagtttttctgtgatatgacaaactaggcataatcctatctcggaattgttgagtagaaaatttatgtactaatactcctgttaaaattcaacagctttattgtgaaagaatccagagatctcacactggaaaaaatactaacacagctcatatataaattacttatctataagaacaattatagaaggaatctaaatggggcaattttaacaaaccaggcaaaatatcacatatacctgaatataaggtaactccaagccatgagtataagattaaggcagttactttattttgaacaaggaagtggcataagcaactcagtgtgtgccccttagggtgggagctcttccccctaccactccccaccccaaggcatcattttggagaaaaaagtgtcttctatctggctagctgtgttatctaggattgcaccttcttacacggcaggcgcggcatcacgtccagatgggcatctaaggaactgcatttcgggagatgaaactttcatttgggactcaactgaatgcatgaactaacacagggccatggacccaccagtcttgattgagttacagaaaatgaaggtgactctttacacttccaagttgctttctagatcctttcattacaaaatattctgatcaaataatcttacaaaggaaagataatctagcctcaaggctatcctctaaaagcaaagagaaagtgattgattttctgctcagtcattacattggggacctttacgaggcacgtgttagttcccaggcagcactgctaggcggtctgtgccagaaatttcacgtactgcccgcgggcttcaaaatggtcagcgggccggttgtacgctgtccacaccggttctcccacaaacagccgcatggccttcgtgtagttcttctcgtccaccgtgaagcggtgatagatccccgcggggagcgtcaccatgtctcccttctccatgaagatccggatccactggtcctccttgtccctcacgtcgaagtacccactgccatccaggatgtagcggatctcatcgtccaagtgcaaatgctcctcgtagaacatcttaatcttttcttcataatttggtagtttatctttgcatatggttatgatgtccatccaggagtagttcctctctcttcggatcttttctaattctggatcattctcatatttgtcagcatccagcttccagtagagcaccccgagccgccgcagctgctccaggcccactgggcggccggggtcggggcggtggggttgccgcgggtcgcccggggcgtcgtccatataccaggcctgcaccatgacgcgcagtgcgggtgccgtgttcgaacccaggggccgcgctcggagcccgtcggccgcgctttgtcttatagggaggcgtggacgcgcat

SEQ ID NO: 311866 - DNA, 587 bp, Homo Sapiens
ggaactgcatttcgggagatgaaactttcatttgggactcaactgaatgcatgaactaacacagggccatggacccaccagtcttgattgagttacagaaaatgaaggtgactctttacacttccacattacaaaatattctgatcaaataatcttacaaaggaaagataatctagcctcaaggctatcctctaaaagcaaagagaaagtgattgattttctgctcagtcattacattggggacctttacgaggcacgtgttagttcccaggcagcactgctaggcggtctgtgccagaaatttcacgtactgcccgcgggcttcaaaatggtcagcgggccggttgtacgctgtccacaccggttctcccacaaacagccgcatggccttcgtgtagttcttctcgtccaccgtgaagcggtgatagatccccgcggggagcgtcaccatgtctcccttctccatgaagatccggatccactggtcctccttgtccctcacgtcgaagtacccactgccatccaggatgtagcggatctcatcgtccaagtgcaaatgctcctcgtagaacatcttaatcttttcc

SEQ ID NO: 311867 - DNA, 1574 bp, Homo Sapiens
  misc_feature (605)..(605): n is a, c, g, or t
  misc_feature (1468)..(1468): n is a, c, g, or t
gagagatggagcctgctcagttccaggtgttaccgagaacttagggcaaagtttgtgggaggtatctgaaagccacttcaagtacccaattgtggagcagtacttgaagacaaagaaaaattctaataatttaatcatcaagtacattagctgccgcctgctgacactcatcattatactgttagcgtgtatctacctgggctattacttcagcctctcctcactctcagacgagtttgtgtgcagcatcaaatcagggatcctgagaaacgacagcaccgtgcccgatcagtttcagtgcagactcattgccgtgggcatcttccagttgctcagtgtcattaaccttgtggtttatgtcctgctggctcccgtggttgtctacacgctgtttgttccattccgacagaagacagatgttctcaaagtgtacgaaatcctccccacttttgatgttctgcatttcaaatctgaagggtacaacgatttgagcctctacaatctcttcttggaggaaaatataagtgaggtcaagtcatacaagtgtcttgaggtactggagaatattaagagcagtggtcaggggatcgacccaatgctactcnctgacaaaccttggcatgatcaagatggatgttgttgatggcctccaaggtatgaacatagacagtgaaactaaagcaaataatggagagaagaatgcccgacagagacttctggattcttcttgctgatgatttttttccttgagctgtaaatctgtgacttctgcgacatgggatttaatttggctaaagcacccctgttggtttcacagctggtttgcaataaatggttcttggtggagatactgagcatgtcttattgagtccctaatggaaatggtgatcaacaaaaggttatggaagaatggtttatgaacttcccataggaagcatctgagagatagtaaactgcagcaagtaactatgtgtaagtcctcatcaaatgaaaagcagaaagacaagaacaattagtcaagagcagtagccctgtcagagcctcggagcaatacctttctgtacccgtggtgagacaagacccagagctactggaaaacaagcactttggaagatttgttttgttttcatggaataataatatgtcaggatataatttaacgtgagtttcttatgtgcccttaaagactgttagacaagaaaagcattcactggctaataatccataggtcgacctatgtcctaagttaggtgtaaggtccgatgccttggcccacactcgagctctctttacattgttagttgtcaaccttggctgatggaaatcccgtaaccactatttgttgcactgtgccttgaagggcagcaggcccaagtgctgctctgactgaaaactgagttaacaagacgaaatctaaaggatattcacagtgacttcaattcaggaagaatgcttcctcaaagagttngtctacaggcggtttctctggtatcaaaggcatttgaaatagggatttacttaacaatattgaacacaggagttttaaagtgaagacactttgcctgattgtgaca

SEQ ID NO: 311868 - DNA, 720 bp, Homo Sapiens
  misc_feature (593)..(593): n is a, c, g, or t
  misc_feature (680)..(680): n is a, c, g, or t
  misc_feature (689)..(689): n is a, c, g, or t
atctgactattaattttaaaacttaaagcatacctgtttctttacaggtatatacagagcctgatggatttggtggaatccatgagaaaagcccagatgaccagaaagcattatcagagtaagctctatgcattagaataagtgtttaaaactttggttctttccagatagattcctaagatatttttagacctaaattaaaggaattcagctctgaataataaatcactaccctcttacacatgacaagttttggcttgttggtttttcagaagcgaagaaatatggcattgaaaatgatgctgagtgtgaagaaatgtagaggactcatttttgatcccccagggagacctatttttactataaatttactccaataatgagatgtgtaggaggatttaccattacatagttttaatacatttcagcgtcattggagactaaacattttctttcagagtaactgatagtttctagctacctaaataaggatcttttctaaatctgacaagaaattttgaaagttttttcacaatggcattctagagtcatctctagaatgatgatattagatattaatcattattttatanaagagaatacttaatgaatacatctgatgaatgcattggttataaggctaatagtttacatataagctagaaacaaatgagtctgtntgtgaaatnatctcctctactctagtggaagaatctgtag

SEQ ID NO: 311869 - DNA, 491 bp, Homo Sapiens
aatcctttaaatctaaatatataaattcaaagttaactgggaaactgttacacctatattagaatacataatttatatttgcatgaacatgtattctatttcttctgtacatgtttgcacattagcacaaaaatacaaaacaaagatcagattttgaacatatgaaagcaaaaacatgttttcaaatacatttgtaatagtggatttctggtctcctttagaaagcaaactcaagaattcgttatctcagtctcttcaaggccacttgatgttgtgtggtaatatctttaattacatttcctcaagacttcttctaatagcttcttctaattccacatcttctgtggatataaattcttctcctattgaagtatttttggcacccatgttatcatcactgtcacattctttggtgcgtatcagatatgctatttaacaaggcacacatcatatctccctctaagtggtgagggtttagtatatgagctggc

SEQ ID NO: 311870 - DNA, 761 bp, Homo Sapiens
  misc_feature (407)..(468): n is a, c, g, or t
ccttttctggactgtttgcttataggcccagagagcaaccttccttgcagaatgaaatgcaagggcggcaaacaatgtaccagggagagaatacaagatgggaatgaacagtttgaactatttgctcagcagaaaggcaccacaatgctggggtagtggttttcccatgcgtccactgtcccttctttgggatcttttgttgtcccctgtctcctttggccggataaaagcacagctgcagcattgcagataacaagtaggccgtacttatccccctaaatctcggggtgcctttactggaacaagttatgctcggctctcttttattttacaagaggatggtgagggagagaatggaagaacagagggggcggacgtataagacatttgacactgcctatgtctgnnnnnnnnnnnnnnnnnnnnnnnnnnnnnnnnnnnnnnnnnnnnnnnnnnnnnnnnnnnnnngcaagctgtgatcggatgcaatctttgtgggacatttaaatggaagggttcattgatgtgtattgcttgccaagccaaaatgttgcctttggggaaaagggagagaggtgttcatgggagtgcagggaaaggaggttttggggcagagattttgacttaaaataaccagacttcttctgggctgctgaaaagagggcaaaagttttaaatttgttcaagttttaaaactatgttcagttattgatttggccacttctggaatattaattttgggatttccccccttgcaagct

SEQ ID NO: 311871 - DNA, 1317 bp, Homo Sapiens
  misc_feature (1203)..(1263): n is a, c, g, or t
  misc_feature (1288)..(1288): n is a, c, g, or t
cgcacacacatacacctatacacatgcatccttttaaccaaaaggtaatacttcactggtgttaaaactaacaagctctactggacaatggcttcatggacattttagaggcagtcttaagtctgctgtgggcacaggcatgtcggatatgatttccctgcagggatgccctctcggtggctgtgggggatgcttgcggcccctcgcctgccagcgctgagctcagcctcacagtgagccgagatgaacaggtgctctcttctctggcggcggcggcacgtgaggtcggctccttgcagaacagcgtctcagtgggagacctttagcttcacggcctttccttctgaccacccagcaggaaaaatatacgaaagcgtttttttctgccagttttgtcgatgagacaaaatacaaaaacaaaaaaacacacagcattaaaactttgtatttcccacaggtgggctttggaaatgtttaccacagtcatagtaaaacactagttttcttcggaattaaattttttgcctttccaccttataaaaccattcaggctaaataaccacattacaatagaattaaacattgaagcctggctcccgaaatcaacatcagtgggaaaacccactgattcggaacacacacccaacagtgcaaatctatgttagattttgaatttaatatcaacttaatgtgactgtagtttatattattatcacatctactttcttttatatttaaaataggctctgattttagaagagcaaatgtaaaaaatattttgattatttgttgatgacatttactctgattataggtgtaatctatggcaattccaaaagtaccttgtatgtcccatctccagttcatcctgcttttaccctgagtccagcaacctctattcattaggattctgaacaaaataagcatgaaaggggaaatccaaaataatattcagaagtggcaaatcataactgaacatagttttaaacttgacaatttaaaacttttgcctcttttcagcagccagaagaagtctggttattttaagtcaaaatctctgccccaaaacctcctttccctgcactccatgaacacctctctcccttttccccaaaggcaacattttggcttggcaagcaatacacatcaatgaacccttccatttaaatgtcccacaaagattgcatccgatcacagcttgcnnnnnnnnnnnnnnnnnnnnnnnnnnnnnnnnnnnnnnnnnnnnnnnnnnnnnnnnnnnnntcagacataggcagtgtcaaatgtnttatacgtccgccccctctgttcttccat

SEQ ID NO: 311872 - DNA, 439 bp, Homo Sapiens
  misc_feature (136)..(188): n is a, c, g, or t
  misc_feature (223)..(223): n is a, c, g, or t
  misc_feature (369)..(369): n is a, c, g, or t
  misc_feature (405)..(405): n is a, c, g, or t
  misc_feature (412)..(412): n is a, c, g, or t
ttttatacttaataattttattacatgtacacacaaaatcatagcaaaatatgatatattttataggatttttttgtcttttcatgatgccatcgaatatttgcaaatgcctaaatggaaccctttcttcattctnnnnnnnnnnnnnnnnnnnnnnnnnnnnnnnnnnnnnnnnnnnnnnnnnnnnntgcatccttttaaccaaaggtaatactcactgggngttaaaactaacagctctactgggacaatgggcttcatgggacattttaggagggcaggtcttaaggtctgctgtggggcacagggcatgtcgggatatggatttccctgcggggatggcccctctcgggtgggctgtgggggggnatggcttgcggggccccctcggccctggccaggcgnctgaggnttcaggccctcacaggtgaggccgagg

SEQ ID NO: 311873 - DNA, 710 bp, Homo Sapiens
  misc_feature (26)..(26): n is a, c, g, or t
ataatctctgtaatgcagtggtatcnaataattaacaggatacaatttattacaaataacatatacaagattctatcaacatttaagcaatatgatacaattttgggatgcatattaataacagatttatcaaatacaactcaaagaaaattaaacaacatttttatttgatcagcttcctgtatgattttaatataccaaattagcctaatatgtttcttttggacttccaggggccctatttggacttccaagggctttaatgcccaaaagttagcttgaggtcgaaaacatttaagttagaattttacatttgattttggaaagtttgtcaaatatcaaaggtttaaaacacttgatcaaaataagattacaggtcactgtaagataatagttattcatttagccaaactgataattcaaaaatttcaaaaagcaaaaattttactctttgacagaggggagattcagttttccaaacaatcaaaagacataataaaaacagcattagggaaattctctcctcttattactaatattttttgcagtttactcaaaaggtaaacaaaaatcttttactatttcttattaatgtatacaaaaatcttgttcaaaagagaaatccaaattctaactttgtgccagtgtattataaatgctaaagctaattttaatacagccttataaacagatcaatccaattgcaattg

SEQ ID NO: 311874 - DNA, 472 bp, Homo Sapiens
  misc_feature (396)..(396): n is a, c, g, or t
aacattgtgtgtttttaagtataaatacaaatgattatgattccttaaaaaacagatttaccaagttctcgaataagacaaggttttacagtaaagctgtagatggtgggctacaaaaacgctttccttttcctcctattgctctgaatgcacttatcaaggcatgtagctcagggaaaagtgtggccagagattagttagaggtatccgagtgcacacttcctgggccttctgtaggagaagtcacagaagatgggagttgttgcgtcctgccagcctccattaggcatttaaattatgtggactgtacagtgaatttcctccaaggccatcactgtagcctcccgtctgattgataacatgacggacggtatccacctgtgcttgcacattggntccgacttgggacccttggtaagaatccccattcagactctgcatgttcatgaacatgtccccagcaccgggaggt

SEQ ID NO: 311875 - DNA, 507 bp, Homo Sapiens
ggaacctggagcactttctttggttggttaacgaagcatgcagatgtggaagcagacgttactattatccctactatggtcttctgtcatactgagacaggctgttttaattacctggttttacataggaaagaagaaatattaaggcttaaagtttgtaatgatcaatggctcataattcattaaatcttttcatacaaggaatttgtggttaatgtcatttcatagttgccattattttctcattatttgacttgaatgttaagccatttatttcatctccctcattcacataaagtgtagatatggattcaataagacaccaaaagaaagtaagatttacccagttaatatttaaaatcattgttcagtgattaggcattttctgccttttaaaattatttgactggagaaagagtttcaaaaatagcagagccctaaaccataaagaaactactactgtataatgaacttttgtttgtttttggagacagggtttcactctac

SEQ ID NO: 311876 - DNA, 676 bp, Homo Sapiens
  misc_feature (27)..(27): n is a, c, g, or t
  misc_feature (61)..(61): n is a, c, g, or t
  misc_feature (69)..(69): n is a, c, g, or t
tgacgcaggttagttcatgtggttaanggtcagaaacgctggccccttaacagagctgaantgctcccnacactcatcactggctctggagggaaaagacccactagctgtaacttctacaaaactttttttcacaaaatgtaaaacaataacaaaacctacctgccagggtgataatgccgtagcgtgactttaaaacttgtaactagcagagtaaaattctaatccctttctaaaagaattcttataacccttagcacatgaaatactgctctcaaaatacttccattcagattttaagcatcttgttcctcagccatgcaacaatttctcacttctctctcttcctaatttgttttctcattggctttccaaaggaaattattctaaaaaacatcagatgcttagtatagaatttggaaaggaagataaggttgagcaagttacatcatatgctctggtttgctgccaaagtatattgctgctgtgtttcttaacaggaaagtggacgagaattgttttaggcctgtgcttggcggggggtagtgaatcactaatggatttggggagagactgttcatgctgcttatgtgagccaactgcatatgcacaatcattctaagccttatttggacatgcaactatttttattccacaactggtaattttaaatttt

SEQ ID NO: 311877 - DNA, 534 bp, Homo Sapiens
tctgaaactagttctgtgttctcttcagtatcatttggtaatgtccaatgacactgaaaaatctcgcccaaaatgggattgtatggctttttggcaactgatcctttccttcccgcatgaaaggctgagaggtaccatttcacaacctgaaccattcgatccttgggatccttctggtcactaatgctcacaaacaggtccggatgtgcaaaaaagtctgcatacatttctaaaagagatcttctttcaagaataaacgttggaagaactaccttagtaagatccattccaagtctaacctgcgacaagagatgcatgataacgctcttgtgctcctccacagaccctgcctccgcgtcatcatctctgtcatcatgtgaatcaaacaggtcagcatcacttgttccattggacaaggaagaattaactgattctgtggtatctgggcgttttagactatttcccgagctgctgtgtgtcaggactgaggcagatccagaagaatctattaagcgctttggggacgcgccactt

SEQ ID NO: 311878 - DNA, 775 bp, Homo Sapiens
attttgatgggcctccaagattctcgctgttatctgcttgttcttatacttttttagatagcggggaaacaccaaacattcaggagttatatcagtcgtgatctgctctggtattaactgaggatctgggtttaaatgctgcatcttcagaaaggaaagaatattctgaacttctaagttgtaagaactgtccgccatggtcttgcctttggaggctaatctgcaggctgccatccagtgtgcatactgtttttcattgtcacaacgaagccagatttcattcatgccttctgcaactggaatcaggagtttaatgttaaatttttggcctgaaatgtttacatctggggtaacttcacatcccctgaggttcatctgatgagctggtgtgccactggattcttctttgctcttataacaagaaatggcatgtgtctttgaaaggtgcacccaatattgtttgtaacctttccagagtcagcttttttggcttgaaaactttaatgtagtcagcaagttcaggaatggaagtaatgtcacccaaaattgttgacgttttacccccttccagagtaatctcccaggtctgaaagggcagcatcaacttcatcaacttctttgtcactgttgttcaaatgattctctgatgtcatgattgacagcttattgatatgatactgcagggctgcaaacatcatcatttcttcttctgtgcattcaatctcttccaggagaagtgcccatttggcctgctcgtaaagctgattgattctga

SEQ ID NO: 311879 - DNA, 1129 bp, Homo Sapiens
  misc_feature (173)..(182): n is a, c, g, or t
  misc_feature (689)..(689): n is a, c, g, or t
  misc_feature (697)..(697): n is a, c, g, or t
ggatttccatggtggctgacacacttgtcatgtggtctgttagtgtttgccaagaaccattgcaaataaattgaacatcaaagatccaagtttgtactatccctaaagactggagataagcattggaggctcttttaaaaaatgctagttactgaattttgtattgttttacnnnnnnnnnnatttcaatatatacagtttgatgatgtgcttgaaattggtgcaaatatatacacacccttgtaagtgcaaagtatgtaagaagttttaacatttacttcacaggacttgtgattgtgttaaattctcactattgtgttttcttttgctcactgtttaggacaatttttctttaaaatagttttgcagattaaaattgcttaaataagtggattaaaaaactgacaatgcatgctactgttctctttcaaaaggaagagcaaccgtgttgaatactaataatgatgaattagtattcagtgtttagaatcattgggactacccacaaagtgagcatttctttttaaattttcttgacatttccaagcttattatgaataatattgcagtgtgtcttgtcagctgtaggtggcaaaggtgcccttataaaaaaggaaactggcttttcaaatgggctatgggagcacaagctgaagctttagtgccttctacaatgtggtatactggtntctagaantttatatgtgctagtcattctccattcatatggaatctagatggatgtttcatgcatacccatagagaagtgtgtaagtgatatgtcagaagagcttcttactgatttcacctataatgagaaggaagtcctgttttcaagaatgacattatagtcatgcagctttgggacacattagttttatacatgtgataattgaaaatgaaacatgttcttattttccttaaattgagagcataaatgatgtgcagaaattgtgcttaaggacttaggagtatatgggaggttattggttttatgtttaaggatacgtttacttgagtttaagatacaggtcattcattattcttaggctcactttttacacgaaagtgtgccaatagtaaagtgacagcactggtaatggttttccccagtactataacttgtggt

SEQ ID NO: 311880 - DNA, 407 bp, Homo Sapiens
aattcaagggaatttagtatgtaaatcgtgccttagaaacacatctgttgtcttttctgtgtttggtcgatattaataatggcaaaatttttgcctatctagtatcttcaaattgtagtctttgtaacaaccaaataaccttttgtggtcactgtaaaattaatatttggtagacagaatccatgtacctttgctaaggttagaatgaataatttattgtatttttaatttgaatgtttgtgctttttaaatgagccaagactagaggggaaactatcacctaaaatcagtttggaaaacaagacctaaaaagggaaggggatggggattgtggggagagagtgggcgaggtgcctttactacatgtgtgatgtgggctttttatcatttccttcttccctttaaga

SEQ ID NO: 311881 - DNA, 880 bp, Homo Sapiens
gttggttagagatacagtgtgggtggtgggggtggtaggaaatgcaggttgaagggaattctctggggctttggggaatttagtgcgtgggtgagccaagaaaatactaattaataatagtaagttgttagtgttggttaagttgttgcttggaagtgagaagttgcttagaaactttccaaagtgcttagaactttaagtgcaaacagacaaactaacaaacaaaaattgttttgctttgctacaaggtggggaagactgaagaagtgttaactggatgccatctcacaggcaggggaaatgtctttaccagcttcctcctggtggccaagacagcctgtttcagagggttgttttgtttggggtgtgggtgttatcaagtgaattagtcacttgaaagatgggcgtcagacttgcatacgcagcagatcagcattcttcgctgtcccttagcaacttaggtggttgatttgaaactgtgaaggtgtgattttttcaggagctggaagtcttaagaaagccttgttgcctatattgtgggcttttaacgtatttaagggaccacttaatacgagattagatgggctcttctggatttgttcctcatttgtcacaggtgtcttgggattgaaaatcatgagcgaagtgaaattgcattgaatttcaagggaatttagtatgtaaatcgtgccttagaaacacatctgttgccttttctgggtttggtcgatattaataatggcaaaatttttgcctatctagtatcttcaaattgtagtctttgtaacaaccaaataaccttttgtggtcactgttaattaattgaatttttaatttgaatgtttgtgctttttaaatgagccaagactagaggggaact

SEQ ID NO: 311882 - DNA, 415 bp, Homo Sapiens
caaactttatttgtgctgtaaaggggaagaaaagtgattagtaattatgtacatgacgtaacagacagcaatttcacaacagcatacccgagactacttccccatacatgcgtgactaatacactctaaatcccaacgacagtaattgtttgcatcatccccaagtcattggttaagaactgaactaccatgtcaacatataaacatttaaaaaatggaacccagaagacagaaagatcccaacgataaaaataaccatgatttttaaaatttcaagtgaaacttaaagggaagaaggaaatgataaaaagccattggtattactttaccaattcaatagacgcagctcagaaccaagcagggttttcagatcacacatgtagtaaaggcacctcgcccactctctccccacaat

SEQ ID NO: 311883 - DNA, 1295 bp, Homo Sapiens
  misc_feature (1226)..(1226): n is a, c, g, or t
aggttgaagggaattctctggggctttggggaatttagtgcgtgggtgagccaagaaaatactaattaataatagtaagttgttagtgttggttaagttgttgcttggaagtgagaagttgcttagaaactttccaaagtgcttagaactttaagtgcaaacagacaaactaacaaacaaaaattgttttgctttgctacaaggtggggaagactgaagaagtgttaactgaaaacaggtgacacagagtcaccagttttccgagaaccaaagggaggggtgtgtgatgccatctcacaggcaggggaaatgtctttaccagcttcctcctggtggccaagacagcctgtttcagagggttgttttgtttggggtgtgggtgttatcaagtgaattagtcacttgaaagatgggcgtcagacttgcatacgcagcagatcagcatccttcgctgccccttagcaacttaggtggttgatttgaaactgtgaaggtgtgattttttcaggagctggaagtcttagaaaagccttgtaaatgcctatattgtgggcttttaacgtatttaagggaccacttaagacgagattagatgggctcttctggatttgttcctcatttgtcacaggtgtcttgtgattgaaaatcatgagcgaagtgaaattgcattgaatttcaagggaatttagtatgtaaatcgtgccttagaaacacatctgttgtcttttctgtgtttggtcgatattaataatggcaaaatttttgcctatctagtatcttcaaattgtagtctttgtaacaaccaaataaccttttgtggtcactgtaaaattaatatttggtagacagaatccatgtacctttgctaaggttagaatgaataatttattgtatttttaatttgaatgtttgtgctttttaaatgagccaagactagaggggaaactatcacctaaaatcagtttggaaaacaagacctaaaaagggaaggggatggggattgtggggagagagtgggcgaggtgcctttactacatgtgtgatctgaaaaccctgcttggttctgagctgcgtctattgaattggtaaagtaataccaatggctttttatcatttccttcttccctttaagtttcacttgaaattttaaaaatcatggttatttttatcgttgggatctttctgtcttctgggttccatttttttaaatgtttaaacaattactngtcgttgggatttagagtgtattagtcacgcatgtatggggaaagtagtctcggtatgctggtgtgaaa

SEQ ID NO: 311884 - DNA, 447 bp, Homo Sapiens
tttggcataaaggggcagcgaaggatgctgatctgctgcgtatgcaaagtctgacgcccatctttcaagtgactaattcacttgataacacccacaccccaaacaaaacaaccctctgaaacaggctgtcttggccaccaggaggaagctggtaaagacatttcccctgcctgtgagatggcatcacacacccctccctttggttctcggaaaactggtgactctgtgtcacctgttttcagttaacacttcttcagtcttccccaccttgtagcaaagcaaaacaatttttgtttgttagtttgtctgtttgcacttaaagttctaagcactttggaaagtttctaagcaacttctcacttccaagcaacaacttaaccaacactaacaacttactattattaattagtattttcctcgtgccgaatcctgcagcccgggggatcc

SEQ ID NO: 311885 - DNA, 733 bp, Homo Sapiens
agtatcttcaaattgtagtctttgtaacaaccaaataaccttttgtggtcactgtaaaattaatatttggtagacagaatccatgtacctttgctaaggttagaatgaataatttattgtatttttaatttgaatgtttgtgctttttaaatgagccaagactagaggggaaactatcacctaaaatcagtttggaaaacaagacctaaaaagggaaggggatggggattgtggggagagagtgggcgaggtgcctttactacatgtgtgatctgaaaaccctgcttggttctgagctgcgtctattgaattggtaaagtaataccaatggctttttatcatttccttcttccctttaagtttcacttgaaattttaaaaatcatggttatttttatcgttgggatctttctgtcttctgggttccattttttaaatgtttaaaaatatgttgacatggtagttcagttcttaaccaatgacttggggatgatgcaaacaattactgtcgttgggatttagagtgtattagtcacgcatgtatggggaagtagtctcgggtatgctgttgtgaaattgaaactgtaaaagtagatggttgaaagtactggtatgttgctctgtatggtaagaactaattctgttacgtcatgtacataattactaatcacttttcttcccctttacagcacaaataaagtttgagttctaaaccccaaacctacaaccttcat

SEQ ID NO: 311886 - DNA, 697 bp, Homo Sapiens
  misc_feature (542)..(593): n is a, c, g, or t
gagtaaggtgggataggttagtggcataataatgcttcattaaatgcacaatagtcttaacatggtaaaaaacataaaattaaattcacacataatctaacaatttttaaatgcactgcattttattacataaaagtacaataagtaaaatatacgaatttagtttaatatacttttatcaataattatttcttgcactataatgtagaaaagtattactctgacctagcttatacattacttcatataggttaactacaatgagcctctccacttatcttttcatcatgcatcttacattttagtgtccttacttttatagaaaaggttataaataatgcccaattaataaaagactatctctggtatctctgatgcagcaaaaattgctcatatgttttcacatgtgaatacaataggaataaaataacagcataaagtaatttgaaagctgtatgacatcattattcacttttgaaaaactttttttcaagaaaacaagtatacttttaatgtaattacaatgcttccaaaaatctccnnnnnnnnnnnnnnnnnnnnnnnnnnnnnnnnnnnnnnnnnnnnnnnnnnnncaagtgtggccaccaaataaaggctttgtcacattttatacttttctacagtttcacactagtataatttttttatgtatagaaacgttggaggtgttaggaac

SEQ ID NO: 311887 - DNA, 782 bp, Homo Sapiens
  misc_feature (264)..(336): n is a, c, g, or t
tttttaaaacatctgtgaatgagtgattccggagcctgtgaattgtgtggggagcttgctttgatggcactgtgttaataaaagttgtagggactgtgcacctaagaggctaagaggtcccactcatccgccctgtgaaccagctgtaaagaaatgtagttaagaaatgcaaagaaatgtgttatcttggcacttgggtttgattttcctttttttaaagcactgcaaaacttctttaggatactaaaacatcctaattgggcnnnnnnnnnnnnnnnnnnnnnnnnnnnnnnnnnnnnnnnnnnnnnnnnnnnnnnnnnnnnnnnnnnnnnnnnngcaactatgacatgaattgagtgataaaatggctctttgaaaagtagatattgtctgtattgtaaatgcttagtcatattcatggcaaagtgttcatttcttgagatggttctttcacaacacacaagaatcaagatggaacgcaaggaaaatctttttgttttgaccgaggtaaccagtttatgtgtgttccaatccatagagaagtgggggaaagggcgagaaaggatcggattgatctgggatcagctttgagcctgagttcagtgaatagcctcatgggcatctcatggaattgatgcatttgctgtggcatatttaaattttgttcaaaagatttgaagcaagaccttgcaaagactcttaacattactgttcagcttgcttagattgtgttaacagttcatttaacaaagatccgttttaactctgaacaaaagcaaccc

SEQ ID NO: 311888 - DNA, 362 bp, Homo Sapiens
  misc_feature (11)..(11): n is a, c, g, or t
gcaggctaaanaaaggaaactcaaacccaagtgccaagataacacatttctgtgcatttcttaactacatttctttacagctggttcacaattaacacagtgccatcaaagcaagctccccacacaattcacaggcctccggaatcactcattcacagatgaaaaatgatcaaccaatgtattcctcccagttaaagttgtgttggatcctgagttgcggctgggatgaatcttcaggatttcattcttctctcttctcctccattcttgatgaaggggaatttggttatatgcacccacatttaactactgttgctcactttcttcaaattcaggaccaatgacatttctatgtatgaatt

SEQ ID NO: 311889 - DNA, 439 bp, Homo Sapiens
  misc_feature (257)..(257): n is a, c, g, or t
  misc_feature (396)..(396): n is a, c, g, or t
tttttattcattatccttcattaaaaattttaagttacaaacattttgattgatagtcagtcatggtggtgcacctagtccttactctgaaaccaaatatcctgccatctggggactttcaccagccctgtcggttatcttaccgcaacaccaaagaggaggctcagccttccccagttccctgagttcacattgattcaattctacagctcactagacctgcccaagacaggaccaatcaatgtcccgggaggcangagagggtggtggggccacacttagccatatgggaaagacagtattctcaggatgaggggcagggacttttttgtggggagagggacgcctaggcttttcagttcctaaagggaaggtgatttccctgggtaaaggggnagggtgatttttgccaaggctgggagttttaaagggaggtggg

SEQ ID NO: 311890 - DNA, 1893 bp, Homo Sapiens
ttttaaatattcattatccttcattaaaaattttaagttacaaacattttgattgatagtcagtcatggtggtgcacctagtccttactctgaaaccaaatatcctgccatctggggactttcaccagccctgtcggttatcttaccgcaacaccaaagaggaggctcagccttccccagttccctgagttcacattgattcaattctacagctcactagacctgcccaagacaggaccaatcaatgtcccgggagggcagagagggtggtggggccacacttagccatatggaaagacagtattctcagatgagggcaggacttttttgtgggagaggacgcctagctttcagtcctaaaggaagtgatttccctggtaaagggaaggtgattttgccaaggctggagtctaaaggaagatggaactgtctttcaggcgtctccagcagaccctctacagacccgtgttcctgaaggcagagtcctgaaggcagaatacccctgtggcagtggcacagctcagagtgtcccatagacactgattttggccacggagatgctctctgtgtagtggttccggccttttctcatacaggacgtagagctggggggcctgctcctctccatccatgctgccctccagggttgccagggatgaatagccactggggcctggccatagctggactgtctctttccgccatgaggtaccattgctgaagctccatcgcagggtcaggttcactcggaactctggatgtgctgggttggagaagaagacaatgccggagctggtgactacagctcctgcagctaccacagggtccacgagctcagggtcgaaggtcacatcacggggccttagtgtatcacaggcatcatagctgcggaggacaattcggcagtggcagtggtagttgttctggtttcgggcattgatgacgactgagccatctgggagctcatagggctggcattcatcaggattgaaatcattttcctgcttgggctgaccgtaggggatgccgctgaccccacttccgtagcgccaggaggcaccatgatcatcgctgaggagacagaagactccgtcccgctccagcgtcccatggccacacacgatgaggcggcccttccgtggctcccgctgtttctgaataccagagcccggtccaggggcaaacacttcagtgccaatatccagggagagattccggggtgtgctccaggaaacaccatcatccttgctccataccaacatggtagaggccacctggcagccggccttgtgagcacaaagggagtagaaaagaaatactactcctgtctcaacatcgctcactactgccccaaggttcagcccatcggggacatccccatcattgacaatgaacgctgtaggagaccatgtgctgccctggtccatggacctccgcagggcgatgaacttggccccctcatcggatgaggacattttcctcgcctcagcaaaggcgagaagagtgccccgcggagtggctgtgatgagcgggatgcggaaggtgtccactgagccgatctgtctcccgctcacccacagcagttgctccatggtcaccagcggctgcaccagaccgaagtcgttctcagccttggaccaggaggctgccagagacagcagcaggaagatcgcggcaaacacccaaaccctacagcctccccagaagcccagaatccgcggcccccagcgtctgtccgggagcgccgtgctgggtcgctccccagtcatctctccccgcagctgccgcgaccctggcagctagactcctccctcgtgccgaattcgccacccaggccgcgggttagttgggtgtggtaaggacacatagggtgtgtgggaggcggcgggcagc

SEQ ID NO: 311891 - DNA, 946 bp, Homo Sapiens
  misc_feature (13)..(13): n is a, c, g, or t
  misc_feature (38)..(38): n is a, c, g, or t
ttctttttcttcntcctcccccacacgccccctacccncctaagcagcgaggcctgggtggcgaattcggcacgagggttcattgtcaatgatggggatgtccccgatgggctgaaccttggggcagtagtgagcgatgttgagacaggagtagtatttcttttctactccctttgtgctcacaaggccggctgccaggtggcctctaccatgttggtatggagcaaggatgatggtgtttcctggagcacaccccggaatctctccctggatattggcactgaagtgtttgcccctggaccgggctctggtattcagaaacagcgggagccacggaagggccgcctcatcgtgtgtggccatgggacgctggagcgggacggagtcttctgtctcctcagcgatgatcatggtgcctcctggcgctacggaagtggggtcagcggcatcccctacggtcagcccaagcaggaaaatgatttcaatcctgatgaatgccagccctatgagctcccagatggctcagtcgtcatcaatgcccgaaaccagaacaactaccactgccactgccgaattgtcctccgcagctatgatgcctgtgatacactaaggccccgtgatgtgaccttcgaccctgagctcgtggaccctgtggtagctgcaggagctgtagtcaccagctccggcattgtcttcttctccaacccagcacatccagagttccgagtgaacctgaccctgcgatggagcttcagcaatggtacctcatggcgggaagagacagtccagctatggccagggccccagtggctattcatccctggcaacccctggagggcagcattggattggagagggagcaggccccccccagcctctacagtcctggaatggagaaagggccggaaaccacttacccccgagaagcatctcccgtgggcccaat

SEQ ID NO: 311892 - DNA, 917 bp, Homo Sapiens
  misc_feature (182)..(241): n is a, c, g, or t
ctccagttttggaggagaactggaagggagtaaaaagacctgtccacagcacaaacttccactctggctgtgaaggactagccaattgctaaatgtttcatcacggaggtgctcgatcatattatataaaacactgcaacctccttttcattacatccttcatatattatggatccatcatnnnnnnnnnnnnnnnnnnnnnnnnnnnnnnnnnnnnnnnnnnnnnnnnnnnnnnnnnnnnagggccatgagagagcagaaacccagggagcaattttaaattaatttgactaaaataaagagtatagtcttgcaaaatgtgtacggaagggagtgggcacatgggaacagggcagagcaaccagcagcactcaggatcctttcatcagaaaggggaggcattcaggaagacttcagttgagaaaaaggtgttcaaaagacattcaatgaccgtttaattttaaaggaacggtcaaatttcgtggtgaaagtaaaaaaagtgaagagtcaaataaggataaaatctttcaacagagagactgaaatatgtgaagaaataagatataaataaaagttaaaaatataacctaaaaatgacatggaggaacaaaacagaaatacggtcaaaattcttgtccaaggttttagctagtttgtagagttaagcccattggaatatgggtgaattccaatattcatggataatgaaatagtcagaggtaggatttagatcaggaaaagaatgttccaggatgctggcattttgaaggcactcaaaaacagagtgagagagactgaagctgcagtgacatcagaggattagagagaggtgcatactcatgtgtctgtcataaagaaataaaacaactccaggaacctgtgaccatacatatattagttgagtaatacatagagtc

SEQ ID NO: 311893 - DNA, 414 bp, Homo Sapiens
  misc_feature (385)..(385): n is a, c, g, or t
ctccagttttgggggagaactggaagggagtaaaaagacctgtccacagcacaaacttccactctggctgtgaaggactagccaattgctaaatgtttcatcacggaggtgctcgatcatattatataaaacactgcaacctccttttcattacatccttcatatattatggatccatcatacattttaaacaaattagatgaaaacagctagaaaaacgtaaacagaagtttttgacgggacagggccatgagagagcagaaacccagggagcaattttaaattaatttgactaaaataaagagtatagtcttgcaaaatgtgtacggaagggagtgggcacatggggaacagggcagagcaacagcagcactcaggatccttncatcaggaaagggggaaggcatttccagg

SEQ ID NO: 311894 - DNA, 706 bp, Homo Sapiens
actgaagagtactattgccttcaggtaggcatattcgtatccatcaatgcagagtttaaccatgctgttacaaaactcctgtagtttgaagatgtgctccatcaataattttcttctttctgttgacattttatcttgttgaagactattgtgaagacaattgacaaatgttgctaatatagttgctacattcatcacttgccagcactgggcaagaccaagagtaaaaagttcattccagtaagctttccaccagtgatatgcctgttttccttgcccctagagccctggaaagaaggaatcgaaagtgcccagtgcattgataagaacagcagtctggaggcagactccccaatgtagtgcacattcaggtactcaggcataggagaaggcatggtgagcctgaaagctacatgtgaatcgctgagaagtggcccctctttttcggtgtaatttatgcttgaatctccagtgattaggtgtacacttccttccatgcccgctactgagctctggcaggctgtgctctctccaggattcaatgcttttgcaagagtgtcaaatgcccttgaaacatcaccgttggtctgcatttcttgaaattcacacaaagaggtatcatcattgcttaagctttcaatcatagacatttcattactattttgagaaagatctttagtttttccaagattcgctaatgatgtaa

SEQ ID NO: 311895 - DNA, 1524 bp, Homo Sapiens
tttcttaaatttccttgggaaccgtttccacatatcagttatagacaaaggccatgggactatgctaaaccaataaaaccttattagcaaatctttagattctgacttagccagagcatctgagtgttcaagtacagttttacagtggctaaggttgtctcttgatcttttttctccgttgtgtgatcacagatgctattctgttttattggtgattatacgagacttctaatacataaatgaacgggtattggtgcctctttattttaaaaaatttgaagaaaagagccacctcatattcatagggtgtgtattttttgagtgtgagcatttaattgaaaataagaaagctatgaagtaaatgttaacttctctgtagcagctaatgcatagagacactaaaacccacaccacattttgtgggaaatgaggatcctgatcctcttttgtcctctccaggtagtctcgcaggttatgcagcttaagttcagtcttctttatgctgcgattgatttccacctcagtggcttagcctttgggacagtggatactgcaacagccaagaactcttggttatccgcacaagctgctggtagactacattagccctctggttttccagctcaacctctgataaagtggactgagagccacgctgctcagtctgtttcgtcagccgactcaggttattttcagggaaggcatggaggcatagtttggttagtttcatcactaggatgtataaggtgacgacacaaaccaaatacctttctttcatcacttaactatacgtactttatctctggtaacactagaatgctgtggtcttgagggaatgttagcaaggaacacatagaagatttggtgtttcataagcctgtctaggtgtggcaggttttgtgtggtacactgatgtttaccataagcaggtacaagcttcatgaaccgttcttaatgaactataattgaatagataccaaaaatagaatgacaaatgtattttaatagcagatgaggcagttttaggatgaattttccactgttgattttacttcaagacatagcaagagaaacaaaattttgttttcaagacatttccactgcagtttcaagctgtagtgggcatatgcttcatttacttccaaagaggcaaaagcagctggaattggcttacagcacatgctttgtttcatgttatgggtgaggacctacatacactcttactttagcagtcacttaaccttctccagcaaggcagttgtggggttcactaggatttagtgcctgatcttttttttgggaaggggcgggaatgaatgtgttggggctgggagggaagcagaagaaaatgggagtgtgagtgagtgtgcatgtgtctgaagttcaccattgcccccacctgcacctagcaaggaacaggtgtttgatgtattttgcttcatgactgccagtatgcatgtattttttttccttctccgtgtttttctaaaccttacactaaagggattcatcaaaccatcctgc

SEQ ID NO: 311896 - DNA, 1416 bp, Homo Sapiens
taagatgcgcggggccggcgcgggggggcccgccatctcttgtgggggcctaaaaacatgggggaggaggcacaacagccctcggcggcgatgcggtgctcgtccacacgatgacgggggcgcgccattgataggggataatgtggcagacagcagcgcgggaaaactgtctgcaatcattgcgagataatctatagcggcacctcagcgggggggtggggcacttagtacggacgggggcgcggaggcacaggggaggaagacaagcgcgggactggagcataccgcaggggcgccatcgagggtaacaggcgcggacaccacacagttatggatattcgtcttcgagtagtggtatgtggtgctgtgatagtgggcgggaggatgactagagtgagtcatgtcgggtccgcgcctaatacgcacggcagtagggggcaggcggggaggaaagggcaacagggagagaagtatgttataaattggtggtggtggtgatttacacgcgttctactgaatcggttagagggagtttgtttgtgggtggagaggatatgtagagggtggggtactagggagttgttgtacggggcggtgggaatggagaggtggtgttgggggggaatacaagtaaagaaaaggacgggtgagagggcgggagggtagggaagggatgggtggtggtgtgtaataagtgagataagggggggacaaagagggtggtgttctggtaaatgtgcatttctttaatttttaaaaatatacacaggaaaagccatgtgttttacataggaatacacacattaacaaagcatttcttatagttttccaaaactctattatatcagtccgaaatttataaattaaatatatcagaattcttaaagttaaaatgaattccctgaaactactggatatgctactttttccaaaatcaaatgaacagaggatatggatgtggtttgtgttaaataaggtttattgttagctttattgcctatagtctataagatgcaactttactgtgcctttgcaaacaggatacatttcttaaaaaattgatcaaaattttccatacatatagctctatatgatagattacagtgcaacactattctcgttacataattatagaaatactatagaacccaagagcacggggtaagcaaaataaatacgatcctgagccatctgaacaagatgatttgatgaatcctttagtgtaagtttagaaaacacagagaaggaaaaaaatccatgcatactgcagtcatgagcaaaatacatcaaacacctgttccttgctaggtgcaggtgggggcaatggtgaacttcagacacatgcacactcactcacactcccattttcttctgcttccctcccagccccaacacattcattcccgccccttccca

SEQ ID NO: 311897 - DNA, 2019 bp, Homo Sapiens
ggggtgacgcaagggcggggttgccggaagaagtggcgaagttacttttgagggtatttgagtagcggcggtgtgtcaggggctaaagaggaggacgaagaaaagcagagcaagggaacccagggcaacaggagtagttcactccgcgagaggccgtccacgagacccccgcgcgcagccatgagccccgccccccgctgttgcttggagaggggcgggacctggagagaggctgctccgtgaccccaccatgtcctctcctaccacgagttccctggatacccccctgcctggaaatggcccccctcagcctggcgccccttcttcttcacccactgtaaaggaggagggtccggagccgtggcccgggggtccggaccctgatgtcccaggcactgatgaggccagctcagcctgcagcacagactgggtcatcccagatcccgaagaggaaccagagcgcaagcgaaagaagggcccagccccgaagatgctgggccacgagctttgccgtgtctgtggggacaaggcctccggcttccactacaacgtgctcagctgcgaaggctgcaagggcttcttccggcgcagtgtggtccgtggtggggccaggcgctatgcctgccggggtggcggaacctgccagatggacgctttcatgcggcgcaagtgccagcagtgccggctgcgcaagtgcaaggaggcagggatgagggagcagtgcgtcctttctgaagaacagatccggaagaagaagattcggaaacagcagcagcaggagtcacagtcacagtcgcagtcacctgtggggccgcaggcagcagcagctcagcctctgggcctggggcttcccctggtggatctgaggcaggcagccagggctccggggaaggcgagggtgtccagctaacagcggctcaagaactaatgatccagcagttggtggcggcccaactgcagtgcaacaaacgctccttctccgaccagcccaaagtcacgccctggcccctgggcgcagacccccagtcccgagatgcccgccagcaacgctttgcccacttcacggagctggccatcatctcagtccaggagatcgtggacttcgctaagcaagtgcctggtttcctgcagctgggccgggaggaccagatcgccctcctgaaggcatccactatcgagatcatgctgctagagacagccaggcgctacaaccacgagacagagtgtatcaccttcttgaaggacttcacctacagcaaggacgacttccaccgtgcaggcctgcaggtggagttcatcaaccccatcttcgagttctcgcgggccatgcggcggctgggcctggatgacgctgagtacgccctgctcatcgccatcaacatcttctcggccgaccggcccaaccgtgcaggagccgggccgcgtggaggcgttgcagcagccctacgtggaggcgctgctgtcctacacgcgcatcaagaggccgcaggaccagctgcgcttcccgcgcatgctcatgaagctggtgagcctgcgcacgctgagctctgtgcactcggagcaggtctttgccttgcggctccaggacaagaagctgccgcctctgctgtcggagatctgggacgtccacgagtgaggggctggccacccagccccacagccttgcctgaccaccctccagcagatagacgccggcaccccttcctcttcctagggtggaaggggccctgggccgagcctgtagacctatcggctctcatcccttgggataagccccagtccaggtccaggaggctccctccctgcccagcgagtcttccagaaggggtgaaagggttgcaggtcccgaccactgacccttcccggctgccctccctccccagcttacacctcaagcccagcacgcagtgcaccttgaacagagggaggggaggacccatggctctcccccctagcccgggagaccaggggccttcctcttcctctgcttttatttaataaaaactaaaaacaggaaaa

SEQ ID NO: 311898 - DNA, 1118 bp, Homo Sapiens
gtgtcacgcggcgctgggcggttctgcgctttgtttggacgtgctagttcgttggcgtgtttgtgctccgtctcgttgtggcgtatctgtgttgttctgcgatttcggtattgtggtgtgatgcccccggggcgacgggccgatagcttcggctcgtgttcggagtaggttgccctttggtgcacttcatgttgggtcccctctgcatctgcgtggtatcaggggttcgtggagtcggtggtagtggacccgggttgcttgtccggtgtgttcgtgtctctgtgcgtcagagtccacctgggtaagccccagcgcctgaggctgagctgctgctggcctgctgccccacagttgactgcgactgtgactgtgactcctggttgctggctgtttccgaatctcttcgtgccggatctgttcttcagaaaggacgccacactgcgccggaagaagccctgcagcgttcgcagctgagcacgttgtagtggaagccggaggcccttgtccccacagaacacggctaagctcgtggccccagcatcttcggggctgggcccttcgtttcgcttgcgctctggttcctcttcgggatctgggattgacccagtctgtgcttgcaggctgagctggcctcatcagtgcctgggacatcaggttccggacccccgggccacggctccggaccctcctcctttacagtgggtgaagaagaaggtgctccaggctgaggggggccatttccaggcagggtgggtatccagggaactcgtggtaggagaggacatggtgggttcacggagcagcctctctccaggtcccgcccctctccaagcaacagcggggggcggggctcatggctgcgcgcgggggtctcgtggacggcctctcgcggagtgaactactcctgttgccctgggttcccttgctctgcttttcttcgtcctcctctttagcccctgacacaccgccgctactcaaataccctcaacccaccgtaacttcgccacttcttccggcaaccccgcccttgcgtccgacagcgtgggtcgacgatatcccgaaagaattccggaccggtaccagcctgctttttatcagaggttttatagtactaatgc

SEQ ID NO: 311899 - DNA, 806 bp, Homo Sapiens
tgtaatccaagtgagtggagagtgtttttaatgttttgtgaatgaaggaaatgaggttttgtttcacctgttttgcagcagtaagagaaactagtgctgcaagaatgtattttttaatgaagttccttattttgtcttgcatgttttagttttgcttatttttaaatttggaggtcctccataatgtcagataatattgacctgccatacgttagcactcttagttccgctactgtctttaacaggagcaaagagctgtgataaaccatgcttttttgagcttgtctgactcctaattaataacatgtttttggcaagacaacagattgaggttagaggatcagtaggacatttttattccatctgtcctatggggaaatttacaaatcccgtgctctaaaatgttctcaaacatttatatagatttccctttcatcttactaaattttgcattgttcttttcaagtatgtttcgtatttactgtctttttttctgccatttcccaaataataactccagatttcataattccagtttttacattccgttatctttctggtacaaccattcccattcagccttaaatctgagtcctttttagcagcaacttttttcctgggatcctccttcgtggtcttctaagtcagtgttagttttgaaaattttggccctgcataagttctgcatagcatctaatgtcaaaatagaaccaactggtaatcacagtattatttagtgtgggttccatgacaacaaaaatacatacgaaggaaaacttctcaggttactatgcgtgaaattccac

SEQ ID NO: 311900 - DNA, 520 bp, Homo Sapiens
  misc_feature (27)..(27): n is a, c, g, or t
  misc_feature (31)..(31): n is a, c, g, or t
  misc_feature (34)..(34): n is a, c, g, or t
gccttccgtctgccaatgacactgttntttnttnttggtttcccgttcttagtagtacaatcaataatcaggcagtagaaactgatgaaggaattgaagaggagataccggattcaccaggaatagaaaagcatgataaagaaaaggaacaaaaggatcccaaaaagcttcgttcctttaaagtatctagcatagattcttcagaacagaaaaaaaccaagaaaaacttaaagaagtttcttacacgacgccccactttgcaagctgttcgtgaggttatattaaagatcaggtatttggatccaatctcgctaatctgtgtcagagagagaatggcacagtaccaaagtttgtgaagttatgtattgaacatgttgaagaacatggtttggatattgatgggatatacagagtaagtggcaacctcgcagtgatccagaaactaaggtttgcagtcaatcatgatgagaaattggacttgaatgacagttggggatattcatgtcattactgggccctc

SEQ ID NO: 311901 - DNA, 351 bp, Homo Sapiens
gagggcccagtaatgacatgaatatcttcccaactgtcattcaagtccaatttctcatcatgattgactgcaaaccttagtttctggatcactgcgaggttgccacttactctgtatatcccatcaatatccaaaccatgttcttcaacatgttcaatacataacttcacaaactttggtactgtgccattctctctctcacgaacagcttgcaaagtggggcgtcgtgtaagaaacttctttaagtcttggtttttttctgttctgaagaatctatgctagatactttaaaggaacgaagctttttgggatccttttgttccttttctttatcatgcttttctattcctg

SEQ ID NO: 311902 - DNA, 715 bp, Homo Sapiens
  misc_feature (629)..(629): n is a, c, g, or t
  misc_feature (632)..(632): n is a, c, g, or t
  misc_feature (637)..(637): n is a, c, g, or t
  misc_feature (686)..(686): n is a, c, g, or t
cattaaaataatagtggtgaattatatgttattgtgttaaaacctcacttgccaaattctggcttcacatttgtatttagggctatccttaaaatgatgagtctatattatctagctttctattaccctaatataaactggtataagaagactttccttttttctttatgcatggaagcatcaataaattgtttaaaaaccatgtatagtaaattcagcttaacccgtgatcttcttaagttaaaggtacttttgttttataaaagctctagataaaactttcttttctgatcatgaatcaagtatctgtggtttcatgcccctctctatacctttcaaagaactcctgaagcaacttaaaacctatgtgtacttctgtttatgatccatattgatatttatgacatgaacacagaatagtaccttacatttgctaaacagacagttaatatcaaatcctttcaatattctgggaacccagggaagtttttaaaaatgtcattactttcaaaggaacagaagtagttaaccaaactaacaagcaaaacctgaggtttacctagtgacaccaaattatcggtattttaactgaatttacccattgactaagaatgaaccggatttggtgntgnttttntttctatgcaaactggacacaaattacaacagtaaatttttttataagngcttctcccttctccatgatgcgacttcc

SEQ ID NO: 311903 - DNA, 951 bp, Homo Sapiens
  misc_feature (826)..(826): n is a, c, g, or t
  misc_feature (865)..(865): n is a, c, g, or t
  misc_feature (876)..(876): n is a, c, g, or t
  misc_feature (891)..(891): n is a, c, g, or t
  misc_feature (916)..(916): n is a, c, g, or t
  misc_feature (932)..(932): n is a, c, g, or t
cagcagaacccaggagagtgccctgcctgtctcagtggaagtgtattattgttttaaggatagaaccagaggccttgaagggagccaagacagaactcccagcctgtgtaatctattggaaggcacattttcatttctgatgcagccaccttctggaggcagcttttatcctttctctctattgctatgttgaagtaatagggttttttttaacctctggatgtctcgtctgtggttgggtttatggtaatgggtacatgggtcaggccatgtattaacagatgccagtgcgctctgacaagtattccaaagtgttccgtagctagactggtgcaggctcgttgtaccactgcaaccgactgacgttactgtagttcctagaatgctgtgagggcggggggttcagatcaacataaagcctaacttgctggagttgtagtctcaaggctttctctcttgcttaactaaaacctaaggaccactgtttttggtagcaattatatggttactatccactgcagtcctcagttgttggggtaaatcccacatggcagagtaaggcaccccacagaaattaacttggagagcctgagaaattcccagtggccttggcatagctgtctagaacaccatctctaggaaaatttaattctgtccctggccagctattgttcttccacttcgttttctgctgtcccaaggccagatgggtggaatcaccatctgactgttgtcaataaaatgtatctggcgtgaacagcaggataacccatgttctccacataaggataaccttacgtgaaacctttcctgctgacaaccatgncagaggaattttttccactttaagtcagagcctttcctnccctttgggantttcacaggtgtttncctgggcaggcacacagggagggtntttaagggacctttgngagggttagggtacatttt

SEQ ID NO: 311904 - DNA, 701 bp, Homo Sapiens
  misc_feature (591)..(591): n is a, c, g, or t
  misc_feature (622)..(622): n is a, c, g, or t
  misc_feature (678)..(678): n is a, c, g, or t
aaaacaagggaagcagctctgcattcaaatgaaacagttggatatgaaacagaggactgagaggacgggcacgggtcagtggcatccttattctatggaaggcacaggcaaagagagagagagggtgattatggtagctgcaaagatagtcactttgaactccctttatcccaccagttagacagagtcaaggagattcaagggagcaaaaatgtgggtacctgatacatacgtaaaattagagccagtcagtgcaacaggaataaagcttcatcgggcatttatacaaacggttgtatatttttaatttcaaaatttgaaggtaaccacaattgtatatttccctcacaataaaatcagaagcaggaaaatataaaggtggcagctttacatctcagcattaacaaactgtaagtcaactgtttaaatggatgttattcttaaaagataatgtaacaaatgaactcataaagcagtagcagatacatcaatatcttccccaccccagactgacaaatactccactacagcacagacagccaaagcaacagcaacacaaagtttcaccgcacaaagggaaaaccaggaaanggaatcctcccttccccattacactctactnggggtcaccccttttccatagggtttgtcctggcatttgccatttaacattggtcntagggggtaaatggtgttttggg

SEQ ID NO: 311905 - DNA, 1210 bp, Homo Sapiens
tgggaagggagacaaggtgcttgggacatttaacttgccaagtgtggttgcctagaagcaagaggaagagcaagacgactctggcaggcccagacccactgacggtggcccatgaagcccctgctgggaaactgggaaggggcacccagtggggcagaagaggaagtcaggaaagcaggggttgtgaagcctcccacaatcctgccagggacagtggagatgtgctgcttcaaggctactaagcagtaagaacagctgggcatgcatgggctccagggaggcagtgtctcaggagactggtaccagcagcagcagtctgggcctaatgaggccctcagacaaaaagccatcctgaggcctgtggcgtgggtacctggcagagacttccctctgctctgctagggagtggagcactcccatgtgcacagaaaataggtgctccagagtaagctctagtgaagtcccagacccagctgcaccacgcttctcagcaggctggctccagccacccccccagggcttctccagtggaataaagtttatgcccccttttattttttggggggtggggaggtgaagagggaatttcacacaagcttttctcccacaatcaagctctaaaaaaacaacagtctcagaagaggatgaggaggaacaaacaacacacattttttggaactcagacacccagacagaaacaggcaggcagaccctcacccacacccaggctatatgactccttgcagccactcattacctggtctccctgcctgtctcacaccctcacccaccacccagctggatgggggtgtggtaacaggcaggtgaccctgcaacagcaccctggatccatatccctggctctcaaaccaactaagacttgagggaaggaggggggtaagagggactttgcatattcttgtatctttggcagacagctgttctagcctggttcaagcttcccatggagatatccacatctcaacctgctcagaatctacaggatgccagggcaggccacctgcctgagtgagcagccagtcaatcagcctcttgcttcagctgggctgccacttgcccacctcccagccaataatctagcatcctggcagggaggcggggctgtggaggtcctctcatttccatctaaatgtggtctccaagatcaagtagtcagtggctgcctcgtgccgaattcgccacccaggcc

SEQ ID NO: 311906 - DNA, 735 bp, Homo Sapiens
gggtgagagcccagagccataggtcatggccaggggtctccttagggaaccagctttgggcccggtgtcaattaacctactggagcccccgcccccaacagggatgttttggaaagcttttcgagggccgaagccggccgaccagggggcggaacgggcaaaagtcagggatttttcacttttccaatgagtttttattagcaggtaagtcatgatttaggatcctggggtggggatcactgggtaccaggtcccccttcaccatcctgggagaaggatggaggacagaggaaagggagatgcagccagttcagatcttcccgggaaacgtgccttcagcccgttgctcatcccagtctgtgacccaggatgtggggcagagggactggtacacacgctggtaccattcgcacacagagatatcgcctcctttagcggtcattgccttctgacagcggtggaagtccaggtagttctgccagcagtttctagtctggttctggttggggaagcggctgtcaaaaggggcggtcttgtagttcttgattttggtctccatgtcttccgccatggtgctgaatcctaaaggcaccccggattcaacctgcagctcaatgtgaccctcagcaaagacaccacagtcggacaggaagcggaactactaccagccggaagctgagaggtggggactacgggagtcttgcgagcggcttcagctccctcccaggaggaccc

SEQ ID NO: 311907 - DNA, 3007 bp, Homo Sapiens
  misc_feature (408)..(408): n is a, c, g, or t
  misc_feature (617)..(617): n is a, c, g, or t
  misc_feature (630)..(631): n is a, c, g, or t
  misc_feature (644)..(644): n is a, c, g, or t
  misc_feature (650)..(652): n is a, c, g, or t
  misc_feature (654)..(655): n is a, c, g, or t
  misc_feature (657)..(657): n is a, c, g, or t
  misc_feature (661)..(671): n is a, c, g, or t
  misc_feature (822)..(830): n is a, c, g, or t
  misc_feature (2196)..(2213): n is a, c, g, or t
gtgcggggcgcccgcgcccccgccaatagactagcgtgccttgcacaacacctcttcttccggcagcggtgtccgcgcctaggcgcgcgctgctgacaaaccacctcgccccctgacgcaggagagcacgcgggttgcctccgccgcggatcaataacaaagagtgtcctttgcccttctaagccctagagagactgttttctctgcaaagaatatctcttcctcttttccagagcacctacagggtgtgtaacttctcgtactcgccacggcgcgcgttcgtccccccttctatttgctcagcgccccgcttctccgaccggcggcggtttttatgttgttttgtcagagggccagatatgtctctttcgtccggcgcacctttggcttgtgcttttcccctagaanaagttcccagtttactcttcgcctatggtgtgtgttgtgccgccctctgttagttaggtgttatacaaacaacacgggctatcacgctaatactccttgccccctgtggtgacaaaaatggccagaagaaactctcagtaagttgtgcttgccacccaatagggggtcccacgtttgttctctagaatagttcctcgcggggtttcgtngggctgttttccnnaccctatttcggnggcccnnntnncncccnnnnnnnnnnngctccaatgtcatgcatttaaaacaagatagtttaaatatggcataacttttcagacagatatttcagattatcaagcagtttcatcaatatcattattagcgattttttttagctgaaagttattcacttgtaaaactatctccggttcnnnnnnnnntcagaaaccttattaaatttaacctgcttttacaaatgtcctaagaagtcttaagctaaacaaaatttaagtaggaaaacgataatttaaaaatagtgtgttatactatttctgtggtttatgtacatatattaactggtctcttggataggaaacatgactagaagtttatcacactaagcactgtaaaataaaggcaagagctaatcatcttctagcaaaaatagtctctatgcaacaattgcaaatgtcaaagctattatttagtagttaattgcctgctacaatacataaaacaaagtacatttactggattgtttttcagtttgcagctgccctcttgacatcccaaataaggaattcccgttaagtaaaacctgcagtgcaattcactcagtggttagtttcaggccaagcctccccctaccattatgcttgttcttccccaccgcccccaaatcctgcagtggcaccatattattaaaaacactaagtacctgggatttatgcctcagagcaagacatcatttgagtaatttcaaatgatacacagctccttcatgtaaaaaagatgttttgtggtcacaattacttcaaaaagtaattatattcaaataacctgacatatcatgccttagcaattacaaaaccatgattttgacacatggcaatttttaagttaggcaaatgtaaaatgctaaaagatgtgaacagctgttcttctgtttaagttagagcactgcaaaactcaggtaatgactttatttttttcagttaacataaccagcccacgatacagcatactaaatcacaaagtacaaatccaaggaagttaatacctttactaagttacaaaacttgggcaaatcaatacagtactcttttataatgaaaccatacttttgttggagtcatgttactttagtgataattttcactccaaaaatatttaagtaccaaatcaaaacactggtttttaatggtggtttatagcatagtaaggtattttacacaaaatatattttaaaactacacaatttctccttttaagtgagctcccttgtgcaagctgctgaagtgtacagcagcagggcaatgggcgtctataggaggtggctctgctctgttctggggttggtccaaagtcaggtggagttccaatgtatgaaaagcttgaaaaatctaccttaaggagactgaatatcaataccagtttccaaggagttcttgttgaattttcacagaaatactggaaccctcaaaatcagatagtaatttcaaacaacattaatttcagatgatcccttttatttagaggccctgcatctgttttgatcaagtcacatagccttacaccaacttatcnnnnnnnnnnnnnnnnnnctacccaaaatatagttgtatttttaaaataacaaataaatatatagtcagtttggagagacctggagtacccgatgttgtctaccaactgtcacgatcacttctctgcaaacgctgctgctgccattggagtccttatggttcctcttgctgaggctgtcagttcttcaatctcagcatttaatttatgtattacccattccattgcttctcggcctttactagcatttgaggatatcgtacttgccatcagtccttcaaggtaactgctgaggctaactcctttcacggtaattatggcttcttgtgtcaaaacagttttttctggatcctgaggatgtggtttgtatataagtctctcatctactgaaaccatgtttgtaaatgaaatattagtagatttaagttccattgttttctctacaggatcaactacagaatgttcttgcacatatgttttcgttcttgctgcaccaataagagacttcacaatggaaggcagtccccactctgtgctgagaagtctgtggctgtgcaactttccagagggatctatatgtctgtccaacacatcaactccaaccacacttgggttcatagggtttgggtatttctgcattgcagctgttgtaacagtttcccacgggtggtcaaagacgtgctccgaagtccagatcttcatggtgccggcaccctgagagatgtccgggtagcgccaggggacaacgaggcacagaggctacacctgcccctgccccgcccccagcaccccagccggcggcgcagtgcgcccc

SEQ ID NO: 311908 - DNA, 561 bp, Homo Sapiens
  misc_feature (44)..(44): n is a, c, g, or t
  misc_feature (77)..(77): n is a, c, g, or t
tactatgcattttgcaagacaacatataatatacctaatagganacagctaatatatttgaataagtactccatcanatacagagattatttttaaaatgctcagtttttgaaagttattggaaaaaatattaaggaaatatttattccttagtaatgtcattaaataaggcacatcttataaacaaaattcaaaataagtacctttgagataactgactttccgctatttccttgtaatatttcatttttgtttctagttaaccaccttctttttgttatataattggtcaagtagctggaacgaaacccagttaataattacccagccgcagctgctggtagctcttgttgcacaggatcatttgcagcatggttttgtgctcccccgtcttctgctgacaggcttcccataggaccattgcatcctgagcagccatcgcagggtctgtatatccttcctctctggtcccctggaccaagttcatgagagtatctctgaagtgtcccgaggttctactgaataaatgtcctcttggaggttattgctgtattctgtatc

SEQ ID NO: 311909 - DNA, 896 bp, Homo Sapiens
  misc_feature (73)..(73): n is a, c, g, or t
  misc_feature (759)..(759): n is a, c, g, or t
tggttggtaggttgttggatggttccacatttaaaataaaatcctattcccaatgccaatttttcctattatncccatcatgcacaatttatttaattgcctgattagatagtaggcaaattcaggatagtaggcaaattcagtatcatatactttcattcatagttttctttggcttagaataatttcaaagatagaagagaaaatatgattgtatagttttgttaatagtgccatgaacagtacaaatttgtgagaaaatctctatttggaagtgtctagaaagaggagtgcacagtactccaagtcctcttcattttagtagtcctcagcatcaccagcacagatggcaagcagtgctttcttataatgccctgaatcaaaatttctgctgtcatgaaatagggattttccatatcgctctttgtatcgtttccttatggtcagcaggtctatttcacttttggcaaatgagaatcctgattacagttttattatggaaaccaaagtcatgaattgcactatataatctataagcaaaataggctggtttgtctcgaacacagagaacaattgcaaccagcagctcctgaaagtatccatcataacattcattaatggcatctaccatatcttgcccagaaatattttgaaattcctggaaaaccagccgcagctgctggtagctcttgttgcacaggatcatttgcagcatggttttgtgctcccccgtcttctgctgacaggcttcccataggncagttgcatcctgagcagccatcgcagggtctgtatatccttcctctctggtcccctggaccaagttcatgagagtatctctgaagtgtcctgaggtctctgaataaatgtcctcttggaggttattgctgtattct

SEQ ID NO: 311910 - DNA, 844 bp, Homo Sapiens
  misc_feature (173)..(173): n is a, c, g, or t
gaagaagatccagtaaatgatccaactggaagtgaatggactgaagtaggcatcaacctggatacgctctatgagttcattgtcaccccccttcctttgtttaaccacagaaggctgcctgctgagaaagcactctgattttctcatggcaatcctggcggctacctccagcntttgaccatggccatgatgatgttctctgtggccatgaaaggcagctcttgccgaatgcgccgttcaattactttggggtacacgaccaatccttcagaaaatgttctgcagcgtattcaatatagtatctgcggtaagaaaatgcctcggccaaacagatccgtcggttggcactatcatccaagtgtgcgttcaaaccactggacagatgctgttctgtaagcgggtccaatgacaagggtcatcaggtggcgggcaagactgcagcaacgtttctgaacgcaatgggattccgcttatatggcatcgcacttgagccaatctgctgtttttcaaagggttcctccatctccttgaggtttgccaggaggcgtatgtcggtgcaaatcttgtgcactgatgcccccaagctagccagcacagacagtacttcaatatccacttttcgtgtatatgtctgccctgtgatgatgaaagctctcttaaatcctgccttttctgtcaccatcttgtcaagctgctctaccttatggtcatctccctcaaagagctgcaggaaactggcctgagtgccagtggtaccctttactccccggaagcgcaggtcatctcggacacgcttcaagttctggagcctcgtgccgaattcgccacccaggcctcgctccta

SEQ ID NO: 311911 - DNA, 1818 bp, Homo Sapiens
agaaacccctgcgtttcccccccgggggctttttttattgggtgaggaattccaagcccctagtccatgggccaggtttttccttggaaacaagcttgggccatggtccccttcccttatggggcccgcgcggcccaacgaaatggttttgaaaaacctttcaggggcccggggggccccacaagcgtcttctgttcttcggctccctacggccggacccgcgcccgctccctgttcccctctccctctccgctggcgcccttcgggttgtcttctgtgttcatgcctcagcaattaacaatgattttcgtttaattctcttccaactctacagacataattctgctttcaccttcatcacgctttcatatggttttaacaggggatacacctcctcttctaagaatctctgcacctgctgggaggcacgaccagtgaaagaagaaggatccagtaaatgatccaactgggagtgaatgggactgaagtaggcatcaacctggatacgctctatgaggtcattgtcacccccttcctgcttaaccacagaagctgcctgctgagaaagcactctgattttctcatggcaatcctggcggctacctccagctttgaccatggccatgatgatgttctctgtggccatgaaaggcagctcttgccgaatgcgccgttcaattactttggggtacacgaccaatccttcagaaatgttctgcagcgtattcaatatagtatctgcggtaagaaatgcctcggccaaacagatccgtcggttggcactatcatccagtgtgcgttcaaaccactggacagatgctgtctgtagcgggtccatgacaagggtcatcaggtggcgggcaagactgcagcaacgttctgaacgcatgggattccgcttatatggcatcgcacttgagccaatctgctgtttttcaaagggttcctccatctccttgaggtttgccaggaggcgtatgtcggtgcaaatcttgtgcactgatgcccccaagctagccagcacagacagtacttcaatatccacttttcgtgtatatgtctgccctgtgatgatgaaagctctcttaaatcctgccttttctgtcaccatcttgtcaagctgctctaccttatggtcatctccctcaaagagctgcaggaaactggcctgagtgccagtggtaccctttactccccggaagcgcaggtcatctcggacacgcttcaagttctggagatccatgcaaagatcctgaatccaaagacagcaacgtttcccaactgtggtcagctgtgcaggctggaaatgtgtgaaacctaatgtgggtagactggctcgttccttagcaaagtcggcaagccgagagatcactctggcaagctttggcaaaagcaggtcaagtgcatttctaagaataatcaagtcagtattgtctccaacatagcaagaagtagcaccaaggtgaataatgcctgcagcttttggacagcagtggccaaatgtgtgcacgtgagccatcacatcatgtcgtaaacgtttctcttcctcagctgccatcttgaagtcgatgttctccaggtttgatttcatctcctggatttgttcatctgtgataggcaaacccaatgtctgctcggcctccgccagccacagccacagctgccgccatgtccggaatttatacctgtcgctaaacacgaagcacatctccgggctggcatagcgggaggcaagaggtgagcggtagctgtcgggcgaaccatgatcgcctccagccgccatcccaaccctgcgaccccgccagggtggactggccc

SEQ ID NO: 311912 - DNA, 540 bp, Homo Sapiens
  misc_feature (449)..(449): n is a, c, g, or t
  misc_feature (493)..(493): n is a, c, g, or t
  misc_feature (530)..(530): n is a, c, g, or t
gcttttatttcaagttctggggtacatgtgcaggatgtgcaggtttgttacataggtaaacgtgtgccatggtggtttgctgcacctatcaacccatcacctaggtattaagcccaacatccattagctattcttcctgatgctctctctccccgcagcccatgcatcaggccccagtgtgtgttgttcccatccctgtgtccatgtgttctcattgttcagctcccacttacaagtgagaacatgtggtatttggttttctgttcctgtgttagtttgctgaggataatagcttccagcttcatgcatgtccctgcaaaggacatgatcttcctttctacgcctgcatcgtattccatggtatatatgtaccacattttctttatttagtctatcgttgatgggtatttgggttgattccatgtctttgctattgtggatagtgctcncatgtatatacgcatgcatgtatctttataacagaatgatttanattcttttgggtatatacccagtaatgggattcctgngtcaaatggt

SEQ ID NO: 311913 - DNA, 562 bp, Homo Sapiens
tttaaaacattttatattttaagttttgtgggtattaggtgtatatatttatggggtacatgagatgttttgatataggcatgcaatgtgtaataatcacatcatgtaatatggggtgtccatcccctcaagcatttatttgtgttacaaacaatccattatactcttttagtcatattaaaatatacaattaaattgctgttgactatagtctccctgttgtgctatcaaataccaggtcttattcattctttttaaaaatttccaacttttattaagttccagggtacatgtgcaggatgtgcaggtttgttacataggtaaacatgtaccatggtgctttgctgcacagatcatctcatcacccaggtatgaagcccagcatccattagctattcttcctgatgctctctctctgccgactccctgccctcaacaggccctagtgtgtgttgttccccatcatgtgtccatggggtctcaatatttagctcccacaaaaattttaacataaaccaaagtggggagaaaaggataatggaactccatgttttcattaccc

SEQ ID NO: 311914 - DNA, 571 bp, Homo Sapiens
  misc_feature (390)..(476): n is a, c, g, or t
  misc_feature (549)..(549): n is a, c, g, or t
aagttctggggtacatgtgcagaatgtgcaggtttgttacgtaggtaaatgtatgccatggtggtttattgcacctatcaacccatcacctaggtattaagctcagcatgcattagcagcactcttaacacacaattaaactcacatgtaatgagattacttctcattactccacaccatagtagtctattttacagatgaggatactgaggctcagggaggctgagagatttacctggagtcaatcaaattgttggatctggaagcatccgatcaccagggtcttctgaaataatgacagcagcaaccaattaacattatgcttactatgccaaatgctatgcttaggcattttacctgcatcacaatcgcgattcctttgggcagttnnnnnnnnnnnnnnnnnnnnnnnnnnnnnnnnnnnnnnnnnnnnnnnnnnnnnnnnnnnnnnnnnnnnnnnnnnnnnnnnnnnnnnntaaaaagtcaagactcagacctcgatctgactaactccaaagaaacccgtgccactctgcctctcggaaaacnactcttccagctgcacagttca

SEQ ID NO: 311915 - DNA, 656 bp, Homo Sapiens
  misc_feature (28)..(28): n is a, c, g, or t
  misc_feature (419)..(447): n is a, c, g, or t
aggtgtttaagaatgttgaagacacggncagaaatgattgggtgggtttccatgtgatgccaaaagaatttcccccatactcccgccctgttttcctggatcaccctgtccccccagaaattgccctgaaaacaaatcacaggttgaaactagaaataacttcccctctccctaggcagcttggagactggccaccctgtttcttggtttggtaagaatgttccagacacaaggaggggagcaacacacactggggcctgtcgggggttggggtatggggagggagagcattaggaaaaataactaatgcatgctgggcttaatacctaggtgatgggttgataggtgcagcaaaccaccatggcacacatttacctaagtaacgaacctgcacatctggcatgtgtaccccagaactnnnnnnnnnnnnnnnnnnnnnnnnnnnnngaacatatggaaagctggataatgccacaaaagggttaatgttagcaagcttgggatggaggcactatgcaccatcatcatgtatttttccatcttaagcagcataccactcctaaataaaacaaaatcattttgcagaaaataaaacacttcatgacagaaaataatttttttcttaaccctggtgaatctcttttaattaagcggcc

SEQ ID NO: 311916 - DNA, 906 bp, Homo Sapiens
  misc_feature (819)..(819): n is a, c, g, or t
aaaatgtttttattttatttgaagttctaggataaatatgcaggatgtgcagttttgttacataggtaaacaagtgccatggtggtttgctgcacctataacccatcacctaggtattaagtcccacatgcattagctatttatcctgatgctttccctacctccacccgcaaaaggcctcagtgtgtgttgtactcaaggttttttttaaaaaatctgttgaacaactgcaaccagcatcaaacctaggttttcaaaacgtaccaaaacggaaaaatattctgaaccaaacccatcatttgattcagttccaactttggtcttgagcccaatcaaataaccactgaaacatgctggacaattctagtgggccacggggactgggtggaaagcctggtggtcatctggtctccatgagatgatttccattccccaggctcagggaatacatgggaaaatcctctgcccattttccaaaaatcctttaagcccatatagaaaacaatactttctttgtgatagattgtttatacaaattcaccaaaggagattttgcaaatattatatagacttcatcataccgagggagaaataaccatgccttttagtttcttctgattcacgtgaaatgaggactaagatgctttatttcacacactaccgggttcatgtatatcaccgggcagaaaaacaaacataaataccttcttaagcagatgacatcttcccctgtttctcgatggagaccaaatcctcccggcaggtaaaaactagtagcaatcccattaactctcaagactactttctgctgccccctcnctgagacaggagttaaaagatggcaaggacatgggcaagtggcctagggtgcaaggtgaaatctagtgctagctttaaagagaaaat

SEQ ID NO: 311917 - DNA, 899 bp, Homo Sapiens
atgctgctctctaaagccttgtatcttgcacctcttcttctgtctcctctttcagagcagcaatttggggcttagacttgcacttgcttgagttccggtggggaaagagcttcaccctgtcggaggggttgatggcttgccggaagaggctcctctcgttcagcagtttctggatggaatcgtactgccgcactttgttctcttctatgaccaaaaattgttggcattccagcattgcttctatcctgtgttcacagagaattactgtgcaatcagcaaatgcttgttttagagttcttctaattatttggtatgttactggatccaaatgagcactgggttcgtcaagcagcaagatcttcgccttactgagaacagatctagccaagcacgtcaactgcttgtggccatggcttaggacacagcccccatccacaaggacaaagtcaagcttcccaggaaactgttctatcacagatctgagcccaacctcatctgcaactttccatatttcttgatcactccactgttcatagggatccaagttttttctaaatgttccagaaaaaataaatactttctgtggtatcactccaaaggctttcctccactgttgcaaagttattgaatcccaagacacaccatcgatctggatttctccttcagtgttcagtagtctcaaaaaagctgataacaaagtactcttccctgatccagttcttcccaagaggcccaccctctggccaggacttattgagaaggaaatgttctctaatatggcatttccaccttctgtgtattttgctgcgagatctttgacagtcatttggccccctgagggccagatgtcatctttcttcacgtgtgattctcaataatcataactttcgagagttggc

SEQ ID NO: 311918 - DNA, 673 bp, Homo Sapiens
  misc_feature (26)..(26): n is a, c, g, or t
  misc_feature (39)..(39): n is a, c, g, or t
  misc_feature (79)..(226): n is a, c, g, or t
ctagagaagtctttcattatttcaancacagactgtcanattataactgatgaatactcagtaagaaaggaggcaagcnnnnnnnnnnnnnnnnnnnnnnnnnnnnnnnnnnnnnnnnnnnnnnnnnnnnnnnnnnnnnnnnnnnnnnnnnnnnnnnnnnnnnnnnnnnnnnnnnnnnnnnnnnnnnnnnnnnnnnnnnnnnnnnnnnnnnnnnnnnnnnnnnnnntatgaaaaagactgggctgaacagcaacaacaaaaattctttcctctaagcttaatcccacaaggcttccttttcaataaatgaatataataacacctaccatcatttaattgtaaaccttccacagctctgcattaaacagaggcttctcctacaggctaaagattgtgctggtcccaggaaaaagatgtcctttttgcatactgggcccaaagagtattttaataatcattagtaatcaccatgtgggggtgtgtctggtgatgggtacaagaattgaaatttgaatccaaatttgggggttttgtattttttgtaagctctagctagactgaatggcaacaacaaactgaggctaaattcagtgtcgtggcttgagggggaagaaggagctgactaccatcataaaccataatttctctactgacctttatctcttttatcaga

SEQ ID NO: 311919 - DNA, 862 bp, Homo Sapiens
  misc_feature (718)..(718): n is a, c, g, or t
  misc_feature (774)..(785): n is a, c, g, or t
gtttgttgcgttcctttcttttccccctttgtgcacatttatttcctccctctaccccaatttcggattttttccaaaatctcccattttggaatttgcctgctgggattccttagactcttttccttcccttttctgttctagttttttacttttgtttatttttatggtaactgctttctgttccaaattcagtttcataaaaggagaaccagcacagcttagatttcatagttcagaatttagtgtatccataatgcattcttctctgttgtcgtaaagatttgggtgaacaaacaatgaaaactctttgctgctgcccatgtttcaaatacttagagcagtgaagactagaaaattagactgtgattcagaaaatgttctgtttgctgtggaactacattactgtacagggttatctgcaagtgaggtgtgtcacaatgagattgaatttcactgtctttaattctgtatctgtagacggctcagtatagataccctacgctgtccagaaaggtttggggcagaaaggactcctcctttttccatgccctaaacagacctgacaggtgaggtctgttccttttatataagtggacaaattttgagttgccacaggaggggaagtagggaggggggaaatacagttctgctctggttgtttctgttccaaatgattccatccacctttcccaatcggccttacttctcactaatntgtaggaaaaagcaagttcgtctgttgtgcgaatgactgaatgggacagagttgannnnnnnnnnnncctttgtgcttagttaggaaggcagtaggatgtggcctgcatgtactgtatattacagatatttgtcatgctgggat

SEQ ID NO: 311920 - DNA, 1574 bp, Homo Sapiens
  misc_feature (23)..(23): n is a, c, g, or t
  misc_feature (33)..(33): n is a, c, g, or t
  misc_feature (53)..(53): n is a, c, g, or t
  misc_feature (272)..(294): n is a, c, g, or t
  misc_feature (309)..(309): n is a, c, g, or t
  misc_feature (343)..(343): n is a, c, g, or t
  misc_feature (345)..(345): n is a, c, g, or t
taacaaagccccatggaaaaaanaattaaaganggaagccattggtaaactancccctactcctactggccctcctccttttggtccatgaacaaggtgaatgccatttcctggggccctcctccctaagatccttcctatcctggtgtttcccactgcccagtaataaatgccccatctgtaatcctagatagattttcaaatgcatatggctgtcagcattggggtttggactcaactgtctcatttccatcttctgaaaagctagaagnnnnnnnnnnnnnnnnnnnnnnntcaacagtccgtggnacaggtaatttgacctcccaacagaatgagcccnancccctgccacattaacatcccatggcaggtgtggagctgtggccttgaaatgctctctgtgtgtgtatgtgtgtgctgtaacattttaatttacagagaagcaatgactgactgcctcacgaaagctcccctgctgtcacacttcctagtttaacactgaaaactcagaatgagaaagagtcagaacgaactcacaatagcaccatttcctatactcttggaattagattcctttccgtgtaggaagaaacgcaggcgcccagcctccagctttgtgctttcacaggctcccaatgcatttcagcagaagtgggtggtctgccttagcctacttctgcagcaacatgaattttccctgggaagagttaaaaatatgggtcttacaaagtgaagttggccacaggtgagaagcctgaggaagcctgtttctggtggtgagatgtgacaagcctgtagatggcaggagggagtccagggaccttttcccttgcccatctcaattcaagtcagtgaagaatctgcatgcagaagcatggcaagttcaaggaatactgagagatgtaaaccctaatacagcaatccgaacaccagcgcactaatggtatcttatgtattcaggtccaccagtgagtttgccctggataatgctgggatttaataagcccttctaatgattataaagattgtcctcttgaaactagacattggaaacaacagaatatttgatatcactatattttacatggcacatataaccatataattaccagcacttaacatggcaaatattgtaaatacacattcttggagttgactttgtaattacaccgatgttattcaacagaacaaagattaaacactctccaatttgcactttgggagatttcagtcccctccttcctttcacaacaaaagggataaccctctaattacgtaataatgctcggtgggtcatgtgggggcaaagaggaatcacaggggtgactttcataatcaattgtggcctgtaaaataaagtaatacacagtattttcatttcaacaaaatacaacagaccatataaaaatattttccaatctggaatcagaaacatgaaagctgaattttttttctttgtataaaaagaaacaaaataacagactaaagtttattaagcctcctaacaaaaaaaatatacatatcagtttaaggaatgcagtgagagtcagcttccctttttgtccaggctc

SEQ ID NO: 311921 - DNA, 698 bp, Homo Sapiens
tttagggttccattttcctatttctaaactgataaactaagacatgctttctctaactgcatgaaatctttactgttgtggcctaaatatattgctcctcttgtttaatcttattgtaacgaagacactagatttagatttttttaaccctttgtttaaacccttaggttccactgccaattgaaaccagaaccagttaaacattacataatgctcataatagatttaaaaccatcttctagagatgtgaaacatggtgaggcaatagttctttttgtaggtaaacatgatattttctaccattctacaatttctttatcttgccatttatcaaaggaaatctccagttagttatttatctgaaaggcagaacctctgatcttaaagaattcttattccttccctggttgccttcttcaggctttacttcaatttttccttaagccttgaattattatttttagttagtagaaatatgattcttcaatattagttccaaacatataaagttacgaagactagagaagatttaatagtcattgtcattatctattggactcgtgtgttgattgattgtctttcaagtctctcaatatatttactggtgcaatgtagtaatgacagtttgtcagacaaaaccaaagggggctagcttgtgatctgttatctcttttgagcttacttatatcaatttagac

SEQ ID NO: 311922 - DNA, 1086 bp, Homo Sapiens
  misc_feature (13)..(13): n is a, c, g, or t
  misc_feature (15)..(16): n is a, c, g, or t
  misc_feature (22)..(22): n is a, c, g, or t
  misc_feature (25)..(25): n is a, c, g, or t
  misc_feature (39)..(40): n is a, c, g, or t
  misc_feature (44)..(44): n is a, c, g, or t
  misc_feature (47)..(47): n is a, c, g, or t
  misc_feature (50)..(50): n is a, c, g, or t
  misc_feature (69)..(69): n is a, c, g, or t
  misc_feature (75)..(75): n is a, c, g, or t
  misc_feature (81)..(81): n is a, c, g, or t
  misc_feature (195)..(195): n is a, c, g, or t
gctccctatcccnanngcatanagntccaggagcaatgnnatcnccnaangataaagtcaacttgccanatcccnaattcnctgcatcatgtccttgctctgcaacggtacccccaactccggggacgagccatggcctcaagcagcagcttgtacgctgccgaaaccaggacacatctgcatcacacagaaaangcgccaccctggtgtgacaggccctacttggtcaccctagggtaagctggagaagaactccagatgtgccctggagaggcccccacctctcagggccacctcacaggtgccccccaccaccccattctttgagtttggcttgagattttaggaagcataatttcaggtgaggaagagaacaaagtctggtcccagcccactctggcaaggattgttccccaccttgtcagcatcagaggtagccacatatacaggcaggacacagacagcacacatggggcgtaaggaaccgtgcctggacacacacagcacacatggggcgtaaggaatccgcgcctgcacaccactcacgcacacacacaacataaccaagtggcagccagagaggccagggaatgctcagagggccgccttcggggcatccatgtagtccgggttgtaaggaggctggctggcgggttagggcgcggctgctcctccagccagggtctcgtggtaggccggtgggcccatgggctgggctgggtaaggtggtgggtactgcattgggtagggtgctgctggcatccctggctgaggcggcatggtgtggtagccctggtagcttggtccagggtagctgggcggcacacttggaggctgaggataaggggcatgcaccacagtggtggatgtggtggtggtgacaaccggacgtggtcggcggcacgtcttgtaaaggcagcagcaggagcaggtgaagcagatgatgatagtgacgacagacagcacaaagatggtcaggccaacggccaaggtcgctccgaaccccatgttagcctctgccttcacccagaggcctcctgtacccctgggctttcccctcttcccatcgtgggccactcagtttca

SEQ ID NO: 311923 - DNA, 1140 bp, Homo Sapiens
  misc_feature (1012)..(1012): n is a, c, g, or t
  misc_feature (1068)..(1068): n is a, c, g, or t
  misc_feature (1077)..(1078): n is a, c, g, or t
  misc_feature (1105)..(1105): n is a, c, g, or t
  misc_feature (1107)..(1108): n is a, c, g, or t
  misc_feature (1118)..(1118): n is a, c, g, or t
  misc_feature (1127)..(1127): n is a, c, g, or t
aaagagcgaggcctgggtggcgaattcggcacgaggggtggaacggggcttcgcgtctgtgcttcctgtggctgacgtcatctggaggagatttgctttctttttctccaaaaggggaggaaattgaaactgagtggcccacgatgggaagaggggaaagcccaggggtacaggaggcctctgggtgaaggcagaggctaacatggggttcggagcgaccttggccgttggcctgaccatctttgtgctgtctgtcgtcactatcatcatctgcttcacctgctcctgctgctgcctttacaagacgtgccgccgaccacgtccggttgtcaccaccaccacatccaccactgtggtgcatgccccttatcctcagcctccaagtgtgccgcccagctaccctggaccaagctaccagggctaccacaccatgccgcctcagccagggatgccagcagcaccctacccaatgcagtacccaccaccttacccagcccagcccatgggcccaccggcctaccacgagaccctggctggaggagcagccgcgccctaccccgccagccagcctccttacaacccggcctacatggatgccccgaaggcggccctctgagcattccctggcctctctggctgccacttggttatgttgtgtgtgtgcgtgagtggtgtgcaggcgcggttccttacgccccatgtgtgctgtgtgtgtccaggcacggttccttacgccccatgtgtgctgtgtgtgtcctgcctgtatatgtggcttcctctgatgctgacaaggtggggaacaatccttgccagagtgggctgggaccagactttgttctcttcctcacctgaaattatgcttcctaaaatctcaagccaaactcaaagaatggggtggtggggggcacctgtgaggtggccctgagaggtgggggcctctccagggcacatctggagttcttctccagcttacctagggtgacaagtagggctgtcacacagggtggcgcantttctgtgtgatgagatgtgtctggtttggcacgtacagctgctgctgaggcatgntcgtcccgnnttggggtacgttgcaaccagggaatangnngcgattgggnttgccagtngattgatctttgg

SEQ ID NO: 311924 - DNA, 1468 bp, Homo Sapiens
  misc_feature (311)..(311): n is a, c, g, or t
  misc_feature (374)..(375): n is a, c, g, or t
cccccccaaaaagggatcacaaaatgttcccacctttgggccccaggtttccccaaaggttttcgcccttccatcacaatttccccggggtttttgccaccggggtttcccccccaacttcccgggggagaagcccatggccttacagccagccaactgggttaccgcttccggaaacccagggaccacatttgccatccacccagaaaagctgcgcccaccttggtgtgacaggcccctacttggtccaccttaggggtaagcctgagaaagaactccagattgtgccctggaggagggcccccaccttntcaggggccaccttcacagggtgcccccccacccaccccattctttgagtttggcttgagatnntaggaagcataatttcaggtgaggaagagaacaaagtctggtcccagcccactctggcaaggattgttccccaccttgtcagcatcagaggaagccacatatacaggcaggacacacacagcacacatggggcgtaaggaaccgtgcctggacacacacagcacacatggggcgtaaggaaccgcgcctgcacaccactcacgcacacacacaacataaccaagtggcagccagagaggccagggaatgctcagagggccgccttcggggcatccatgtaggccgggttgtaaggaggctggctggcggggtagggcgcggctgctcctccagccagggtctcgtggtaggccggtgggcccatgggctgggctgggtaaggtggtgggtactgcattgggtagggtgctgctggcatccctggctgaggcggcatggtgtggtagccctggtagcttggtccagggtagctgggcggcacacttggaggctgaggataaggggcatgcaccacagtggtggatgtggtggtggtgacaaccggacgtggtcggcggcacgtcttgtaaaggcagcagcaggagcaggtgaagcagatgatgatagtgacgacagacagcacaaagatggtcaggccaacggccaaggtcgctccgaaccctgacatggggtcgttgtagccagggcgaaacctcagcgccgagcccagctgctccaccggctctacactggcaggcacgctggcctcaggcacagcacacctttcctcgctccacacaaatttcttcagcacgtcagagcagcagtattggtcatcacaggtaccacagcagaaatctggacaggactcggggaagaggctgagtccacgggaagccatacacacctcaccacgtgcacccggaggcggcgttagcagcagcagcaacagcaacggcaacaggatccgcggcgcggggaccggcgcagtcatggctgggcgggcggacgggcggacggacgcgagcgccgggcgcagtgccgccacagcctcagtgatccgcgcgcccgacgcgtgggtcgacgatatccctagattcgcggaccggtacca

SEQ ID NO: 311925 - DNA, 2266 bp, Homo Sapiens
  misc_feature (71)..(86): n is a, c, g, or t
  misc_feature (126)..(126): n is a, c, g, or t
  misc_feature (160)..(168): n is a, c, g, or t
  misc_feature (201)..(202): n is a, c, g, or t
  misc_feature (274)..(285): n is a, c, g, or t
  misc_feature (344)..(344): n is a, c, g, or t
  misc_feature (398)..(398): n is a, c, g, or t
  misc_feature (403)..(412): n is a, c, g, or t
  misc_feature (424)..(424): n is a, c, g, or t
  misc_feature (430)..(438): n is a, c, g, or t
  misc_feature (470)..(470): n is a, c, g, or t
  misc_feature (499)..(499): n is a, c, g, or t
  misc_feature (505)..(517): n is a, c, g, or t
  misc_feature (820)..(833): n is a, c, g, or t
gggcgccccctaaaattttggatggaagtgtcttgtgcggggtccaaccccaagggaggggtcaccaagtnnnnnnnnnnnnnnnnccgcccgttatatttaaaaggttcttgttggtgggaaggnacaattattgttcgcggcggggaggggggggtgnnnnnnnnnccgcaacgccggcttgggagggggaaggggggnngacttttctcccccccaccctttaggggtggtttttgggggaagattatattatgagaaggatttggtcctnnnnnnnnnnnngaatagtttttataaaaacaagggtgcgagggccgggcccctttattttttcttaaatnggtgggggggtaatttatttttcgttggcccccatccacattttttttgttcgntgttnnnnnnnnnnaagattcatgantaaatnnnnnnnnnttctgccaccctccacaacatggggggatggnaaaattcgcgctgccggttgtttttggtnaggggnnnnnnnnnnnnncccccccgtctccctcccctgggtgggggcgagggtctatttttttctttataagaatagatgggggcgaggggcggcgggaataattttcctcccagagggcgccacctgtgtggtgtcacacgtgggagccacccggcggagttctttctccttatgggggaaacaccacggctttatttggggcgccatgttttgcccgcttttacccgttagatgggggcccccgggcccccctcattgctggatgtgttctttggaaaaagtttttttggaggggccggagggcgggccgaacaaggnnnnnnnnnnnnnngtctaggtttcggttggtgcgagtgttgctttggtccttccaaacgattgcatttattataaacaagtgtacagaccctagactcagaaacacaacagatttgagctaagacagctctggtgaaacagtaatagagggaggaggaacacgaggtattcatgtctgggccagagctgccatccagggccccacaccccacctttggtccagatggcccattggcccaggtgtccctgctgccagaacaccgtggactggggtacaggagttgttgcatattccatgaggctggtgtcgggaagcagggactcacagttgccaggttgtccatctctgagccaatttccctccacaacccaggggtttcagtctcatatcaactatcatgtttgaaacagaaaacaggcaaaatgtttggctaaaataaaatgaaaacactgcagggaagagaactgagtgtgctggtggacaggagccctgctcacctgtgggaagggcagggccagcaagggcagcagagctccctgggggcagctaggctgtgtgtgcatgtggccctccagctggtcccaggggagatgcggggacaggggacagtccaggcagacaggtacagctgagtagggctctgcctgaggtgttctggcatcaggaggctgcctgatccccaacaggcatgacaggctccagggagcaatgggacatctgcccaaaggatcaaagtccaacttggccagatcccaagcttcgcctgcatcatgtccctggctctgcaacgggtacccccaactccggggacgagccatggcctcaagcagcagctggctacgctgccgaaaccaggacacatctgcatcacacagaaagctgcgccaccctggtgtgacaggccctacttggtcaccctagggtaagctggagaagaactccagatgtgccctggagaggcccccacctctcaggggccacctcacagggtgccccccaccaccccattctttgagtttggcttgagattttaggaagcataatttcaggtgaggaagagaacaaagtctggtcccagcccactctggcaaggattgttccccaccttgtcagcatcagaggaagccacatatacaggcaggacacacacagcacacatggggcgtaaggaaccgtgcctggacacacacagcacacatggggcgtaaggaaccgcgcctgcacaccactcacgcacacacacaacataaccaagtggcagccagagaggccagggaatgctcagagggccgccttcggggcatccatgtaggccgggttgtaaggaggctggctggcggggtagggcgcggctgctcctccagccagggtctcgtggtaggccggtgggcccatgggctgggctgggtaagcctcgtgccgaattcgccacccaggcctcgcta

SEQ ID NO: 311926 - DNA, 823 bp, Homo Sapiens
taaccactcaattttagcagctttaattttttaagaaactgaacctctatcctgtaatgttagatattttatatatactttttcagcaggataaaaaacgtaaaacactatttgaaggcaagaacatttactcctctcattctgtgtaagttagagcaatgcagcaggtgcgtgacaaaaatattatatactagatatggtccaaagtcattccatttgcttgtttagtgatgttcaaatttcattgggccagttcttcagcttctgcaggaactatctccattaactgtggatcttcatatcctcttcatatccaggaggcatgaaagccaaagcataagggaaaagcttatgacaatttgctctataaatttcagcagcttctttacagtctcctgggctaccatcatacaaggcttccaatacctccatacatgtctggaggtttctgttagtgagagattcatcaagtgttgttgccaactctatagctcgcttctgactagaaggatctaagtaatataccattttggcagctgataatctgtatggcaatgaatcagaattccttttcagaaaagtttcattaaaattctttggattcgttgctccaaaaagacgattcatttcttgttttaatactgttctaactgtatcagataaatctttactttcacacactgcagtattaaagagacgaatcatacactcatgaagccagggatgactagaatcaatagcaaatgccctctttactgattgtagcatcaaaagaacttttctttcctaaagtaaatctcaaaggcaaaaagatgagtctcta

SEQ ID NO: 311927 - DNA, 1464 bp, Homo Sapiens
  misc_feature (1384)..(1384): n is a, c, g, or t
gggattggctggagtggcccgagtcgggaaaatggctgcgagtacctccatggtcccggtggctgtgacggcggcagtggcgcctgtcctgtccataaacagcgatttctcagatttgcgggaaattaaaaagcaactgctgcttattgcgggccttacccgggagcggggcctactacacagtagcaaatggtcggcggagttggctttctctctccctgcattgcctctggccgagctgcaaccgcctccgcctattacagaggaagatgcccaggatatggatgcctataccctggccaaggcctactttgacgttaaagagtatgatcgggcagcacatttcctgcatggctgcaatagcaagaaagcctattttctgtatatgtattccagatatctgtctggagaaaaaaagaaggacgatgaaacagttgatagcttaggccccctggaaaaaggacaagtgaaaaatgaggcgcttagagaattgagagtggagctcagcaaaaaacaccaagctcgagaacttgatggatttggactttatctgtatggtgtggtgcttcgaaaactggacttggttaaagaggccattgatgtgtttgtggaagctactcatgttttgcccttgcattggggagcctggttagaactctgtaacctgatcacagacaaagagatgctgaagttcctgtctttgccagacacctggatgaaagagttttttctggctcatatatacacagagttgcagttgatagaggaggccctgcaaaagtatcagaatctcattgatgtgggcttctctaagagctcgtatattgtttcccaaattgcagttgcctatcacaatatcagagatattgacaaagccctctccatttttaatgagctaaggaaacaagacccttacaggattgaaaatatggacacattctccaaccttctttatgtcaggagcatgaaatcggagttgagttatctggctcataacctctgtgagattgataaatatcgtgtagaaacgtgctgtgtaattggcaattattacagtttacgttctcagcatgagaaagcagccttatatttccagagagccctgaaattaaatcctcggtatcttggtgcctggacactaatgggacatgagtacatggagatgaagaacacgtctgctgctatccaggcttatagacatgccattgaggtcaacaaacgggactacagagcttggtatggcctcgggcagacctatgaaatccttaagatgccattttactgcctttattattatagacgggcccaccagcttcgacccaatgattctcgcatgctggttgctttaggagaatgttacgagaaactcaatcaactagtgganagccaaaagtgttattggagagcttacgccgtgggagatgtggagaaaatggctctggtgaaactgggcaagcttcatga

SEQ ID NO: 311928 - DNA, 1176 bp, Homo Sapiens
  misc_feature (59)..(59): n is a, c, g, or t
  misc_feature (92)..(92): n is a, c, g, or t
  misc_feature (113)..(113): n is a, c, g, or t
  misc_feature (116)..(116): n is a, c, g, or t
  misc_feature (132)..(132): n is a, c, g, or t
  misc_feature (172)..(172): n is a, c, g, or t
  misc_feature (192)..(192): n is a, c, g, or t
  misc_feature (199)..(200): n is a, c, g, or t
  misc_feature (1142)..(1142): n is a, c, g, or t
ttcagtcacctagtatcacactgtcttaatgtaacacacagcaagtttgagatctgttntagttagtcatagttcaatcagcacctcagaanactagcataaattcttgggtntantcagcacatcagcacncctttcactaactgagcacagacaagtttctaacacatanttctacactgatcttgctcnaatatannagagcagccagaagagatgcaactcctaaaactgatgcagtgttataaaatagcatctttcagaaaggaataagctattttgagaaagacacttaaatcctccaatatttaaatacaaaagcatgtcttttttccacgatcatgctaatatagctccaatgggttagaaagtgcattgtaaagcaataaatcattctctgctaaaactcaaaaggtgagtcagtgcccactgtttctgccgacagtcatttgaaaaaagaaaatcctatggtaccaccattatatataagctacttaaaaattatgaaaagtgaaataactcaaacctaaaggctgttatcttcaaagcacttttgaaaaacaaacaaacatagcccttgtcctatgcttatataccattttttaaaatcctcattcagttgatgtcttgtacttaggtgtcatgccatctttaagacacagacctcaagtagagcatttgtaaagaaaacctcattgaatgtaatatattttatcagttatctttgtatcattgctgaaatgtttatgtaacaaattgatatctgaataaaatgttctgtaagtattaaatcaggaatgtacatgatacagtacaattcacagccttctcttcttgttcgcccagatgagatccctcaatttcatgtttaaaaaaaaccacccaaaccttttcgcaaaattcaaggtaactatcagtttaggaattgaattacacaatatcagataagaatattaaaagatcaagatgtattgcaaactggcaggttatggttttggcccattatagtaaatgtgaacttacaaactgtgttcctaaaattaccatattttcactggaaaaaatcagctgttcttaaataggcccatcgccagcaataggcttatactgggaaaaacacacaccacaaaagatcatccctnttaaaaagtaactgtcaaatcctaacactttttc

SEQ ID NO: 311929 - DNA, 1752 bp, Homo Sapiens
  misc_feature (28)..(28): n is a, c, g, or t
  misc_feature (80)..(80): n is a, c, g, or t
  misc_feature (87)..(87): n is a, c, g, or t
  misc_feature (125)..(125): n is a, c, g, or t
  misc_feature (158)..(158): n is a, c, g, or t
  misc_feature (160)..(160): n is a, c, g, or t
  misc_feature (205)..(205): n is a, c, g, or t
  misc_feature (208)..(208): n is a, c, g, or t
  misc_feature (260)..(260): n is a, c, g, or t
  misc_feature (337)..(368): n is a, c, g, or t
  misc_feature (394)..(394): n is a, c, g, or t
  misc_feature (397)..(397): n is a, c, g, or t
catgtttattacgataaaatgatgtcantcaacatcagtcctcagtgatgggatacggtagaccactggttatgacagtnatcaccngggaaggcgttgtgtcttctgtaaatccgtgctcttcnggtgacttactagctgcttaactaatcccagangnccccttaggagttgatgtaatgcctgtagaaaaagcagtgcgcanaantagagcacagaagagtcgaagctcaagagaacagggaacatactggtttgtntcaccaagtatatatcctagctcctcacagttttaccaaaaaaaatctgtgctcaatacatgttagctactgtattnnnnnnnnnnnnnnnnnnnnnnnnnnnnnnnngcattcttgaagagtcagccaaagtnggngggagggcagagtggctttaactggctataagtgttgctgcccccagtttccccattcagtgctagataccaccatacttcatggcaaggactgagaacacccagcaggatctaatggtgcacaagctcattttaacaatataaacaatagaatgacagtgagatgcgtttcagcaaggccagtatcacagaagccattctgtattttggtttttgtagcagctgtgtaggtaggctaccagctccttacttccagtaagtggatgtctccattaatttccagcgtgtcaatactgctgagctctttaaatctgtgtttgtactccaggctgtgtacgccatttactgcaaccttgaattctctaacatcacagtaaattatcatctcaaagtacatcccaggactaaatgggaaagaggtaatatttctctcttcttctccccaggactcctgaagaaaagaatttcttacaaatgctttaatattcaggcgtgggttcaagtgtagagcaatatcctttgattttcctgctagtaggtcaacattaaagcttttggcatttgcattcacttctcctttaacgacgacagttcgtccagggcccatgggggtgttcaaccttgcagcgaatggcaggctaagctggggcgtgccagactttggaacattttctctacttatctctgtcagttccagactagatgcttgggtactttgtaagtccgagctgaagctaaaaccaattgagtgaatattcactttgccataaatgcccagagtgtctattttctctgggccgatcctgtggccatagagcagagtatgttttccatttacagccacctggaatttgtcctttagcaccataatcacgatctcaaaagacttttctcttttgaaaggcgtgtcataggtgatctcttcccgtccccatttttcatttatcaaagtattgcaaacaatgcagccggcccttttgaaacgaggattgaaatgaaaggccacatcggctcgaggtttcacactgctgccattctgcagatccacctggaatctgtctgcgtcactaggaacatgcccacatatcacaatcaaagttccaggatccagctgatcgggaatggtgccaacatacgggattaccgggttatagatgatattctgtaggttgtttaaggacaacatcattcttttccagcttcttgtcgattggagtctcttctgtgtatgacctaagattttaggcaagtttcatttaaaggttacctggattgaaactgaggcactggccccaaagactggtgtttcaggcgctccacggagcaggttgtttgtcagcagctaagtgccgtca

SEQ ID NO: 311930 - DNA, 1445 bp, Homo Sapiens
aacttgctgatacaggtttgattttaatcacgtaaagtggaagagtgctttgatctcagttgctaatgatgatggactaatctttagaagaacggaggccttgattggtgatttcatgggaacaaaacagatttctgcattacctctgcctgctttgtgggtcccttagttggcgtacactttctgatagtgcctgccttatgaatgcctgaagtctaatcctgaccttactttgttgcccataaatatctttcaaattgaatgcatcttgcctcttcctgaaactttctgtaggcgtctgtgtagactctgatttgccataagttcaaatacacagaaatcagctgccttgggcttggcatcaagttaatttcagcaccatgtatttgttttgctttggttttttgccttaatttctgtgctcagatgtcatgccaattatttggtcaagcttgcagctaatagagccacatgtttattacgataaagcccatgatgtcagtcgacatcagtcctcagtgatgggatacggtagagcactggttatgacagtgatcactggggaagggagttgtgtcttctgtaagttagtgtcttcgggtgatttaatatctgcataactaatcccagaggaccccttaggagttgatgtaatgcctgtagaaaaagcagtgcgcagcagtagcgcacagaagagtcgaagctcaagagaacagggaacatactggtttgtttcaccaagtatatatcctagctcctcacagttttaccaaaaaaaatctgtgctcaatacatgttagctactgtattatagtaggtactccataaatacttgttgaatggcattcttgaagagtcagccaaagtaggagagagggcagagtggctttaactggctataagtgttgctgcccccagtttccccattcagtgctagacaccaccatacgtcatggcaaggactgagaacacccagcaggacctaatggtgcacaagctcattttaacaatataaacaatagaatgacagtgagatgcgtttcagcaaggccagtatcacagaagccattctgtattttggtttttgtagcagctgtgtaggtaggctaccagctccttacttccagtaagtggatgtctccattaatttccagcgtgtcaatactgctgagctctttaaatctgtgtttgtactccaggctgtgtacgccatttactgcaaccttgaattctctaacatcacaataaattatcatctcaaagtacatcccaggactaaatgggaaagaggtaatatttctctcttcttctccccaggactcctgaagaaaagaatttcttacaaatgctttaatattcaggcgtgggttcaagtgtacctcgtgccgaattcgccacccaggcctcgtgcagtggggggtgcggcgggcttataaaggagggaa

SEQ ID NO: 311931 - DNA, 316 bp, Homo Sapiens
gacccagctgggaccaaggcagactgtctctcccctcctgggatttacagggtcatggctctgaaacattctgtagtgttctttggacacgagttttccctggagatcgctttctgcaggcctcttggtcctgactgtggcttcttttcagagcctgccattcgctgcaaggttgaacaccccccatgggccctggacgaactgtcgtcgttaaaggagaagtgaatgcaaatgccaaaagctttaatgttgacctactatcaggaaaatcaaatgatattgctctacacttgaacccacgccggccctatgcagt

SEQ ID NO: 311932 - DNA, 2305 bp, Homo Sapiens
  misc_feature (67)..(67): n is a, c, g, or t
  misc_feature (112)..(112): n is a, c, g, or t
  misc_feature (117)..(117): n is a, c, g, or t
  misc_feature (121)..(121): n is a, c, g, or t
  misc_feature (142)..(142): n is a, c, g, or t
  misc_feature (158)..(158): n is a, c, g, or t
  misc_feature (243)..(243): n is a, c, g, or t
  misc_feature (250)..(250): n is a, c, g, or t
  misc_feature (253)..(253): n is a, c, g, or t
  misc_feature (256)..(256): n is a, c, g, or t
  misc_feature (271)..(271): n is a, c, g, or t
  misc_feature (338)..(338): n is a, c, g, or t
  misc_feature (394)..(394): n is a, c, g, or t
  misc_feature (447)..(447): n is a, c, g, or t
  misc_feature (545)..(545): n is a, c, g, or t
  misc_feature (595)..(595): n is a, c, g, or t
  misc_feature (610)..(610): n is a, c, g, or t
  misc_feature (650)..(650): n is a, c, g, or t
  misc_feature (689)..(689): n is a, c, g, or t
  misc_feature (709)..(723): n is a, c, g, or t
  misc_feature (774)..(774): n is a, c, g, or t
  misc_feature (782)..(782): n is a, c, g, or t
  misc_feature (849)..(849): n is a, c, g, or t
  misc_feature (912)..(912): n is a, c, g, or t
  misc_feature (998)..(1035): n is a, c, g, or t
tatggcgccgggtcgggataggagcaacagcataggagttgagacgtccgggcggcggtggtaaagngtggcgggtgttagctgcggcgggggccgatagcaacagacgtcncgtgntcgnaacaaacacatcagtcggtcntcggtcttaatatggnctcgggggacgacgcagcgagcacatgtttgtttcgtttcccccgcgtgtatacacgtgggccggccgcatgaaatgtggaactncacagcntcnagnggcgggcgggggggnagcacacggcgatgaggggcggtgttgtggtcatatcaaggtgtttttacacgcggcgaggatcaanaccgaggggggcacagtgagctgttgcggaagcgggatgataacctcaccataagntcatcagtggtcggagtgcccgcgcggcatgttctattcttggtcaagggcanaaattggaggattagtgtcaaggagtcggccaggagtaatgatggtcgtcgaggggggtaagccgtacgatgtaaatacattagtgcagtggtcgtgntagtgagcaatcgggttgagaaggtagattgttggttgcgtcgtcaccanttgtcctacgccaanaattattatcaatgttattagtgcgcaaggtgagagtatntaatcaaaaaaaatatcgcaggcgggggcccgagaagtngtgttaaataaataatgtannnnnnnnnnnnnnncgcgggcgaggaaaaaaaaggtgttatgcggggctgcgcgatgtctggttncgggggantatatgctcatgattattaaaatcttattatggagagacgtgcggtacacgcgcgctagtaggtgcnaaaatgataaagtgatatacccgcaggagtgtgagagggtgatataagcgtcgctcaaagtanatacatggggcgcgatttgttcgcgaggaatgtaggtgtgtttacgagaacaggcggatctgcgcgaggtgtaaacagaccacacnnnnnnnnnnnnnnnnnnnnnnnnnnnnnnnnnnnnnnaattgtccgtgagccgtcgtgaggtcgcgatggagaacaagggatatttgcgtgagggcgagaaccaggggtagggtgccaatggtttcacttgagcgttacgggggccgcggcggcgcccgaaacgagaaggtagtagggaagagtgctttgagggctagaggcgggcggaacatgtatggttagtggtaggggggtgtgttggtcgggattttaatttttttaatgtatctatttaatggaataagttgatcatagatttgtaaaccaaaaggtaatttctcaagtatttggaaataagaaaaagcctccctaccaccaaccttttggtcatctttctcattctcttacaatcatcctaatcccctagtacacccttaccatatatcaataagggcaccataatattatgcaaagaacagatatatatgcctgatctcttattagacttgcaccagagactgttgaaccactccaggcatgaactccaaagctgaggcacactgaccaagcccctgggcatctacagaagcaaaggcgttctctctccagctggctgctccttctggaagagccctttaatctgggttaatcggccatagagcctctctctcaatggagggatgtggtagctagggtccagaatgtttgtcactcggcgctctctctcttgcttccataacttgtatgggtggggagggaagaacggtcgtcctctctctcttcgaatctgtaacgtaattccacttacagccagcatgccccatactgccaggataatgaagtcattagtttgaaaaggcacatttgtgaaagctctgtggaaatccttgttgagcgctctcttgagtacgttcaaagtgatgtaggaaaggcttgtggaccagtaactgtcaatggctaaaaccaccgaataggagccaatgactccacaagtcagtatgttcagtattcttaggcagcccatgaaaactactggaatgaggatagctatgcaagagaaagtgacccagaatacaccatcatcatgaaaaatctttaggtttcccagtggagtaaagaaagtcactgacgagatgaggaaccccagcactagtccaacacagagcatgcagatcgagaggattccaaatcgccaccacacagctaccaagaacattccaccgacgcttccagtgacagctgtcagaatcagattcacatcatacttgataggtgtcagtcttgtaatcagtatataaaagaagaatcccatgatgataaagcctat

SEQ ID NO: 311933 - DNA, 869 bp, Homo Sapiens
acatttacttggagtataatttctttgaaacgactatcaagtttgccccagcaaaccctaggctatgcgagaggcgtagatcccccaccatgtgacgctgggacagaccaggactccaggtggaggttgcagtatgatgtctatcagtattttctgcctgagaatgacctcactgaggagatgttgctgaagcatctgcagaggatggtcagtgtgccccaggtgaaggccagtgctctcaaggtggttaccctaacagcttaattgataaggacaagtgtttccttctcctccctcccgggacaaggtgtcattatacaatgttcattgtttggggacccttttttaaatacatctggctgcctacattcctgctcacacatacgcttgcagctttgaggcaggagagggtagttgtgcttccctaggaagagtgtcttccaaagtgttcttcactctttttgccctgcttggtttcttcatttgtttctttggacacagattctggaaaacagaattattcttcataggctttatcatcatgggattcttcttttatatactgattacaagactgacacctatcaagtatgatggaaacctaaagatttttcatgatgatggtgtattctgggtcactttctcttgcatagctatcctcattccagtagttttcatgggctgcctaagaatactgaacatactgacttgtggagtcattggctcctattcggtggttttagccattgacagttactggtccacaagcctttcctacatcactttgaacgtactcaagagagcgctcaacaaggatttccacagagctttcacaaatgtgccttttcaaactaatgacttctttatcc

SEQ ID NO: 311934 - DNA, 844 bp, Homo Sapiens
ccattggaaatatttggatcctgctcttggtttccttgatcccttaggccttggctatgtttactgctcctgttcaactgatgatgtgaataatttctaggttgttcttggttttcctctctctttgtgatactttcttgttggttagaatctgtgaaggaactaacaccaggagccaaaaaatcagtgttctctgagagttttttctcctgaggctcactcatatcttcttttatgtccaatgtaccttcagttggtgcatactccaaattcacacttaagtgaccatcactgtcctcttgatccttcaatcccagctcttggctagaactcttgccctgttctgctgactgttcatggctttcctcttttgactttagtactgatgatttttcagccttatggtgggaatcgtcttctgtggatactgctgtttctttttcattttcttcatcttcagcccttaaactggggtttgcagtgttgtcgggtgctaccgtttcagcagttggtttggaatgatcagataataatcttgcatttgtcgggattgcagctgcagttcccaggagacataggaaaaaagcccagtcttcatgctttccagatctttaagtaaggggctggactcagagccactgcagaaagattgaagttgaatcccctctgcacacagacagggaataaatgtttgacacacacccaagaacaactctttaaatccctttcctcgttagctccgcttctttgcccagaggcacattcaagtctactggagttgaaattctgatgctctgtcaactagtgggggtctgaagtgacagacgagaatttggaggttggc

SEQ ID NO: 311935 - DNA, 723 bp, Homo Sapiens
  misc_feature (703)..(703): n is a, c, g, or t
caaaaagataagcaaaccgcctagcagtctttgtccagcagattttgtcaatgagctctttcatggtcattttgtcccatttgtcagcatgttgagcctcccagggtgcatcagttggaatctccttccccatgttatctattgtcctccacagattattgtaatccaaatatgcaatgggattccatactggtggaaaggcgccccgaaatggatatgttttccccttgacatattgaacgagacgctcactgacattcactttgtaagtctctatgcccagctccttagacaagcgtaagattctgttttgggttggtcccacataagctccaccaacatctacgtaatcaacatgctcattccttatagtatatgttcttcctccaaccctgtcccgagcttctaaaaccaaaacactaacgccatattcagtcaagagtttggcagcagatagtcctgaaatgccacctccgatcacgactacgtcgaacatgtggcccgcgatactcgccttctcttgattctccatgctttggctgacacgctcctgggtcgtaggcacaggagtggggacggcaaagggtgggaaggacccttctatcaactcccccggggagcccggggcggagccgatccttcttttgatacccggggggagccgggcactgtgggcggggcgaacccttttgctgatactccngggagcgcccccggccccgt

SEQ ID NO: 311936 - DNA, 1198 bp, Homo Sapiens
tgagacggagtctcgctctgtctcccaggccggactgcggactggcaatgctttttattttgaaaggagaagctaaatactttcggatatttttaaagaaagagctaaaaataactaccatttctgcctttacaatgtgatccccaaaagcctttctaaacaaacagtagctggaaaatgctgaaaatgaataaatggaatccctgtccttaaagacatcccagcctggcagaaagatggataagtaaacaacagtggggtgcaggaactgatactgaccattgatgggcacaaagtattatgggaacacagacagcaggcactaacctgctttaggaatgcctgggatgatttactaagagaactgacgtgaaggatggcaacttggatcggcccagaagccttccctggtactcacccagggcctgatgtagatgtcactcggtggtcccagcagcttgtcacagctgacagcacactgcttattattggtttacttgttcacctttctccacaaaatggtaagctccttaaaagtagaaactttgtcattgtatctacagtgcctgctgatgcataagaactatctgacaagtaaatataaggagtctaggatgatgaaaatacttcttctctaagacgggctgatgtttaaagacagtattttatgtctgtaccatgatatgtttaaagaatgtgtattcgtgtttgaaatgccaataccaaatattagatgcaagcacagggtcgggaaccatgggagacaaacaagacacaatcactgctctccagaaacttacagtgtaaactggaggcttcacggtccccaccaggatctaaacaggcatatctttcatgtgtttttattttggagttccacaaaacactttttttgaatacagagctccatttcgttaaaaaaattgacaactctgatcaagtaaataagaaagctgcttataggtaatagagtttccccttcctttttaagattagaaggaaatttagatgaaaggaattgagaatttacatttttagatgatgtgttcatatttctttggatttcatcttagttttccctcaccagttgccttttagcacctttctaataggcaatctgtagcaatgtacagatgtttacaataatgaaagtgctcattctttcctatatactgcaatatcacgtatttgctactat

SEQ ID NO: 311937 - DNA, 389 bp, Homo Sapiens
aaaaaccttcttatgttgatcaccagcaataataataggcatgccccaaagaatttccttcaatagcagtctgaacccctgtacatccataagccaattcttcactaattaaacaagcatcaaaagttccaagtccaagacctccacagttctctggaatgtgtgtgttcatatcatattctgcagccactgggatgatttcctctctggcaaatttacgagcagtagcttgaaattctttctgctgttcggtgaactcaaaactaaatcctaatcctggttcacgttgtcgattggcgtatgctgtgatctccaatgaaaacgagaaatacttctcaggaccctgcagcatcgcccgaaccccgctgccatgttggctcccgttccgg

SEQ ID NO: 311938 - DNA, 1274 bp, Homo Sapiens
ggagctgaaacagtggcttgtgttctagttattcaatatttctacagtaatttttttaatttttgtacttgtcaatgtgttcacgggctacaataagtctttgaatttgtgaagtaccttcataaatctgatagattttggcatccctcattagtttttctacaggatattctgtattaaatccattgcctccaagtatctgcacagcatcagtagctaactgatttgcaatatctccagcaaatgcctttgcaatagaagcataataggtatttcgacgaccagaatcaacctcccaagctgctctctggtaactcattctagctagttcaactttcattgccatttcagccagcataaatgatattgcttggtgctctacaagtagctttccgaaagttttcctttccagggcatacttggtagcttcatccaaagctctttgtgctaatccaacagcaccagcagctactacaggtctggttttatcaaaagctcccattgcaactttgaaaccagctccgtcaccaattaaaacattttctttaggcactttcacatcttcgaagacaattcctctagtatctgaacatcgctggcccatgtttaattcctttctcccaatctgaattcctggggtatctgcttccacaatgaatccagtaaaggctttattagcacctccgttggttatccacatcttctgaccattaataatatactcatctcctttcttttctgctttggtctttataccagctacatcagagcctgctccaggttctgttacacaataagcacacatcaatggctcctcagtcattctccccaaatacttcttcttttgttgatcatttccagcaataataataggcatttgccccaaagaatttccttcaatagcagtctgaacccctgtacatccataagccaattcttcactaattaaacaagcatcaaaagttccaagtccaagacctccacagttctctggaatgtgtgtgttcattaaaccaagttcccaggctcttctaattagggggactggatattcaccagttttatcatattctgcagccactgggatgatttcctctctggcaaatttacgagcagtagcttgaaattctttctgctgttcggtgaactcaaaactaaatcctaatcctggttcacgttgtcgattggcttttgtatgctgtgatctccaatgaaaacgagaaatacttctcaggaccctgcagcatcgcccgaaccccgctgccatgttggct

SEQ ID NO: 311939 - DNA, 782 bp, Homo Sapiens
  misc_feature (68)..(68): n is a, c, g, or t
tttcctggggtatctgcttcccacaatgaatccagtaaaggctttattagcagggagctttaggatcntggatcagaacgtgccccaataaaaaataccaattagcttttcctccgttggttatccacatcttctgaccattaataatatactcatctcctttcttttctgctttggtctttataccagctacatcagagcctgctccaggttctgttacacaataagcacacatcaatggctcctcagtcattctccccaaatacttcttcttttgttgatcatttccagcaataataataggcatttgccccaaagaatttccttcaatagcagtctgaacccctgtacatccataagccaattcttcactaattaaacaagcatcaaaagttccaagtccaagacctccacagttctctggaatgtgtgtgttcattaaaccaagttcccaggctcttctaattagggggactggatattcaccagttttatcatattctgcagccactgggatgatttcctctctggcaaatttacgagcagtagcttgaaattctttctgctgttcggtgaactcaaaactaaatcctaatcctggttcacgttgtcgattggcttttgtatgctgtgatctccaatgaaaacgagaaatacttctcaggaccctgcagcatcgcccgaaccccgctgccatgttggctcccgttccggccactcggacaataatacacgggtcacggccttgacatactccccgaacgcgggactcctctggtccc

SEQ ID NO: 311940 - DNA, 396 bp, Homo Sapiens
gaaataagtagtaatatataccttagattgttatttaaatttttgttcctctgtgaactaatagaacacgaagtaattgttcacaattactgttgtttaactgccatatatgggtaaattagggagaattttgtttaatatttagtccttttgagatggcttgaatatttgaattttgttgtacgtgtatactgggtagtcacaagtcttataaacactttagaggaaagatggatttcagtctgtatttttaaacatcatttattttaaatctggtgctgtttagaaagaaatttaactgcattctgctgctcttctttagaagcatttctgcgttactggtgttatactgtcatgcatagagtcttctttcttgacgttcctttttgtggcggg

SEQ ID NO: 311941 - DNA, 529 bp, Homo Sapiens
ctcgttctgcagctgctcataacggggacatgggcccaacgggaacttcagcagcctgtcctcagtgatgggcacagtgtgcacaggaataggctgccacgagatgttcgggttgaagcgctgcatcccgttgggagggaagagtccagccaggttggcctcagcactcatgagagtccggtcaaagtctgtgcttcgcacataaacctcttgccggtgataagaggtgtttaggaagccgtgatagcgctgccgcagggcctggcccagttcccagtgctgtagcatcccctccttggttaactgaccaaacccctggggccattcttcttcctgataggggtccttgggatatgtcttcactggtgaacggtctccatggcggtacagcaaggtaacgaagcgcagactccgggcccgggtgggcggcatcaccaccaggttcacgccgagaaggagctggaggagagccgcccggctccagccggaccgcttgcccgccatcaccgttgtaatctatgcagcaaac

SEQ ID NO: 311942 - DNA, 707 bp, Homo Sapiens
  misc_feature (297)..(305): n is a, c, g, or t
cgtgagccaccgcacccggccttgatgtttattttataaagcactgtaattttgtagctgatgacaaaaggcagccaaatgtttttgataaatcagtggcaactgtatttttgtcttttgaaataactctgaaaacatcaggacaacatagatttcaacctgatagcacaccacacacagtgagctgttgctttttaaattctgaagccttgtcaggtttgcttcctagatttcaagtgtttaaaataattctatctatgaaactgaaggatgaagcagatctctgactgacatgtnnnnnnnnntgccctttgagggtgtatggtggagataaacgtttctgaattcagtaaaattgattcctaagtatattatcctaatcctgtttgctacagttggtataaaaaggcatgaaatatgtattcaatacctcttatgtaaccaaaaccatttttaattagcttttaaggactgagagagcatcatgtttaactggcatgcagtctgcctgcattgccaatgaagtcctcaactgtttaatattttgaactaatattatttataatctatgaatttaatcttttttgaaagactttaataatttgagtctctgagaggatactttcaatttccatgggggacttatttgttggggatcttaaataagattccttttgatctaccggaatatacatgtacagagtaca

SEQ ID NO: 311943 - DNA, 947 bp, Homo Sapiens
  misc_feature (104)..(361): n is a, c, g, or t
attgtgtgtcatcttttaactcgtgggacttcatgtctatgagtcctttgccactgctattaggatctagttttactaaaacactcgaaataggagtttaaagnnnnnnnnnnnnnnnnnnnnnnnnnnnnnnnnnnnnnnnnnnnnnnnnnnnnnnnnnnnnnnnnnnnnnnnnnnnnnnnnnnnnnnnnnnnnnnnnnnnnnnnnnnnnnnnnnnnnnnnnnnnnnnnnnnnnnnnnnnnnnnnnnnnnnnnnnnnnnnnnnnnnnnnnnnnnnnnnnnnnnnnnnnnnnnnnnnnnnnnnnnnnnnnnnnnnnnnnnnnnnnnnnnnnnnnnnnnnnnnnnnnnnnnnnnnnnnnnnngtctcaaaaaaggaagtaaacatgtccttcctgttctcattttaaacctgatttagatttccaataatgaaagacaagtgggtgtgtcacatgtgtgctagcaatgtgaaacaaatgctattcatatttctcaattcataattgcagtttgatttttgatgttagttatgggctttggattcctcttcaatcaaatcagcttcacaagttaaatggattgtttttattaatttacaatgaaatagtttttgaatgacttcacacaaaaacctagagataacatcacaattgcaatgttataaagtttaaaggcctattcatttcactgtcagttgaaattcgttaccaggtgaaaattctggagctgggttttgcactgaggatgctacacagccactagcctttttaatttggtcttattaacagaaatactgacttagtgaaattacaggcataggcctcttaatcgctttttatgagtctgaacttttgctttcaataccaaatagtatctgaaaaacatgctcacttttgtgcttcttgagaaattctaagaattggcccagattcatgtgatagtcattcc

SEQ ID NO: 311944 - DNA, 650 bp, Homo Sapiens
ctcagaatgactgcaagactaagggactttgaagtaaaagatcttcttagtctaactcagttctttggctttgacacagagacattttctctagctgtgaatttactggacagattcctgtctaaaatgaaggtacagcccaagcaccttgggtgtgttggactgagctgcttttatttggctgtaaaatcaatagaagaggaaaggaatgtcccattggcaactgacttgatccgaataagtcaatataggtttacggtttcagacttgatgagaatggaatttctgcaactgtattattcactccttcaagagaacttgccacttgaaaggagaaatagcattaattttgaaagactagaagctcaactgaaggcatgtcattgcaggatcatattttctaaagcaaagccttctgtgttggcattgtctatcattgcattagagatccaagcacagaagtgtgtagagttaacagaaggaatagaatgtcttcagaaacattccaagataaatggcagagatctgaccttttggcaagagcttgtatccaaatgtttaactgaatattcatcaaataagtgttccaaaccaaatgttcagaggttgaaatggatgtttctgggcgtactgcaccgcaattgaagctt

SEQ ID NO: 311945 - DNA, 2289 bp, Homo Sapiens
tcgaatttcattacttttattgaaaggtatatcctttagtactaaaacataatggtagttggttagtttacctctgccaactcaaaattaacaatgatgtattcaaaatattgaaatttatcagccttttgggaaaactaaaaagttacccataagacatgtgtttacaaaaagtttaagaattagatatactgtggttctttggtttttcattgtgtactgatccataacgtgatgtcaaattggatatagccatcatggatagactcaggctatacattgcactgagtaactgtttacaacactttaacactgtacttcttacattcactaactgccatggaggatcctaaacactacttcagcagcttcattcatagttatgaaggtgtctacttgcttttcttaagatttttgttttggcacagtaagggcatcagtggaagtatattctctatttataaaattgccatcacttctaacttaaaaacagtctgtagtaaaaaattctggagtgttcaatctagtctgaacttaccttagtgtgggaaagcaagttttcgaagtgataatttattttgagttactaatacaatagaaactagttttcttgatgggattcagtttgaggcagtaggttctgtataaaaatttttatcgtagatacaaatgtcacctgttttctagaaaaaaatattaaaagataacttaatgaatatgccaaactttataggtctgtatttttctttatataaaatgccctcaaatttaaatgtaattcccatatagcaataaagtccacatctctagattacctattacttgcattatggggtgtgtttatactgcctagaatgttaacccttattatgccttaaaagtacatttgtgaaatgttgcttttgacataaacctcataacttaaaatttaagtaggagtaggattagaataatgacagtgattgaagctgtgggaagactgatagttgatagtattagtgtgactcctccaatagcattttcaataccacctaaatatattgatccaatatctaaagttagatcaatgatagaaatgaagattcacagtttaccttctcaggcttgtcattagcatttcacatttaggcttttagctttgatttgaatgcttcacagatgaattcaaatctaaacataattccactacagcataatattaggcagttttcccaagtctgagaccatcatgcttatctcgtgatgttttgaggcttcatagcttaaatccattgtaacattatggaatccatagaacaaggttgtggagaaaggcttcagagaagttttttggtgcctgtaataatccagttaaggggacccatttcaggaattgttggaaggtgagttattctgtagtagctatgcttcaattgccgtgcagtacgcccagaaacaatccatttcaacttctgaacatttggtttggaacacttatttgatgaatattcagttaaacatttggatacaagctcttgccagaaggtcagatctctgccatttatcttggaatgtttctgaagacattctattccttctgttaactctacacacttctgtgcttggatctctaatgcaatgatagacaatgccaacacagaaggctttgctttagaaaatatgatcctgcaatgacatgccttcagttgagcttctagtctttcaaaattaatgctatttctcctttcaagtggcaagttctcttgaaggagtgaataatacagttgcagaaattgaaaggcagtagtagctttgactttccaacacaccttctccaatacaatcttttccattctcatcaagtctgaaaccgtaaacctatattgacttattcggatcaagtcagttgccaatgggacattcctttcctcttctattgattttacagccaaataaaagcagctcagtccaacacacccaaggtgcttgggctgtaccttcattttagacaggaatctgtccagtaaattcacagctagagaaaatgtctctgtgtcaaagccaaagaactgagttagactaagaagatcttttacttcaaagtcccttagtcttgcagtcattctgaggccattatcgtgtgcagactcaattagtctcaaaccacagacctttggctgacatctagactcctgttccaacagggcattcagctggtgtagcagtttctgagagtcagttgttgtcagtacctctatcatcttgacagagactcctcgtgccgaattcgccacccaggcctcgcttctt

SEQ ID NO: 311946 - DNA, 1200 bp, Homo Sapiens
  misc_feature (28)..(28): n is a, c, g, or t
gaattccaaattttaaacctaattcccnttccagccataattttaggccagttttccccaagtctgagaccatcaggttattctcgggaggtttggaggtttcatagcttaaaatccattgtaaccatatggaatcccatagaccaaagttgtgggagaaaggtttcagagaagttttttgggccgtaatatcccagtttagggaccattttcaggaattgttggaaggtgagttattctgtagtagctatgtttcaatgcccgtgcagtacgcccagaaaacaatccatttcaacttctgaacatttgttttggaacacttatttgatgaatatttcagttaaacatttggatacaagctcttgccagaaggtcagatctctgccatttatcttggaatgtttctgaagacattctattccttctgttaactctacacacttctgtgcttggatctctaatgcaatgatagacaatgccaacacagaaggctttgctttagaaaatatgatcctgcaatgacatgccttcagttgagcttctagtctttcaaaattaatgctatttctcctttcaagtggcaagttctcttgaaggagtgaataatacagttgcagaaattgaaaggcagtagtagctttgactttccaacacaccttctccaatacaatcttttccattctcatcaagtctgaaaccgtaaacctatattgacttattcggatcaagtcagttgccaatgggacattcctttcctcttctattgattttacagccaaataaaagcagctcagtccaacacacccaaggtgcttgggctgtaccttcattttagacaggaatctgtccagtaaattcacagctagagaaaatgtctctgtgtcaaagccaaagaactgagttagactaagaagatcttttacttcaaagtcccttagtcttgcagtcattctgaggccattatcgtgtgcagactcaattagtctcaaaccacagacctttggctgacatctagactcctgttccaacagggcattcagctggtgtagcagtttctgagagtcagttgttgtcagtacctctatcatcttgacagagactgcagctcctcagcggtaaccaccctccccgggtggaggcctcggcagcgccgccgagacaactcggccctgatcagggtcagctcggagccgaaggccc

SEQ ID NO: 311947 - DNA, 1013 bp, Homo Sapiens
  misc_feature (928)..(929): n is a, c, g, or t
cgtgtccgactgcccgaatatataggcccctaactggtctgtcgcttgacggtctgttcgtggcacgaccatgataagttccgctgttggctaagcttgcaccttgagagttcctgaggaacttctgaaaggggccagagttacaccgtcctatcgtgcacccttatccctgctgtccacgctgaggcctgagcctgcctctctgccttctcagcagagcggcacggccgctggtgaccactgctctcaggagtatgtgggggatgagatggccagaggtgatgcaggctcagaccccggcttcaggagctcggggtcggggtcgtgggacggtgcgcgatagcatcagtccacaggggcaggcagaggcggtgtggagatgccacggggaagccacctgcccatcgggggtccacgggagtccaggctacaggcagaaagccttgaactcaggccaagcagcatggaccttccctgagagcctggctgcaggtgagggatggcaggctaggagggtgcccaggaggggtgggtgcagacgtggccagagggaaggcccaagagacgtctctgaagccaccgttcctgattattcagaggcagggtccacagtgagtgactcggtggggctggaggaacccagggtgacccagagggggctctggagcgggtccctaacatctgaaaaagtcctcccagggaactcggagctggaacttccaggcagcttcgggggtgacatttgtatccggccagccgagcggggaaaggagaccttgtgtcctggcaacagggagagccgggactgggatggccacagctcagcactccaggtgaggagcccagggccctgctcgagctgtgacctccacggtcacggagtcctcggaaaaagagaagttgagcccgttcccctggtagcagatgnnggagacgctcactctggagatccccgacagacacacagggtcaaaggtcacacccgctcgggtgaccctgacccccgtgcaccc

SEQ ID NO: 311948 - DNA, 557 bp, Homo Sapiens
gcagcagaaatactattaattgtgacattttaaaagcgtttgctgcagaagtggtttcttcagtaggaaatggttagacttgcctcagttcttaacaagtgtctaaagacagtaggctgtagaagaacaagtattaggttttaaattttataatgtgccccatttattcacattgattgactatccagctgttacaagagcagtcgatctttattttgtgtaagttagtttcatttcatcagatgatctgcacagaactcagaataaaccatcaattttaggtataggctgttttgttgttggcattatcttttagatataaaatcatagctagggtgatctgtagacaagaaagtcttccttgaagcagggataatattcaggttattataaatatttaggcttgaagcatagagctactgtggggtgaaaaatctctgtaggactttctggggcttcagtaccatttacacccacgatgaagggcttaaatagaaaataatggaaaattaaatattactttaaggaaagcaaagctgcactaaaatttttaaggg

SEQ ID NO: 311949 - DNA, 525 bp, Homo Sapiens
  misc_feature (459)..(485): n is a, c, g, or t
tagtgagacatctttaagaacaagcaacaaaaagtgttatcctaagctggttttgttgctttttgttgttgttgttgcaacttaacactacaaactcccaggacaaccgtgtctttctaggaccaaagttttattgttacaaagtcaacatttcctaatgtcaaaggaggtttgcaacccaatagctgtttgctcttttcactgtggcagtagagtcaaataaatgaaactggtgaatcccatttgcaaggggcaggcccagcacaccctacctttctccagggcaggtggagaaaggtgagtctgcaagggcagtgcctaaaagtacaagagcagcaagatttgggccccactggtcctgcctagactctcacatgggttatcaaagctgcacaaggtccaataatatcagcttgaggtcagtcaaaccccaacacagaggtccaaggtgttgttgcnnnnnnnnnnnnnnnnnnnnnnnnnnngcgttcagcacattaatgggttttggattggaatttccct

SEQ ID NO: 311950 - DNA, 762 bp, Homo Sapiens
aaaattctctcttcacaccactgacaatggatcaggtattgaatcttcttggctgtttcatctgctgaagtaggtcccctcaaaactctcacaactaccaacacaaaatgttccagagccactgcaaacagtacttctatgcctttgttgcatcgggctgcagctcttgccactgcagctacaacaattctggctgctagttccttgtaatattcagttcggacaatgttacatccgtagtgacgccgggcaacatgctgtgccttggcatataaagaactgatatctgtagaagtcactgacactatgccaaggtttcttatatttctgaatgcagaatctagataattcactgatgttccaaaagggtctagatgtatgaaatcaaaagatctcaaatgcatcagtacattggcatccattttggtcaccttaatattaccaagatttttctctccttcttcaagaatatcatcactcttttccttttccttactgtccaccaccactttcaatttgtttaaatggcagttttcctgaatcagtgtcacagaattttcattcaaagtcattgattgtaactttgactgcatttccaagatgttttgcccactgtaatcccattatcccagtggctccaaaagcatctagacattccaaaggttttcgttcctcagccaaagcagccaatgtacagaatattagctgccgatttagtttcattttggggttaaaataggaatctgttttctgaggtataga

SEQ ID NO: 311951 - DNA, 319 bp, Homo Sapiens
  misc_feature (29)..(29): n is a, c, g, or t
  misc_feature (31)..(31): n is a, c, g, or t
  misc_feature (54)..(54): n is a, c, g, or t
  misc_feature (133)..(147): n is a, c, g, or t
tgtccatcatgtgatctgcccaccttggntnccaaagtactgggattacaggtntgagcatcgcacctggccttatatgagatttctttatttcagtctaagtttaagttagtttagtctaactttaattttnnnnnnnnnnnnnnntatatcgatctgattgtcctggatatgagtactgacttgaattagaactttcttggcttaaagtactcttcagtatcatgcagaagtcaaaaccttgtttatcaccaactcagaagccaaatatccttatatgaaagttaagacaggatttaattttgattaatttatagga

SEQ ID NO: 311952 - DNA, 1698 bp, Homo Sapiens
  misc_feature (392)..(392): n is a, c, g, or t
  misc_feature (417)..(417): n is a, c, g, or t
gaccaccaccacgattttattcttaaataaagctcagtctaaggccaggttaggtgtacaggtaggtgaaaggggagggagtgcagatcccgggcacttccactgtgggtgagtgggccagcccaggggagtgtggggcagctgagaaaggcaagcaggtacacagggcagtaggggacgatggaaccactggagtcattctgcatgttctgggaaggtgcagaaagaaccctggaccccacgttctctgtgggtggtgccaaaaagctcagcatggtcccgagccccaagagtcccctgcccggactccccctgtccagctcagtgcagcatcaaccagggcagtgatggctgcctgctgccattaagtctcccgacaagatctcaggttnagggggcggcaaggagagccacatngccgtgccacccacgttttccacacagccatgctcaggcctccgggcactcaggcctgcaggggcctccccacctgggatctgaggtgctctccaggtgcgactgggctcctgagcattgcaggtgccggccccctggggcttcaaggataccgggctgctgactggaggaaaacgggaggagggcagaggtcttcatgcttccttcccacggccaggctcagtgctggtgctcaggctccgacttcccgcaggaattccctcagtatccgtggcagctcagggctcttgtaaatgtatttgtgcctgtagccaaggtctgaatgaaagggcacaaactgaactttgaagtctcggaagcttcgagctggtgcggcgatgctatagagctttctgccaagctggaagggcaccaccgggtcgtcctcagcgtgcaggatgagcaggggacaggagatgtgcttcacgttttcatcatttgcaaatttaattccactacttgtaataggatcaaggaagaaccagtcaaacccagggaagtatcgatatatcactgaaaatggatggctcttagcttcttcgcggatattagtgaatggagattccaatataagggcatctggaggcgtctctcgctcacagaggcgccgcaccagatttgtcgccacgccagtgcccagagagtggccccagatgtacacggggttgtcaccacttcttgctttgatccagtcaaaaacgtggagtgcgtcataggtcatgccccgctcagatggcgttcccactgagtcaccccaacctctgtagtcaaaggtgaccacatggtaaccaagggaactcagcaccttgtaaagctccacgcggtggtcgcctcctctggtacctgcgttcccatgcaggtacagaatgatagggtggctggaagccaaggcatcctcataccacatctggtctttgccttgggcgttcttccaccagactgcagggacggtgtgccagactccaatggtcacgtcttcctctggctgcaggtagtagttacacgtgtgattcaaaccttgatcctgtggttttttcaaatcaatgaaatagggaactcttacgaaattcaagaaaatcagtttggcctgtattccaggacatagtttgatgagaaatggaatggcaatgtacaaccccaaaacacagaaaagtatcttcctcaggcgcaaccacacgccctttcgcctcgtatcaggaaagagcggcctcctcaggcctcccgatccgtcttctgtgagac

SEQ ID NO: 311953 - DNA, 863 bp, Homo Sapiens
gacattataatgtagttagtgttttatttcagtgcagttagcccatggtatggtttatctagagttacagactttgtaaggtttgcagctcagggcagttcttcaccgttggcaaaagttgaatccggcgagggctgggaattcacctgccctccactttcagctgcctttgggttagttttgtctgctgctcttcgatgaccgtgtcacctgttggcttcagtcacaccagctctgaccacatgctgggatctgggctggaacctgggccctgctgaggtctcagtatccgtggcagctcagggctcttgtaaatgtatttgtgcctgtagccaaggtctgaatgaaagggcacaaactgaactttgaagtctcggaagcttcgagctggtgcggcgatgctatagagctttctgccaagctggaagggcaccaccgggtcgtcctcagcgtgcaggatgagcaggggacaggagatgtgcttcacgttttcatcatttgcaaatttaattccactacttgtaataggatcaaggaagaaccagtcaaacccagggaagtatcgatatatcactgaaaatggatggctcttagcttcttcgcggatattagtgaatggagattccaatataagggcatctggaggcgtctctcgctcacagaggcgccgcaccagatttgtcgccacgccagtgcccagagagtggccccagatgtacacggggttgtcaccacttcttgctttgatccagtcaaaaacgtggagtgcgtcataggtcatgccccgctcagatggcgttcccactgagtcaccccaacctctgtagtcaaaggtgaccacatggtaaccaagggaactcacc

SEQ ID NO: 311954 - DNA, 1518 bp, Homo Sapiens
  misc_feature (1062)..(1062): n is a, c, g, or t
ctctctcttcaaacttctttcgtcctcacagtttgcccctttcacgtgtgtcttccgcctctattttttccccgctctctgtgtcgggttaccccctcattcttccactatcctcggtcccctcgttcccctccaggcaggtcacccccggcctctccttgtgtgtaacatcacctggcttttccccgcccttaagtctcagacccgccatttgcacccaccgtcactgcagtttccagatgaggaattaacaatccgaggggctacattaacttaatacaggttaatacaacagctccgctgggacctgaagtagatgagaaccccagatatcttgaactcctaaaaccagtgctcgtcccaccttctctctctcttccagcatgttgctttttgaaagtatcatgctggaagagagagagaaggtgcccatttttctgtgaataatgttcatcaatctttatattatttgagagccagagcaaactgtaagagatactaagtaatggaggctaagggggcactgtagttttaggcaagcaagtcaatttttctttttaaggattctctaaacctgccataatggaaacatgaagcaatagcagcctaagggacagaacacttagaagcacagaaaacatgtctcattcaatctacctttcccaactacgttaggttagccttgggatgttaaacctgccaaactattcccaaggctcagcctaatcaattttgggacattctctcccaaaaggagaaatcacatctctccagtttctcacacaaaaaaagcatttgcagcattatccaatcctagcctttcctatttctgggccctacctggactacagggagtgtgtggaagtgtcaatctaacgaaataaataaacttagagccccttttcaacctacattaccttctcagcagcccccagcagaatcacagtcatttctggctagcaagctgagaagatctgactaggtgcccatttcatccctgcctataatatataaacgtccagtggttgaggaaggggaggagaggggggctcaggttacccncgcaagcttgctggtgacgagcgaggactttctctggggcagatcctgtggggtggggatgtgatcaccagtcaccaggttcttgtctggtcctgcacttggcagctgcttattcttcatcttggctttggccatgttgtagtctcctgagtcaaagtacttttgccctttctggagtctcttcatgaggaagtcggagcctccaggcttttgtcctaggcttgggtatttggcctttagctttgcctcttcagctctctcaggcagaataccttctttctcctgcgtgtcctgcttctcctcgccggtctcctccgcagggttctcttcttcttgtttctgggacatggcgggaccgggactgtggagtgtaaggggcccgggaaggcaacccggagaagggaagggggaggggaaacgggacaacctgcgctgctgcttcggctcctgtcactc

SEQ ID NO: 311955 - DNA, 962 bp, Homo Sapiens
  misc_feature (710)..(730): n is a, c, g, or t
  misc_feature (766)..(804): n is a, c, g, or t
  misc_feature (806)..(806): n is a, c, g, or t
  misc_feature (867)..(867): n is a, c, g, or t
gggacgggcaagggccgccattttgactgagcaaccctagtgacaggagccgaagcagcagcgcaggttgtccccgtttcccctcccccttcccttctccggttgccttcccgggccccttacactccacagtcccggtcccgccatgtcccagaaacaagaagaagagaaccctgcggaggagaccggcgaggagaagcaggacacgcaggagaaagaaggtattctgcctgagagagctgaagaggcaaagctaaaggccaaatacccaagcctaggacaaaagcctggaggctccgacttcctcatgaagagactccagaaagggcaaaagtactttgactcaggagactacaacatggccaaagccaagatgaagaataagcagctgccaagtgcaggaccagacaagaacctggtgactggtgatcacatccccaccccacaggatctgccccagagaaagtcctcgctcgtcaccagcaagcttgcgggtggccaagttgaatgatgctgcccggggctctgccagatcctgagacgctttccctccctgccccacccgggtcctgtgctggctcctgcccctttctgcttttgcagccaggggtcaggaggtggctcgggtgtgggctggagaggcagaagccctttcctgttggtgtcccagcacatggagccccttgggctgagcaccaagaccttgaacnnnnnnnnnnnnnnnnnnnnnccaaataacagttgggagaaatatcaatgaaattcnnnnnnnnnnnnnnnnnnnnnnnnnnnnnnnnnnnnnnnanaatttggaggagtttggaattaagggtttgggagttgggtaaaaaaatttctggaatattntttgtttaaaaaagtgggttggatgtgggggtaaggtatgagggggaaggaaatgggagttatcctaaatggaaaaaggggtttgtaagttggaa

SEQ ID NO: 311956 - DNA, 376 bp, Homo Sapiens
  misc_feature (268)..(325): n is a, c, g, or t
gttttggaattctggggacaatctgactggatatgacactgcagaagtagatcttacagtcgctgtgttttctgtgctgatgatgtccttgtactgtacttaagttagtgttgcttgtttttgttttgttctcccatgtttagttgcaattactggctctcaagctatagtttgttttcaaaaaggaaaaacaaaatagttttttactggattaaaaatgcttattttagaatcctcccctttttgaggctttttggtaataattgcnnnnnnnnnnnnnnnnnnnnnnnnnnnnnnnnnnnnnnnnnnnnnnnnnnnnnnnnnncatctgtacaagaaattttgttatgcactactactttttgtattctagaca

SEQ ID NO: 311957 - DNA, 776 bp, Homo Sapiens
  misc_feature (626)..(626): n is a, c, g, or t
agcttacattaataaaaacagaaatttatttcttacagttctggaggatggggagtccaagatgaagatgccagtagattctggtctctggtgtctggtgaaggcccaccttcttgttcgtagatggtgccttcttatgtgtccttacatggtgtaattggtgaacaagctctctggggcctcttttacaagggcctgcctccttgacccaatcacttcccaaaggccccacctccgaagaccatcgccttcagggttaggatttcaacatatgaatttgtgggggatataaacattcagatcatagcagataaaaagctaaattcaattgcctgtttatatatcataatacatttagcaataaacaaagttaataaactctatcgagtgtattttaaagcattcaaactatccaaattacaaacatatctccaataatttataccacaacctgaagaaattatctttgtaaataaattatgattacttctcaaacaattcataagaatagtaatatgtataatggcaataaaaattaaccacaatatcgtataaaattgtaaactgaactgtcttattgatgctgataacaattaaaggatggtgtcctaatattttttaagcanacttgatagtgctctacaaattaactggttttaccagtgcttacagccatgcccaaaaatttgctaggctgctactttaaacatttacttaatatgattcttgcgtcaaattcaattcaagtctcttataagtatcaggttgcccggccg

SEQ ID NO: 311958 - DNA, 975 bp, Homo Sapiens
  misc_feature (170)..(215): n is a, c, g, or t
tataaagctggtctataaagcaaggctggtacaggtccggaatcctgggatatcgtcgacccacgcgtccgtgacatttttgttgagactaaaaaatggcagtcgctaaagtagggactctagagtctggcttacgtcagtgttggtagtttagattgtctttgtcaacnnnnnnnnnnnnnnnnnnnnnnnnnnnnnnnnnnnnnnnnnnnnnnagcacagttctagctcaaatttgtgtattttttgtgtgcctgggctggagatgagagactgagtcataactgatttaaaagtttgtgttatcaggtatcttatttgaacatggtcatttttggccacattgctgtttcatactaggacttgggatgatgtagccagaataaaactcaagttgcaccctccggttggtggaagattgctgaccgtgccgtttctgggcaggagaagacatcatggtgtccagcaactcagcaaaggcattcttaagagtcgtgaggtccttctgaatgtaaaactggagcccaggagaagctgtcccaggagggctgttaactccctatagagccaggagacaggataggggtttctagggtccaacaccagcttaccttggagtatgaatctacccatgaaggatgagagatgttttgaaaaactagccaggacacacccacaggatcctactggctccttagcagctgattggtgttacataattaacttaattggagatgcattaggtcacttgaatgtataagcaagcacctatggtaggcgctacagacatttaaatctcttgggaattcgatgctcccatggaatttataccagttatatgaattgacttaagtaatcttgaaaaagaaactttagagaaagcatcaggggtgtgtactcagtatttcaaatcagaacacaagattggaacttttggaaaaatgggttcaagctttcctattagccatggaaatg

SEQ ID NO: 311959 - DNA, 1249 bp, Homo Sapiens
  misc_feature (618)..(659): n is a, c, g, or t
  misc_feature (758)..(788): n is a, c, g, or t
tgatggaggtgacatttcaaggagaatatccttctactttggtttcacagggtgctgaaataattccctcaggaactgagcatcctgtgtttcccaaggcttacgagctggagaaacggactagtcctcaagttctgggtagcattctaaaatctgggactactagtgagagtggagccttatccttggaacccagtcatataggtgacctgcagaaagcagacaccagtagtcaaggtgctttagtgtttctctcaaaggactacgagatagaaagtcaaaatcctctggcctctcctacgaacactttgttaggctctgcaaagaacagagataccagagaggcctagaaaggaatgatagctggggttcttttgacctgagggctgctattgtatatcacactaaagaaatggaatctatttggaatttgcagaagcaagatcccaaaaggataatcacttacaatgaagccatggatagtccagatcaatgaaggaccagactgcctattcgtaacctttctgcagcattagagccatcgttcatgggggacacaaggcttttatgctcctagatcttcaacgcagcagaggaaccataagtagaatcacaggnnnnnnnnnnnnnnnnnnnnnnnnnnnnnnnnnnnnnnnnnngttatttaaaaaaggcaactgaaagtaattagacttcttaaggaatcaaatttatttcaagagactacacatggttatttaatctccggtactgaatannnnnnnnnnnnnnnnnnnnnnnnnnnnnnnaagtgtgaatgcaagtgattaatgaatacagacttaacaagtgtggttctaaagttcctgctgtcatcaacttgggcaacaaatgacccactggaaaggcaaatccacttaaaagatctctgtatcttgttctgtgactgaagtgatacactaatcacggggaacccagaatgattcaacattttccccccactcctcccttgatctttttggttttactttaattaagccctgcgagaatgctggataaatgccttgaagttagcagggtgtatttttttagcggatatgatttgcatgtcttgccaggagttaagcggcctctggggtgttggggaaatactttatttctttccatttattttttgtggggcggggataggggagggcattgaagttctacaattctggaatagttagttgatggtacatagttaacttggctccggttacatattgga

SEQ ID NO: 311960 - DNA, 670 bp, Homo Sapiens
  misc_feature (179)..(241): n is a, c, g, or t
ttctatctctttggatctgtctttttctcgttccttttctttgtcctgttccttttccttctctttgtctcgatccttctcatgctctttttcccgttctctctctctgtccttttccttgtctttttcccggtccttttcccgttccttgtcccggtctttgtttttaccccgttccnnnnnnnnnnnnnnnnnnnnnnnnnnnnnnnnnnnnnnnnnnnnnnnnnnnnnnnnnnnnnnntccttttccttgatcttttctcgagtgtcttttctcttgtcccgtgaatgcgaacgactccttgacttccgtctctcccttgatttagagcgttttttatgtgggctcttagatctacgtctgtctttctgtcttgaacgtgatctattatgggatctactcctgtgttttgattgtgatcttttccttctagaatgggattttgagctagacctggattttgagcgagtatgggaacgagatcgaccgccttttctttcattgctctttccagactctggttcaatagctgctgagataaatgactgagcttctcgtactcgcttcattacttcttctaactccttagctgcagcctgaggtgtcatctcagggggttttactattgcattgttggagtgatttattttcagtggcctgtctccaaac

SEQ ID NO: 311961 - DNA, 559 bp, Homo Sapiens; identical to SEQ ID NO: 135277
  misc_feature (147)..(202): n is a, c, g, or t
  misc_feature (368)..(421): n is a, c, g, or t

SEQ ID NO: 311962 - DNA, 772 bp, Homo Sapiens
  misc_feature (714)..(714): n is a, c, g, or t
  misc_feature (730)..(730): n is a, c, g, or t
gggattcccgtggaggaactttttaagctgctgaaggaaggacacagaatggataagccagccaactgcaccaacgaactgtacatgatgatgagggactgttggcatgcagtgccctcccagagaccaacgttcaagcagttggtagaagacttggatcgaattctcactctcacaaccaatgaggaatacttggacctcagccaacctctcgaacagtattcacctagttaccctgacacaagaagttcttgttcttcaggagatgattctgttttttctccagaccccatgccttacgaaccatgccttcctcagtatccacacataaacggcagtgtttaaaacatgaatgactgtgtctgcctgtccccaaacaggacagcactgggaacctagctacactgagcagggagaccatgcctcccagagcttgttgtctccacttgtatatatggatcagaggagtaaataattggaaaagtaatcagcatatgtgtaaaggtttatacagttgaaaacttgtaatcttccccaggaggagaagaaggtttctggagcagtggactgccacaagccaccatgtaacccctctcacctgccgtgcgtactggctgtggaccagtaggactcaaggtggacgtgcgttctgccttccttgttaattttgtaataattggagaagatttatgttcagcacacactttacagagncacaaatgcagtattntaggtgctggatgtatgtaaattgtttcaattatgtattaat

SEQ ID NO: 311963 - DNA, 538 bp, Homo Sapiens
tgagccgccatgcccggccaattttcaactggcccatactttatagtgatggaaagcgcataaactacttgtaaatcattaaaatagggtgataactgtgataatagtgtttcttgcattctagaaaattattttattaactacattcaaaacccagcatttcacaggttccatcattagaaacagtatagttctagttaacatgattggagagtttcaggggaaaggtttacattttctgaaactgtatttggtatgtgactcaatgtggtatttcagtcttgttagtcacttacatgactgacgtttgcaaggatttattgccaagtaaaatttgaccagagtgcactgagaatagctacataaggggaaatctctcaaaattccttctgttcatttaatttggagcatattgtttaaatcattttaaacatatgtaaaaagttgaaacattaaaaaatcttcaagaaacaatgaaaaaatagaaattagcaaacataagtttcttaatgcaaaattaatagtgaataaaatatag

SEQ ID NO: 311964 - DNA, 1412 bp, Homo Sapiens
  misc_feature (48)..(48): n is a, c, g, or t
  misc_feature (993)..(1182): n is a, c, g, or t
aactacaaatgccaaccattggcccacaatgccacaggcaagcaatgnagtaggagaagtccccagaaagacacatagcaaatccaagggttcccacatcgtaaaggcccagcatccatgtgggacacaagagtggctgctactgcgcaaagaacccagatgatgttcttccctgttttatccaccaggagcccaaacaccggggacatgggagctgatatgacatatacaacactgttaattgcacttgctgcctgggaagaaaatccaaatttctctgtaaagaaaactttcccaagtccaataaaagggaacacagcaacataatagcagacacagatgataaatataagccacaggggtaaggagaagtcctttacatcagttaatttaataacttcacctgtttttccttgttctttatgaaggattctctctgctctctgatccaagtaggcaagagccaaggcacagattagtgaaagaatacacgttacacccccaatcataagtgtgatcccgagggttgtgtgaccagcagaacctaacaaagcttcaatcttagaatacagccatcccatgaggttcatgtttactgtacttccaattctagccatgctaagttgaagtccaaacaccaggtttaattctttgcctttaaaccagctcacagcatatgtattctgggcaactgctaaggactcgccaccaatcccaaatacaaatcttccaaattccatcagccaaaaagcattaaatattccacccagggcaaaaacaacctgtccaatgcaaacaaagcagctaaaaatgattgtgccccatcgtattaccaaatactcggtctatcaaaaagccaccaaagaaacccagaaactacattggggccagaataccaggcatacagcagcatgaatttcgtggtattcacttgcatatctcgtttaacttgagtctgaagggcagcaggattatcatagcaaaaatagctgnnnnnnnnnnnnnnnnnnnnnnnnnnnnnnnnnnnnnnnnnnnnnnnnnnnnnnnnnnnnnnnnnnnnnnnnnnnnnnnnnnnnnnnnnnnnnnnnnnnnnnnnnnnnnnnnnnnnnnnnnnnnnnnnnnnnnnnnnnnnnnnnnnnnnnnnnnnnnnnnnnnnnnnnnnnnnnnnnnnnnnnnnnnnnncacagtaagggagaaatggagaagggatactgtggaaacagagagcacggtctgcctcggcctccttctctggacacatccacttgtcacttctccagctctcattggtacttgggggactaaaaatccctcagtcctaacagcatggtctgagtgtgcagtctcaatcaggaggctaaggccatcaggaggagaggtgagtgcaggccacggggctgagccttgacaag

SEQ ID NO: 311965 - DNA, 1181 bp, Homo Sapiens
cggccggcagaagagtcctatttttgtggcatttcagcttgcacaagtctgtgcaatggacagtctcaaaagacaaaaactgagaagagggctttaaaacgaagacgatctaaagtccaagaccaaggaaaattgataaaaactctaatacagactaagtcgggatcattgccgagcctgcatgacgtaatcaaaggaaacaaagagatcaccgtgggaacatttggtgttacagcagtctcgggacatatctaaaattaattgaacttttcatacagaagacttttttgttgttgttctttgaagaacagtctgtagtatttgaagggtttgggggagggagaaaatattaatgggaaaggcattcagaaattatggtttctacctttttaaaaagtagatgggattgtgtcaatcttggttaatgagctacagttttacaaagctgatcacttcctataaggacaatggtagacattttataaagatgttttttcacaagattaattactgggacaaaagtaatttggaagcccagttccttaggtgggataggaatgaaagcctaaacctcttcctttagctttgttcctatttcttgcaccttcccatatttatgtgccttttgtctatttataatgccactggaagaggagggataactttttctgttatttgatttcttttataactttgttaggtttttgaagctgcaaacactacaatgctttgagggggtctgtgcctgaagctcaggagtgtggatcagacagtctaaagatcctaaaaacttgccaactggatctttgtttagcaaactcactggaaatgaacacttaatggaatttttaagtctgttctgttaggtagatggtgatgctcttgttattttcacttattcagactggattacttcttacttagttactaactcaatgaggaaaaatccctacaggatctttttttgcaaacaactgatatatgcagacaaatttttgacaaattcaccttttaaacacacttaaccatttgtgaaggttttctttagcttacattttaaacatacacaataaacactaatcctccaaactttcactgtttttattagtatgaatataaaatttgaaggtttggccaattagtacaagtctcatgatataatcactgcctgcatacatatg

SEQ ID NO: 311966 - DNA, 955 bp, Homo Sapiens
  misc_feature (749)..(749): n is a, c, g, or t
gggtccaatactaaatattgctttattaaaatcaaagtcttccctgaacgccacctacaactttccaaaaacttgaatgtctgtgcttaagttttatttccaggctttctaaccttggcatttgataaagctagcttctatcattcagggtgagaaaattgagacattggcacttattgtttagaagtgtaggcaattgactgatattcaacccaggcacagtcttgacaaaaactctgagtagagcttttttcatctacagtttcaaaagctgtatatttgagagtaccccaggtagcactaattatttgtgaggtaatcatgggcaaattgattggttttttagaaaatatcccaatagtccattgtggtggtgggactgactgaggcaaaatatatacttttctctgccctattactattctctactgaagacaaccaacagtaaaatgcacaaaacagtcagtccttgggtaattaaaaaatgtattgtctatttctgaataatcaatatattactttacacaaaatagggctgagtcagagctgtaaatggtgtcttcaaaagcatgaaaagatgagaaagtggcaggatgggacagacaagccaaggtctttgaagtgctccacttgattcttgagaaccgggtgtgaatgacgacttaaggtctatgttttaatttttgtctttttggtttcaccatttcaaaacttaagcttccaactccaagaaacagcattcttgaacncctcaactatttccattagatttgaaaattcttcctctgaagcccaaatgtcagcatattctataatctgtatccccctcaagaccaaatatacttgctaacaagcagtcttttccataaatcagtttcagcctagcacgtcttgttttgaaagcaacattgttcccttttgaaaagaaaaaaaggtcacgcatggtggctcacgc

SEQ ID NO: 311967 - DNA, 323 bp, Homo Sapiens
gagctgtaaatggtgtcttcaaaagcatgaaaagatgagaaagtggcaggatgggacagacaagccaaggtctttgaagtgaatttttgtctttttggtttcaacatttcaaaacttaagcttccaactccaagaaacagcattcttgaacacctcaactatttccattagatttgaaaattcttcctctgaagcccaaatgtcagcatattctataatctgtatccccctcaagaccaaatatacttgctaacaagcagtcttttccataaatcagtttcagcttagcatgtcttgttttgaaagcaacattgttccctttt

SEQ ID NO: 311968 - DNA, 1177 bp, Homo Sapiens
  misc_feature (1067)..(1067): n is a, c, g, or t
  misc_feature (1136)..(1136): n is a, c, g, or t
  misc_feature (1161)..(1161): n is a, c, g, or t
cgggggtgaaaaacaagggtaaataagcaccttataattgacttactgtgaatgacaatccatcttggtatcaacgatagaagccctatcattttggagttggggttaagagtcagaaacaatgtgctcagggatctcctaaaactcttaaaacagggtggccagtactactgggacaaattgtgttttttattattaataataatgataataatactatccctccaaggcacaagtgaactatatagaactgcgtgtgtgtaaactctttactctcgtctcattttgttgagtttagaacttgatgtgctcgtcagtcttgtgtttcaaaacactgaataacttccaaagcaaagttatgccagtgtgttcaaaagataaattaataatgtaccagcaaagagcatcattcaaagtatagtccttgcatattccagttaccatttctctaataattaaaatattcatgataaatatatatatagcatcatatgttaaaaactatttcaaattctacatattaaggatgaaaattttaaaatccagtaataagaggagagacctgcctatcagtacagtgatataggtaaaagatgaaatatgtttttaaaataccagcaattaactattgttttcatgtgttctcctctagaaggcaaccaaaaattccttcatggaaaacaattcttacttctacatgtgtagtttaaatctgatgcattacaagagctaatgtttaaagacaaaacaaaacctgcctgtatgacagcagcaactcgagccaacatttagtgttacatgttatatttttgaaataccgttttgttatcatattccacatattactttccataaagtcagagaagttcaatgtaattgttggctctgattcttccaccttgggatacacattcacaagaagatttatatattttcttactatgatagaggaacataatctgggaaaacttcccatgtctgtaagatgaaaaggatacctttaccatgttgtttttgataataaagaatatggaaaatggtagaaatctctcctctctatgtgtatntgtatatgtgtgtatacacacacacgttattgacattttcacataacatgtgattgccacttcttatanagttatgatatagaaccccatgaanacaactttatattata

SEQ ID NO: 311969 - DNA, 1327 bp, Homo Sapiens
cattcttaaaccattttacattggcatcatcttcagacacctcaccttctaattccactctctccccacaataagcagttgtatcttccagctgtttggtcaccataattggaggctctcttacgaagagctcagtggaacatttctcatcaccggctgtcacataatactctgaatcatctgtcatctgacagttattgataaacaggattctctggcatcctttgtgttcaaagatgtatttggtactgggtcgaatttcttgaccatttttataccatttcacctccaactttggatctgccagctccacaacaaacctcactctgcctcctttgtcaacctgatatgcaggatcaagaatttttgcaaaagctgcgctcttcttctcctctctgcgcatgcgcttgagtcgcttgagcatgccgcgcaggtcggtgattccatactggaaggcgatcttctcgtactcactgggtttcgcgttcttcagcaactcccatacgtccacctggggttcttcctcctgctgcttcacctccctacgtttcaggagaccactaaagtcaagttctcctgcatcctcttgaccttctccacttctcttgaaagcagatctgatgtcaatgtttggagtagtcccagtagattcgtgcacttcaagatcaaatgaacagctgtcaaacttatccttataggtgacctcgcatctgtaatttcctgcaaagttatctttggccttgatgatctgcatctcaaatgtgtacacccgactgtgcctctcaaaggtttccttcagctgaaggtgcttcccggctttgctggccaggtccatccattttcctttgaaccatttgatagtgggttttctcagaagatcttcagccttgactttggctatgaaggtgatatcttcaccaactttcactgttcctccttgaggtttttcaatgaacaagatggacagctgggagttggcattctgcttggcttgttcctccccaggaggagtttcgacaagggtccagtctgaatcttttctctccagggcccgactacccaaacctggaggcaaggcgctaggcggggagacttcctcttcatcttttgctggtgtagttccggcctccttctctttacttggttcttccgggggtggggctggggctggcacttcattttcctctttcttagtgggttctggcatggccacaataagatgttattctttaaagagtctccttccctccacgactagttgacagaaaccccacaggcaggcgagagatggtgcaggtcggtgtgacccccccggccccgtaatggc

SEQ ID NO: 311970 - DNA, 436 bp, Homo Sapiens
aaggtgcttcccggttttgctggccaggtccatccattttcctttgaaccatttgatagtgggttttctcagaagatcttcagccttgactttggctatgaaggtgatatcttcaccaactttcactgttcctccttgaggtttttcaatgaacaagatggacagctgggagttggcattctgcttggcttgttcctccccaggaggagtttcgacaagggtccagtcttttgctggtgtagttccggcctccttctctttacttggttcttccgggggtggggctggggctggcacttcattttcctctttcttagtgggttctggcatggccacaataagatgttattctttaaagagtctccttccctccacgactagttgacagaaaccccacaggcaggcgagagatggtgcaggtcggtgtcccggccgt

SEQ ID NO: 311971 - DNA, 1671 bp, Homo Sapiens
cctcacaccgctttattgcagaatctggaagggggatgagccaatctcacccctctgcccatctatgggcaaaatggagctgaaataaaatgagaagacactcggtggcgacctgctgggcagcaccctgtaccctagggccccttatcagtgggctcctgatctgctgcccccacagcctcaaccgcggggatggggtggggcaggtcaagcctgagaacagtccactttcaaggacttcccaggcacccataggagacctgaaacctataaagagaagtctagatttaagggggcctaagtcccagagtccaggtttggagggctcgggtctagagccctgatttggggagaggactcagtctgggaacccagactgcaggggagagggtgaattctgtgagtccaggtgtggggagggggcttgactcatggaggctctgtaagagctcaggtttgggggcctgggtcagggagtaccagtttggggatgctggagtggggagacaatcctggagcccagaaggagacccattttttttggcggggggagctgagtcccagaggtggtttagaaaaggagccacagtcctgggcccgtggtatgggaaagcctgggtccaggagccctggcttagggccctgcctggctacagccctggcagagcacttggtctccatccggtacgaagccctggcccaccagggaggtagagcagcgggcgcaggagaagcagttgtggtgccagtgtcggtcttcaaaggacacatacttgcctccaccgagtcctacgatggggcgcttgcagctgctgcacttaggtgcaaagagttctccaaaacaggccacacagtagggatcttcatcccgggaggtgaactgctgccctgccaggggcgtctggcatccggtacagaccagacattctcgatgccatggctgatcacggtatgtcactccaccctgtgtcagcgtcttgctgcagcgggggcagcggggagcaagcttgttctcatagcagggcacgccagtagtgagcgcccttgtcgggcacaaaggaaggggagcccagtggctgttcacagccactgcacaggaagcagtgctcatgccatgtctggcctccatattccagcttccgggacccaggcatgacagtctccccacaagcggagcactgcgaggaaaacgcactgcagtagcagtcattgcagagcagctcactgtcctggcaggtgaagggttcatcggctagtgagcgctggcagcggcagcagcggaagcagccctcgtggaaatggcggtcttcatagaacagctccctcgagtcatgcccgataagctgctggcactcagcacaggtgttggcaaaggtattgtcatagcagggcacacagtaggggccgctgtctgtctggatgtacttgcgtccatacagggactcgttgcattttgcacagtcaaatgactcgctcatggtggcaaggggagagaaccctcgaagcgggcggcgggagcggggagcgcgcggcgcaggcggggccgggaaccgggcgccgcgtccctcggcggctcctacctgcgggccgggccaagcgggggccgagcgagctgccggcgaggctgccgactgcagacggacccctcgtgccgaattcgccacccaggcc

SEQ ID NO: 311972 - DNA, 1541 bp, Homo Sapiens
  misc_feature (15)..(15): n is a, c, g, or t
  misc_feature (32)..(32): n is a, c, g, or t
  misc_feature (48)..(48): n is a, c, g, or t
  misc_feature (575)..(575): n is a, c, g, or t
  misc_feature (715)..(715): n is a, c, g, or t
  misc_feature (772)..(772): n is a, c, g, or t
  misc_feature (785)..(785): n is a, c, g, or t
ttcccactgttcttntcttctgtcctctgctntgggcagtctcatganatgatctgtgattttagaatcctttttttcatgttgcttagaatttctgcattctacattcaggctagacatatttccaggtagtttagcatttaaatcattcattccagtgcgactctctcctccttcaaattggaaatgtaatctaacttcaccgcccttagtagagtaccgtttcctaaattcaatgtcagcgtctcttgcttggaaccttgaaggtttatttgctgtttgggaggaactaccatcttcttgttcatcaaaacctggacttgtctcctcatctgcttctgagtcttgacaactatttttagaattatccacatccatcggtgactcgggttcactttccttctcaaatggaggagaatttcctaggcaactttcttgtctagtcaatttgttgtcattttttggcccagtaccaacatcctcagagccaacatctgacaatggactctctggcaccacatctatctcatcttgctgacaacttgcacagtcttccccaggatcgcaagacttgnctgcacttctggtggcttttggcttctctgggcctgttcatcttctgtagtctgctttgcatttgcaaagctttacagttgtgagaaactgttgattgtctctattctctccactatctgtgtcactgtgatcatcattntgaggtgaccgatcaatgttagcattactaaactgctctggtaccagggttactgtntgaggttcacttnccaaaagctgctccgtgtgtttcccttcattttgccacttacacattgctgcagtctgatgctggttcaaatactgtgtacttttttcagtgggtgacttatcaagacttagctgagaaacattttctaatttttctacattatgttggtaaaagttatctttttgtacagaactcatcatggattctattcttgtattgttgttttctttactatccaaactttctgattccgctgtcttgattcctttagtgtccatccaactggtaatagtcttttgtttgaaaacaagcgaggtggcgctgcctctgtgctgtcccgcccgccctgggacgcaggctggcgaggacggtgggaccctgaactgcacgtgagcgtccggggtcgaggacgcgcctctgcctgctgggaaagctccgggcgtccgaagcagccggcgaagttgtagcggcgccccagcggggtcgcttggtgcagggttcacagccggggcccgcattcatgctgggaccagcagcgcactgtccccgggccggcccgggcggagagcctcattcactaaccctgagagagatggactgcgcctccttctcagcgcctgcctgcaccattccctctctgccgctgcctgcttctgcaattgctgatccgccggcctcccaagtcaggccgtaaacactcgcctgccttccctcttccactggcaccccacctgcctcaatgcgccgcgattcctcgtgccgaattcggcacgag

SEQ ID NO: 311973 - DNA, 449 bp, Homo Sapiens
  misc_feature (281)..(289): n is a, c, g, or t
  misc_feature (383)..(383): n is a, c, g, or t
  misc_feature (405)..(405): n is a, c, g, or t
  misc_feature (420)..(420): n is a, c, g, or t
ctacttttatttttgcttacagaaaaacggggggagaattaagccaaagaagtatatttatgaatcagcaaatgtggtgcctgattatagaaatttgtgatcctatatacaatataggacttttaaagttgtgacattctggctttttcttttaatgaatactttttagtttgtatttgactttatttcctttattcaaatcatttttaaaaacttacattttgaacaaacactcttaactcctaattgttctttgacacgtagtaattctgtgacatacnnnnnnnnncttataggcaatacactgtaatatcagaaatggttgggcctgaggcaacctagtaaggacctcgtcttctactaattaattaaaaaaactggcngggcatgggtaggcacacaccngtaggtcccagatantggggaggggccaggggcgggaggggttg

SEQ ID NO: 311974 - DNA, 655 bp, Homo Sapiens
attcagactcttcatccctaacaggagtgaggtatgatctgcgtctctccctgacctctgttgtggaggagacagtgccagcagtagttgtagtcagggttgtggtagaagctgcagcatttacaacagttggagcaacaggaatggtcactgccgtaggaacactgtccttttctttctcagtactatcctcagcccacaaacgatttgaggtactgctttgtgtgcctgctgaggaagaacccgttgtaatctttgtagtagtgcttgtgctggaaagcaggcttttctgaagcccagctgcagaggtaactgttggtgttgatgtggtgcttggaacactagaactaatcaaatcatcttgtcttctaccaaaggagcaacttttatgatacgttgatccttcattaactgagctattttttttaagatcatcttcccattttctccttgtatatgaactacttgttcgcaaacttgaagaatctctgttttctttctcttcaatgtcagatgtactggctagtcgtcttggtattgtaggtgcaacatatgcaagcctagttcctttactatctttctccttttctttattatccaaagaggaggaaagtctgggacttgaagctgaacgtgtaacacctgcagtatcttt

SEQ ID NO: 311975 - DNA, 1292 bp, Homo Sapiens
  misc_feature (1260)..(1260): n is a, c, g, or t
  misc_feature (1269)..(1269): n is a, c, g, or t
gcctcaggtggtgtcccgggttcgcgccccttttttctttgtccggggagcctttccgttttcgttgggccgtagccccccggtgttcgagattctctttcgatcgctttttggtccgctttccctacggtgggtttgatcgcctctcgcgactctgtgtgaggacgtcccccatagtttattcaggtttgtaaagctcccgcctttacacagttgagccacaggaatgttcactgcccgtaggacacactgtccttttctttctcagtactatcctcagcccacaaacgatttgaggtactgctttgtgtgcctgctgaggaagaacccgttgtaatctttgtagtagtgcttgtgctggaaagcaggcttttctgaagcccagctgcagaggtaactgttggtgttgatgtggtgcttggaacactagaacttttatgatacgttgatccttcattaactgagctattttttttaagatcatcttcccattttctccttgtatatgaactacttgttcgcaaacttgaagaatctctgttttctttctcttcaatgtcagatgtactggctagtcgtcttggtattgtaggtgcaacatatgcaagcctagttcctttactatctttctccttttctttattatccaaagaggaggaaagtctgggacttgaagctgaacgtgtaacacctgcagtatctttttctttctgaccctctttagatgctgtgatttcagcaagtgcaccatagctgcccgtctttctaagtcctaacctccaagttgcaggagactcatcttttctctcttcttctttgggagaaatttttgtagctgtggttggaaactttttaataggtgatgtaggtgttgcttgacctgatgacacagtaggtgttgtaacagctacaggagctgcttgtgtactagaagtgttggcattagttacagaagccaggggttttgtcttatctgtttcagcttctgattccgagtcatcttcctcatcttcttcactagagcagctagactcatccttctttccttcttcttcttcatcaaccttttcttgttccagaaattcaatacgggatgcatttttctctggctcaataatcaacgtctctttgtttttaaaggtcttctgtgactgattattgtccatatttgctgttgattcaattagtggagatttctgtcccgtttttcacgacgcgtggtcgacgaatcccggaattccggccgtacactgttttttnaaaccaacngggttcatatcctaaatggcacc

SEQ ID NO: 311976 - DNA, 814 bp, Homo Sapiens
cctgtaggaataagtgacattttgtggttgaaaaatttgcagctctcagacacaattacctttcaagtggcattgagaattattttcatcataaaaaacatgtaagttcctataccacactagtgatatttctacttcttgtcacagactaagaaagtgaaaaaattcaaacatatcctggttccttttcatctgtcataagtaaaataccttattagggaggcataaataatgccttctggaaaagtagtttccaaattttaaaagatacaggagaaaaagggaaaaggggacaaaaatagaatgtataactacactgtgacaatttgtttcataagaaaacagcattcataatttttacatgtctatgagctgaatcaaatagactgctgcaatttagataaatttcattaaaattgactttgaagaattcaagcctaaaggcagagtccatcaagattctctgaaaagttggtttaagatgataaccattttgtgtatactacccagcataatgcaacaatttcaaatggatttaaatttataaatttgtaactattattaaattagcacattttccagattaatctgcagctattttttaaaaatcctcctgaatgctaaaatgtgctgcatcactccgtataaataatggaagagtgtaaactatctacagcagtttggcatgtgcagaacacctggatatcccattcctcttaatgttcctttttagctctttttcttcataaaatcctcaaaactgctgcatggataacatgctgacataggcttaacagaatacttttgtaagcag

SEQ ID NO: 311977 - DNA, 1786 bp, Homo Sapiens
  misc_feature (30)..(30): n is a, c, g, or t
  misc_feature (47)..(47): n is a, c, g, or t
ttctcatacacagctttttttctttctgancctctttctttctggtnatagtcattattttacttcttcagcttagaggatacatcaatgatttcaggagcttttgctggaattaaggtagtaggaggtggaggcttcttgacaatctcttcacgtggtgtcatctctttgggctttgcaacaacttttttggcatctttcttcacagcctttttggtaacttcaatacgttttggtggtggtttcttttcttcgggtgttggtagcaaaagggggataggaggagcaaccacaggagggatttcttctggtggcactgctctgataggcatggttgggattggaactctggagtcaggaatatcaggaggcttcagctcaagtttgatttctttcgtcgttaggtacagctctgccgtgcttcttgcttcacctcttggctccagccgagcgatgaccgagtagacaccttcatcgtctggggtcacattgtggatggtcatataatggcagcggccatcattcctgaagttgtatttctggctctctgtcagttctgttggtcctttgtaccatgttacaatggcatcatcaaaggacacttcacactcaaaggtggcagactgatgctcactcaccacgatgttctgtatgcgctttgtaaactgaattggttcagcttcgattctgagttctgctgaagtttcaaggtcttcatatttgcaggtgtactgaccctggtcttctgctcgaacatctgcaatggtcaatttatggactttgtgttccacttctgttttatgtctaccttggggtttaaggattctgccatttctgtaccattcagattttacatttggtacagaaaattggcatgtcatggtgcaagtctggccttctttcagagtcacatcctgaagatgccgttcccatgcaggctcaattacagttagtttagcgctagcgatgtgtggaccacaaaccaatcgataattgccctggtctttaagttgacagtttttgactctgagtgtatgtcggtcaccatcaatgcttatttcaaatttatcactgggttccagtttttcagttcctttgtaccacgaaagcttgatttctggataattaattttaatgtcaatttcaaagacagcatcattatctttcaaaactgtctgattttcaatgtccttgatcagagtgacaggctctgtctgtgacagtctttgctgaataaatgatacaagttcctcaaattccttttcgtccctctctgacctctctatttcctcaatttccagtctatgtgtctcttcttcttggctttgcttgagcagttcaaatgcttgaagaagacctcggaagtcagtgattccatacatgcgggcatatttttcatattctttaggatcaacatttttgagaagttccatgatatcaatttcctcttcttctccagctcctttctttaagattggagtctttttcagcattgctctaagatcgccttcaattttctcttgtttcttcctttcatccacctgtaagttaacattactttcaatttcaccatgttcgttaaatgccacgcatcggtataacccagaatcagtttttgtggtgtccctaatctccagttttgcttcatcgcctttttggtggatgaaaacacgacctccttggttcagctgtctccacttcccttttgtccatttaacatttgggattgggtcacctccaacttttgcaatgaaggtcgcagtggttttttctacgactctgatac

SEQ ID NO: 311978 - DNA, 1496 bp, Homo Sapiens
ggctggaggcagtgctgaggccgccgtcccctctaccatcagtccagtccggcccgccctcctgcagccatgtcccggcccctgtcagaccaagagaaaagaaagcaaatcagtgtgcgtggcctggccggcgtggagaacgtgactgagctgaaaaagaacttcaaccggcacctgcatttcacactcgtaaaggaccgcaatgtggccaccccacgagactactactttgctctggcccataccgtgcgcgaccacctcgtggggcgctggatccgcacgcagcagcactactatgagaaggaccccaagaggatctactacctgtctttagagttctatatgggacggacgctacagaacaccatggtgaacctggccttagagaatgcctgtgacgaggccacctaccagctgggcctggacatggaggagctggaggaaattgaggaggatgcggggctgggcaacgggggcctgggccggctggcagcctgctttcttgactccatggcaacactgggcctggccgcctatggctacgggattcgctatgagtttgggatttttaaccagaagatctccgggggctggcagatggaggaggccgatgactggcttcgctacggcaacccctgggagaaggcccggcccgagttcacgctacctgtgcacttctacggccatgtggagcacaccagccagggtgccaagtgggtggacacacaggtggtactggccatgccctacgatacgcccgtgcctggctatcgcaacaatgttgtcaacaccatgcgcctctggtctgccaaggctcccaatgacttcaacctcaaggacttcaatgttggtggctacatccaggctgtgttggaccgaaacctggcggagaacatctctcgtgtcctgtaccccaatgataatttcttcgaagggaaggagctgcggctgaagcaggagtatttcgtggtggctgccaccctccaggacatcatccgtcgcttcaagtcttccaagttcggctgccgtgatcccgtgcgcacgaacttcgatgccttcccagataaggtggccatccagctcaatgacacccacccctccctggccatccccgagctgatgaggatcctggtggacctggaacggatggactgggacaaggcgtgggatgtgacagtgaggacctgtgcctacaccaaccacacggtgctgcccgaggccctggagcgctggccggtgcacctcttggagacgctgttgccgcggcacctccagatcatctacgagatcaaccagcgcttcctcaaccgggtggcggccgcattcccaggggacgtagaccggctgcggcgcatgtcgctggtggaggagggcgcagtgaagcgcatcaacatggcacacctgtgcatcgcggggtcgcacgccgtcaacggcgtggcgcgcatccactccgagaatcctcagaagaccatcttcaaagacttctatgagctgga

SEQ ID NO: 311979 - DNA, 1061 bp, Homo Sapiens
gagcgtccacagattctctgaaggaaccactagcagcatgatttatatttactggtattgtgattgtaggtggagagtccctaccacgagtttctatcttaatttgacgacgaagtgttgcaggagacatgatgatttcagacctcttctctacaattggaaccggggttgctgctggacatgggatggcccctttggataactttgcagtggtgtctttgagtctgacaagttgttcagagcgactcctgggtggagaaggggaagtgtttgctctgtgaatttcagatttttgcgacatgggccttcttggtgggggttcaacataactgtcctttttaggggactgagaaagctcgttcttagtagggttttctgttcgtcgggcagtagattctattgtgataaaagttggtgacggtgggcgtgtttttaaagagggaggaggaatgttgctatcatcaagtttaatttcctgatgggttttcacgtgactacgaacagttgcttcatgatgagctgctacttggtgctgtactgttttctctttggcaattttattttctttctgttcactatttttattattgctgacatgaacattagatactttggatgatgtttcatcaagactagtgggtttatttcccggttttcctgttttggaggacatcatggctgtctgaattatattttcataggacacaagcatatcttccgcttgagttttaatatgtgttatttcttcttttactttttctaaattattctccatggcaatgtgaactgcatattctctcttatcttcacttatcagccatcctgggatagtatttaatagtgtctgaaatgttttaaggccacttttatttggctctgcttcaaactgtttcactctcgacaaaatctgttgcagttcttcacgttttctcaagaattccactatatttaaggcaccttttccatcatcccgctgggattctttcacagaggaaaagaaagatttgttctgtgtaatctcttgctttgatctttagtattagagaagacttgtttctctt

SEQ ID NO: 311980 - DNA, 1119 bp, Homo Sapiens
  misc_feature (991)..(991): n is a, c, g, or t
  misc_feature (997)..(997): n is a, c, g, or t
  misc_feature (1024)..(1024): n is a, c, g, or t
  misc_feature (1051)..(1051): n is a, c, g, or t
  misc_feature (1056)..(1056): n is a, c, g, or t
  misc_feature (1064)..(1064): n is a, c, g, or t
  misc_feature (1095)..(1095): n is a, c, g, or t
  misc_feature (1108)..(1108): n is a, c, g, or t
tacaaaaaagcaggctggtaccggtccggaattcccgggatgcctgaggagctgctgcgacagtccactacctttttcgagagtgactcccgttgtcccaaggcttcccagagcgaacctgtgcggctgcaggcaccggcgcgtcgagtttccggcgtccggaaggaccgagctcttctcgcggatccagtgttccgtttccagcccccaatctcagagcggagccgacagagagcagggaaccggcatggccaaagccgcggcgatcggcatcgacctgggcaccacctactcctgcgtgggggtgttccaacacggcaaggtggagatcatcgccaacgaccagggcaaccgcaccacccccagctacgtggccttcacggacaccgagcggctcatcggggatgcggccaagaaccaggtggcgctgaacccgcagaacaccgtgtttgacgcgaaggctgatcggccgcaagttcggcgacccggtggtgcagtcggacatgaagcactggcctttccaggtgatcaacgacggagacaagcccaaggtgcaggtgagctacaagggggagaccaaggcattctaccccgaggagatctcgtccatggtgctgaccaagatgaaggagatcgccgaggcgtacctgggctacccggtgaccaacgcggtgatcaccgtgccggcctacttcaacgactcgcagcgccaggccaccaaggatgcgggtgtgatcgcggggctcaacgtgctgcggatcatcaacgagcccacggccgccgccatcgcctacggcctggacagaacgggcaagggggagcgcaacgtgctcatctttgacctgggcgggggcaccttcgacgtgtccatcctgacgatcgacgacggcatcttcgaggtgaaggccacggccggggacaccacctgggtggggaggactttgacacaggctggtgaacacttcgtgaggagttcagagaaacacaagangacatngccagaccagcgagcgtgaggcctgcncccgctgcgagaggcaagagacctgtntcacnccaggcanctggagtcactcctgttgaggatcactctangtcatacaggggngtcgagagtgt

SEQ ID NO: 311981 - DNA, 1212 bp, Homo Sapiens
  misc_feature (1020)..(1020): n is a, c, g, or t
  misc_feature (1057)..(1057): n is a, c, g, or t
  misc_feature (1104)..(1104): n is a, c, g, or t
  misc_feature (1115)..(1115): n is a, c, g, or t
  misc_feature (1118)..(1118): n is a, c, g, or t
  misc_feature (1126)..(1126): n is a, c, g, or t
  misc_feature (1129)..(1130): n is a, c, g, or t
  misc_feature (1134)..(1134): n is a, c, g, or t
  misc_feature (1145)..(1145): n is a, c, g, or t
  misc_feature (1149)..(1149): n is a, c, g, or t
  misc_feature (1160)..(1160): n is a, c, g, or t
  misc_feature (1165)..(1165): n is a, c, g, or t
  misc_feature (1199)..(1199): n is a, c, g, or t
  misc_feature (1207)..(1207): n is a, c, g, or t
ttgaattttaaagtttatttactttgaagtaaccaacttaaaaaatggcctgagttaagtgtattaaaaagaagaaatagtcgtaagatggcagtataaattcatctctgcatgtagaaaccggaaaaaaagcaagttcagtacttcaccaaaaaatttcaacattgcaaacacaggaaattgagaactgacaaacagaaatactaggaaatgcaaagtcttgaagctccaaaacaaaaacagcaatcttggaaaggcccctaatctacctcctcaatggtggggcctgacccagaccctcccttgggaccctgagccccgaagcccccaggcccgggaccaccggcaccctggtacagtccgctgatgatggggttacacacctgctccagctccttcctcttgtgctcaaactcgtccttctcggccaaggtgttggcgtccagccacgagatgacctcttgacacttgtccagcaccttcttcttgtcggcctcgctgatcttgcccttgagcccctcatcctccacggcgctcttcatgttgaaggcgtaggactccagggcgttcttggctgacaccctctcgcgctgcacctcgtcctccgctttgtacttctccgcctcctgcaccatgcgctcgatctcctccttgctcaggcggcccttgtcgttggtgatggtgatcttgttggccttgccggtgctcttgtccgtggccgtgacgttcaggatgccgttggcatcgatgtcgaaggtcacctcgatctggggcacgcccctgggggccggagggatgccgctcagctcgaagcgccccaacagattgttgtctttcgtcatggccctctcgccctcgtacacctggatcagcaccccgggttggttgtcggagtaggtggtgaagatctgcgtctgcttggtggggatggtggagttgcgcttgatcagggcagtcatcacgcctccggccgtctccagccccagcgacaggggagccacgtccagcagcagcaggtcntgcacgttctcggacttgttccccatcaggatggcgnctgcagcgcggcccgtagacaaagctcgtcggggtgatgctctgtcnagtcgcgcgtnganagtctgancanntctnacttgggatgnggtngacccgacagnacagntgtgatttggcttgtcagctgggttggagagctnttcagggntcagg

SEQ ID NO: 311982 - DNA, 2563 bp, Homo Sapiens
  misc_feature (22)..(22): n is a, c, g, or t
  misc_feature (44)..(64): n is a, c, g, or t
  misc_feature (69)..(69): n is a, c, g, or t
  misc_feature (77)..(77): n is a, c, g, or t
  misc_feature (79)..(79): n is a, c, g, or t
  misc_feature (81)..(81): n is a, c, g, or t
  misc_feature (83)..(83): n is a, c, g, or t
  misc_feature (88)..(88): n is a, c, g, or t
  misc_feature (102)..(102): n is a, c, g, or t
  misc_feature (108)..(108): n is a, c, g, or t
  misc_feature (185)..(185): n is a, c, g, or t
aaaacatacattcccagcctantatagaatatttcgccacagcnnnnnnnnnnnnnnnnnnnnncaaanaaaaatangnananaaggnggcagataattgantcattnaaagggaacgaaacacccttacagtatcaacattaaatgcaaagaattctaatgaacatatcggttgtactacaaanataatggagccagctaattaccatcaggttacaactttacaaagaagtgaagcagcaaagagctgaagcagaaatgacataggaaaacagcagcaaagtccttgagtcccaacagtccacctcaaagacaaacatactaaagaacaaaggcccctaatccacctcctcaatggtagggcctgacccagaccctcccttgggaccctgagccccgaagcccccaggcccgggaccaccggcaccctggtacagtccgctgatgatggggttacacacctgctccagctccttcctcttgtgctcaaactcgtccttctcggccaaggtgttggcgtccagccacgagatgacctcttgacacttgtccagaaccttcttcttgtccgcctcgctgatcttgcccttgagcccctcatcctccacggcgctcttcatgttgaaggcgtaggactccagggcgttcttggctgacaccctctcgcgctgcacctcgtcctccgctttgtacttctccgcctcctgcaccatgcgctcgatctcctccttgctcaggcggcccttgtcgttggtgatggtgatcttgttggccttgccggtgctcttgtccgtggccgtgacgttcaggatgccgttggcatcgatgtcgaaggtcacctcgatctggggcacgcccctgggggccggagggatgccgctcagctcgaagcgccccaacagattgttgtctttcgtcatggccctctcgccctcgtacacctggatcagcaccccgggttggttgtcggagtaggtggtgaagatctgcgtctgcttggtggggatggtggagttgcgcttgatcagggcagtcatcacgcctccggccgtctccagccccagcgacaggggagccacgtccagcagcagcaggtcctgcacgttctcggacttgtcccccatcaggatggccgcctgcaccgccgccccgtaggccacagcctcgtcggggttgatgctcttgttcaggtcgcgcccgttgaagaagtcctgcagcagcttctgcaccttggggatgcgggtggagcccccgaccaggaccaggtcgtgaatctgggccttgtccagcttggcgtcgcgcagagccttctccacgggctccagggtgcttcggaacaggtcggagcacagctcctcgaacctcgccctggtgatggacgtgtagaagtcgatgccctcaaacagggagtcgatctccaggctggcctgggtgctggacgacagggtcctcttggccctctcgcaggcggtgcgcagccgcctcacggctcgcttgttctggctgatgtccttcttgtgttttctcttgaactcctccacgaagtggttcaccagcctgttgtcaaagtcctccccacccaggtgggtgtccccggccgtggccttcacctcgaagatgccgtcgtcgatcgtcaggatggacacgtcgaaggtgcccccgcccaggtcaaagatgagcacgttgcgctcccccttgcccgttctgtccaggccgtaggcgatggcggcggccgtgggctcgttgatgatccgcagcacgttgagccccgcgatcacacccgcatccttggtggcctggcgctgcgagtcgttgaagtaggccggcacggtgatcaccgcgttggtcaccgggtagcccaggtacgcctcggcgatctccttcatcttggtcagcaccatggacgagatctcctcggggtagaatgccttggtctcccccttgtagctcacctgcaccttgggcttgtctccgtcgttgatcacctggaaaggccagtgcttcatgtccgactgcaccaccgggtcgccgaacttgcggccgatcagccgcttcagcgtcacacacggtgttctgcggcttcagcgccaccttgggttccttggcctgctatccgcctgatgagccagctctggtgtcctgtgaaggccactgtagcctgggggtgctacggttcccacatgctcgcttggcgatgatcatccacccttgccgtgttggaacacacccctacgcatggtacgtatggtgcgtgcccagctcgatgcctgatccccgtcggcttttggccatagccggttgcactgcttctctgtacgcgactctggctcatgagattagggggctggttacggaacactggatccgcgagaagagactcggtcattccggacgccggtaactcgacgcacacggtgcctccagcagcacagattcgctctgggaagtccttgggacaacgggagtcaatatcggacaaggtagtggcatgtcgcagcagctcctcctcgtgccgaattcgccacccaggcctcgctaccttaaaccgcttagagtactgccg

SEQ ID NO: 311983 - DNA, 1512 bp, Homo Sapiens
caaaaaacggcagagcccccacattctcaccaacattgggcatcaacacgtcgacagattcagtaagacgggaatcctcaggacatcgctgcatgtagaaggacttgatctccacaggaaatcgacacagcaagattggttcattaatggtgtctgtcatcagtctctcaggagcttctgggataagccaaacgatagcatctgaatagttcatccggaaaggccgtttggggggctgaaagttcgggttgagctcatgcactatgctccctgcaggtgacttcaatattcgatctaccacatcacaaaccaagtcctccaaccggttcaggagggtcgtcaaaagtcaggaaaggacactcagcttccacgtgagtgtactcagccaggtgccttcgtgttctggactgctctgcccggtatgactgagcaatacaaaaaacatctcccagggctgggaggcaggtctccaagtacaactgagaggattgagtcaaaaatgcctcttccccaaaatagtcaagcttgaagagtgtggcaccaccttctacttgtgtttgcactaatgttggaggagtaacttcatagtaccccctatcaaagaagtgatctctaaagcacctggtgaccatggatcgtgcttttaggattttggacatgttttctcctcggatcatcatgtgtctgttgttgagctggacatcaacgtcagactcctcattgatcaggttgtcagctcctccagcaggggccaacccaattagttcccagaagtcacaactcagctcatggccacctggagcctgcttgccctttggggtaagatttagcattccatacactgcaacactgctctccgtggacaagagaactccattgtagcactgacacaactcatccgccaagacacactgaagataacctgtaccatctcgcaacaccagaaacattaaattctttccttgcctgcgcagcctgtggacccagccaaacacctttactctttggcctctatatccttctaacgcaccaatcttcacacattttggctctgggagacttggatcatttttaatggtaatcttctttgcttcttccaggttcttttctcttcgtaaactatcttctgcctctttcttttcccgggattcactcttcatttgttccctatgccacatctttttaatgttcttcaactgtgatttagaaataacattccacctctcattttctttttgtgaatctacgtaaatggtaggaaatggttctttccctactgtcatcaaagcctttagacctgttttaaatggtttctccttggttccatctcccgtggcatcgcttccctctcggtcagagacgtacagctctgctagcaccatgcctgcagtggccctggtcacctccaaggacacagactgcaacaccgacgccgtcttatgactccaacgtgcaccggcggtttccgcgattccggcgttgcatcagagagcgtagatctgagggcgtctc

SEQ ID NO: 311984 - DNA, 724 bp, Homo Sapiens
gccccgcggatcatcatggtatcggattgttgaactggacatcaaggtcaagactcctcgttgatcaggttgtcagctcatccagcaggggcctacccaattaggttgccagaagtcacaactcagctcatgaccacctggagccctgcttgccctttggggtacgatttagcattccatacactgcaacactgctctccgtggacagagagaactccattgtagcactgacacaactcatccgccaagtcacactgaagataacctgtaccatctcgcaacaccagaaacattaaattctttccttgcctgcgcagcctgtggacccagccaaacggctctgggagacttggatcataatggtaatcttctttgcttcttccaggttcttttctcttcgtaaactatcttctgcctctttcttttcccgggattcactcttcatttgttccctatgccacatctttttaatgttcttcaactgtgatttagaaataacattccacctctcattttctttttgtgaatctacgtaaatggtaggaaatggttctttccctactgtcatcaaagcctttagacctgttttaaatggtttctccttggttccatctcccgtggcatcgcttccctctcggtcagagacgtacagctctgctagcaccatgcctgcagtggccctggtcacctccaaggacacagactgcaacaccgacaccgtctt

SEQ ID NO: 311985 - DNA, 522 bp, Homo Sapiens
aaagagcctgttcctttcataatctttcctccatgcttctggagaaaatggttatggcgtgcaacgctggacaaatcgagggtataagcacacgtctcggatgtgatacctattcagaatccacgttaagaatcgttccaagcccaagccatatcctccatggggacatgtaccgtattttctctgatccgtataccagtaatagggagtggggtcaatcccttcccttttataacctgccagtatttcttcactatcaaagatacgcattgagcctcccacaatctcaccaacattgggcatcaacacgtcgacagattcagtaagacgggaatcctcaggacatcgctgcatgtagaaggacttgatctccacaggaaatcgacacagcaagattggttcattaatggtgtctgtcatcagtctctcaggagcttctgggatatcttctccaaattcatagaaagttccatcttctttctttacatcatgttcttttagccaaacgatagcatctgaata

SEQ ID NO: 311986 - DNA, 1177 bp, Homo Sapiens
  misc_feature (838)..(892): n is a, c, g, or t
  misc_feature (903)..(1077): n is a, c, g, or t
  misc_feature (1104)..(1104): n is a, c, g, or t
  misc_feature (1164)..(1164): n is a, c, g, or t
gccaatttatattgtaacatgatttcttgaacacagtaagttgttttaaaataaaagaacagcatactgtagtttttataagtaaagcgtaatgaaattgtacccctagagaaaattccattaacttgttaaattagtggaattaacaacaaataaagcatgtttgagacctggcaaaaattcctctggtagtatttataaatagagctgcatgcctctagtatgaaaaccgtatcagttgcaagtgccacttctacaagttactcagtttactctttgtatcagtaactttaaaggttggatgatccttgctggttaaagctaattctcgacctagcaactaaatgaaaatatttagaatcgtcagaatctgaacagactaaaattatcagcgataagcagaatcaagcagggtataagttttatctcaattatttgaaattgactgagttttcttaagtgtaaagctgaaatttgctaaccatgtttttgatgaaccacagtgcagcattgtgtgggttttagattgaatgactctctgctataattatcatgactttgaaatttttcatgagaataaatgaggaatggaggcaatttgtgggtttatccaaagcccccttgatgttgagtgttgccattgatcaaagatagcctcttttagattgtgatttctctctaaataagatactttgtatatttaatgacaagtctcttccctataattttgctcctcagaaaagaaaagcctagacagactgtatttccagtcacagaacataaaacttaatctaatgggtgttttgttttgttttgagacagaggctcactctgtcannnnnnnnnnnnnnnnnnnnnnnnnnnnnnnnnnnnnnnnnnnnnnnnnnnnnnnattcaagcaannnnnnnnnnnnnnnnnnnnnnnnnnnnnnnnnnnnnnnnnnnnnnnnnnnnnnnnnnnnnnnnnnnnnnnnnnnnnnnnnnnnnnnnnnnnnnnnnnnnnnnnnnnnnnnnnnnnnnnnnnnnnnnnnnnnnnnnnnnnnnnnnnnnnnnnnnnnnnnnnnnnnnnnnnnnnnnatgaggcgccgcacttggcctagtgtnttcttaactgtgaaattccattcatttcttgaatgaggctacatcttatggacagagcanagttattgtccta

SEQ ID NO: 311987 - DNA, 2335 bp, Homo Sapiens
  misc_feature (2180)..(2233): n is a, c, g, or t
tcagagcttaaaaaccaaaaggcagaaaatagactttattccaagacagatttgtaaaagatgtttttaaagggaaaggcaagtcacgctactaaatcaaacattgttcacaatttctggatcttcctcctccgcctggcactgcagctgagccttgggggatatgctcggggccctcggcgcagaggaacttggcctcgattctcttcctgaggggcttcttaacttttccaagccaggcagtgagcgtggtgggaggctggggctggtgcctgcggacagctccagatggaatcccaggccacggtgtttttagtgtccccccagcgagcttgcggtgtggcaggcggccaggaagggccatgagcagggtggcctgaatgaaaaccgagggccgaagccagcctgactccctcgcttaagctggggctcggtccgaggcacacgcatggccttggccagacacaaaccaagagactgccatgacagacagagcagaaacctcccgagcactgtgttcaagctaagctttcctaagacgggcttctcaggcgagacgtgacaccagacaccgtcgcatgttacttggagagaacagagacgtgcgggccacagcggcccaccaaaggctgccatccaagctgagttccgcaggcctcacctgcagctggagagggaccttgccctgatcctcctggtaagtacccgctaagggattcaggacagagcgtcacactgcacgcagggtcctccgccaccaccatccaagaaccccggggggctggccacgcgctggcctctgccaaggagtgccagtggttcccgggacggggccgcccaagcaggtgagggaggtttagatgaatgacttggccagggtcaccatgtggtccacgccacatgccacgtccacaggctccccaggcatcgtcaccctccatgggaaatactggtcctccaggcgaccgattcccaggcaccctcggatgttcttgccccatacaaacagctctcctttgttggtcagtgcagcaaagtggctgagtccacatcggatgcgggaaacctggatttctgggttgaactccgtcaagccaaagagagtgggtggaatcatttcagggacggcactttccactaggtttggacctttcccaagaattccatagccccagacaaaaacatgtccttctccgtttaacactgcacagcccgtgccaccgcatgcagcctgtcgcaccttccccactcctgagaagtgtaagcagcggggcacattcacctgtgtggagtcagtgacagaggccagctgcaggtactccgagtttccccaaccaaaaagtcctccgtcggcggacacggccaggcagcaatcaccgtaggtggcaacttggataacgttcactcccgccaggtctccacccagcttggtgggcgagctggtgatattgtagtgacccagacctgtttgcccatcagcaccccatccacaagaatagacttctcctttatccgtcaggaacagactatgatcctgaccacaggcgacctggaccacctggccatcgaagtcctgcatcctgtggactctgtgactttcactgtaaatttcatttttcgaccacctttcttccacattgcccataagaattgtttcccatgctgaagactccttccctgtcagtcaacacaagagagtgagctcggccgcaggagacctgcagcacccgtgtctcctgaggtctgtccagaggcagggagacgggtgagggctccaacacatactcgtagcccctcgttttatctttccggctcctgtgaaatccaagctgagaatctttgttgagtcccatcccccagactttcgtaacatccgcagtcttagaggacagcagtgtgaatccatagccgcaagcagcagatgaaatcttttggtccagctccaggcgatagggcacgggctggatcctgcggcgcgtcgggcgccggcgcggggcccgggcccggagctgggcaccacaaaggaaggcacgcccagcgcccccgagaagctgaagccccacacgaagacgcgatcggcgcgggcagcgcgctcgcccacgtactggaccacgggcacctccgcctcggcttctcgccgcttcgcgccggctccgggagcgcctggccgccgtccagtnnnnnnnnnnnnnnnnnnnnnnnnnnnnnnnnnnnnnnnnnnnnnnnnnnnnnnccaacgccaccagcgccatcctccgttccgccagcctcagcagcctctgggcgccgcccgacgcgtgggtcgacgatatcccaaaattcgggaccggtacca

SEQ ID NO: 311988 - DNA, 926 bp, Homo Sapiens
ggggggcaaacaagcctttacacaacagattgaggaactgaaaaggcaacttgaagaggagataaaggccaagagtgccctggcacatgccctgcagtcctcccgccatgactgtgacctgctgcgggaacagtatgaggaggagcaggaagccaaggccgagctacagagagcaatgtccaaggccaacagtgaggttgcccagtggaggaccaaatatgagacagatgccatccagcgcacagaggagctggtggaggccaagaagaagctggctcagcgtctgcaggatgctgaggaacatgtagaagctgtgaatgccaaatgtgcttcccttgagaagacgaagcagaggctccagaatgaagttgaggacctcatgattgatgttgagaggacaaatgctgcctgtgccgccctggacaaaaagcaaaggaactttgataagatcctggctgaatggaaacagaagtgtgaagaaactcatgctgaacttgaagcttctcaaaaggaatcccgctcactcagcacagaactatttaagattaagaatgcttatgaggaatctttagaccaacttgaaaccttgaaacgggaaaataagaatttgcaacaggagatttctgatctcactgaacagattgcagaaggaggaaagcgcatccatgaactggaaaaaataaagaagcaagttgagcaagaaaagtctgaacttcaggctgccttagaggaggcagaggcatctcttgaacatgaagagggaaagatcctgcgcatccagcttgagttgaaccaagtcaagtctgaggttgataggaaaattgctgaaaaagatgaggaaattgaccagatgaagagaaacacattagaatcgtggagtcatgcagagcacactggatgctgagatcaggagcaggaatgatgcc

SEQ ID NO: 311989 - DNA, 958 bp, Homo Sapiens
  misc_feature (103)..(103): n is a, c, g, or t
agaatttcaggcaaacccaattttcttcaccccagaaatgttcccagtaaaatgaaaccactttaccttcttttgggacatatgctggacttgggttaacttntggtgtccttcccaagtattctgttctagtgccaactgctcagggagttatttaagttgcctctgctgttaggctgtctgtgcttattatcaagatttacttctaaagttctctactaagagaactgagaaagtttctaaaagaaagatccttgcaaaatggatctgctttgatacagattgggcttcttaggacttctaaggcactaaaaccctttgtaggcattttcacacccacattggtgattcccgaccctgggtgcacattagaaactttaaatagctacaatgctaaggtcctatcctcagtctttgaatctgaatctctggttatgggggggtctcagtatttttaaaagctcctgaagtgaggatttaatactagaatgccagtttcttaattcagtagcccatatttgcttttcattttacttgagatttttgtttaacatcttcaagttacattactaagacttctaaatttcacccctaatcaaatcaagacagaagaatcaaaagacaacattctgaaagtcaaggctttaggcatgggcacacgtacttcaaaccggtatgaaattactaagagtcaggcataagacaccagctcccataaattttatctgactgaagattatatctagctgtaaaattcaaaaggactactccccaactaagatgtctttaagttctccctcaggtactcaccttaaaatgctctacaattttgatcaaaatccagcgcgccactcccagacctactgaatcagaatcttcaagagaggagcttgagaatccatatggtttaacaaactccagcctcgtgccgaattcgccacccaggcctcgctacctt

SEQ ID NO: 311990 - DNA, 1757 bp, Homo Sapiens
  misc_feature (166)..(225): n is a, c, g, or t
  misc_feature (560)..(589): n is a, c, g, or t
  misc_feature (1190)..(1249): n is a, c, g, or t
  misc_feature (1629)..(1629): n is a, c, g, or t
  misc_feature (1736)..(1736): n is a, c, g, or t
aggcctttgtaattttttaataacactacatgttaaattggttgcatttacttttgaactcttaatcttttgcttgttctgttctaccagtgtcttgacagttaatcatgatctttgcacagtagatgcagaactagttctgaagttttgctgcctgttaattacnnnnnnnnnnnnnnnnnnnnnnnnnnnnnnnnnnnnnnnnnnnnnnnnnnnnnnnnnnnngtcttaagatttcagcaaccaatttctcacccagaatgctacagtaaatgaaaccccttaactctttgggacatatgctggacttggttaactttgggtgtcattccaagtattctgttctagtgccaactgctcaggagttatttaagtttgcctctgctgttaggctgtctgtgcttattattcaagattacttctaaagttcttactaagagaactgagaaagttctaaaagaaagatccttgcaaaaatggatctgctttgatacagattgggcttcttaggacttctaaggcactaaaaccctttgtaggcattttcacacccacattgnnnnnnnnnnnnnnnnnnnnnnnnnnnnnnactttaaatagctacaatgctaaggtcctatcctcagtctttgaatctgaatctctggttatgggggggtctcagtatttttaaaagctcctgaagtgaggatttaatactagaatgccagtttcttaattcagtagcccatatttgcttttcattttacttgagatttttgtttaacatcttcaagttacattactaagacttctaaatttcacccctaatcaaatcaagacagaagaatcaaaagacaacattctgaaagtcaaggctttaggcatgggcacacgtacttcaaaccggtatgaaattactaagagtcaggcataagacaccagctcccataaattttatctgactgaagattatatctagctgtaaaattcaaaaggactactccccaactaagatgtctttaagttctccctcaggtactcaccttaaaatgctctacaattttgatcaaaatccaggggcgccactcccagacctactgaatcagaatcttcaagagaggagcttgagaatccatatggtttaacacactccaggtgattatttttatttacttttgagacggagttttgctcgtgttgctcaggcnnnnnnnnnnnnnnnnnnnnnnnnnnnnnnnnnnnnnnnnnnnnnnnnnnnnnnnnnnnntattatcagacaagtttaagaaaaactcctaatggatagtgaaagaatacttaagaaattttggagatggcataagtgcaatagctataccttcacacttaattagaaccgtgtgttttcctatgaccagcagggattacttttattaaacaatgataatggccaaaatatctggttcaaaatcatctctgctcagattttgttcttttttgccactgatagtcatttggaactaggaggggaaaaaggagtgtgtcacttcatagttcagttttaagtttctcatataagccatcctgatcaatcatgtctgtgtgcccgttccagcggtgataggcaaggagtgcagcgttgtgggctgcaatggcactcatctccanggcacttgctgcacactctatgccattgaggtaataaagtcgatcatggagaatgatagaggggcatttctccgggggcttatagtgaggatatgcaagccatggcntcttcacagcataatcatagg

SEQ ID NO: 311991 - DNA, 516 bp, Homo Sapiens
  misc_feature (168)..(223): n is a, c, g, or t
aggcttggtaacccggtcccgggaaatctcgagatatcgtcgacccacgcgtcggtgacaagcgctgcggcatttgtccccgcgacagcaccgctgccgccgtctctaaggtcgcccgggtcccaccgccgccaccatgcctcggggaagccgcagcgcggcctcccnnnnnnnnnnnnnnnnnnnnnnnnnnnnnnnnnnnnnnnnnnnnnnnnnnnnnnnntcggcagccgccccagcccccgccccttcgggccagccggggctcatggctcagatggcgaccacggccgcaggggtagccgtgggctcggctgtgggacacgtcatgggcagcgccctgaccggagccttcagcggggggagctcggagccctcccagcctgctgtccagcaggtgagcagcgggtccaagagaaactgaggcaggattatctcgaggccacacagggagctgcccaagtgtccagtgaggagtgtccgcgtgtattcaccggtgcttcagcccaagactct

SEQ ID NO: 311992 - DNA, 1032 bp, Homo Sapiens
  misc_feature (53)..(65): n is a, c, g, or t
  misc_feature (86)..(113): n is a, c, g, or t
  misc_feature (170)..(212): n is a, c, g, or t
  misc_feature (223)..(366): n is a, c, g, or t
  misc_feature (674)..(700): n is a, c, g, or t
  misc_feature (850)..(935): n is a, c, g, or t
ttggggggatttttgtttaaaaaaaccctccgtgtttccccgccggggggggnnnnnnnnnnnnnggggggggaatcccaaacccnnnnnnnnnnnnnnnnnnnnnnnnnnnnggggaaaacaaatattgccccattttttccttttccttttggggccccgcgcccccnnnnnnnnnnnnnnnnnnnnnnnnnnnnnnnnnnnnnnnnnnncccccacattnnnnnnnnnnnnnnnnnnnnnnnnnnnnnnnnnnnnnnnnnnnnnnnnnnnnnnnnnnnnnnnnnnnnnnnnnnnnnnnnnnnnnnnnnnnnnnnnnnnnnnnnnnnnnnnnnnnnnnnnnnnnnnnnnnnnnnnnnnnnnnnnctaaaataaacttttaattgcacatttgtgtcttgggttatctgtggggtgagaaacctcctcacttccaatcccagctatctgggtacaatctggtgttgtggtctggctgtcggcgaggggtagaggtgggtgcaggactggcccccgagtctgcaccgacctcttcagggcagggagctcagaccatggtagtacttgcactgcttcagggcctcgctgaagccctcacacagggacaggtcactctgagtggtggaacagtccaggaactgcctgatctcgtaggcgcagggccccatctgcannnnnnnnnnnnnnnnnnnnnnnnnnncctgctggacagcaggctgggagggctccgagctccccccgctgaaggctccggtcagggcgctgcccatgacgtgtcccacagccgagcccacggctacccctgcggccgtggtcgccatctgagccatgagccccggctggcccgaannnnnnnnnnnnnnnnnnnnnnnnnnnnnnnnnnnnnnnnnnnnnnnnnnnnnnnnnnnnnnnnnnnnnnnnnnnnnnnnnnnnnnggccgcgctgcggcttccccgaggcatggtggcggcggtgggacccgggcgaccttagagacggcggcagcggtgctgtcgcggggacaaatgcccc

SEQ ID NO: 311993 - DNA, 936 bp, Homo Sapiens
  misc_feature (17)..(17): n is a, c, g, or t
  misc_feature (62)..(63): n is a, c, g, or t
  misc_feature (107)..(107): n is a, c, g, or t
  misc_feature (141)..(141): n is a, c, g, or t
  misc_feature (428)..(428): n is a, c, g, or t
ctagaaaggataactcnatttatttcctgagttaattgttcataagttcagttgcaatgtannacatgataaaggtcacagaggcatgacttttagagttgataaanacaatgtagtaaagaacacgagtatttatattancaggaatatgacaaaaacataacagtcattcccagggatgcactgtcgagtagattaaaaattgttatccatgtcattggcactgatgaccagttacctaaaatacaagtaagacatctcacgaaggcatttaaggctaaaatgaattccttaaactttgatggcattcatattttgccattatgagaaagaaaaacattttacttcacagaaagaatgtattaaagtgaaatgaaaatatttttatatttgtcacccaaatttagtgattgatctaaaatttcacnccaggtgacatttttattaagacacagtctggagaaatttcagaattccacatctcatttgctaatattttaaacaaacgattcaccagacctgactaattgaatggtgtatttccactggactgaatgtcctaattatcattcaagacatatcttaaagatttatcaagcatttactctccaccttaccatgtctaaagctcagagatattttgagctctaaaagagtatcacaagaaatttatagcagtctgtagtacaactattacccattcttagagcaaagccacaactaaaatagaaatagacaaaaataaaataaaatcattaagcatcaacttattgggtaaattaagtttagatacccatatgatgcaaaagggtcacttttatataagcttccccatcttttaaacttagagcacagtctatgttgtcattaaaaaaataatagctaactgaagccaggaattcattttgcaattgtgtcaattattttaaagatatc

SEQ ID NO: 311994 - DNA, 1819 bp, Homo Sapiens
  misc_feature (1400)..(1490): n is a, c, g, or t
  misc_feature (1694)..(1694): n is a, c, g, or t
  misc_feature (1748)..(1748): n is a, c, g, or t
  misc_feature (1801)..(1801): n is a, c, g, or t
ttttccactgaggatctgatcttctcatcctccttatttttccacatggaggactttaattcattgtcctgactgctttgttttatttttgagaagggactttgatctctatcagcctttttttccctgctgttatttgagctattatgatcacgacttttagagtacattcttttctcactctcagaattttcttttctgtgtgagctcttactctcttggtttctgtatttgtctttgtttctgctttgactttcttctctctctgagctccgtgagtctctcctccttctcctcctatctttacttcttgatcttcctggtggtgttcttctctctcggcttcgtgaccgtcctcttctcctgtattcctgttctctgtatctatggtactccttgcttctgctgcgatctctgtcatgggttcttgatcgcactcttctgcttctgtccctacttctgcttcgttctcttgttctgctattataactgtgtttacctttagttatatcacattctctactcctggattgtgcgcgtctatccttttccttacttttactgtgatcatgctcattactctttgattctaactgtttagacttctctttacttctactcctttcctgatcttttcctttagaatcagactgcttttctttttctttaacattttcatgatcccttcctttactccttgacctcatcctcttttcttcatttctattatgttttgaatctctttctttactctttgatttctctttgctcttactcctacttttagatttggcccttttcttcactttgtttttatacttgtcatctttttctgaatttcttctgatgtctctctctttgctgttagatttatggtctttaactttcttctccttttcattttttctgtttggactctcagatacattcctgtgatctgttatttttctctcttttactctaactggacttctctgattttcttttatttcattcaactcactcttatcccccttgatccatctttcaccacttgataccctcattctttgagctctctgcatctcttgcctccaatgtggaggagtctcactacgtctgaaacgatcccttgatctggatctggaaggagttcgataacgccttggtcctcttcctttaattttcctgccagatctagtaactaaaagtcgtctctggtatgaagcaggctgggagttaggtggattacactctctttccctttctctctctctgtttttcctttccttctcatcagctttaggaggactttttctcattaggaatctattttcaggtataggagggatctcttctggacggacagtagactggggttgtgcttcaagattttcagcttcactctcactagatgcacnnnnnnnnnnnnnnnnnnnnnnnnnnnnnnnnnnnnnnnnnnnnnnnnnnnnnnnnnnnnnnnnnnnnnnnnnnnnnnnnnnnnnnnnnnnagtagcactttcggaatcagaggaatcagaagaggactgagaatcacttgagctatctgagtcactagatgaggaggaggaagatgatgatgatttatgccttttcttttcttctttcttaactttagatttgggaatcagctctccacaactgagtatccgtacctccgcaaacggtttgctagctgcatctgttttctgggntttcaatctctcttacaacttcttgaccagaggattacttgtccaaaaacaacntgatgcccatctaaatgagggagttggggttcggttggttatgagggacctgngaaccctttggtatccct

SEQ ID NO: 311995 - DNA, 688 bp, Homo Sapiens
  misc_feature (36)..(36): n is a, c, g, or t
  misc_feature (158)..(208): n is a, c, g, or t
ttatgttcaagagccttttcacgttctagctgcatngtagtaattctttcttcctcttgttgctcccacagatccatgtctttaattctctgttcctcgtaagcgctctttatcaaaggaatttcttccaaacgtttggctctttcaaaatagtcaannnnnnnnnnnnnnnnnnnnnnnnnnnnnnnnnnnnnnnnnnnnnnnnnnnccggttgttcaacctgtttagccatgataaaatctggatccaattcctcaaggtcttcaatatcaatatctttgaatgctttggcacccagttctgttttcttgatctgctccaaacgctctcggacagttttctttttgatttgttcatgttcctgtaagatacgctccttctctctctcctttgcttcctggcgcagcctctcttcctcagccttccgcactttctggagttcagcttccctctgttccaattcttctttctcacgctgaatattcagactctcaaggcgctcttttctctcctcaattgtctggcggcgagccaggatccgctggtgctcttttcgtgaatttttaaggtatgcagtgacagccacctgatgctgttcttctttctcttgcagtatatgagctggtttaatgacttcaagtgcttttgcaagtactgaggacatggctgtcagctggtttcttatct

SEQ ID NO: 311996 - DNA, 1203 bp, Homo Sapiens
  misc_feature (25)..(25): n is a, c, g, or t
  misc_feature (43)..(43): n is a, c, g, or t
  misc_feature (59)..(59): n is a, c, g, or t
  misc_feature (71)..(71): n is a, c, g, or t
  misc_feature (78)..(78): n is a, c, g, or t
  misc_feature (89)..(89): n is a, c, g, or t
ctcctctggtgggcctccttctccnaactcaagaactgctttnaaggtccttttctccnaggtgccttctnaaatctnctaatctcccnaacgaagagtcctttcctaagaaagggaactaatcgccaaagtcttctctcttcctctctacgccgttctcgttcttcaatttccaactccctttggcgttttttcactttccacttcttctaatttcttcacccgctcctgatactctcgtagctcttcctcgcgttttgctcgttcggcgcgctctctctcttcccgctcttttagcatttgttcttctgcccttctctgctcctcctcttctttttctctatagtatgttatcctgcgttcttctttacgctgccttttccgttcttccaatcgattatgcctttcttctgctaatcgctcttcaaactgtttaagtttttcctcataaacagactgccgtgcagctttgagtcgcattacgaataaatctctgtcttcaagcattcgtgacattcgattcttatgttcaagagccttttcacgttctagctgcattgtagtaattctttcttcctcttgttgctcccacagatccatgtctttaattctctgttcctcgtaagcgctctttatcaaaggaatttcttccaaacgtttggctctttcaaaatagtcaatcttcttttcttgattctttaggcgttcttgaagttctttcttttctttctccagttgttcaacctgtttagccatgataaaatctggatccaattcctcaaggtcttcaatatcaatatctttgaatgctttggcacccagttctgttttcttgatctgctccaaacgctctcggacagttttctttttgatttgttcatgttcctgtaagatacgctccttctctctctcctttgcttcctggcgcagcgtctcttcctcagccttccgcactttctggagttcagcttccctctgttccaattcttctttctcacgctgaatattcagactctcaaggcgctcttttctctcctcaattgtctggcggcgagcaggagtccgctggtgctcttttcgtgaatttttaaggtatgcagtgacagccaactgatgactgttctctttctcttgaagtatatgagctggtttaatgacttcaagtgcttttgaaagtactgaggacatggctgtcagctggtt

SEQ ID NO: 311997 - DNA, 1273 bp, Homo Sapiens
tttttaagcttggcaaaagtggtgacttttatttacaattgcatgtgtcaagattacaatggaaacactagtgataccatctgaacaaaagcaatgatttattggtaatggcaatgaatgaaacattgacagtctctggcgagaatcaagcaattatccaggagctgtagatctgattgcaatatggttgtccagtgtcttttgtaccttagtggctttctccttttttgccaactactcgtttgaagtcattcatatttgttgcctggactggagtaccaataaaagtaaaatatgaaattcttgttgtttcctcttcaccttgattcgactgaacaaatatagttacactgttaacattctgaaacttaacataacgaatgggaacaatgccatcttctttaatatcatcctctgtcagttccagagcttgagttggttcacttctttctgcctcttcaaaatccatagatcggggtaggttgataaaaatttttacatatttagggccctgaccattatctggcccttgaaatttcatggaataaagcttaacaggttgattgaatgccacagtaataagcagctgttcatcacagtcagattccaagaaggttgtgtcttttcgtaaacagttgtcaaatccatgctcatcactttcattaagacattcacaaccagctttgttaataaaaggcattaaatccatatagccttttggaatatctgtgtcctcattgcttccagggtcattttctaagtgctgcttgattttttcttctaatcccacagcatctgctccttgatattgatcaattctcactttgtttcgaaaaaacaaaaatgtaggtgttgctgatatattgttggtggcagctgttccctgacactgatgtacatcgacttccaagaaaacagcctgtggatatttattactcatagaactgaatgctggggcaatcctcaaacatggcccacaccctctcatggtgaacttgaccacggcgagtctggagcccgcgccgctcagctctggctggaaatccgggtcgctcccgacgggcttcacccccaccatcctcacagagagcccggcagggtggccgcgacgccactggctttgaaactgaaggagaagacgatctgggagaggaaggagagatgctcaggaaggccgaggcctggacagaagaggtggcgaccgccgagtcttctcccgggactctcagtgccgagtcacgccagggagcggagcggccgagggggcggggag

SEQ ID NO: 311998 - DNA, 814 bp, Homo Sapiens
  misc_feature (705)..(705): n is a, c, g, or t
  misc_feature (776)..(776): n is a, c, g, or t
attgatatcagcgactcatttattaggtataaataatagccaaagaataaaattaaaatttattttaaactttcggtcttaaaaagagctgtaggatataaacctcttttgtgaaaagtagaattttcctgaatgctttccatagacaaaaacgcatttaaactatgtttaccctggttttcccaacagaaatcaaatgattttaatattatgttttgatgggttattttcagagttgtttggttttttaaacactactgaatggtttcttttaaatttaagaacaactagttcttgaaaagcaataccgtatttctctgataaatttgtagttaaggttctagaaaatctaggacaaatttacttcattaaacataaagtttttaagattattcagttggcacaatttaatgcataattgggattggatccatttactgtactgtggtacagtaaagagaatgtgttcttattgaacagcagatttgtatacaaatacggaataatgcaactacattataaattgtatacgaacaaaataaattgggtcactctgagcttactattaaaacattgaaaatttattaatgaacacaggctatcttgatgaggatctctgcttatgaaacacatactaatgaaattattagtgacacattggaagctagaaaattgctgttggggccattgctataaatcattgtntccatgttaagacttctgttctaattcattcattcaacaaacatttgttgagggccagatactgtgctggntcactggggatactgtcctgaacaatatgcacacagtt

SEQ ID NO: 311999 - DNA, 745 bp, Homo Sapiens
gattgcagagagaaaggagcttgtctttccttctgctgtgctggtctgttttggatgtcagtcttcaggactatgaaaacttcctgccagtttagcatggacactgagggctggcatttctagtcttcttcagacactgaacatactgactccaggtataggaagcagctagcaaattgattcttttttaaatgcataggactctgcttccggcggttcctcttgtagtccaactctttttgccatctatttatgttgggaggtaggggcacaattgtcactcacaacacaggctagttagagtttgctaccttcttagcagaaaatgcatgtgtgtcttgttggaccttcactggggaaaggctgggagcctctggctgtcagtgacttttctcacagaagaagaaccagcaagccagactggacacctttaccctttaatggtaagacttgtatttataaggggtaattttgatgttgaatttaagccactactttgtttaaacttttttaaattggcaactagaagtttgagaatttgtatagaaatggaacatgtatttctaacagttgccaatctggctggtcccaatgttagtttattagtgattgatctgtaattattgggattatttattcaactctaaaattccaagatgaaaataatttatctctttcttttcaagggaaaaaaacccaaatgaatgcattttcagtttctccaggcctttgaactgcagcagaa

SEQ ID NO: 312000 - DNA, 729 bp, Homo Sapiens
ccacagcatccacaggggcaagacggatgtcaaagaagggtgggttcttcccctctgtgagaatgagcctggcactggaagaagcagagcctatagggtttgtagctgtgcaggaatactggcctgcaaggctccggtcagttttaaaaatattgagtgtggctgtattgtctaaaaatgatgtttgtacatttgggctgtctttcaatggcttgccgtctttataccaagacacggagataggttctgatccacttatggcacaatcaaaaacaactggcagtccaactgtttcttgaacatctctcaattgtcgagaaaatgatggtggaagtttttgctcttgaacggtaaggaaagttgatgcagaaacttctcccacgctgttttcagccttgcagatatattctccactatcattaatatcaacctggttgaaaaccagtgtagcaacattattcctaaaatgcattttgtaagtcgtagtgggtctcaattttgtatctcctttataccaggataccccaatttcaggggttccagcaagctggcattgtagagaggcagaatctccaacagacaccttaaccggctccaactgcttgacaaaatacggtggttctagtatgagtatttgtgctgaacaggaatcttttccagcaggcattttcaatgtagcagttgtattgtcctgcatcctctactgtgctacttggatttccaggatgc

SEQ ID NO: 312001 - DNA, 761 bp, Homo Sapiens
gaacaatcgtatggtctcctgccgtgcccggaatcccagtcataagttccagcctgccactgttctctgatgccatgtcagcaccaactcaactgttttttcctctcatccgtaactgtgaactgagcaggatctatggcactgcatgttactgccaccacaaacatctctgttgttcctcatcgtacattcctcagagtcgactgagatacacatctcatccagcatatgctaccttttgcaggccaaaggagaactggtggcagtacacccaaggaaggagatatgcttccacaccacagaaattttacctcacacctccacaagtcaatagcatccttaaagctaatgaatacagtttcaaagtgccagaatttgacggcaaaaatgtcagttctatccttggatttgacagcaatcagctgcctgcagatgcacccattgaggaccggagaagtgcagcaacctgcttgcagaccagagggatgcttttgggggtctttgatggccatgcaggttgtgcttgttcccaggcagtcagtgaaagactcttttattatattgctgtctcttagttgccccatgagactttgctatagattgaaaatgcagtggagagcggccgggcactgctatccattctccagtggcacaagcaccccaatgattactttagtaaggaggcatccaggttgtacttgaacagcttgaggacttactggcaagagcttatagaccctcacactggtgagtcgactgat

SEQ ID NO: 312002 - DNA, 395 bp, Homo Sapiens
ccctcagtggtgaggagggaaatgcatgttgggaacagaatggcttcttcctgccctgagctcattgtgcttagcccttggagccaggacattactcaggttttagtttatttatatattaaagcacctatatagtgcatacttcatgccagacactattctaagtgctttgcaggtattcagtctcaacacaaccctaggaggtagggaatattagtgtccccattttacagacaagaacactgaggcgcagagaagttaaataacttgcctaagataaaacagcaaatagtaataatggaggcaggatttgcatctaggacatttggccccagagtctgtgctcttaagcaccacaggatggagtccgtctattatggaagttgttttgtgcg

SEQ ID NO: 312003 - DNA, 1508 bp, Homo Sapiens
  misc_feature (1268)..(1268): n is a, c, g, or t
catttaagaaattgttttgtagtttctggtttatagcagtcttcaagttttccatcttcactgtatgttgctgaaagtgaggatgaggatacagagttgatatttttagaaacagtaattttacttttaaggaaattggctagctctttgagctagagagctgtaggaagctcaacatttctttgtagagaacgttgctttttttggattgtacaggtataaaaacattgcttttgttgaattgtataggtgtaaaaagggaataactgtatgcaggtttgaaaaggaaatgtgctttaggcatgagtcataagatgccattgtacttgtaggcattttattttcctttagaaatggacatcagctcttctcttctgactggtaacacatagccccaaagcatgagattatttttcattgggtttttattgttgtttagttttggtttgttacgccagcccagtctgtctgcggaacactgactctgctctctaatgagaacaaagttagaaatctgccgataacctaaaataatttagaaatgaattaaaaatgtgaaatcgggttaaagtgatgatgataaaatagcatgcaagaaacaagctccttccatcagacttggctactgttttcttctgggtacgatttggtttggaagagcctcttgtttccttctctttggggtatgtcttcgtttcttaatatgtttgtaacattattgagatataattcacataccttacaattcacttattttaagggtacaatttagtggtttttagtgtattcacaaagttgtgtaaccgtgaccacagtcaattttagaacatttcgttaccccaaaaagaaaccctgtacccttgagcagtcacctctcattttctcccagtgcccaccccatccccgagcccctggcaaccactaatctatttctctctctgtagatttgcttattctggtcatttcatataaatggaattctacaatattcggtcttttgggactggcttcccaaatatgattttctatatggagtgagaaaattcttctcatcttgagaactcttattgctgtgaaagggagtggttggtaaaatcaatagatttcaggcaagagggccagatacctaacaggtttttctccgtgaatcttatgctgagtagtttttctcataccaagcattatgatatatactacttataatctgtggtagccctagaatggtgttgaatcttgctctcagcgggaagatcggctaaaacgggctnaatcggccaaatcggccaatgcttgcaataattgcaagtgttcagtggctacttgcaggctgaactcggcagggcccgaattttgcatccggggtttgggttacagcccagataagggttggcggcaccgaatgctggagttttcggggcattcgggaaaagggcccctttgtagggccgttacggttagctgtccgataggcccctttccgcccgtgaaatgcaagtctcaagagtcga

SEQ ID NO: 312004 - DNA, 742 bp, Homo Sapiens
cagtgcgtggggtgagtgcataagaggagtcgggatcggggctttcacagccttgtttttctttcttgttcaatgcctccacgatgtctgagtttgtccggctctcatgcggctcgttgtactccgtgtacttgagaagcactttgtccatgtcggtgctggcatactggaacagcttgttggtgctgttgaagatgatcagcgcaatctcacagtcacacagcacgctcagctcataagccttcttcatcaacccaaatttcctctttgtaaatgtcacctgtctgttacgttcatccataatcctcgtaatctgaatcttttttctccccatagtccccgtttttcttctctctctcgtccctgaaattatgtattttttccttccttttctttctctttcctgtttcctccaaacaaatctccttcttcagcacttgcacagctcagttcccaaattcctgcattcgttcctgcacatacacttctttactgccacaatcatttgccttccgttctttacttcatctcttcatagaagttacttcacagtttgcaactcttctttggcaccagtgcctttctgcttctccaggaagttgtacccgtcagcacctgctgagggctttgttgtccaaaccctgacaggtaaaaaaattcctgcagaataaagccagaccagctggctttgaagagaaaccccccagtttgggctgcgtttgcctcctctccttttctatcc

SEQ ID NO: 312005 - DNA, 806 bp, Homo Sapiens
  misc_feature (443)..(506): n is a, c, g, or t
  misc_feature (639)..(648): n is a, c, g, or t
tgaaagtgggggaggggaacaaggcccccaattctttgccctgctgatcattggatcaaattctttcgttaattttcccgtacttgtcctcagattcagggctggtgacctacggaattggtccgcatccggggtttggctgttcacagccattaagggcccttctttctcaacgtctccacgatgtctgagtttgtccggctctcatgcgggtcgttgtactccgtgtacttgagaagcactttgtccatgtcagggctggcatactggaacagcttgttggtgctgttgaagatgatcagcgcaatctcacagtcacacagcacgctcagctcataagccttcttcatcaacccaaatttcctctttgtaaatgtcacctgtctgttacgttcatccataatcctcgtaatctgaatcttttttctccccatagtccccgnnnnnnnnnnnnnnnnnnnnnnnnnnnnnnnnnnnnnnnnnnnnnnnnnnnnnnnnnnnnnnnntttcctccaaacaaatctccttcttcagcgcttgcacagctcagttcccaaattcctgcattcgttcatgaaggaagacccgatcagattagtccttgggatattttcctttcttaagagagagagagagagnnnnnnnnnntaacaacaataatctttacttcgtccagcgttgaagtgcttctccacctgattcaaacatgcagccacggcgacccacacagaaccttcaaagtcaatccaatagcagcccgaagatgtctgggtgtacgcgtgtgctcaagtgtctgtgactgcccc

SEQ ID NO: 312006 - DNA, 750 bp, Homo Sapiens
  misc_feature (91)..(91): n is a, c, g, or t
cactgcaagatttattagcatctttcatgactttgtagagctggctgtcttttggattgtattttggtgtctgccccttttctttatcganattttctcggtatttaacctggctgctcagcttggctgccttcttggccatttctatgtctgggcgaccgagcatgcttaagccatggctgccttccttgcggtgcttggctctgtactccacctcactggcctgtttggctgcctgtgtggccttcttgatgtctggtcgatcagccactgtggtgtaatgcaggttctctttggcatcttttctgtaagcgacatcactttgcttcttggccacttccatagcatgtttcacctctggtggctccagcatgatggagtagttggattttcctttctccttgacaaacttctttttgtaatttgtatcactgacatgcttggtcacttccttgacgtgaacagtgtcccgggtctctggtagtgttgtgtatgagccctgtgccaagtgcttcttgacatggtccttgtacttgttctcagacaccaggttgctgacagtcttcgccagcaggatctgaggcgtgtcgggtacggcatggcaggttcctctttccttgacatgtttctctttgtatttcagatcactttctattaaagtattcctgagggcgagcaccgtgtttttgtcatcagtgacagaaagcttgcaacccttgaggactcccggtccagcttatattcaaaatc

SEQ ID NO: 312007 - DNA, 1644 bp, Homo Sapiens
  misc_feature (136)..(150): n is a, c, g, or t
  misc_feature (155)..(158): n is a, c, g, or t
ggtgggaatacaaccaccagtcatgatcagcatgtcctaggagacagctattaccatgttctctttcttcctgggggcccggcccaaccgaatgatggagaaagaatcttgaggagggacgcggcggacatcttgnnnnnnnnnnnnnnnttttnnnnttttgagtataaaaatttattatacataaagaatattaccactaacaaatgcagacaggctaggacatggtactgggtggaggacggctagctctttggaaagtgaaaggtttgggtggcgtgggcctcatgccacactgattggtcagtagacagggggcacatgccaaacaccacagggcatcagatgctgctctgtgtgctcacaagtgttccctgtcttatctgggccttcgaagggagcacacccagaagcgagcaactgaagcgaaggggcttcctaaggtgccccttccaggcttgtctctgaagtcacagcaacactgttttaagcagtatgtttaattggatgatttccacaaactatccacgaagtttctaaccatcacaattcagtgaagtacaaaacactgagttacaggctgtgggaagagaaggcagcaccaatggtggcaccttctaatactggttgttctaggggcagggagagggaaaggtctttttttaaaccaagcccctcatttcaatgtacaaaagaattactctgatcgatattaaatcgtattgaaaacaaaatggactaaaaagcaaatactactctatgttggggtggaagtgggaggaaagaatgagtccttcgaagcaggaagggagatagcaggggaaaggttctgtgcctgtgaccttgggcggtcactcacgttgctccatttttactttcggtggtctcaggaaggtccgatttttcttctctttcttccccttcgtattggcttggaagtttcgccagctgtccacacgaccatctcgactttcctcaaagtttttctgccactctctttcccgtttggctttttcttgagcttcaatctcttcttccctttgtcgtttcctttcatgcatctctttggcttctctctctttccttttaatttccagctctgcaaagagtttcattgtctgtttatatacagcttgtttgaacagctcaggatcatcctcctctacaattgtaggttttccttccttctttaattgtttttttcgctctttcacagtgtgttccacgtattcttttcctgcctgaattacatccagggccctcttcttttgctcctgatccagtagcaacttgtaagctttgtccacagcttcaaaagccttttgtgctctgtcagcatcatcttgatttttgtcaggatgcaccaagatggataactgccgaaacctcttttttatttcttcatctgtaacttcaggatctatctgaagaacctcaaatgggttcaaattgaagtaagaggaaccaggacgggtcagtctttcaatctgatttttcgaagttagaaccgagtctctcttctctatttgtttcacctcactgtagaaggtcataaatgcttcctcggtgctgcctccgccgcctgaagtcccgctctctcctgaagccgccatttccccggcccagccaccacgtgaccccccc

SEQ ID NO: 312008 - DNA, 679 bp, Homo Sapiens
  misc_feature (653)..(653): n is a, c, g, or t
ggggaggacgggcctttcaagagggacactggtcacaccgcccagtgtcagcagcagctgctagttctgaactgtctcactcccaggctacatcttctcacttgctaacaaggacctctgagttcagcagccatgagttcagactcagaattggctgtttttggggaggctgctcctttcctccgaaagtctgaaagggagcgcattgaggcccagaataggccctttgatgccaaaacatctgtctttgtggcggagcccaaagaatcctttgtcaaagggaccatccagagcagagaaggaggaaaagtgacggtgaagactgagggaggagcgactctgacagtgaaggatgatcaggtcttccccatgaaccctcccaaatatgacaagatcgaggatatggccatgatgactcatctgcatgagcctgctgtgctgtacaacctcaaagaacgttatgcagcctggatgatctacacctattcaggtctcttctgtgtcactgtcaacccctacaagtggctgcctgtgtataagcccgaggtggtgacagcctaccgagggcaaaagcgccaggaggccccgccccacatcttctccatctctggacacgcctatcagttcatgctgactgaccgagagaatcagtncatcctgatcactggaggatctggtg

SEQ ID NO: 312009 - DNA, 1399 bp, Homo Sapiens
  misc_feature (47)..(47): n is a, c, g, or t
  misc_feature (83)..(83): n is a, c, g, or t
  misc_feature (102)..(102): n is a, c, g, or t
  misc_feature (1184)..(1221): n is a, c, g, or t
agtcaaaggaaaaatcaatgagatagccaaaacatttcaaagtactntactaaatagcaatagacaattcttatgtgctttgnatgattaggttattccaanatattttcactcatttgtttagaatttagtatttatgtattttctgccacatagccattgaacttaaaaactaagggtaaaaattaccagaatgctctcaacaaattcacttataattgtttgcccttcttcaagagagaacaaaaaatctttagtgaagacagcacttaaaattttgtacataagttttaaaaaaacattccatttatctcaggagaaaagatctaacacggggatatggtttgagaatcgtgtaactttcatatgcctgggggacatgttctgcttcttcttctgtccagttttcaaagcctcactttcttgtcccagaagccctacatttgatgaagtttgagtgggacccactcaactctcattccaaagctttgtgcacaggtgtgcgcctgggaagaatcaccatcctcaactacaaaaatggtcccagatgttcaccaggcctaaccaggccaactggaattatctctcccagagccatctgcattgggattggtaaactggagactggtctggagcctgctgagggccatcttggttatcaagtggtagcatctccaaatagaataactcaggcagaaaccagcacagttaagacttaggaagtgagctaagaggaaaaagaactttgattccaggtctagacttgggatctagtcatctgaagttagtgccctgtatctgccaaacaaagcagctgtagaattccctttttggtttacaatgttcttgtaatgtgtaaaaatggcaaaatcctgactaatcaaaacataaaactccaagttatcaggttacgatatcttcaggccttaatttttaagcaataaaataacaggattatattggagatattagatattctctaggatttcttctctgttgtatgattctattgagttgaagtttctgtcaactaaatgtcgtaaagtatttgactttaaatagtaaaaggcgttaacctaagaaaaaggtgtacaatacatttagaaatatttacacttaaacatactcatttctgagttgaaatatctttaattaaatcaaaaatctcgtttttaagatcttcnnnnnnnnnnnnnnnnnnnnnnnnnnnnnnnnnnnnnnttagtggtagcatttttgattctgttgttaataaggttaacattaagagaatcaaaaatgctaccacagagattttatcattatcaactaactgcatttcacggtagtcacaattagatatttaatatttgaggcacagaatagtacaaaccatttgtagaattaatttctcaccccg

SEQ ID NO: 312010 - DNA, 484 bp, Homo Sapiens
gctcaaaaatctttttactgataggcatggctacacaatcattgactattagaggccagaggagaatgaggcctggcctgggtgccctgtgcctactagaagcacattagattatccattcactgacagaacaggtcttttttgggtccttcttctccaccacgatatacttgcagtcctccttcttgaagattctttggcagttgtctttgtcataacccacaggtgtagaaacaagggtgcaacatgaaatttctgtttcgtagcaagtgcatgtctcacagttgtcagtctgccactccgagtttattgggtgtttgtttcctttgagatccatgcatttcctggttgaatctcctggaactccctcattaggtatgaaatagcatgatgcattgcataaagtcacgaaggtggcaaagatcacaacgctgcccaggagaacattcattgtgataagcaggactccttatagacaggtacc

SEQ ID NO: 312011 - DNA, 1035 bp, Homo Sapiens
  misc_feature (449)..(488): n is a, c, g, or t
  misc_feature (774)..(792): n is a, c, g, or t
tcccaggaggcaagaggaccaaccctccaagtcccggggcccctgtccacccaccatatcctagacccaatcttttctacctctttgtcgacaaggttacaaacagagaggcaagcaaagaaggctggggcccaacggaggggagagaatatatatcccgggaaacgtgggcaacagcatcatagacttgaatgaagcccaaggccaagcagccaagcaaggactaattcagagcagctcaagaaaccctccactcaaaccggcgggcccccctgtgttaaggacatggccgggcccagacgcgctctcatagggttcacagagagtctggagtccacgttcactaaagtataaaatactactcgaaaatgaaccccagcctcccttctgagagatgaatcggttacatcaacacatgaggacagatgcatttacatagacccacacannnnnnnnnnnnnnnnnnnnnnnnnnnnnnnnnnnnnnnntaggagggcaaagcttctcactccggagtgaaacttcagcttacagacgttacctgtctcccctccccttctgaatcatctcattcaaatagctgctgagcagatgaggggcccaggaggaataggtctggctgcattgagtgcctgcagtgacagaggctcggtctctaccatgacagagacagactcggcgcactcggatgccatgatctgaaaagaggccaccgctgctgcagccacatcccaggactgcacaggggaggcaggcgtagctcatgcacaaggnnnnnnnnnnnnnnnnnnnagcacatgcatgcctgcaaaggtgtcagtgtacacagccttactaaactcacaacacgaccgcttcacattgcatattgccaaagagaagcgtgggattcaaacattcatgagagggagcctctggcagaggtgaaaagaccggcagggggcgagaggcgggagtcaagactgtccattggtcggcgtaagagttcctccacgtgcctggccacatccatggtctcatccaggtcgaattctc

SEQ ID NO: 312012 - DNA, 3063 bp, Homo Sapiens
  misc_feature (292)..(332): n is a, c, g, or t
cctcagaagaaagctgagacactccgggttatatatcactggctgggcaggacagagtgccgaagactcactggagcacaggtgctttctcctccccgtgtccgtctcttattcgagacagccacaatgtcaaaagtccagccactcttaagacacagtggccaagcttccagccgttcacgaaactcactgcctttttgcacacagtagtgaaccaccacagcttctgtcttggcccctctgctacaactaaactctcagacactgagagggagaaacaccataacgtgcnnnnnnnnnnnnnnnnnnnnnnnnnnnnnnnnnnnnnnnnntactcgcactcccttcgctggtgccaccatgcacagaaacactaaggtcacaactagtattaacacttcacattatgagtattgtttcaaaagagaagcgattcatggaattaaaacatccacaagagtgattcctctggtgaagatgaagaagctgaagatggagaggtcgcggggtcacgattgtgcgtgcgggatccactgactgtccattggccggcccaggagctcctccacacgccgcgctacgtccattgtgtcctccagatcgaagtccccatcggtgtcaaggactgagtcagggttctgtgggtacatgttatagtgagcctggggacacacagctggggagggggcctggtccatgtacgtggcgctgccgcccccggcatctgcagatgcgttcacaaactcagggaccacttgcttgatctgtggcttcacgtatccatcaacagctttagcagtagcagactcgcagggaactggtgtgtagtatttggagtatacttcatcttttggccgatcaggaaacacgtagataaggtaattcaagtctcccaagcggtcggctagggaccgaatggagaagtctctggtggtaaaaggcatcagattccaaaacattctttcctgagaatcaaacttccaagcaatggtgatgccgccaatttctgagtcactgaatctcaggaggaaggtcccatctggcttgttaatgagtaggtcatgggcctgttgcttgtttacaaaccccaaaatggccccatcattccaatgaggcttgagatgtttttttaacacttccatcacaccgtcaaaccattgccagaaagtgtaattccgtcctggtaaattctccctgttgaactgggaccaggacacagacaggccactgtagtcctccaggtggctgctgctgttgttgaacagtttctgcgccaggaacacgaggttctccttggtcaggccccggttgctctgcacttcggccttgaatttcatgttgagcgcctcacacagctgtggccacagcactttgtcaggcacggcaaatggcaccctgcccaggctctgcaaaagcattgtcccagagaacagtggccgtcgcattgttgtcctggctgccatgaacgatcaccaccactggcagggacagggtcttgacttgaaaaaccagctcatttccaccaacactgaactgggattcaaacaggattgtaaatttttcttctgtcaccgactctgccccacgacggtctgacctcttaattcgtttcagggacatattcctgaagtgggcactaagggtgcctgtggcttggtggtactccatgacgcagcagttgttcaagatctcgccactgtactcgttgcgggtgttctcgtttttgagcagagacttggcctgctgctcactgatgatggtggccttcacctggggggggttcatgtgcacgttcagcttcccgcccaccagcaggcgtacggtggctgcaaacttggtctgggtcttcaggacctgaggaggctgcttctcaatgatgaatgtgctggtcaccagggctgagataatgtccgtgatggtggcgttgacctcggccagcatctcctccactgggccggggatgggcagctgctggcagaggtgctcagccctgcggatctgctgccggttctgccagatgatctcggccaacttctcacaccaggactgtagcacgtccaggctgccctcggggggcccgccgttcccggccagctgctgccgccgcttccactggatcagctcgtcatccaggatgatggtctgctgcttccgcagcagctgcagggtcttctggtgcttctcggccagctccacgcggtactgctgcagtgtctgtgcctcacgctgcaaccaggcctccagagacacctgcttctgctggagggccgtctcccggctcagacgctcctgggggctcagctgggccagctgggcaaactgagcttggatcctcaggctctcctggtactggatgatgaagtactcctgagtctgctgcagtttttttagctcattctctgtgtcctgcgtgaccagtcgcagctcctcaaatgtctggttgatctggaggtgtttctgggacatggcgtcagccaggcttccagctggagagctgccattgttggcttctcggaccagcctctgttcattgtacagtatgtggcggatgcagcggaccagctccatggggcagcggtcatatgttttctggagctgtgtggcgtagtgccccagcttgatcttcagtaaaaacccatcttcccccacctggtgctctgccttcttctgcagctcctgcaccaggccctccaggagctgggtggccttaatgttctcctgtggattatcaagatctactgagtcccatgcttggctttcaatccactgggataaataatgccgcacctcaatgggaaaatgctggccatataacgcttgcatctgatgaagggcttctccttggagctgctgagcttgtatccacacagccatggtttacaatctcgctcggcccctcgggcgcccgcggctgctccggcccagctgtctggcttgcccgcccgcccgctcgctccctccctcggccgggccgccgcgcggagttgcctgcgctgggtccccgcccggggtgacggctccggccgccgactctcctcccgccggggcccgcgggggcgcgcg

SEQ ID NO: 312013 - DNA, 788 bp, Homo Sapiens
ggatttaaaaacactttatagtgtgttgtttttattgagcgctcacacccgaagggtggcggcggatgctgtgggtgagtggggccgcctgagcctgctcgggccacatccacacatccacagagtccacctggactcggaggaaggccgagaggacacggacggtggccacaccacgctgcagtgaaggcccaagtgtgatggcagagaaagagggaaagttggagaaagagcggtatctgacaataacttttctcttggatgttaattttttggtctataaattggaaaggaaggctcggactgaaataaatacatttattctgagtaatgaccttttgggagcagtgtccgtcaactctgcttcgagagcgtctccacgtgagcagcagcgcctgtctcgcgcctcgccgaggcggacccacaccgggcctccagcggaggcggctttctcctgtgtctgtgaagggaagtagcaggtgcgtcactgttgttaatggagcggacaatgatgccttttctctgacagaaaaatgtccggcttaactatgcaagacaagacttggtcctcacgttcgcgtctgtagttgattttgtcctggaatatgtacaagttattggtggcagccacggcaatgacattgtccacggggtgccaggctgtgtgcaggatcttcttgttgaagtccagactgtccacactgatctcgtccctcgtgccgaaaacaccacccagcctcgcgagcgggggtggtgggggcgcgcccggcggcccgccccccccgcgc

SEQ ID NO: 312014 - DNA, 564 bp, Homo Sapiens
gtttcttcaagcaatatctctattcctgctagataccttttcagtggagcaaagtgacaaggtttatgaagtttataaaatctacatattttccctctttctgggatatttactacagtttgagaatccagctttgttggtatctcctttattaagtttagtagcagccttaatgcttgctaagtgccttcagctgaatgtgaagaaaggaagttttgtagctaaaataataaaagtgattaatttttacttggtgtgtactctgacaataacattgaatattataatgaagatgtttgtcccacacaaagaaaatgggcacatgctgaaattccttgaagtaaaatttggactaaatatgaccaagaattttacaatgaattggctcctctgtcaagaatccctgcaggcaccatctcaagatttttttctgcgattgacacagtcttctttattacctttctacattctagtgttaattatttgttttctttctatgttgcaagttattttcaggaggattaatggtaagtccctgaaggaaactgttactcttgaagatgg

SEQ ID NO: 312015 - DNA, 685 bp, Homo Sapiens
gtccctagctctcctgacagatgtcattctgttgctccatcaatgataatcgggattctcgcaatttccggagtctcttccagacgaactggatgggaacttctggctataaaagagagaggtctcatccggtgggaactcagggtccacataaagaactttcttttctagacatttcttgtgaagttgctcgaatgtcttctctttcactccgataataggaaaattgcggctgatgatggctgaatagatgccacttgggtttccacccccagcctcagtggccttgctctgggccgggtgaggaactggccctggggaccggggctcagccgctgtccttggagccacagatgcgctaatgacggtcggcatggcaagtggctttggaagaaaaagctttttaaagaaaataagatacagctaccttcaaggaaaggaagcaactgcaaaggggaggttggagtaattctgtcatctgagagaaaagtgtccacatccagttcaaagttgaaagcccatcagaaggtcgtacaggttatgtccatcttaaaaaccgagctgtgattctgaagccataagttctcctgagaaatgagtgctaaaggatttctgaagcaatgttgacttgggggtctcctaccagcagcatgcatgccagagggagagagaaagagagtgagtc

SEQ ID NO: 312016 - DNA, 417 bp, Homo Sapiens
  misc_feature (113)..(122): n is a, c, g, or t
  misc_feature (391)..(391): n is a, c, g, or t
actttcacatgtattgattaaaaaaaataaaggggagggggagttttcaacgtcattcaggataactattttcctggtataaaaagacattattctcaaacaataactttctnnnnnnnnnntacatcatgcaatcaaagttttaaaaagtttcactgaaatgtttcaaaacctctgggaacaaatcatgtagtaaccattttgaccagtttttgccctgaataaacgcaaaatcttgcaagtcaacacagatgcaggctttgctgcaaaaagaaccgctgatcagagccaaaaccagtttccaaggagggcacctgccagaaaacaggggcctcagcagagagccagaatgactccgtgtgttggcacaaacttctacgcctttggagtnctgtggcagctgcacacccagcagac

SEQ ID NO: 312017 - DNA, 880 bp, Homo Sapiens
agcagctggctgcaccacaacagaaatcaaaacaaggaacagctcccgagggcctgcctctgctccagggactggggcctagaggtcaagggccccatgcctgaatccctttcttctgggtggatctggcagggacccctatcatcttcccaaagaagggggagaggagaacgccacaagatcaaactccaccaacccacccacttgttccacagctaggattccttcagcaccccgctccctgcctcttgctctctgagcgccactggtattccctccattgtccccaatgagccctggcatccatcttggtaatattgcactcttcctgtctctcagattgtttccatttttgattgagaatgcaaggtatttggaggggtaggggaagtgagtaaccttaaagaaataatatattagttaaatacaataacaggaaaaataggggttattttatctttttccccttattaaaaacaagaactaccaaaccaaggtctaaacttaaatagtcctacacctattctgcaaacactagtaataggaaaataatgcctgactggaattcccttgtcttttttccttagatgataaaagtagtaacatgccttgctgaggaaagcaatggatataaatgcctagtaaaatacgctgctttctaacattctgaaagtgattaagatgattctatataatgccttcgtcaagatggaaaatcaaggaggaagaaagagaaacctttggggccaggcttagggtagacggggctgaggcctggcaagacagcccgtctacagtcattggacataggggaaacccacagggcatggggcacgcccgctgctcagggttgcccctttccagctctctctcactgccc

SEQ ID NO: 312018 - DNA, 664 bp, Homo Sapiens
  misc_feature (24)..(24): n is a, c, g, or t
ccacagccacctccacgatgtccncagggacgatgtcccgagccttgatcctttgcactgacttgcggtcagcctggtagaccttccccatctctggctcatactccttcagggcctcgatggcgttctctgcgttccgctcctgccaaacccccacgatggcattggcaatgaggatcaagaggatgacaaagggttcaacaaaggcagtgatggtctcttcaccttcctcaaaccaggccagcacgaaggaaatgcatgcggccaggaggagaatccgcaccaggaggtcttcaaactgctctatcaccagctcccacagggtcttcccttcctcagcagggagctcattgaggccgtatttctccagattccgcttaacttggtccggggtgaggcccgtggtctcactcaccccaaaataggccaaacattcctccgtggttttagcatgagcggcctccattgtgctcccttcctgggggccggggccggtgtgttccttccagggggttcccactcgtggggggtcttcctcagtgtgtccaactgcctgtctgcctgggtttcttctttttactctcctgccccctccaggtttttcttccctccacaaagctctgacccccgtcccacttgagcagccggccccccggccgaaggg

SEQ ID NO: 312019 - DNA, 348 bp, Homo Sapiens
attttcaagagagtgtgactcatcaggcagcccaaaagtttattggacttggggtttctattcctttttatttgtttgcaatattttcagaagaaaggcattgcacagagtgaacttaatggacgaagcaacaaatatgtcaagaacaggacatagcacgaatctgttaccagtaggaggaggatgagccacagaaattgcataattttctaatttcaagtcttcctgatacatgactgaatagtgtggttcagtgagctgcgctgacctctacattttgtatgatatgtggggcaggttttttgtagagcttacttttattattaaatgtattgaggtattatattt

SEQ ID NO: 312020 - DNA, 851 bp, Homo Sapiens
  misc_feature (82)..(82): n is a, c, g, or t
  misc_feature (135)..(135): n is a, c, g, or t
gggaggccgcgggggcgggtcacaagaaaggggcgaaaaaaagtcgtgttttacgtaacaagaccctcttttctcttccaantgggcgcgcgcgaagcgggcgcgcccccacccgacttctttggatggtccggncgccggtctttatttcgcgtgttcgactgaataccgcaggcggaggtgttttgcggcgcgccttcgtcgtgctcgagacccgggccgggtgttcaggacggacgggcgattctttggggctttggtgggctattggggtttgtcttttttcgcactgctattaatattttattggtatactgaagaaagagttatgaccacattatttcaatgtcatggctttctgaaggaagttatcttcttatttattttctgccactgaattctagattaccagagtggttgctcctggggatgtcttgctggtctgtccctccggaagaatgatgatgcttcctgcaggctgacagaaggaaatcggggtagagagagttgacggtgtcctcgttggggtggtcgttgctgattttgaaaaggaggtgggggaggatggcggtgatggcctcctggttttggtggtctctgctgaggaccatcatcttggttaccactatcaccagggggtctaggtaggagtccttcaggaggaggtctctggggtccctgatctggtctctgacttgagtcctctacatctggtatggtgaaagtaaagtcttcatagttcacatcattatctgtgctctgagctgagctcagagccagaaggaccactgagagcaggaccagcagcatcttgaaggaggctctggagttgctcccaactctgcgttccc

SEQ ID NO: 312021 - DNA, 651 bp, Homo Sapiens
cagccgggcctgggcccaggccaccttctcggccaccgtgccaccgttcagctggatctccatgatgtgggccttcttctgccggaagggcagcagtttcatctgagtgtggacaatgacccgaatgaccttgcagtacttcttcatggcggcgaagtccttctgtagctgctttttcccgtctgtgtcccgccacctcttgcaggccttggtgaaggctttcttcttgctcttgtgccagtccttgtagaatcggcgccggcactcatcactgaggtgttctgcaaagatggtcttgaagctccggagacctcgaggggtggccacgtagcccaccacgcccaccaccactaggggcggcgtttctacaattgtcaccgcctccacctcctcccgtttggaaattttgagccccggccggtgcacctcccgcagggtgtgggtcatgcccgccttgtagcccaggaaggccgtgaggtgcacgggctggctggggtcatcccgcggccacgtcttcaccttgccccggtgccggtggctcctcttatggggcaggaagcccaggtgtccgtgccgaggggcggaaaacttccggtgggacatggtggccgatccctgaaggtcaggaaggggcctcgccgctagccgccc

SEQ ID NO: 312022 - DNA, 508 bp, Homo Sapiens
ggacttttccgtcgtttattttcaataaataagcagctcagcgcagtcggtcgccttgtccctgcaagcccctcggggttgggaaggggaatttacaaggttgagagggaggcgggtggccgagggggaaggaaagggaaggggacatgtttataaacagacacatgacacgggtgtgggggacaggacgggggtctgtgccacagctctgcctgaagatgtgtcactatcggggtggggaggacagagcaaaaggatgctcacttccttctttcatcttctggatctgtgacacgggctcagagatggaggagggggaacagttatccctctaggtagttccgagcaacgaacttgaggatttcgtcgagccctatgactggcagtgagatcttgaggaccatgagccactgggtgaggtccagggcccggagcttgaagatcatcggcagggggtcaacatataggatgaggaagtgcagggacatggagaggcagatggagccca

SEQ ID NO: 312023 - DNA, 1557 bp, Homo Sapiens
  misc_feature (208)..(216): n is a, c, g, or t
  misc_feature (354)..(354): n is a, c, g, or t
  misc_feature (811)..(825): n is a, c, g, or t
  misc_feature (832)..(832): n is a, c, g, or t
tataacacttgaaagtataaaatgctacatttccaaaaatatatatatttttttctgcaccagcacccttgtatagtaaaagtatctactttttgttcatttgtttcaatgcactacactttatctacaatttcattacatgtatacagcaaataggcaagcatggcttttacatccttaatgatttttttctatacagggaggtttnnnnnnnnntacttgaacagtttgcccagtaatgtgacacataatgcatgtaccttgttctcatatttttttaggtgtaaaataaggattcagtaattttacttcagatatttatctttttaaaaatagtgttgcagttttgttatnttgcattacttttcaaaactccttaagtttttctctcatggcacactttcttctaatacttcaaattttggcaggcaatataaaaaaggctgcaacttctgccctttgagggcactgtagtgactaaacagcatatcaaattttgaatactttttgaaatcacttcaccaatgatatccctgaccgaaggttcatgcatgatgcatcatcacacagtacattcagagagagctttgacttcgctatgagaagaaaaagattcctagaagtctctcacagtaactgcctctgtcattgagtagttaaggaccatctgtctccccttcttaagagaggccttcttaccgttcgcttagggtgggatattaaaagatgatcagtgctgtgggatgaattgggccttattgctttactactattcagtgcagtttctagaaccactttcacccaaacaggnnnnnnnnnnnnnnnctttacngctattgagttggagtttctacaacaatttctttgtcttttgtttggttagatggtaagacgaacggacaagtgcctcagctcgctgcactgacgacaggcaagcaaaggcgattacccagttaactgatcagcaggcaggcatggtcaggtcatcattgggtgaagagttcagaggtcagaaggtcataggttagttgccggtggcggctcggtctgcggtcacaatcctttggtaaggatggacacgcatatcgtgccttcgaactttagtagccaccgcacctaatacaccactaggttcaataggatactcaaggattgatgtagctggtgccaatgtgtaggggtactcatagggtgtatagattaaaccagcttcgggccctggaggaactattgcagcagttgggtgaggagttccgggcatgacagcggtctgtatttgtctgatcaaaggcattatggtagggccagctggcgtaggagtacgcagggcagctggtgggagaaccggcgcaggcccagtaatgatccttggagcagcctgggctgttgctgcaagagaaaaggcaagggctggtgatttaatgttggcatctctgtaggtgccattcagaatcgcaagctccatcagctgcatcttcttcaggctgtcttctccttctgctgcaggtaccaataatttcttcacttcttcaactgctctcttcaatttgatttgag

SEQ ID NO: 312024 - DNA, 359 bp, Homo Sapiens
  misc_feature (58)..(75): n is a, c, g, or t
  misc_feature (267)..(267): n is a, c, g, or t
ccttggtgctttactactattcagtgcagtttctagaaccactttcacccaaacaggnnnnnnnnnnnnnnnnnngctgagttggaggacaacaatttctttgtcttttgtttggttagatggtaagacgaacggacaagtgcctcagctcgctgcactgacgacaggcaagcaaaggcgattaccagttaactgatcagcaggcaggcatggtcaggtcatcattgggtgaagagttcagaggtcagaaggtcataggttaagttncggtggcggctcggtctgcggtcacaatcctttggtaaggatggacacgcatatcgtgccttcgaactttagtagccaccgcacctaatact

SEQ ID NO: 312025 - DNA, 1465 bp, Homo Sapiens
cagacctgggggtggggagccacagagtgccgcaagtccaagtcggtatctggaaggaaggagtctactcagttcttcctgctctaacttgggttcaaacctcccacctacatcctcatctccagaacaagacacatggatgccagtcaccttaaaaactaggtttctatttctggttagattctagagcagtggaactcaggagtgatactataccctacccagtcccaccacagcctgcctccttcctcccacagagataacattgtacaaaactgtatttacaagaaaaccaattaaaaattaagggtgtgtgcaaaagtagacaggagagtcaagacatatcaatgcagggatggctttggggaatgggggactcaggttctacactggaacctggggtcatgtatcatgtaccaggtggggagaagtgtagcaaatctcagtgccaatttgaggggaagccagtcattccaggagaagagctgaggggaaagagctgttgactttcataatgcagtcttaattatccagtcaccctcctgccacatggcagaagccaggtggcagtgatggtggtgggggaaacaaaacacacagtctctggcaagccccaccgggaaaggagggctcagaaggcgtagcgggtccggatatcctcgagtttcttggacacttcgggtggggttcggtccagttcttcagagacgttcttttgtttgttgggttccatggaattgaactgctcacagaggtctccatcaatcacattcttcacagggaagtagtaggagcgaaagctgaggtggtcccgcccacagagagggggatgttcagaccgcaggtgcatttccacatgctggaagaagtcatggtcctcatgggacgtgaatggcacaaggatgccaattcctccagacaaggtggtatagacaagtgattctgagcctccagggatcagcgtggtcttctgcaaggacagcaccgtctccccgacatggtagttcatgatcacctctgccttctgggaggccccattgagcaagccacggtcccacagggctttgtttcctgtaggatcctcatctacttcatcattggtgttaggtgggagcctcaccacacatatgttgccaaacttgtctgccccagccacagtgtcatagtccaggaggctggctgtagtgacccatcgggggtaggtatcatcagcaaagatgataagctggttttcattacgcttgtagcgaacccagatgaaactttcttggacatcagatacaattaccctatgtccgatagtctggatcccagagatataattggcaatatgcttattctcacattttcggagtaacttcttctttcccaggtcatagacacgcaacagcttccccacaccaatcaacaccctcccctggaatggggcaatagcagccctcgtgccgaattcgccacccaggcc

SEQ ID NO: 312026 - DNA, 772 bp, Homo Sapiens
gcgtgggatctggattttggttgcagtttttagctccaagttcttgcagtttctctccatttttgccaataacaaagcgatggtgttctttgggaatggcaacagttgctgaggcctgagtctgcagtctagcaacaatgtctttccgagctttcatggcagcatccagctttcctgacaccatgatggagaggccttggtctttggccaaagacagctccaagtgagcaccagttctctgcatgatctcaaggcagatttttgcttgttcaccttctccaaactggttcatatccttgtattttctctcctccaggggtacatggaacacctgagtgatgacagaagccttgatgggtcggatcttgttcccccaggctccagcgggttcctgggcactttccaggcaagcagctttctcaggaagtggagggaaggcatccttgtaggttggagggtcgctctcctcttctgaatttagagtggcaactttgatttgttgcggaaccagcccacttcggtgttcagcaaaactctcttgggtcaaaactgcaacggaactcatggttgatctcacacctacacacaatccgggaaaaccacagcaaaacggtcagtagccagaaggtccgtcctgaggccgcctctgtcagcctgccagcttttgctgttccactcttataagcataagaaaaccgagctcataaggtaggaactgtggcgaaacagggacaagagtgccatcttggtaaaggagaagaggctacgcttc

SEQ ID NO: 312027 - DNA, 704 bp, Homo Sapiens
  misc_feature (658)..(658): n is a, c, g, or t
cggccggggcacactttcaggctctgatcgcggccgcagtttttccttttttcttctgccgtcgccttctctgcctcttctcatcctttctcgctctgctgctctgcagtgtgacgagtccgaatcctcttcccacccagcccgcgcctttcttcttttgcctgcgctgttctatttctccttcggccgccgccgccactgctgcacacagctggtgtcggtgccgcgcttttacccccaagtcgttcccgcagcctatggcccaggccgccttgggtatttctgctcaaggtaaccacatccctctttaaaaattccgccgaaaaagagaagacgctttacccgactctttgggccgttatctcacggcgaactttctgaccaagtatacaactacccagagggcctaggagaagtgctgtatagagagcagttcgacttcaacgctgagccaccttgggaacctagctgatgataggggggttccatctcccaacttgtccattttgttgcatattctaaggacccagacataggcttggtggcccgtctcttgtctttcctggtttatgactttcggctttgtggaatacggctgagatgaaaggatttattgatgatgcaaactactccgttggcctgttggatgaaggaacanaccttggaaatgttattgataactatgtttatgaacataccctgac

SEQ ID NO: 312028 - DNA, 834 bp, Homo Sapiens
  misc_feature (102)..(102): n is a, c, g, or t
agttattcaataacatttcccaaggtttgtttccttcatccaaacagggccaagggagtagttgccatcatcaataaatcttttcatctcagccgtatcccncaaagccgaaagtcataaaccaggaaagacaagagacgggcccaccaagccctatgtctgggtccttagaatatgcaacaaactgctacaaaggcttctacagttgattgtacttcagaagaaactgatacatctctcaaataatcacaagataattctggcagcaacagcccccttgacaccaagctggatgaatatgagtcttggatttctgaagtgaagacctccatggacaagttgggagatggaacccccctatcatcagctaggttcccaaggtggctcagcgttgaagtcgaactgctctctatacagcacttctcctaggccctctgggtagttgtatacttggtcagaaagttcgccgtgagataacggcccaaagagtcgggtaaagcgtcttctctttttcggcggaatttttaaagagggatgtggttaccttgagcagaaatacccaaggcggcctgggccataggctgcgggaacgacttgggggtaaaagcgcggcaccgacaccagctgtgtgcagcagtggcggcggcggccgaaggagaaatagaacagcgcaggcaaaagaagaaaggcgcgggctgggtgggaagaggattcggactcgtcacactgcagagcagcagagcgagaaaggatgagaagaggcagagaaggcgacggcagaagaaaaaaggaaaaactgcggccgcgatcagagcctgaaagtgtccccggccg

SEQ ID NO: 312029 - DNA, 1859 bp, Homo Sapiens
  misc_feature (1209)..(1275): n is a, c, g, or t
  misc_feature (1398)..(1408): n is a, c, g, or t
accgcagcaaacacacataacagattcttgagacttagacccttaaacatgtctgctcatcactcaatccatttggccaccctttctgtccacaccaggccaaagagcaaaatgttttcacagaaattctctgggttgcatattcttaattgcctgaactattgtggacaaaacatcacatttttaaaatcttaaagcacttgtaagggtcatacatgtgtgtttactgtccttgttgcttctgtcctggagaatttgcttgaccagagctctctccagggcggtctgcaggagtgaaaggaaactgaaatccatagccattgtacccatccaagtagacacactggaagaaactgatgggacttttctgctttgtgggagacacatcttcagttccttctttagctttctttgaagctggtacatcttcaacatcttttgatactcttgcaggtttttctgcttttgtcacattgtgtaattgaagactttcttttcttgttgagactttttcttctctaagatgcttcatgtctgctttttctttactttctttttcagatatttcagttttcttctttcctgattctgtgacttctgatgttccttttggagttggttttggtttgtctgtttttatagatggaggttctctttctcgatgttcagctttttttgttggtttgggcttggctgttttttctattgtgacagcttttacctgcttgagaactttttcttctggtttaccatgagaaacagtcttttctggtttcactatgtcttgtttgtgtatttgcactttttcagatatagctggttttgcttcttttttaatttggggctctggcttctcttccttttttccttgtagttgtggaggtttaggcttgacttctttgcctgctttggacatcttttcatcttttttagtttcaggttctttttcctttagggaagctggaactttctcttctttccctttaataggttctttatctttcagaattgaagaagtcttcccagatttttcttttctaatttcttgctccactgtcttggttgttttctcttccttctttccaggtacagcttttttacttgaaaccgcaccaatctcctctttggctcgttcagtttttgcttttacttgtttgtcacttggaactgagtgttctttctttggtgactttgctggttccacatggnnnnnnnnnnnnnnnnnnnnnnnnnnnnnnnnnnnnnnnnnnnnnnnnnnnnnnnnnnnnnnnnnnnaatcttccttcttttcatccttcttagctgcttgtgctgcaatttttacagtcccttgtttggtttcagaagcttttcccggctccacatcttacatgtttttgagcattctcccatctctgnnnnnnnnnnncagtgtatttattatgttttaattttagaataagttggtagagatcaattattacttcaaaagagacaataaacaatgttattcaaatacctgaataacatgtaagtctcttacttatagtaacaacaaaataaataagaaagactccccccagctgcagtgaagtggctggccattagagagaggaactgacaggggcaggagaatgagtagcagcagatggtaaagcaggtagtgggctcctaccacacagactttatcctggttattgacaatacccagcccactgacctccacagtacagatttccatttcaatgtgaaatcatataattatttactcgtacaacttcccttcctactaccctataaattctctgagatcactgattgattgtcacttattcaactttataactccagacccaacaaactgctggaaaaattgtctc

SEQ ID NO: 312030 - DNA, 611 bp, Homo Sapiens
  misc_feature (398)..(398): n is a, c, g, or t
  misc_feature (550)..(550): n is a, c, g, or t
caagcaacagaaatagtttttgcatgtataggattgggccatctttatttttcaaattataatcagtaaggtggtgttaaaaccacaaatcaaataggaatatgtctaccagttaccctggatcattgtcttattcccagcaatcttcagcatgtcccctgatgtaattaaacagtttgtggagtttccctgttcggaactgatattcaaagttcagttacacaaaagaaagaccaacccagattgctgtctcacattctccctggcacagaaaaacatgcaaggacagtgataaagagtaatagacttaaaggttattgtcttccgcctgtctgaatccagtgctttcctccgcatgttgttgtctttctaaagaagataatgtcaacctccttcanttttttttaccttgctccactgtcttggttgttttctcttccttctttccaggtacagcttttttacttgaaaccgcaccaatctcctctttggctcgttcagtttttgcttttacttgtttgtcacttggaactgagtgttctttctttgngtgactttgctggttccccatgtttttctttcttttcctgttttcttcccccggccccgta

SEQ ID NO: 312031 - DNA, 1231 bp, Homo Sapiens
  misc_feature (1038)..(1043): n is a, c, g, or t
  misc_feature (1045)..(1045): n is a, c, g, or t
ggggctcttaggaagcctgggaaggaccggtgtgctaggagatgatcggggaaagcatagtcccctgtctgtggcaccagacactcccgactgtgcgctgactctccccgcccagccagcagccttttccagagaggctgtggtccatagcctctgttcgttttcactgcaggaccaggcacgaaagttaaaacaaaatgaagattttttctgaatctcataaaacagtgtttgttgtggatcactgcccttatatggcagaatcttgcaggcagcatgtcgagtttgatatgctggtgaagaatagaacccaaggaatcattcctttggcccccatatctaaatcattgtggacttgctcagtagaatcttccatggaatattgtagaataatgtatgatatatttcctttcaaaaagctggtgaattttattgtgagtgactctggagcacattttttaaattcttggactcaagaagaccaaaatttacaggagctaatggcagcattagccgctgttgggcctcctaatcctcgggcagatccagagtgctgcagtattctgcatggccttgttgcagcagtggaaactctccgcaaaattactgaataccaacatgaggctcgtactctactcatggagaatgcagaacgtgttggaaatagaggacgaataatctgtattactaatgcaaaaagtgatagtcatgtgcgaatgcttgaagactgtgtccaggaaacgattcctgaacataaccagctttgctgccaattccgatcatctcatgcagattcaaaaatgtgagttggtcttgatccacacctacccagttggtgaagacagccttgtatctgatcgttctaaaaaagagttgtccccggttttaaccagtgaagttcatagtgttcgtgcaggacggcatcttgctaccaaattgaatattttagtacagcaacattttgacttggcttcaactactattacaaatattccaatgaaggaagaacagcatgctaacacatctgccaattatgannnnnnanctactttcctccaaaagatgcacatgtataattttcctgaaaagtgggtggattccccatcctaagggggcgggccaatccgaaaaggggctccctttacaaaaaaacaattaaccctttaacggggggggtcacaccccagggaacacataaacctttgggaattcacccctcaccgggtcccta

SEQ ID NO: 312032 - DNA, 497 bp, Homo Sapiens
cagcctatcctcccccacagaggctgctgcgctacttacaaattgaattaaatgagggctgaaacggcacgcttcagcatgtactgtagtcaccgtggaagaacaagtctttccaatattggggcatgtattgatttctaaaaaatgtctgcctggggaatgaaatatgcacatgtatttcatattcacagatctgcttccgaaaacctctctatttaatatcactcaattatgaatttgttttgctttcagaggaatggaatgcattttagtttttataaatttggggagagacaacactctgcccaggtaagaggagaggaagttcaggggtccagctgtccatactgctggctagaggaggagacagatccgggagaggtcctggagtgttttgccttttcctttctccccctgaccaatccatcctgggaaaccccaatagtgtcattgattgccacatcctgggctgcatcttctagcgcccacctctcccg

SEQ ID NO: 312033 - DNA, 439 bp, Homo Sapiens
gcatgagccactgcgcccggacgacttccctatttctgatcaaggtatatacaggaaaaaaagaagttcataaattttcccaattctagggtactttctgtcttgcacccagggatatgtacatctctatgggcgatattcattaattcgttgttcttttcaaatgcaaacatgaaaccttgaaacctttctaatctcttcaactggatatgatagctcccttcttagcacactgtacccttatcaaagcacattcatattctgtcttacagtgtagtgtaattgttgtttactttaacctatcgcagacagtgtagtgtggttgttgtttactttaacctatcacagaattcttgacattaccacctaattttccaagtgaaacaatattattatacttccatctccttacacaggagatgttcttttttaaataggt

SEQ ID NO: 312034 - DNA, 717 bp, Homo Sapiens
  misc_feature (50)..(75): n is a, c, g, or t
  misc_feature (412)..(422): n is a, c, g, or t
aaaatgaagctcagaggttaacaattctttcagtgtttgggaaaggggcnnnnnnnnnnnnnnnnnnnnnnnnnnccactctgcattaatagcaaagctgcagtacgtttacatgtgatgagtcagaccacaagagacaatacgactcttggtactagaatacagcttgattaatccaggtttcccatataatagaagaaacacagttagctttattcccatcgatagcataagcaaggcagagcgttcattctttctccatcaggcagttgtctgtggctgctccagcaaaagggcacaggcaccaggcagaaatggtgttagtggagaatcctagtagaacaagcaggctgtgaaggaattagaaggcatttgagctcaaattactgcttcaggctttttgttttctttnnnnnnnnnnnggggggggaaaaacatagtagtgtatcattccagtgtttcctttgatctccacatgaatacagcttccattaaacagtcttcattcagagaaaaaaatagcagactgtgcatcttctttgagccaactactttattcagtcatctgcctctttgccgatatagtttccttccactgtgaaaaccgccacagttatccttttcagatttcaaatgctttcctgttcctcagatgatcttgcaaaacaccactgacatccccaaatgagtaggtccttaaaaaatatctatagaacc

SEQ ID NO: 312035 - DNA, 1203 bp, Homo Sapiens
  misc_feature (558)..(572): n is a, c, g, or t
aaaagcactttccattatatactttttaaaggtctagataattttgaaccaatttattattgtgtactgaggagaaataatgtatagtagaggacagccttggtttgtaaagctcagttccactagttcatggttttgtgcaacttctgagcctcagttttctcctttgcaaattaataattacatacctttatagattttgaaattaatttaaatattagtatttggtacatgaaggcttaatgttaagtttcctttaatgatccacaataatccctttgatcacgttaatctaaatctagatgtctttgtctaattttttttgaatagcagttataaatgtaaaggactcaaagtttaagtaaaaagtgatactccaccttgtgtttcaaagaatttagttccacctctccataccagtttaacacttaatatatttcattggattttagacagggcaaaaggaagaataggggcctctggaggctcttggttatttaaatcttggattatttgtgatagtaatcacaaatttttggctaatttttaacctgaggnnnnnnnnnnnnnnnaaaggaaatgcagcctagtcttgagaacataattttatataatcaattactaaatgttaaactattaccacacagcccataaaacagcatttgcgtttattgagagagaggatgtgccatcatgattaatgaaaactatcttttgagtttgaaaagaaattaatttgcagtgtttggattgtatatatggtgctaaaaataaattaatttactttataaaccttatctgtacattatacgatgtgatgaaatttgctttttatccaaatattttgtatcttgtaaatatggctaattataggaatgcctataatacatcttagattccttatatctaataagagttcaaagagttatgagttgaagtcttgaatgcaggaaactatctgatagtgttctaaaatttggttacttgggtttggatacccttagtgggatgatgtaaatagaggctagctacctaggcttgtctatagcaaccataatgttgatgtaagtaatgcggttactgaatcataagaaaatgccatctctttttagttgaaggaaaactctggaagtaggtgccattggtcattctgcagtgcactgcaaccattgttttcccctagtggccctcttttccctaggg

SEQ ID NO: 312036 - DNA, 1324 bp, Homo Sapiens
  misc_feature (147)..(157): n is a, c, g, or t
  misc_feature (172)..(267): n is a, c, g, or t
  misc_feature (283)..(337): n is a, c, g, or t
  misc_feature (377)..(392): n is a, c, g, or t
  misc_feature (400)..(526): n is a, c, g, or t
ccccccgtttttccccgggggaaatttttttccaaagggcccaaaggtggttttccccgggggaataaagtttttaaaaccccttggagggggttccctctcgggcgaaagtttttaaaatttcacacctttttccaaaaagggcannnnnnnnnnnaaatttattttgagnnnnnnnnnnnnnnnnnnnnnnnnnnnnnnnnnnnnnnnnnnnnnnnnnnnnnnnnnnnnnnnnnnnnnnnnnnnnnnnnnnnnnnnnnnnnnnnnggggaaatcaaacccnnnnnnnnnnnnnnnnnnnnnnnnnnnnnnnnnnnnnnnnnnnnnnnnnnnnnnnggggcccggggcccaaaaaaaggttttaaaaaattttttnnnnnnnnnnnnnnnnccaaaggnnnnnnnnnnnnnnnnnnnnnnnnnnnnnnnnnnnnnnnnnnnnnnnnnnnnnnnnnnnnnnnnnnnnnnnnnnnnnnnnnnnnnnnnnnnnnnnnnnnnnnnnnnnnnnnnnnnnnnnnnnnnnnnccacttttaaaccagtctttaattttcaattcaggtgtgaggcacatatatacacacaaacatattaatttaaggaagcaagaatgtagaatattaacatgtatggcagacactacttcatgtattttgtttaaaacttaactttgaaataacttcattgtttacatgtaaaagaaaaatatcattcacttatacttccacttccctttaaagtattctcaaattatatttcctgaaactccaatagaaagcattctctcttaatcatggcaacgggtcgggtactcattggtgaccaaaatctggtgacaccatcttttatgttctttgccatattcttaaatgcctggcaaacagtagatatttaccagatgaatatgacattaaaaaaataaatttcaagagattgagattctttagccaagttgagggactacatcattttgaagcactctagaagggggatgtgattaaatgtgactgcatgcctgggctggctgcttctaggtatagagctgtgttaaggcgtgggaataggagagcaatgccctagggaaaagagggcactaggggaaacaatggttgcagtgcactgcagaatgaccaatggcacctacttccagagttttccttcaactaaaaagagatggcattttcttatgattcagtaaccgcattacttacatcaacattatggttgctatagacaagcctaggtagctagcctctatttacatcatcccactaagggtatccaaacccaagtaaccaaattttagaacactatcagatagtttc

SEQ ID NO: 312037 - DNA, 721 bp, Homo Sapiens
atctgtcatcaaacacacggagcccgttcctgacccccgagctgtcaaccaggacaagaagaacatgcttttctcgggcaccaacattgcagccggcaaggccttgggcatcgtggccaccaccggtgtgggcaccgagattgggaagatccgagaccaaatggctgccacagaacaggacaagacccccttgcagcagaagctggatgagtttggggagcagctctccaaggtcatctccctcatctgtgtggctgtctggcttatcaacattggccacttcaacgaccccgtccatgggggctcctggttccgcggggccatctactactttaagattgccgtggccttggctgtggctgccatccccgaaggtcttcctgcagtcatcaccacctgcctggccctgggtacccgtcggatggcaaagaagaatgccattgtaagaagcttgccctccgtagagaccctgggctgcacctctgtcatctgttccgacaagacaggcaccctcaccaccaaccagatgtctgtctgcaagatgtttatcattgacaaggtggatggggacatctgcctcctgaatgagttctccatcaccggctccacttacgctccagagggagaggtcttgaagaatgataagccagtccggccagggcagtatgacgggctggtggagctggccaccatctgtgccctctgcaatgactcctccttg

SEQ ID NO: 312038 - DNA, 689 bp, Homo Sapiens
tgtagcagctggagtctatagatttttttcagatgcaggtaatagttgtgagaagcaatgattagcactcagcgttcgatttatttgcaagatgtcacacaagtagcattctccccctgcttttcactgatctgattcagaacatcaatagtatctttgatcagggtctcaaagatcccgtcggctagctgcattttcacacacaactcatcctcatcatagttcacccactgtgcctcctcctcatggagctcctgaaccaggatatgatccactcggtctcttttctttcttccaaatttcatcattttctgccaatctgttttgtggtttggctcctttttaagactgaacaacttgagtacttcacttgctatgaagctcttgatttcatcaaggttatttggatttttcactcgtcggaaataactagagttgattctacatggcttcatccagacaggttgatttaagttgggatcctcagcaaatatttcctcaaaaatctcttttgttaaatcaaaaaccgcctgtttgtagacccttttactagtgctttctatatctagacctttactggcacagccaagcagttttgtaggaatactgatgctatgaagatcgtggcctaattctttccatttccaaagttcttctgctgcattatgtacaagaatctctacttcttc

SEQ ID NO: 312039 - DNA, 1235 bp, Homo Sapiens
aaccattccagtttggcccttcccatgaaagccaggggggttgtatgggaatatctcaaccaatttaagctatattcattaaagctattataggttaggtagctgtaaaaaggcccaacacaggtaggcagggaaatattaataggagattatatgtccttaaagtgcttatgagaaccacaaatcgctttatggtagctcctgtgtaataaataagtccatccaagccataagattaactagaaccaagctcaaaacaaacagatcatttacctcgggttgtaatgagcgcaaaaatgaatccatggcctgaagggatataaattcgcctgtgtggtttccatacctgtaaattccttcaggagttctaagtatgtatgatggcatattatatatgccaatatctgtcatataactcttgttgtcccaattttctacattaacaaaaataaactcaactcttccagtaaactttatacttagtgcagagaagaaagctgggggctggtcaaggtttgcaaataggtatatttttaaccaatactgatcacttttattccattcttctttcaagtgttcagcattataaatggttttgatccgagaagctgcatgagcagttatccatttaaaaatgtgctctacttcaatcttgcgtccactgtattctttaagcatgactttcccttttgaagtacttgtttgtggaacagacataatgagtgtggatcggacccagcctcttctcctgcaatatctgggatcactggaacagttaaatgtgcctgtacgtattccaaatcttgacacctttttaaccattttctcccagtgaattttgcccaccaagggacttctgtcatttgctatgacctgaaccagccagatgccatcttttgtgtcttccacaagctcatagaagtgcatttcaccactgaaattggtactagaaaccgattcggatgcttcttcttccttgagagcagaatagagctcaccctccatcaagtcacctgacttttccaccagctcccggacatccttcttctcgggcaaccctgagtagcccaacccccggcactccaaaatggtcttcagcttcttgaagctcagcgccaccggatccaccagctgggtggcaaagatgccagtttcataccacacaatggcctcaaaaaacctggccaggacgaacaggaccaggaaatagaggagcaagaaaaaaagcttcagcc

SEQ ID NO: 312040 - DNA, 1478 bp, Homo Sapiens
  misc_feature (308)..(321): n is a, c, g, or t
  misc_feature (1071)..(1071): n is a, c, g, or t
  misc_feature (1075)..(1075): n is a, c, g, or t
  misc_feature (1093)..(1094): n is a, c, g, or t
  misc_feature (1148)..(1148): n is a, c, g, or t
  misc_feature (1154)..(1154): n is a, c, g, or t
  misc_feature (1304)..(1317): n is a, c, g, or t
  misc_feature (1321)..(1321): n is a, c, g, or t
  misc_feature (1342)..(1342): n is a, c, g, or t
  misc_feature (1345)..(1345): n is a, c, g, or t
  misc_feature (1350)..(1350): n is a, c, g, or t
  misc_feature (1366)..(1366): n is a, c, g, or t
  misc_feature (1371)..(1371): n is a, c, g, or t
  misc_feature (1388)..(1388): n is a, c, g, or t
  misc_feature (1407)..(1407): n is a, c, g, or t
  misc_feature (1409)..(1409): n is a, c, g, or t
  misc_feature (1415)..(1415): n is a, c, g, or t
  misc_feature (1430)..(1430): n is a, c, g, or t
  misc_feature (1441)..(1441): n is a, c, g, or t
  misc_feature (1444)..(1444): n is a, c, g, or t
  misc_feature (1451)..(1451): n is a, c, g, or t
  misc_feature (1460)..(1460): n is a, c, g, or t
  misc_feature (1472)..(1472): n is a, c, g, or t
taccatgtgaaccagcaattccactccttggtatatacccaaatgaactgaaaacatctgaaactcaaacaactgaaaactcaaaaactggtacacaaatgttcttggctgcattactcataatagcctttttgtagaaacaacccaactgtccatcaactgataaaaggataagcaaaatgtgatatatccataccatggatacatgctacagcatgaatgaatcttgaaaacatcacatgaaatgaaagaagccagacacaaaaggccataatactgagtgattccacttatgagaactgtccagnnnnnnnnnnnnnntctttagagacagatgttagtggttgcctggggctgggagcaagggaatggggagtcatgccaatgggtgtgtggtttctttttgaggtggtgaaaaatgttcaggaaattagaaatggtggtggatgtgcaacactgtgaacatactaaatccactgaattgtatactttaaacaggtatgtaaattatgggtatgtaaattatatctcaataaagctgctatttaaaaaaggaggaacaggtcacttagtgctgatgtttattgttaaggctccaatcttttgggttctacaaaatatacacctgaaacactccaacttgctccttgatgattactcatgactggaaggagggaagtggcccagatcaaaataagcaccataagcttgaccaggaagttcctaaaggctctattcacttcctcccatagaacacctaagacaatgactgtgtttctcagtgtccttgatgcaaggaaactcacaaaaaaaatggccaattctgaaggtgaatcacaattttgttttcagaaaacagaattttgtatataactatcttttcggactttgctgctagaaaatctaagtggcaaatttattgtttaaattttatcttttcctcacatcaaggtcctaaaagttatctaccttccctgcttctatctgatggtctctatcatcctttaaatacttccttttataataaaggatgtctttatgagcaaactgctctaagtccttttggttgcnagantggtccaattccaaaacnnagactaacactcctcccatttgccagctctcaaaggttatgagtaatgattgantctgcncctctgcctgatctctgggtctttctccaaagcagagatgttctaaaggtttcaaggtggttggcttccctgactctggggtgttttactaaatcactgcttgccatggggactgacagaaatacccagggcgccacgcatgctagcctnnnnnnnnnnnnnnagcntccatctgacactgaccctgngantaggnatcagaatagtaaacntcccnctgatctcaggcaaaanaaaaaggcctactggaganancaaaanccgaatggcaaatancttcgacgcgntcnagtagcntgcttcctnaaggtcactacnaggtcc

SEQ ID NO: 312041 - DNA, 1597 bp, Homo Sapiens
  misc_feature (33)..(33): n is a, c, g, or t
  misc_feature (38)..(38): n is a, c, g, or t
  misc_feature (1412)..(1413): n is a, c, g, or t
  misc_feature (1443)..(1443): n is a, c, g, or t
  misc_feature (1447)..(1447): n is a, c, g, or t
gtggaggcgggtaagtgacccaaacccccctanccccnccccgccgcgaggcctgggtggcgaattcggcacgagggtggactcggcaagaaccagcgcaagagggaagcggagttatagctaccccggccgcggagccggctcactgcactacccccgcccccttctttcctccagacgccgaagtcgcgggcgctcatggcgggcctggaggtactgttcgcatcggcagcgccggccatcacctgcaggcaggacgcgctcgtctgcttcttgcattgggaagtggtgacacacggttactgcggcttgggtgtcggtgaccagccgggtcccaatgataagaagtcagaactgctgccagctgggtggaacaacaataaagacctgtatgtcctccggtatgagtataaggatgggtccagaaagctccttgtgaaagccatcaccgtggagagcagcatgatcctcaatgtgctggaatatggctcacagcaagtggcagacttgaccctgaacttggatgattatatcgatgcagaacacctgggtgacttccacaggacctacaagaacagtgaggagcttcggtctcgtattgtgtctggaatcatcacacctatccatgagcagtgggaaaaggctaatgtaagcagtccccaccgggagttcccccctgctaccgccagagaggtggacccactccggattcctccacaccacccacacaccagtcggcagcctccctggtgtgatcccctgggcccgtttgttgtcgggggagaagacttagacccttttgggcctcggagaggtggcatgattgtggatcccctgagatctggcttcccaagagcacttattgacccttcctcaggcctcccgaaccgacttcctccaggcgctgtgcccccaggagctcgctttgacccctttggacccattgggaccagcccacccggacctaacccagaccatctccccccgccgggctacgatgacatgtacctgtgaaggcctcaagaatgtaacatcccaggcttccctccattctcctggagctgccaccgctgtccccatcagcaaccatgttcttgcaggctgggggcaagggattctgctcatgtgtttgcagaccggctgggatagcctccccaccccttatcagagccaagacacctgctgcagctctccacctagctgcagatagctcccaaagagaaatcagtgtgtctctttcaccatcagctcctcccctttcaccaccagctcctctccacttcccaagggagactccggcaaccttcagcaacatatatcctcgaccagatgcagtgctataagaacagaacgcattttggatgttattattaagaaccaaatgtcaatacagaattcatgttgccggttannaaaaaacccccccacacacacaaaaaaacncccncaccccaaggcattctatgtcgggtggggaaaaagaggtaatgaaatggccctgggccatacctgtttcctgaacccacctttcttgtacaaagggttaaatttgccgggccccccttaagtggagccgaatttaatttcaataagccgg

SEQ ID NO: 312042 - DNA, 1089 bp, Homo Sapiens
  misc_feature (970)..(970): n is a, c, g, or t
  misc_feature (994)..(994): n is a, c, g, or t
  misc_feature (1020)..(1020): n is a, c, g, or t
  misc_feature (1026)..(1026): n is a, c, g, or t
  misc_feature (1033)..(1033): n is a, c, g, or t
ggtttaaaattttaatctttttcctcaccatccaaggtccgtaaaagttaattttacctttcccgtgcttctattctgatggtctcttatcatccttttaaatacttcccttttataataaaaggatgtctttatgagcaaactgctctaagtccttttggttgcaagaatggtccaattccaaaacaaagactaacactcctcccagtttgccatctctcaaaggttatgagtaatgattgaatctgcacctctgcctgatctctgggtctttctccaaagcagagatgttctaaaggtttcaaggtggttggcttccctgactctggggtgttttactaaatcaactgcttgcccatggggactgacagaaataccccagggagccacgcatgctagcctccccacccaggcccagcttccatctgagactgaccctgggcctaggcatcagtttagttttcatctacctgttctcaggctaagcagataggcaatctgaggctacagaaaacagcctggcagatacctcagaagagctacagtagcttgcttacctacaggtaaataataggtcctaatttaggggaaggaatccagggagctgagaaatgaaaggatccacatatggttgaaatgctagctgcagagcggaagtgactaccgccttgatctcgtgcctcttagcctggtgctctatcgtgctctttccactccagaacagggctcatcactgcccgcgtctgtcaggcctcgggctgaaaaggatccggagaacaccaaaggtcaggtgggccaggacacaaggtgcagggctccctgctcctcccgaagttcaacaccacactcagaggcagcccatgctcctgtgctctgtctggggccccatggggtcccaaaaccacagagttaggcaagaaccacacaaggttcaagggaagtatggccttgaaccatcattcttttcctntgccccagtttataggggttaccnaacacagaatgagacattcaaaatgntttagnagcaggnaaggcacctccattttcatagggttttgggacaagggccttaaggaggggaaggga

SEQ ID NO: 312043 - DNA, 749 bp, Homo Sapiens
ggtggtacggtccggaattcgggatatgtcgaccacgcgtcgcccgcaagcttgtccagtccactctctcagacctaagggtgtacctgggagcatccacaccagacttgcagtagcagcctccttggcacctgctgccaccttcaagagcccagaagacacacctggcctccagcaggctgggccatgcagaagaggatagcaggggtgcattctctttgcacctggcgagagggtctgactctgggcacccctctcaccagctacaaggccttggactcactgtacagtgtgggagccccagttcccacctctgtgacaataggatcatggccttacccttgaagcattaccgagaaggagaacagagatgggcttgaagagccacgtgctgccggctccaaattcccaaggacaaggatccctctgcatttttgtctatgtaacctcttatatggactacattcagctgcaaggaaaggaaaaccttgattgcagtggtttaaacaaacagaagattgtttttccacatagcatggattctggagatgggtggctaatggtattggttcaacaactccacgaaggtaggggtcacgtcttggatccttttgccttaatctcagtgctcgttacttcatggtcccaagatggctgctgtatccccaagaatcatgtctgcgttcaaggaaggaggggtggaggaagaggaagggccaaactagctggacccgtcaccttctatcaga

SEQ ID NO: 312044 - DNA, 561 bp, Homo Sapiens
  misc_feature (49)..(73): n is a, c, g, or t
  misc_feature (80)..(269): n is a, c, g, or t
acttttagttaatgttttacaaggaaaaagacacaagaagagtttaaannnnnnnnnnnnnnnnnnnnnnnnngagacannnnnnnnnnnnnnnnnnnnnnnnnnnnnnnnnnnnnnnnnnnnnnnnnnnnnnnnnnnnnnnnnnnnnnnnnnnnnnnnnnnnnnnnnnnnnnnnnnnnnnnnnnnnnnnnnnnnnnnnnnnnnnnnnnnnnnnnnnnnnnnnnnnnnnnnnnnnnnnnnnnnnnnnnnnnnnnnnnnnnnnnnnnnnnggtttaagttaaattttttaaaaaactaaagtgactggcactaagtgaactcgagattatcctcagcttcaagttcctaagataagggctttcttaagctttcaggtgtatgtatcctctagatgtagacaataatgtcccatttctaagtcttttccttttgcttctccttaaattgattgtacttccaaatttgctgttatggttttttagtaatactgtgatctatctgatctgcagacaagaaccttgtctctgttgaagagcatcaaggggagattatgtacacatt

SEQ ID NO: 312045 - DNA, 1664 bp, Homo Sapiens
  misc_feature (1159)..(1159): n is a, c, g, or t
  misc_feature (1636)..(1636): n is a, c, g, or t
  misc_feature (1641)..(1641): n is a, c, g, or t
cgggacaacctttttattaaaatttaaaaataatatatttggacaacctataattttggggccctatataaaacaaaaaatataattcccaactattttagggaaaaatatttattcatatagagtgaaaaatacctccaaaacttagttatttgtagctgtcagatgagaagtatttcctaattacacccattcataaacactcattttatcacttcaaagagcaccagtgtattttttcaacaaaccagaaagtaagaaggtaggggcttatttcatgtaacagtgctattatgataaggcaccactaggtatatgaaaaagccaaagtatttccaaatcatgtgtttttgttactggtgtcttaaccattagacaggatggttagaaaaaagctgctaacattattaatgaaccacattatagcccctttcccaccattctgtgcttttagttttacttataacagaaatgaaaacaacaacgtagtacatgacctgttaaaacaaacatcttttcccaaccttccaagaaaataacctaaaaataaacaagaaacaaaaaatttatctgatatatttgcaaaagcctatccctgtagaagagtgtgaggagtgggagaaggcagggggacctactttctatggaatatattgaggcacataggttacaagtttctcaggcaaattcatggctagaacaaaacagagagagagctcagaatcttacatttcccccaaagttgatttctcagatagccacacctgattaaatactcccaaatgtgtccttagtcactgctatcatcatcgtcatcatcatcagacatatcatttaaaggagacttcaatgactggctgtaagagtctgatctagcaggctggcatgtggccatgtccccagcagaaagcaggtcatagcagaagtcacaaatccgcacaggcttagaggactggctgggaagaagaaatctcttttcagagcagggcccacagacaacaaaaccacatttgcggcaatggtggcgacgattaacaggtgtgaattttgctttctgacaacgcatacatacagttgcctcagagtcaggaacccagacagcagcatgttcattactgggtgtcttcccacttttggagagtaaatcagtaacacattnatttatatgattcatccattctgatttctccgtagcagtggcagcataaactgcaaaagatttagttggtgtcttgattagccatccattccttaagtctccctcatctttgatggaatcaatagtgacattttccaggggaataatatgttgtttgttatattttttcttctggatgacaatattgccatatacaagaatatcattaaacaagaaaaactgccttgctttgggctttttcctgcacaacttagtcaatactccttctccaataagaactcgtccaggtatagttaaaggttgaccagctgctccaaaacagttttccactatacttatacgtctagtatttgcttcactgtttgccaagcgatccaccatctttcactaatagccccgacggccgcgggcggcggcggcggcgacagcgaaggcgaaggtccgatcctcctggtcgcggacgcagggcgcggactntgccngttccccgccggggcatcccggg

SEQ ID NO: 312046 - DNA, 663 bp, Homo Sapiens
  misc_feature (412)..(420): n is a, c, g, or t
gcagatgaaccaaaaactccagtaacatgttttcagtactaaaccgttaagttactcatgaattaatttctcattgataaggaatgtggatgtttggtttctccaaagttcccaccataaaagatccaaagcatgagaggaacttctagtcagatgaccttgcagaaccaccgcattccaccctgccctttggggtagcctactcagcattctacctggggaaatggaaaacagaggccaccacccatgaaggcataacacccatcacattgtctgagaataggattaatgagcaaaagttatgataataggagttatatggatggtttaatggtttctaggatttttcttgggaaagatataatttgagcagtggctttatgcagactccaagaacaaaaccaccaggtannnnnnnnnaagtaaaaatttactaaggcctttagcataatactgtaaatgtcttttggtcaagagaactaacaaatataaaggaacttgaaatgtggggagtgataatagtccagtgattaaactacagtccagtgattaccaccaactttctgactaagctaaaaatgaatgaaaatggtggctaaagaaaatagggactctgaagatgtcgaaatctttattcctggttaggaaggtgggtccgctacc

SEQ ID NO: 312047 - DNA, 215 bp, Homo Sapiens
actaaatgttttattagtgtgagctcttattattatcattgatgtagaagactaaaaattaggtaagtattttcacaggacaacaggtatctttgacattatgctgtctttcaatattgtagcctatactttatcaaataaaagaatataagaatattacctgttgagataataggaataagaaaaccattttgcacatttcgtgtaacaaacag

SEQ ID NO: 312048 - DNA, 856 bp, Homo Sapiens
  misc_feature (642)..(651): n is a, c, g, or t
tccagggatagctcctgcaaaaaatacccaagaaaactgcaccttttgcatacacatgtcagctattatggacagaggtattgtaaggcttagtgcaagtgtgcctatcaatgatgaggtaagaaagcagccccacaaccacaggaactctgagagtactgttccaataaggccattaatgataatgcacattaatactactttattgggaaactcgaagtcctcaaatccagtataatgaagtaaaaagaaacctggccataagagcagcagattaaacaaacctacaaaaccaaagaacattggaatatccaacttgtcttctctatctacttttctcttaatcataacaatatagacagcatagagcatggctccagcaagagaccaaatggaacctactgtgtctcttccagcaggtttttcagaccctgccaggtttaccagtacaacgcctccaatgcttaaaattacagctaatagtttagaaagggtaaatctatctccactgttacttggaaatactgcagcaaggattaaggtaaaaagtccggaagttgaagataaaatattaactatagcaacttgtgtgtctgaaagtgcttcttgatatgacaaatttgccaaaaaccacacaaagcnnnnnnnnnngctaattttcgctacttgagttgcagtaagtttccccacagttttcagtatggattcttgttctttcacaggatatgacatgcgagacaactttgcttccaatgcatgacttgacggaagctgtcgaatctccatgatattactgaacctcacacgagactttttgggggttttttcagtatcaatgtttgtgctctcaggtttt

SEQ ID NO: 312049 - DNA, 580 bp, Homo Sapiens
  misc_feature (541)..(541): n is a, c, g, or t
ctctatcggagagcttgtatgagacttcaaaataaaatgattactactcttaaagttaactattttaattagaatttttattttgtgcttcagggccacaggataaaataactacatttagcttgcctttcagtgacgcttttgccaaatgtcagctacaaggagtcatctccctcaccgccaagctgtctagcagccagagtggtagctttactgtaacacacagtactttttgtaatcagactcaaagtcttcatccatactgcttgtgtctgccatctttttgccatcagtctttggcagaaattgtgcatagtctatcccctgctgctcatagaaaagaatgtaggcagagtcggtgtcaatttcatccgggtgaagttccttacagctgctgtcattgtaacagtaccacttgcagtttgggtttttggcataagtgacgtaatggcccccacccagaattcctgaatggcacgaaattgcatatagattataaataggcttaatacgagtatcttctctttggtcatcagtgctngcttcttcactgtggttccaagctgaccattgctgtagc

SEQ ID NO: 312050 - DNA, 432 bp, Homo Sapiens
taaaaaaagaggcttggtaagtttttgatacttagttgacttttagcattatccagcatttgtattatgaaccagtgagtactgtaatttttctttccctttcagaaagactcaaagggaacatataaatgtttcctatttttaatgtggcaatagtgtagctaacactggtacagacggaataaacacacctctaatattctcctgaagatttggtgatccagtttcaaataaggtatgggaaaaacagatgttttcattatcgccacttaatccttacttccgattataattatacatgtttggctgtaataactatactaaagcatgcctgtgaaagtagacttctacaaggacagaaaacccacaacaacaaagatcgatcacgaaagacaaggcatattcattcattaatttacttctcttagaccc

SEQ ID NO: 312051 - DNA, 592 bp, Homo Sapiens
  misc_feature (217)..(322): n is a, c, g, or t
gaaagaaagaaagaaagagatatcactttttggtgacaaaggggtagctacatttgcttcagtgttcaaagaaataccacagcaaaaaagaattaagggatgaaaagaatagcagaagcttgcagtttttagcaaaaacatctaagaatgtatggacttttagaaacttcagtgggttagtaaaaaatctaataaggctaagagattataagatttnnnnnnnnnnnnnnnnnnnnnnnnnnnnnnnnnnnnnnnnnnnnnnnnnnnnnnnnnnnnnnnnnnnnnnnnnnnnnnnnnnnnnnnnnnnnnnnnnnnnnnnnnntttttacaagattactattttgggttcattttcagatgtccggaatgatttatcatgctctaagtcaggataacctgtagtaactttggtgttaacatttctgctttcattttagcttcatgggtgagataaattttactattccgtctgataaaactgtaagttccacctaaatatactgttattaacagactactcataacttgttttttttaagattgttttctacaaaactcagaaattagaaactaagctcacacctgtaatccc

SEQ ID NO: 312052 - DNA, 1197 bp, Homo Sapiens
gaagctggtttgagatccagggcaggtagagactctgaatgtagaaaatataaagtaggactaacagtaaataacacataattgtcatggcgttcgtctaggatgatgagtaccaaatctcccacctgaaaatctctaatagctatcttttcagaatgccttgaagatactgaagacatgctctgagacatcagtctttgatttaaccgtttattttcttcttctttcaattgcaatgttcgttctaacagcattatccgctgttgtttcttcagaccaacatatggaatatttttcttgtacagaacatcatgcttgtctccaattgctgaatccactcttccttcatctgctgttttcccacagcggatctatctgattcacctgggagttcaggtgcacaagctccataaagttctggggctgtagctacatatggtgaaggaaccaaactgctactgcgcaacttactgacttcttcttcaagctttttcttttcctcaagcaaacgagctcgatcttcagaaagtgactctatcaaatctttatcccgttcttgttgctgcattgtacttttcaacttatcactaagatcatttattatgttttcttttctcattttctctcttgttaaaacagtgttaaaattggtctgttgttccgcaatcaaagatgttcgaacattttgcatttcttcattctttcttttttcttgctcttcaagttgttctagaaacttagctttttcttcctgaagcttttcttgaagttcagcaactaagcttgaagaatctcctctggtagagtcaatggcaggactttttgctatttgattctcaagatgtttaactttttctaataactctttctcaacaacttctctctccaatttaaattcttttagggcagtctgaatagcttcatctttttcacaattaagcttctgaattaactgttctctgtcttgctcctggctgctgaccaatttttgtctgtctttctcaaggttctggataatagcttcgtatttctcttcttgttgggtaattttttcatctttttgtctttcaagagcactcaattctgaatccaatttactctgcagttcaattatttgttcttttaggtttttttctatttcaaatgcttggttatgcaaagatgttactttgtttaattcagctttaagtatattag

SEQ ID NO: 312053 - DNA, 988 bp, Homo Sapiens
  misc_feature (136)..(136): n is a, c, g, or t
atgcttcgctttttgcccggacagctttccaaggggtatgaaagtgaccctctgaagaaaaggccagaaagggcgttggtggagaaagttggggccgaggggctttaaaggtggatttctatactctacgtttttngtgtgaggcactcaaatggattaggcataaatagaggccacaaggttcaacagcgtttcccttggaaaggaccagaggagatttccacgcaaacaggaccccccaaccaggacattgtctaactacacacaacgcccaccagctgcgggattactgcaggaaccggtccagcttctcctggatgcgagcaaacgcgtccttcccccatgtagtcgatacggccttcctcccacttcctcctcttttcctcggggctcaattccttcaccttctcttcgatggagatctgggaaacagagacggccaggtcgacctccagtgcatcctgcagactggggtccctgagagcctcagcagggagttcctggcttggttcgaaggtttcctcggatgagacagtttcgactttatttgctggcaagatggtttcagtctctgtgaagtctgcaggctgaggggaaggctgggacagtgggtcacacgttatcacggcaggagtctcagtttcaggacaagctatcatatcttctgaacggcgtccttcaggtagggacagggtctcatccactatctgggtcggctccggaaggccctgagcaggctggttagaacccagtggtgaatttgcacacggcacgcccgcactgggtgttgaattttcacacggctctccaacaccagaggctgaatccgcacacggcccccccacatcactgtggcaaagtgtgtgaccaggagacgcgcgtgcttcccccgcttggacgcttttataaaggggcagcacgttgttctggtagaccgtccaccagagatgaaggaatgccgcctggtgctggctgctggacactgagc

SEQ ID NO: 312054 - DNA, 1042 bp, Homo Sapiens
tagttgctgttcataagtttattatctatatctgaaaaaatcatagaaaattgctgggtttagctctcagcagcccgctcctgagctctgaggaagcttgccttcttttgagctacccgatccttcttctgagcaagggacattttgggacggttccacctcttctttttaacttctttcttgggcttcttttcatagactggattctctcgtatagcagcatgagctttcttatacatctcctccatcatgtctggagttacgctgttctttatgtattgagagaactgtttcttgtaagcatcttcatcttcttccattaagtagcgcatgtaatctgcaacattctggcccatgatgtgcttccgatgtacttctgcattaaattccttgctttcagaatcataaccagggaatcgtttggtactgtgagggatagacaagcctccatccacagctcccttcagggcaccaaaaactttattgccagtggtagttctggcaaggcctgcatccaaatagcaggtgaaggcacctggctgaccatcaatgctttccacattgtattcatcaccagtcacctccacttggccttcatagatcttgtccatgccaaacctattgagaagcctgcgggccagcagcaggccagtacaatatgctgcagcataatttgtcaggccaaccttcacaccatattttggcagttcgtgtgcatacgctgcgcagactatcatatccccctctatacgggcataagcaatctgacaaatgatatctctgtttgtcacacgaactatcatcctgtatttgggtgtgttgtatttatttttatcttgtatcaccaagcgtttccgagcataataatcagttttaccctctcgtcgtcttctaaatttcacttggtatctcttaaagtaggccttattcttaacaactttaacaaaccccatcctgcggaacagagaccggcgtccgctgctcgacagagacctgcaggcccagcggcgctagggggtgggaaaagggccacagcccttgc

SEQ ID NO: 312055 - DNA, 848 bp, Homo Sapiens
  misc_feature (98)..(98): n is a, c, g, or t
ttcgtattagccagccatggagcctttccttaataccattcttcctccatcaatgtctgggaagttaccgctgtttctttaatgtattgaggagaacnctgtttctttgtaaggcatctttcatcttctttccattaaagtagcgcatgtaatctgcaacattctggccccatgatgtgcttccgatgtacttctgcattaaattccttgctttcagaatcataaccagggaatcgtttggtactgtgagggatagacaagcctccatccacagctcccttcagggcaccaaaaactttattgccagtggtagttctggcaaggcctgcatccaaatagcaggtgaaggcacctggctgaccatcaatgctttccacattgtattcatcaccagtcacctccacttggccttcatagatcttgtccatgccaaacctattgagaagcctgcgggccagcagcaggccagtacaatatgctgcagcataatttgtcaggccaaccttcacaccatattttggcagttcgtgtgcatacgctgcgcagactatcatatccccctctatacgggcataagcaatctgacaaatgatatctctgtttgtcacacgaactatcatcctgtatttgggtgtgttgtatttatttttatcttgtatcaccaagcgtttccgagcataataatcagttttaccctctcgtcgtcttctaaatttcacttggtatctcttaaagtaggccttattcttaacaactttaacaaaccccatcctgcggaacagagaccggcgtccgctgctcgacagagacctgcaggcccagcggcgctagggggtgggaaaaggccc

SEQ ID NO: 312056 - DNA, 932 bp, Homo Sapiens
tttttctgaggcaaggggacattttggggacgggtttccaccctctttcttttttaaccttctttctttggggcttctttttcataggactgggattctctccgtatagcagcaatgagctttcttaatacatctccctcccattcatgttgggagttacgctgttctttatgtattgagagaactgtttcttgtaagcatcttcatcttcttcccattaagtagcgcatgtaatctgcaacatttctggcccatgatgtgcttccgatgtacttctgcattaaattccttgctttcagaatcataaccagggaatcgtttggtactgtgagggatagacaagcctccatccacagctcccttcagggcaccaaaaactttattgccagtggtagttctggcaaggcctgcatccaaatagcaggtgaaggcacctggctgaccatcaatgctttccacattgtattcatcaccagtcacctccacttggccttcatagatcttgtccatgccaaacctattgagaagcctgcgggccagcagcaggccagtacaatatgctgcagcataatttgtcaggccaaccttcacaccatattttggcagttcgtgtgcatacgctgcgcagactatcatatccccctctatacgggcataagcaatctgacaaatgatatctctgtttgtcacacgaactatcatcctgtatttgggtgtgttgtatttatttttatcttgtatcaccaagcgtttccgagcataataatcagttttaccctctcgtcgtcttctaaatttcacttggtatctcttaaagtaggccttattcttaacaactttaacaaaccccatcctgcggaacagagaccggcgtccgctgctcgacagagacctgcagcctcgtgccgaattcgccacccaggcctcgctac

SEQ ID NO: 312057 - DNA, 1159 bp, Homo Sapiens
  misc_feature (251)..(251): n is a, c, g, or t
  misc_feature (316)..(316): n is a, c, g, or t
acggagaggggggagggcacagtaggagagtttcgaccgtcgctgtttaccgacagagcgtactagggcttttcagcgaggcgcgccgttatccgttcgcccttcgacatccggttgagaacaagtgcggacgaggggtagttggttgccaggaaacgtggtcgactgtgagcagcgaagtgaggatgagtcgcgagggcggcttgacacggggctataaggggcaaatctgatcctattgtacacgtcanggcggctccccgtttacaaggcgtcgcggcgatacggcggtattcgcatgcggcggccaaggganaggtaatgcggggaagaaatcggcagtcgcaatatggggtggaaggaggtaaagcgcgggtgggtaaaagggggggtgacgggaagcattgttgccggaaaaggcgggggcattattgttccaagtaaaatagggccaggtagatttgcaacggtttggggccgtggatgtacttcaggaggtacttctgcagacgagtccgggctttcagagtcataaccggggagtcgtttggtagtgtgagggatagacaagcctccatgcgcagctcccttcaggggcaccaaaaactgtattgccagtggtagttatggcaaggcgtgcatccaaatagcaggtgaaggcgcctggctgaccatcaatgctttccacattgtattcatcaccagtcacctccacttggcgttcatagatgttgtccatgccaaacctattgagaagcctgcgggccagcagcaggccagtgcaatatgctgcagcataatttgtcaggccaaccttcgcaccatattttggcagttcgtgtgcatgcgctgcgcagactgtcatatccccctgtatgcgggcataagcaatctgacaaatgatatctctgtttgtcacacgaactatcatcctgtatttgggtgtgttgtatttatttttatcttgtatcaccaagcgtttccgagcataataatcagttttaccctctcgtcgtcttctaaatttcacttggtatctcttaaagtaggccttattcttaacaactttaacaaaccccatcctgccctcgtgccgaattcgccacccaggctcgtacgtagaagcgtgcggacggcaggaccacagctgcaggaggag

SEQ ID NO: 312058 - DNA, 516 bp, Homo Sapiens
acaaggtttttttgggttatggggtttcgcgggaagtggctgcgcataagtttattatctatatctgaaaaaatcatagaaaattgctgggtttagctctcagcagcccgctcctgagctctgaggaagcttgccttcttttgagctacccgatccttcttctgagcaagggacattttgggacggttccacctcttctttttaacttctttcttgggcttcttttcatagactggattctctcgtatagcagcatgagctttcttatacagctcctcgggcactgggcgtggcagtgggtgcggggatggcagggtcggggtcatgggaggctgggaaggcagccaggtttcgggtgggctggtcctgcagggactgtggatcggggtacaggtgctgcatatggcttcagtgggacccggtgtgccaccaggctcttgtgcggtccctcctggggctccaccggcctctgcataggaggagtctgggaaaggggtcctgggggccctggggagg

SEQ ID NO: 312059 - DNA, 754 bp, Homo Sapiens
  misc_feature (670)..(670): n is a, c, g, or t
aagccatcacaacactgccagctaccaatgtgcttttatctttcagaagtttttcaattacttcaattaacatttccttctgctctggatcaaggctgtataatttttgtattgcatgggctgcattcttcctcacatatggtgataagtcagcagaagcttccttaatagcaagcatcatgatgggtacaataattggcactctaatacttgacagaactctcaaagcgcttgcacgaattagttggtttgggtccttcagagctcgctgaaaagtgcttatggacaggagtgcaagatcctgctgttcttcagcatatcgaaccaggtaaacatataccaacttcttggtctcaatatttttactggccacattcttcacaacagcaggaaacagttcagatgcatttttcccttttgcaatcatcccaacaatccgcttcatagcatccagtttagcagaatctttgttgctctctaacatttgctttagatcttcattcttcttcaaatcgctgctaaagaggccgaaggcccccgagggggaaatggttgaggtcgcctcctgacccagctccgtcgcctcccctcctccggactgctcattgtaaggaaaactattgctggacattgccgcggtgctggcgggtgcggggttggtcctgccggngggttctctaccaaaaggttccagtccagagggcacggaacaaaactagttctcgtacggaggagcgcgcgcaggcgcttccgc

SEQ ID NO: 312060 - DNA, 702 bp, Homo Sapiens
attccgaatttggagaatccacgtggctgaacttgttcagctccgttccgttcatttcctgtcctcctgggtttctggtctctgtggccagggagtgtggctgtgactttgtttccacctgttgtccggttctaagattgcctggggccaccttcttatgagacatctgggaagtgttattattctggactacagaatccccattttcctcctcttcctcctcctctatcttttcctccatcatcattctctctaattcctcatcacattcctcaaagatagttgaaagtctcttataggcagaccggatgtcccatgggctcatcgaaaatgatgatcactggtttcttgtcccaggcacacgactggatcctcattgtcagtcccttcttgtcggggggtcatctcttttctggcatcgatattaaccgtctgtatgtcttctcccttttggctaacaatatcatgcacctccccactggaaagaacctggacagtggtttcgggtaatcatgaaggcaatattgtcagtggctgcattttcttcagtaggagaacttgaacttgattctccatcctcattagggttcacgttagcatgccttgcctccttgggtcttagaacaacttggccaaaatctgtcgtgataacctcttgatcttctgttttaaaatcatgcacgcttgattctgttagtctag

SEQ ID NO: 312061 - DNA, 577 bp, Homo Sapiens
gagcaaccaaaacagaacgaactgggatcatgcagttaaaaagtgagataaagcagtcacctggaacctctatgactccaagtagtgggtcctttcctagtgcatatgatcagcagtcatctaaagatagtcgtcaaggtcaatggcaacgccgaagaaggctggatggggcactgaatagagcttccagttggattttatcacgaaagtatggaaagttttgcagaagtgtcacggactttctgttgaggggtttgtccttccttcctctaccactagagagatgactccaggtgagattaaattctctgttcatgtggagtctgtcctgaatcgtgtacctcagccagagtaccgtcagctgctggttgaagccatccttgtcctcaccatgctggcagatattgaaattcatagcatcggaagcatcattgctgtggaaaaaatagtgcatattgccaatgacttgttccttcaagaacagaaaaccttggcgcagatgataccatgttggcaaaggatcccgcatctggcatctgtactcttctgtatgacagtgcacccagtggcaggtttg

SEQ ID NO: 312062 - DNA, 449 bp, Homo Sapiens
  misc_feature (64)..(119): n is a, c, g, or t
gcatggtggtgcacacctccagtcctagctgttcgggagccgagccgagaggatcccttgagcnnnnnnnnnnnnnnnnnnnnnnnnnnnnnnnnnnnnnnnnnnnnnnnnnnnnnnnngagagagtatggtgactaagatttgtagtaataactgggcctagatttaggccaattacacgacctctgattggtaagtgtgtgcttaaagtgcggtcagtgctggcataaacaatggggtttgagggcccctgatgatatctctgagggaaggataccagggctcctgcagtgttacttcactgataagctccagtggaaccagtggctcatctggtagagtagaatttcccttttctttctgcttaaatgctgaatcctttctgctttctttttcctttttgcacctttggaggtgcaaagccgcctggaagctgaataactggcaac

SEQ ID NO: 312063 - DNA, 1375 bp, Homo Sapiens
agggggagcctcctctttcttgggaatgaccactttcttctctgtcactttcttcttaatttcaggcactttgggtggtggtggaggttccacttttttaggggcgggaacagggactttcttctctggtacaggtttctttggcacttcaggcactggtgcaggtactggcaccttaggtttaacttctggaaggacttcttcttcaggtacaaattcttctccctcaggtacatattcttcttcgggaggaacttcctcttcctcaggtggaatttcctcttcttcaggtagaacttcctcttcttcaggtagaacttcctcttcctcaggtagaacttcctcttcctcaggtagaacttcctcttcaggaacaatttcttcttcaaatagaacttcctcttcctgaggtagagctacaggaactggaactggttcacgtttctttggcactttgggtggtggtgcttccacttttttcggaacaggtgttggtttcttttcttctgggatgagcttcttgggcacctctggcacttttgcaggtggagcctccactttcttaggagcaggaactggcaccttcttctcaggcacaggcttcttgggtacctctggcactttggcaggtggagcttccacctttttaggaactggtactggtactttctcctctggcacaggtttcttgggcacttcaggaacttttgctggcggaggcttctcctttttaggaataagcacaggaactttctcctctggcttcttaggaacctcaggcacttttgccggtggagcttccttcttcttgggaacaggaacaggtttcttctcttctggaacaggtttcctgggtacctcaggcactttgactggtatcactggcaccacttcttcctcagttatgaactcctcttcttcatgaatgtactcttcttcttcttctacaagatattcttctacatgggttacaacttcctcttcaaaggcaacctcttctggttcaagttctttaggcacttctggcactctaacaggtggtgctacttcttttctagggacaggtactttttcttctgcgacaaccctcttgggcttcatgggcactttagcagcgggttcagtcacctgctctttttcacgtttggtaattgaaatatgtattttttcctcaaaaactttctttggttcttcaggcactttgggtggtggaggtttgagtttcttaggaatgggcactggtactttttcttacagggacagctttcttcagcactttagccggtggggcctttggttttgtgggaactggttcttctgggacaggctttacagggataggcttctctggttctgtgatgtattcttcatgctc

SEQ ID NO: 312064 - DNA, 716 bp, Homo Sapiens
  misc_feature (499)..(499): n is a, c, g, or t
  misc_feature (650)..(650): n is a, c, g, or t
gggcttttgcctggggttctcaggaggggagagttgggagaggctttgctgctgaggaaatttatttggtagattgaaggtttgaacgagagctacagaaacgaaagaaaaagtctgtataagccaatggtgttcgggaagaaaataaccccattgccttgagtttgtaggtgccactactactctggaaaaatggcagatgacgaagactatgaggaggtggtggagtactacacagaagaagtggtttacgaagaggtgtcgggagagacaataacaaaaatttatgagactacgacaacaaggacatctgactatgagcaatcagaaacttccaaaccagctctggcacagccagcactggcacagccagcatcagcaaagccggtggagaggaaggaaggtcatccggaagaaagtggatccttcaaagttcatgaccccctacattgcacacagtcagaaaatgcaggatctttttagcccaaataaatacaanggagaagtttgagaaaacaaaaggacagccatacgccagcacaacagatactccagaacttcgcagaatcaaaaaagtacaagatcaactcagtgaggttaagtatcgaatggatggtgatgttgctaagactatatgtcacgtagatganaaagcaaaggatattgaacattgcaagaaagtgtcgcagcaagtcagtaaggtttatacaagcaga

SEQ ID NO: 312065 - DNA, 959 bp, Homo Sapiens
gtcagcaatgggactcgtcatgtttcgggttggcgagaagggggtagctggctgattcacagaccctgggaagggtttggccgttctattcatggggaccatcctctggatgtttgctgtctcagatgtcccactgaagccattctgttggggaacatggccaagaccatgactcacctcgatgtagcttttgctcacagagctctgcgttcttaccgactcttcctcctttctttggtaagaagtcgtggttctcaggccatcggtctgggcagcatcttgttctctgcttggcgttccacctaccttgtcctcttctttttgggctgtgatctgatccattctctccctcctcttggcaaacatgagggctcccttgcctgtggtgtctggtaacatctccatcttgtcccctctgttcagtttcttttcaatgtccaccagtccagaatcccagtcaaagttcacaacttgtgtgttgtcgtcaacgtcagacaataactcttcatccacctctgattcgcttgcaccaagaaatgctacttcacatgtatcctccttgtcaccttcttcctcctcgtccgcctctcgctcaagctcgccagtaccgtagctaactagggtgtatttcctggccctccgacgtcgcttcttaaacatcaacacccccttggagttggggttgggagcatccgttagaagaagggcaatgcttttgcatttagattttgcttccttcacttgtttttctgacaggctttcactcctcctgagccgtgcatgccgcgctcggtgcttgtgaggtctgctgtgatctttttccgagcgtggatcttctccctgctctgtgccttctgatgagacggcaaaggataccagagaaggaggtgcttctgactgccctccttccactggagaatccacacactcctttcctgcctgaagcctgcacccttctc

SEQ ID NO: 312066 - DNA, 775 bp, Homo Sapiens
ttcacacagacacccatatacagggagaatttcacaattagaccaccatgcctcacatagaggactgctaacagactgataatgagttgaccaaaatccacacgttattccacttttcagtcacaaataatcgtgtctacacaagtgtaaaattaagcagtacattccagacttttataggggaacctgccttgtatatattgagatacacatataaatatgcttttaagcaagtaagaaacccattatttactccagtttttcccaactctcaatctgaagtaaagaatagcacatatacaaaactttgccttgtagaaatagccctttgtgttgtggggcggaagaaaaggcagccatagcacaatttttttacaacatgtctaggcatcaaaagggctagttaatgaaatcaaacaatttatagcctatagtcttaaatattgattttacatcactgatttttaaaagttttattacaaaatttttattttattcaaaatacacatgctatctttgtccacatttcaatccaaaccacccagtcacccccaattccaaaaaaacaggcctttgttttataacatcgctgaaaacaagccatttttgacgtgggtttggagtcattattctatgacactcactctgccctaaggggactggattttgtaaggctgcttactgtggggatgtccacgggagtcagtgactctcataacagagtgggactgctttaggaatccaagttaacattaggaggtgacaccagtgggca

SEQ ID NO: 312067 - DNA, 735 bp, Homo Sapiens
  misc_feature (54)..(54): n is a, c, g, or t
cactttagtacaggtgctgctgacagttggagagctctgtgagtgaggcaactntgagttagggggccaggactcccggtattcactacctactggagttctgggtgactgcacccgaacctttctttcttgtttcttctgcgtctccataacatgcaggcgctccatgaggctagaaatgccctgctccaagctgtcaatagtgtggtgctgaggatcgtggccactgaagctgttgcgcaggctgcggagagcatctcgaacaagctgcaggtcgctggtccctctgttgctgactgaagtagctccttttccctgcccgttggaaggaagaaaaccattgctttgagagttgtgactgttgtagttggtcgcctcatctgcctctcttttcatacagtgagccaagaggacatctttgtgttcctagctctcgctctagatccacctggtggtaactgacatcagagagtttccggagtgcttcttctaacttggcctggtgctgctgaagaaggcgatccttctgccccagctcttttttatattctcccaagagccggttcctctcatctagcttcctctgcagatccacattctggttgtgcagctcatctttgtccatatttgccctcagcagctcttgtttgagctgaagaacagatgtgtcctgctgagtcaatctctgctgcaaggcatcctttgtcccctgtaagtttctggcttcttgttttc

SEQ ID NO: 312068 - DNA, 567 bp, Homo Sapiens
tttataatgtaatcttcaaaatgagctgtcaaactattggcccattttgtgaatgaggaaaatgaaaattaagttatataatcatgagtggcagagctgggaaatgaactcaagtctgtgactctgaagacatgaaaaagttacacatttcagatgaatgcataaactatctttatgggtatgacatgaaaagtaactgtagaatgttaccttaattacatttcctaatgcatgatgtggacagacattagaaaagtttggactcagttggaaaaacaaatccagcagttaaaaaagtcctttacttgcaatccctacccctagctaacccaagagcatttaaaaaataacttaaaaagtagccatcaaagataccaatcaatttcttactggtgaaatgtataagaacttaccaggagtcacaagagttccaaacaattaatttataaaaataacaaaacatttgtctatgaaaaaaaagatcaggattcactctcatcgacgtcctcatctggatggtgctcagcatcctccttttcctgctgctgtttcttccacagtttggcc

SEQ ID NO: 312069 - DNA, 1563 bp, Homo Sapiens
  misc_feature (76)..(76): n is a, c, g, or t
  misc_feature (80)..(80): n is a, c, g, or t
  misc_feature (87)..(87): n is a, c, g, or t
  misc_feature (245)..(245): n is a, c, g, or t
  misc_feature (321)..(321): n is a, c, g, or t
  misc_feature (436)..(436): n is a, c, g, or t
gtcgtctagtgccgattgaggccgactcgcgcaatggcgtccgttctggcgttttgttgtcccgagtactatgttngtgntggtggnggttttacctttatccacggcaagcctgttttttcattccaaaaaaattccaagttcaggttctcacaggtggaaaaaaagtttccaccatttaaaatttttttccaatttcattatattattcaccagggttcccatttttcttatggggctttttnatataaagcaggataggaagggaaaatttcaaagttggattcctttggcactaagttttacataggacattagganccacaaaaagcttagtttctattgtaaaatagcacccaattcccatcttcttttaaaaatccaattagaaacatcttttttaaaaaaacaaattccacaataagagtaacagatntcaaattaacagtagtctaaaaatcttcaaaataaatggttttgtatagctgagaatatggtagaaagtgaaagcataattttccaacagtcatttcttactacagtgtgtttaaaattatttttattacttttagactttttctcaaaataattattcaaggaaatatttcttaagtggcccaataaaactgtagagccaatagtcagttacaccatattcaaggacaaggatagtcagctatagataggaactgtctaaaccacgagaactgatctctgatactgaagtacccagaagtggctatattatcactgacttgaaacagatcttagtcacccatgtagcatttaattcaatgtttggttctttgcctcatttctttcttaggtcacaatctatagtctttatagaatttgtctacatttcttctaatagaattaatttggttgtagtaacttttgaaaataaatgtaaatggtgaaatcggccatgtggtttgtgcattttaatggtggagaggtcctgggagaaggaggggagacaactatctggactgatagataaaaatgcaaaagtggtataaattttgtgcaaggaggctcacagcatttttggcactcgggtaaaacacagttctctgttaaatcttcagtttctaccatcaaactttcagatttgtaccattttactgagttttcctataatttaaccctgatattgaaaaggctgggatgttagtatgtatcaactgcctatatctaaacaacacaaaatgttaataagttttaataagttatgaaatcttctacaactgcaaaataatctttctggtttcctgcttaaaacagagtttaaattctgcttaactatcgcaagacagtttgcagaagtaagttcccttaatcttcaaatttacttttcttgttggcaatattatatacatgctttagtgaaatacctaaatttccaataattatgccctttaagggatctaaaatagccagatattaagagtattggtattagagtcccttgttcactactcaagacttcaactataggtaacagatttcataaatgaatatttttaaagtgatgctgttttactagagtatacaatgttc

SEQ ID NO: 312070 - DNA, 577 bp, Homo Sapiens
  misc_feature (22)..(22): n is a, c, g, or t
  misc_feature (49)..(49): n is a, c, g, or t
  misc_feature (62)..(63): n is a, c, g, or t
  misc_feature (76)..(76): n is a, c, g, or t
  misc_feature (129)..(129): n is a, c, g, or t
  misc_feature (449)..(449): n is a, c, g, or t
  misc_feature (497)..(497): n is a, c, g, or t
  misc_feature (532)..(532): n is a, c, g, or t
cccagctgacacagaggtggtngaagactccttgaggcagcgtaaaagncagcatgctgcanngggactgtagatntaatgatgcgttttcaagaatacacaccaaaacaatatgtcagcttccctttngcctgcagtttgtaccaaatccttaatttttcctgaatgagcaagcttctcttaaaagatgctctctagtcatttggtctcatggcagtaagcctcatgtatactaaggagagtcttccaggtgtgacaatcaggatatagaaaaacaaacgtagtgtgtgggatctgtttggagactgggatgggaacaagttcatttacttaggggtcagagagtctcgaccagaggaggccattcccagtcctaatcagcaccttccagagacaaggcttgcaggccctgtggaaatgaaagcccaagcagggagccttggtccttnaagggcattcccccaaagtgttaacgttaggaaggcctttgccatccntttttctttgttgttaaaagtattttatttttttngttccaaatttgcccgggggaacattcagggcacccacagttcca

SEQ ID NO: 312071 - DNA, 613 bp, Homo Sapiens
tttttggacaaaacaatttttttaatctgtcttgtaaaatccttacttccttttgagtctctgatggctacaacatttcatttgagatgtttggcagtcacagcttcaggggttatggttactgattatctaaaccccttaggtcagaatgaacaaacacagttcatgtaaacctggctgttattggagtcctctgaccaagagataatagtgaagagtgtggagagcctgaatgcccatggtggaaatgctggaaaaattaaaggtaagaaataaaacatagcacaggagattcagagggctgggatgacttctgagctgctctctatacccaaggccctttcaatttctagctgtgaaagatttttcatgcactgtggtgcctgatgtttcctgcaatttgacaaaaataaatactttacacaagaaaaggatgcaaggcttctacgttacactttggggatgccttcgaccaaggctcctgcttggctttcatttcacaggcctgcagccttgtctctggaaggtgctgattaggactgggaatggcctcctctggtcgagactctctgacccctaagtaaatgaacttgttcccatcccagtctccaaa

SEQ ID NO: 312072 - DNA, 1077 bp, Homo Sapiens
  misc_feature (17)..(17): n is a, c, g, or t
  misc_feature (37)..(37): n is a, c, g, or t
  misc_feature (76)..(76): n is a, c, g, or t
  misc_feature (1021)..(1021): n is a, c, g, or t
  misc_feature (1065)..(1065): n is a, c, g, or t
aacggggaaagggcccncccccgggtcgagaactccnctgaacccccctaaagtaaaaatgaacttgttcccccantcccagtcttccaaaacagatccccaaacactacgtttgtttttcctatatccctgattgtcacacctggaagactctcccttagtatacatgaggcttactgccatgagaccaaatgactagagagcatcttttaagagaagcttgctcattcaaaaaaaattaaggatttggtacaaactgcaggccaaagggaagctgacatattgttttggtgtgtattcttgaaaacgcatcattaaatctacagtcccttgtcagcatgctgacttttacgctgcctcaaggagtcttccaccacctctgtgtcagctgggcagggttgctcagagatgccttcttcagcctcctcaggctctacttcctcccgggtcacaccgtcctctcctgggggcccctgatcattggcctcacttctctcctcatccacaccagcagccaagttgtcctcctcctcttcttcctctgcttcatcctcatcgccaagatcttctttctcttcttcatcatctacaaggctgtctttgttttcttcttcatttgaatcatctttttcctcctccgcatcctgcaactgttcagctctatgagcctcctctgatctccgattctgctcagaacgctcagataaatgccttggaagtggcacatagaaacattctgatattaccaccaagacccagacccataaaaaggccaaaaaccaaggtggctatgacgaaaaagacataagaacaccaagcaggaattccaagagtcactgtgaaataagttgtgaaggatgccatatcttgccagagatgctaaaaagaccagccattccagacatcgttagagaagccggggatttccagccagtcagaggctccgactgattgccatttcttctctaagatataattctgcaggtcttcgaagattcctggggccacgataacggcggantatcccatcctttgcatgagaaaatgctgggatagtggtgacanagaagcggccag

SEQ ID NO: 312073 - DNA, 686 bp, Homo Sapiens
gtgtgaatagttgcgcagcagcagcggcacgcttgtgtgtgagacgacacgcagggtgctgcgctggcccacatccgcctcaaagcccacggtgggcgcctggttcacgcggaacacgcactcggcactgtcgatctcagcacccaggcctgagcccagcatttgaccggagctggacaccacggcacagctgcggcagggctcgcggaccagcggcttcccatctggcacactgctatatccactgaagtgcaggggtcccggcacagtgggcctggagcctgtggggaagtggtggtccaggcaggtggccaggcagaggggcaggccggcccagcagcacaggaggatgtagacggcagagaagaccacggagcacaggatgatgagcacgagccgacccggagccttcatgctgtcgctgtccctcagtagtctaggggctgctgtctccagggctggggctgggaaggggtgggagccgggcacctctctacccgggggacgaatggagaggccgggcgagggcaggacgtaggtttttcaccgcccttccagattccactgccgcatctcccggccgaatgctaaccgggcgtgcaggctggggttcgcaggaggctcgcgatccgccgctcggagctccatggcccccgggccgggccgactgggctggaagctgatcc

SEQ ID NO: 312074 - DNA, 1155 bp, Homo Sapiens
  misc_feature (444)..(444): n is a, c, g, or t
  misc_feature (1067)..(1067): n is a, c, g, or t
  misc_feature (1107)..(1108): n is a, c, g, or t
  misc_feature (1145)..(1145): n is a, c, g, or t
gagcggcggcgacagcagcaggagcgtcatggccgtggcgctgtctgcgccggcgatccgcctttcggactgaggcccagcgtagcgcttgcaaagagcagctacctggcaactgaacccatcatcaccacagccactcctgcagctgccacggtttctgccacctctaagatgtgccctggtaactggctttgggcttctatgacttttatggcccgcttctcccggagtagctcaaggtctcctgttcgaactcgagggaccctggaggagatgccaaccgttcaacatcctttcctcaatgtcttcgagttggagcggctcctctacacaggcaagacagcctgtaaccatgccgacgaggtctggtcaggcctctatctcggagaccaggacatggctaacaaccgccgggagcttcgccgcctgggcatcacgcacgtnctcaatgcctcacacagccggtggcgaggcacgcccgaggcctatgaggggctgggcatccgctacctggggtgttgaggtcccacgactcgccagcctttgacatgtgcatccacttccagacggctgccgacttcatccaccgggcgctgagccagccgggagggaagatcctggtgcattgtgctgtgggcgtgagccgatccgccaccctggtactggcctacctcatgctgtaccaccaccttaccctcgtggaggccatcaagaaagtcaaagaccaccgaggcatcatccccaaccggggcttcctgaggcagctcctggccctggaccgcaggctgcggcagggtctggaagcatgaggggagggggagagaggtcaggccaggcccgtgggtaggtccctggctcccagctggagataggaggcccaggtggcaggtagcaggaggcccagatcacccatcctcccctggggtcaggagaggccgagccccaggccactgtcactctttgtgggaggggacggggagtgaggttgggcagtgtggtggatgggcacccaggaagggttgaccagggaaggaggcagctaggctgtagatggaagatggtcctgngattcgaacaccgctgggatctggccagggtgctccctgnngattcacagtcccttcccctctttgtgcccaagtgtntccctctctc

SEQ ID NO: 312075 - DNA, 1067 bp, Homo Sapiens
cttatcatgagctgtgaagttttgactttgtgatgactgccaaaatgattctatatattgactagatgatctggtggttttatctccagattcatcagaatccctggatctggccttaacagtagtgacactgctgtgagagctgtcttgatcatcttcttcagtttctccttcttcagagaaattgaccttctgttggacactggtggcttcatatcttgggtatcttagagggggtcgacgtaacctgattacaagatcttcactcactgctggagcctcttgtatgctcctgacagttttctttgagatcgtttggcttaaatcagtttgggaagatgcttcatcctcttcagaggaatgagagtcccgcagccctctcctggtcgtaacaggagacggctgtagcggaggctgctctgagtgctgctgctgaaggcgggtagtccttcgcgtcttcatttcctcggtttcctggggtcgcggctgcctccgctgcctagaccgaaggtagtacgcgctttctctcacttcctctttcgcagaatcggaccggaactcttctagccgggttcgttttcccaccggggacctttctttggccaccaggggctcgaagtcgccgtacacttctggcggctcgtccgagaacctcacttcccgccggccctggcgcgacggaggagttctgtacgcaggcgcatcgctgctgccgccattttgaggggcgagccggccccttccctctcggatgggggccctgggggtgacgtacacaccccatccttcccgcaccgcctctgcccgccgcccgtcgcccgccatagttgttgacgtagctttagtcgatcgcgaagatggctttatggaccctaggttctcctgccggtggtggcgatggcttctcgggggtgttgggcggtggccgctgtggtcagggaggcagttgcgagtcgctggggccgccgcctgcgtcgtcgctgctgtgtagcaaacctgcctctgggcccatggtgtgtcttgagggctgtgagaggggcagtgcctgagctgggtcagctgctgtc

SEQ ID NO: 312076 - DNA, 585 bp, Homo Sapiens
  misc_feature (22)..(22): n is a, c, g, or t
  misc_feature (118)..(118): n is a, c, g, or t
  misc_feature (308)..(350): n is a, c, g, or t
  misc_feature (392)..(418): n is a, c, g, or t
tccccaccccacctcccgccgncccgagaaagggggccccagcaataagggaatggaccaggacaggtaagggcaatccctaccaatggtccagaaaatggtatttgggctttttttntcctttttaaaataagtgcatacaaatacagctagaagcatttctgatttgccaagtgctctaaaaaagcagcgcaagtcacagcctacatagaacggtaactgtcaccaggataataaagcacaaagatatgctaataacgttaacaaaagaaaaaaatgtctttataagtacataccttttgtcgtcnnnnnnnnnnnnnnnnnnnnnnnnnnnnnnnnnnnnnnnnnnnatacagccatgtttatgaagtctacatttcccttgtcttggnnnnnnnnnnnnnnnnnnnnnnnnnnncaattcaagcagttttaattaagggtaatcattgggtttttctgaaaccggaaaagtcacgagtctctctcttttttcactttcacatctccagcaaggatggttgcaatttccccttgcataaaggcccaggggacattggagcccacaagagggcatttttcccc

SEQ ID NO: 312077 - DNA, 1023 bp, Homo Sapiens
  misc_feature (206)..(206): n is a, c, g, or t
  misc_feature (213)..(255): n is a, c, g, or t
  misc_feature (297)..(322): n is a, c, g, or t
gttgtttttctttttaaaaaataaagtgccatccaaatcccagctagggacgcattttctgattttcccaagtggttctaaaaaaagcagccgcaagtccccaaccctcccatagaaccgtacctgtccaccagaataataaagcccaaagatatgctaataccgttaccaaaagaaaaaaatgtctttataagtacatacctttngtcgtcnnnnnnnnnnnnnnnnnnnnnnnnnnnnnnnnnnnnnnnnnnnatccagccatgtttatgaagtctacatttcccttgtcttggnnnnnnnnnnnnnnnnnnnnnnnnnnccaattcaagcagttttaattaagggtaatcattgggtttttctgaaaccggaaaagtcacgagtctctctcttttttcactttcacatctccagcaaggatggttgcaatttccccttgcataaaggcccaggggacattggagcccacaagagggcatttttccccactgggacaatagacctctccactagctccgtgctgtttgatgctttgtctggagcaagggaagcagaccttgtgcgaagggacggacgggctgtgcacaaaatggtgtgtcctccagccgctcgtggcagagggtgcagcacagcggggctctggttgccagagaggagtccgggagtctggcagggtgcacgtggctccagtcttctgtgtgttgcttgctccgtggccccccacctctctggggcccagctttctttggttcatagaggacggagagggcggcgtgttgcatattcctcgtggtagtggagtgaccctggttggctatcttttgaggcatgactgccccgtgcattgtctgcttctaagatcagggctgccatgggggactggccattgtgggccgcttcaggcggtgtggtgcggttgaaatgaggtaagacagtgggtggtggcggacacacaaaagagtatgtaggagtcatgggtctcgtgagcccctctgtgtatgtgcacagccgcgtctggcc

SEQ ID NO: 312078 - DNA, 926 bp, Homo Sapiens
  misc_feature (181)..(222): n is a, c, g, or t
  misc_feature (265)..(291): n is a, c, g, or t
aaaataaggtgcatccaaatccagctagaagcatttctgatttgccaagtgctctaaaaaagcagcgcaagtcacagcttacatagaacggtaactgtccccaggataataaagcccaaagatatgctaataacgttacaaaagaaaaaaatgtctttataagtacatacctttgtcgtcnnnnnnnnnnnnnnnnnnnnnnnnnnnnnnnnnnnnnnnnnntatacagccatgtttatgaagtctacatttcccttgtcttggnnnnnnnnnnnnnnnnnnnnnnnnnnncaattcaagcagttttaattaagggtaatcattgggtttttctgaaaccggaaaagtcacgagtctctctcttttttcactttcacatctccagcaaggatggttgcaatttccccttgcataaaggcccaggggacattggagcccacaagagggcatttttccccactgggacaatagacctctccactagctccctgctgtttgatgctttgtctggagcaagggaagcagaacttgtgcgaagggacggacgggcactgcacaaaatgggtgtcctccagccgctcgtggcagagggtgcagcacagcgggggcactggttgccagagaggagtccgggaggctggcagggtgcactggctccagtcctcctgtgttgcctgctccctggccccccacctctctgggggcccagccttctttgggttcataagagggacggagaagggcggactgttggctattcctcctggtagttggaagtgaacctgggttggcatcttttgaggcatgactggcccctgcattgtctgctactaagatcagggctgccatgggggactggccattctgggccgcttcaggcggtgtggtccggtggaatagcctcgtccgaattcgccacccaggcc

SEQ ID NO: 312079 - DNA, 560 bp, Homo Sapiens
  misc_feature (18)..(18): n is a, c, g, or t
  misc_feature (453)..(453): n is a, c, g, or t
  misc_feature (517)..(517): n is a, c, g, or t
gcgaggccaacggggcanacgggtctaaagcagttgcaagaacagcaaggaaaaggaagccctctccagaaccagaaggtgaagtcgggccccctaagatcaacggagaggcccagccgtggctgtccacatccacagaggggctcaagatccccatgactcctacatcctcttttgtgtctccgccaccacccactgcctcacctcattccaaccggaccacaccgcctgaagcggcgccagaatggccagtcccccatggcagccctgatcttagtagcagacaatgcagggggcagtcatgcttcaaaagatgccaaccaggttcactccactaccagggaggaatagcaacagtccgccctctccgtcctctatgaaccaaagaaggctgggccccagagaggtggggggccagggagcaggcaacacaggaggactgggagccagtgncaccctgccagcctcccggacttcctcttttggcaaccagttgccccgttgtggttgcaccctnttgccaaggagcgggttggaaggacaacctttttgttgcagtg

SEQ ID NO: 312080 - DNA, 970 bp, Homo Sapiens
ctataaaatcagaattttcttctaataagtatgattttgtttttggaagtaagttacaggcacatgtttacaggttgatatataatccaaggggtaacagaggctgagccacatagtgctaacatagattggagacctgttccaggtgaccacaatccttcacagttttgtaaagcacaaaagtagtctccagctctatgatttcttccacatttgtctttctccaatcccatatggtatattcaattctggtatgcactcttgtgtttcttataaaaatacaggatgagagtgatggaactaatcttaaaacagttgtttctgtgatgataaatcctgtgattccaaatgccaggccctaattctgagcactctctagatctcccggtcaaaacaacactgtcctttgaaggatgtttctcttccctgaactcctatttgttttgaagggatactgtatctttgaatttgcagaactatcttttgcttcttaaaacaacagcttgaaaacacatttttataaggaaaagatgtttcttctccagatgtcatcatttcgttgttacatcttatagcctattgataatatgtacaagaatgtcttgtcttttaaaaatgcagagaagcacacaagacaaccatctgaaagtatcccttctttgatcttttggctctttgttgttaactatgcttgtatgaagaatatagcaactactgggaatgttgtttagacagagcaataactgacatgtccatttgtggtcctaatggctagagcacctgtcctgggcatctggttgagatagcagcatcatgagtctacaataatctcatggaaccctctagtgtacagtgctgactgataccgatttctgtttatcttggacttttcgcttcttctgctgctgtttgttttctcgttgctctgggatttctttgctggattccagacttttgctgtcaggtattg

SEQ ID NO: 312081 - DNA, 1662 bp, Homo Sapiens
  misc_feature (10)..(10): n is a, c, g, or t
  misc_feature (33)..(33): n is a, c, g, or t
  misc_feature (59)..(59): n is a, c, g, or t
  misc_feature (153)..(153): n is a, c, g, or t
  misc_feature (176)..(176): n is a, c, g, or t
  misc_feature (253)..(253): n is a, c, g, or t
  misc_feature (263)..(263): n is a, c, g, or t
  misc_feature (1187)..(1187): n is a, c, g, or t
  misc_feature (1221)..(1221): n is a, c, g, or t
  misc_feature (1642)..(1642): n is a, c, g, or t
ggatacttanaaagagctacaatggaaaattcntggatgctgtggaactttgttgaaanatggctaataaccttggcttcatggtcttgggctctctgccgtatttctcttttacctttaatagttacttttcatctgtatggaggcattatnttactttttttaatattcatatnaatatcaggtattctttataaattccaggatttatttctttattttccagaacagccatcctcttcacgtctttatnttcccattcncactggcattccacatgaaaacattttcatcagaaccaaagatggaatacgtctgaatcttattttgatacgatacactggagacaattcaccctattccccaactataatttattttcatgggaattcaggcaacataggtcacaggttgccaaatgcattacttatgttggttaacctcaaagttaaccttttgctggttgattatcgaggatatggaaaaagtgaaggagaagcaagtgaagaaggactctacttagattctgaagctgtgttagactacgtgatgactagacctgaccttgataaaacaaaaatttttctttttggccgttccttgggtggagcagtggctattcatttggcttctgaaaattcacataggatttcagccattatggtggagaacacatttttaagcataccacatatggccagcactttattttcattctttccgatgcgttaccttcctttatggtgctacaaaaataaatttttgtcctacagaaaaatctctcagtgtagaatgccttcacttttcatctctggactctcagatcaattaattccaccagtaatgatgaaacaactttatgaactctccccatctcggactaagagattagccatttttccagatgggactcacaatgacacatggcagtgccaaggctatttcactgcacttgaacagttcatcaaagaagtcgtaaagagccattctcctgaagaaatggcaaaaacttcatctaatgtaacaattatataatgtttccctttttgattattgcattgtattttaatttgtgcagaatgataaagaatgttccttttagaagtgtgttatgtctgtacctgtctgaagagtgacattaaactttgaaaggacttcactgctcctttacgatattccaaatagtnttttacattggaaaaactaattcttgggattctntcatacattttcatcaaaactttcagtgtgattatgtattcatatcttcagtttaatatgtcagtataatagatattgttcaaaagtttcttgttgctaaagtggtgtaatctgttacacagatgaatagctagatgtggaaagagatatgtaaacaagaaacctttgggtattgtttcttaagtaaatattgggacaatcatggtaagcaaacttagttctgttactgcattttttcaccttaaaagttaaatgaaatgcatgatggtattttattccttgaattatgcaatgcaacattttacatgtaaatagcactggtcatatactgatgtatatggttatctgggttatatctatttttatgtatactctattttgtttttggcaagaagtgaaattgagacttatgtgcaggttnccattgaattttgctctggt

SEQ ID NO: 312082 - DNA, 1290 bp, Homo Sapiens
  misc_feature (124)..(124): n is a, c, g, or t
  misc_feature (208)..(216): n is a, c, g, or t
  misc_feature (255)..(327): n is a, c, g, or t
  misc_feature (374)..(412): n is a, c, g, or t
  misc_feature (421)..(440): n is a, c, g, or t
ggggcctaaactcggggttcccttaggaagacccggtattgggtatttgcgctctggtgaaagccaggtaccttcggaaaaaggagttgggaagcttcttgatccggcaacccaaacccccccntggtagcgggtggtttttttgttgccaagcaggcagattactcgcagaaaaaaagggatctcaaggaagatccttgggatcacnnnnnnnnngcccgctcattaggcgggttaaattcccgggtactgcannnnnnnnnnnnnnnnnnnnnnnnnnnnnnnnnnnnnnnnnnnnnnnnnnnnnnnnnnnnnnnnnnnnnnnnnaccactttgtacaagaaagctgggtcaggaaacagctatgaccatgnnnnnnnnnnnnnnnnnnnnnnnnnnnnnnnnnnnnnnngcctcgagnnnnnnnnnnnnnnnnnnnncggtcataagtttaatgaagtctgaaaggtaagcgccatcgtggtcagagatacggaggcccggtcagactctccctctgcacctcaatggaaacgatgtggtgtccgggtaccatggccaggcccagcacacggggctccccggcagagaaggaatccgacggcttgaggaactcctgcgccgagcccaggatgacattgcagtcacggtcagtgcagaggaagcagccgaccagtgtccgtccatctgtcatgcgaatgcgcatagtcttgttgagcagcgcctctagctgctgtcgggcgcgctcagccgccgagtcctcgcgctctccgtccgaatccccagcactggagctgctctgacgccgactgcaacagccattctcttctcgtagcagcatggtcggtccagctccggccatttgcccggaggcctcctctgggcctttcaacttcctaagcacctttcaggttgggtggtccgagatctcgcgagcgctcccgacctctttcctttcgcgagatcccctctcctccccctcctagtctcctcggcaacggcacagatctcgcgagcttctcctacttctctagcgctgtggctcactgaagcgtactacgccggatgtcttaagatatcgcgagacctttacctctggtttcttacacatcctttagaaactggaatttagcgagaatacattctttcatactgcctcctcccttgtttttctgtctcagagagatagtctgtcctaaatatcccatgtagcccaggccactgaattaaaacggagcgtattcgttctctgccccaccccgcaactcctgaaagcggcgcaactcaatt

SEQ ID NO: 312083 - DNA, 436 bp, Homo Sapiens
tttttcggtcataagtttaatgaagtctgaaaggtaagcgccatcgtggtcagagatacggaggcccggtcagactctccctctgcacctcaatggaaacgatgtggtgtccgggtaccatggccaggcccagcacacggggctccccggcagagaaggaatccgacggcttgaggaactcctgcgccgagcccaggatgacattgcagtcacggtcagtgcagaggaagcagccgaccagtgtccgtccatctgtcatgcgaatgcgcatagtcttgttgagcagcgcctctagctgctgtcgggcgcgctcagccgccgagtcctcgcgctctccgtccgaatcctgcgcggggtgtaacaagcgctcagaccgcgcagcccaggctgcccgcccgcggaaccacagctcccggcagcccgcggggcactcccc

SEQ ID NO: 312084 - DNA, 824 bp, Homo Sapiens
  misc_feature (218)..(218): n is a, c, g, or t
tttttgcaatacagttgtatttataaaattttgtttacacacaaaaaatgtattttgcttaaaaatataatttacatatatatacaaccacacaagggaaataacaaaatgttaatactagctaatttctatagagttggcattttaagtcagaggggtattgatgaatagatgtagtttattaaatttttttctctatttcctaaactttctataanagaacttgtagtatcttatataatagggaaaaaatgtgattttaatgaacactccatatactttcaaagtagactaaattcaaaatatttacacttactcattttcatcttcgttgtcaaaagaaaggaggctactatttttaatttgtttttgtgagttctttttgaccgagtcctgatttacttcatcttcatttggcttcttcttttttgagcttgctgttaaacctgaatatttttcatctgagggatgcttgactggttttcgatatatgattcttccatcggctggagttggttcttcatctgctttggcagcctttatttctgctttaattttcatgacttcttcaactgacaggtctcccttttttaaaaccaccacttgaggctgttcatcttctttgtcactgtgatccccatcttcatctgggggctgaggctgaattctcttagtctctacggtgggtccctccctgtagccgacccgttccttgaagcgggccagaaacgccggctcggctggccgcacgtacgatacctggttccgcttgctcatggtagctctgggtaaagacagaagacaggttccgcgacggattcgcg

SEQ ID NO: 312085 - DNA, 873 bp, Homo Sapiens
  misc_feature (723)..(723): n is a, c, g, or t
  misc_feature (798)..(798): n is a, c, g, or t
  misc_feature (845)..(845): n is a, c, g, or t
gttttttaaatgaatgtcttttaaaaaacataacaaactcatgttccagaaccagcaagtgctccagagtgacacgccccctaggcccctacatatttattaatatggattatccattaaagccccaggagctgttgttttaagctttgatttagttctcatacatatgatagaaagtcctatttgcctttaggaacatgcctgtaggctcttctgcaggtgagatgtactgggctttttattatattcaactttcaattccatcttaaaaaacatttgtattcttctcttcccattcttccttaccctgcctttgccctttcaggaagggtcagttcccttacctgtgaactatgtatgttcagagtagcattattcctgctagctaggagaagtcatcttgtttaggggatttggatgctttttatacgttctccattttcctgtcattgggtcatgttatctttgagttgctatgaaatcaggaaactgtctccttttcctttcccttcctttgtctacatgctctgtccattcctttcagccttttctcaccacccatactcccccaaatctgggtaatttttaagccttgaaactaatgtaggtttcttgatacacaaatttggtagttatgcagcagccacaatttgcattggcaaggaaaataaggctccaaggttatcttcatgcctctggggtgctcaattcagctggtcaaantttccatgaactttacacttaatttaatgattggcgtttctggacctgaagatgtatggctggcctggttaattngcaagtaagcattaagtttcagaattctttttggcaattgcaaagtnaccccttataaaccagcaatggtcatct

SEQ ID NO: 312086 - DNA, 1309 bp, Homo Sapiens
ggctttatagactctaaccatttatttaacaaaatggaaatttctaatatatagcacttttctacatttaaaattttagggaggagagactcatgttctacagtatacattattacaaaagagttcattataaatttaaatcagctgaaacaattcctttaatgattaggattcatcatcctttagtgcagcgaggtgacattttgtggaaagcatccatggctcttcgtcagagatgtcttaccagcacaaccttccttcactctgacctgtccatcagaggatttcctttaccagtaaaacagatggaagtccatttttctctttcggttcccaactcaagtgtagatcttttaatttaggaaagaactcaaacttatataaactaaagagtggaggttgttgttttcattctgtttactcgcacactgctctgtaaagtcaaggttttcttgtcgattttgctcacatgctgattgctatgcatgcagccatcattagtgcaaatgcgcgggagactttttgaataatgtatagcacctaaaggaatgaacagcagacccccccaaaattcaaatcgctgttcttgcaaattctgaaagccaaggatcacttgtgccttacagaatccgggggctctatccccaggtgcaaagtacattttccaggtttctccagggcaaaggcagggtggacaccctcattaaacctgtgcctgatgatgaagagcaactgctcgctctctgcgttgatgaagataagtctgtggttgttgtagtccagccggatgcccactttgggtggtcgctcagtcgcatgaacatcactcacaataccactgtagaaaaatgtgtatctctgtggctcagagcagtgcatgtaccatgaggtctccccttgtcctagggcacctgcctgcacagccgagctggagcagatgccgagtcgatatgctgggcagtctgtgactgtggtttcccagtaatgctggccacaggaaggcagctcctcacccagcactgacgggatttccgtcagctgtctcctctcaccaaagctgatcactgtcccacttgaggaaatgtgtagagcaggatgagctgtttctctcaacaagagaaatctggttcctctggtggagatgagagcagcttcactctgttcacttgtcccaaatgcattgatggccctcacatagaaaaagtagttatcattgggttggaggttaactttcagctggagtcctttgattccagagaaagatctggctcagagggtcctacgcccacggaatctcgctgattgcccc

SEQ ID NO: 312087 - DNA, 720 bp, Homo Sapiens
caagatcagatttgtaaatagcatcactctgcaggtcataggccttccgagcctgaatgacgtcattctgatcaggcaggcaggtccattcatgcaggggatgcttgtagtctatgtcgcttacaaggatctgacacttcttggccagcaccacccccagcatgtccactgggctgctgaacttggtcttccacttctcaaagtccttcttgtactccctgtcactctggatcttggccacatggatggaccacatcatcttggggtcatctttaatgttccgggctccaatgtggtggccgagctgtttgcggtagccttctttgtatttgtaatcactgataacgtccctggaggccttggcagccacgatggggatggcgtcacttcgcaagtcgtagcctttcttttttgcttcttcattggcaagtttgtatagagtctcactgtagttgattttgttctgccttgccaacataatctctggtgtaccaggcattatgtgaatttgagtcttgtctttgtcccaggcctctgtgtataaacgcttattcatgttgagagcattgttcttggccagcacctgctctagagaatcggtcacactggtaaatttcagcttgtccggaggctggcggtagatgttatcactcagtatttcggtagctctcttgcacttgaccacatccatacacccaatggggacccagccaatgcctc

SEQ ID NO: 312088 - DNA, 1074 bp, Homo Sapiens
  misc_feature (31)..(31): n is a, c, g, or t
  misc_feature (96)..(134): n is a, c, g, or t
  misc_feature (891)..(893): n is a, c, g, or t
  misc_feature (896)..(897): n is a, c, g, or t
tgtgtgtatgtgtgtgggttagggctttttncgttgcatgtgatggttctgtggacatatgatccccacaaactgtgggagtgattggccaggccnnnnnnnnnnnnnnnnnnnnnnnnnnnnnnnnnnnnnnngaagaatagagtggtatttagaaaataaattgcattgcaaagctcttatcggctcatatgagagagcaggttcctgcccttgaaaatgccggtaagctatagcatatgttttttaagacttaagcatttcatgctttaaaataccttcacaagtgaacattacacacagaagttcatttggttttcctttgttttatggtgcatatagcaataaagacccccctccaccctgcaacccccatcccccaccgggcctttgtccctgccttggcttttctccccttctcattctcctctcccctttcctcactgaaggctgtgagttgctttcaatgtgacaacactatgatgtcatttggaaggatttgccaggacagactgattctgagtcctgggtgccgtatgtgtatgcggcagtgttgtcaggcgatcttgtttgaagctctatgttgccataattaccatcaagtacacactgttggcaaaaggctaacacctgactttagaaaatgctgatttgagaacaaaaggaaaggtcttttttcactgcttaaagtggggtcactttgatacctttgcggtcatgtctgtgtctgatgagtgtagaatctctggatgtgcactgtcagtcatgtgtccaccaggcctcgaatatcatatgggaaatgtcatagttaaaaacgtacagccaggcccgtgtgctgttaatagtggtgaaatggccatgttaaaaaaacaccacaccaaccatatttannnaanncctggtcggcccggcctcgccccttcgagaatcttttcctagaaccatttctttttgggcgccccgggccccagctaagggaaaagtgaaacattgggtccctaagcctgggttcccctagggagaatcctcgggcactgggaactaaggggcttttgggaattcctccacccattt

SEQ ID NO: 312089 - DNA, 384 bp, Homo Sapiens
gtttcagaagtaactttcttctcagccttcttcttttccccttctttttcttcaagggcaggtgatgccggagtgggtctggaagcttgttctgtcggtaagggaggtggaatggctgggctttgtcctggttttaaatccccatggacaaatatgtcaatcatatatcgacagaatgcatactgatctttctgttcatgctttgacacagctgctttctctttgtcctccttttctttgggttttgatggtgttttctgtacttcttttacttttgcagctgtttgcttcactttctcctgttttccacctttcacttcctttttagtcttttcttcactcttttctgcagtcttagctttcttctgttctttcgccactgtc

SEQ ID NO: 312090 - DNA, 643 bp, Homo Sapiens
ggaaaatgttactattttatggcttctcatttgaaagaatatatttttaaagtttggatagtcttagttttatataaatgtgtcctttaaggaaattagaaaatcattagcaaaatactagtaaaattcaagcaaaaaaaactacatatttttatcgcatttgttatctctttccttaactatttttttagtaatgggctgacattttttactaagcaggaattagaaaagaaatttcagcaaacagcagcttatcgaaacatgaaagagattcttaccaagaagaatgaccaaatcaaagatctgaggaaaagactggcacagtaagccacactgatcccgcctttggatttctctctctggattgatgtttgttctctgttaaatctaagcttgttccagagaggtcaagccggtggtagttgctggatcatttagtccagaagccttcatttgaggaaagtggaggagctctggcctgaccttatctataatgcccaccagggcttctttttaggttcatctaggcctttagactcacacaggcctacagtaagctgctcttggcaatggattcacttagcaggatgtcagacaggaaacacagcaagctcgcagggcagcattaggtagttctcttctc

SEQ ID NO: 312091 - DNA, 1491 bp, Homo Sapiens
  misc_feature (139)..(139): n is a, c, g, or t
  misc_feature (375)..(375): n is a, c, g, or t
  misc_feature (377)..(377): n is a, c, g, or t
  misc_feature (382)..(382): n is a, c, g, or t
cgaaaaaataaagagacatatttatttgtaataactctctttttttggtaataactatctttaacaatgctattatttatttttacccattggggaatgcataagtacaaacattgttagcttatttaacatttattanaaatacagactctttatactaatgcagaaggataagcctcttcttcccactctaaaaatctcttctttgctgtaaagaattctcagtgcatgtgagctaagactctggagcactcagtagagaggtgtgtgggatgaccagacagaatcactaggttttctctgttttcaactagctgaaaataggaactctagttctaaatattcaaagtctaaatattagaaaaataaggagangngatangacaaaatgcttttcaaaatacatgcctgaggtgagactgcttgtatgtttgcatgtggtagcttccagaggaaatcttcagttttaatcttcaggttcatattgtgccagtcttttcctcagatctttgatttggtcattcttcttggtaagaatctctttcatgtttcgataagctgctgtttgctgaaatttcttttctaattccttttcagccatgtgcagctgctcctgaaccctgagtagatcgtgcttggctgtcgccagattctcctccagtgacttctggttttctgtcttgtcattaagtgtcttctgaaactcactctttaaggcagcgacagtgttttctaagttacttaagtcttgggcctttataaaatccttttgatttccttgatcaagctgtaaatcttgcagtgctttttctagttttgacttttcatccagtgcatttgtagcctgtatttcaatggtcttcaaccttgacttcaatttctcattctcttcttgaagtcttaaaatttccttgtttaggagttctgctgttccaccttcattaagtggagcaagttttggctttgtgaccatttaagatgggctttttgtttgaaggatgtaatctctggctttttcaaattctgcaacttgttctaataattctcggttttcaagttcagagatgtctgtctgtagcttaagataccacttctcagcttgtgcaaacagctgtcgcagaagtaacacattggtataggcagtgttgatgagctcagattccacctcactatgaaccacagcttgtaatccattgaggacttcagagacttcatctatggtgaaggtgtcctccaccagcctgctctccttgaggtcttggaagcaggaatctacagttttgagtctcaagcctctctttgaacgagcaaaacgcatataattaataacttcattttgatggtgctcatttaggcccaactctgccatggcggcaggcagcggcggcagcctaaaggaacgggagaggccaggcggtgccccgccaagcctgggatcgccgagggtagttggaccacagaaaatggggaaggagggtaggttgtttagaa

SEQ ID NO: 312092 - DNA, 744 bp, Homo Sapiens
  misc_feature (78)..(103): n is a, c, g, or t
  misc_feature (637)..(674): n is a, c, g, or t
ttaatgtaagacatttcagattgaagttttggggtaagtgtccttttctttcagaaagtattattaatacagcacttnnnnnnnnnnnnnnnnnnnnnnnnnnggcatattcccagattggcaaggaataaaaataaactatcttcacagttatctaaaatgtttaacattttcagtgggaaattttagtccccgattgagtttgcaaattaggtctatgaaaattgacaggaaaagaacacaatcaagggagatgactccctaactgaaattgctaacgcgtttgtcaattagcaattaagaactctcatttcggtgatcgaatatgaacacatacgtttatttttgagcccttaccagtgttaagggttttagaaacccttagtgcctacaaaataaacacttctctccccatttgtgcgtgacatccgtctcctaggagaggggagaatgtcctagaacaggactggtattcaacacaggcaagtcctttaatctgtgcctcagttcttcatctctaaaatgggaactgttacctgcctccagatttcctcataggggctgtcagaattaattcaagcaaaacacataagtgacttataaattctaaagcacccgactctggataaagaattannnnnnnnnnnnnnnnnnnnnnnnnnnnnnnnnnnnnngagacggaatttcactcttgttgcctaggctcgggtgcaatggtgcgatcttgccccaccaccacctctg

SEQ ID NO: 312093 - DNA, 673 bp, Homo Sapiens
taagttaaaggttaaagaccctgcttgtttcctaaatcagagggttagagctgttgaaattaaacctttatagtgcttaacctggaaacaaatgtactacagccccactgaagccgctctatgggttttttgcttacgatgttttagcaacaggcatttattttgtagaatggtatactttctgctttgtctcctcatctttctccactggtttcctgggtacattttttttaaagggagagaagtttgtgagtttaatgttttaaaaaaactcccaagaacatggataagccggatttctctcatgcttatgattagggagttaggatttaaagatgcaaagcagaaggactgaaaggaatagccagtgaatatgtttcagtgggtgaggtgtgaaaccttgtctaatatagatgtgtcctatggcctgtgactgcttattctttatcaatgagaactcagcaaactagtttctttcttgatctgaggaaccacacagctcacatcagaatataatagtggaactagggtgacttcactccctttcacctgatgtctatcttggccttttagcaccttgactatccctgaaaagactgggtctttgttttcccagggaaaaaacgaagtgatgtagatctaagaaatagtgccttatttatatttaattttt

SEQ ID NO: 312094 - DNA, 662 bp, Homo Sapiens
ggggtctccatgtgggcattcacgctgtccactatggccccgtgttccacgtagaaggccaccagctccgaaaggccgaagtgggcagccgtgtgcaagggcgtctcctcatcttggttgttggtcttcatgttcacattcgcccctctccaaaccaattgcttggcacagagaatggaacttggagttgtacaaaagtgcaaagctgtgtgtccacttaaggagtagcaattgagctttgccccacgatcacagaggatcttaacacaatccacattggccatttcacaagccacgtgaagaggggttttcccattgggtctacagttgattgtagcattgtggtccagtagcaccagaagacattccacatggccaaacaagacagagagatggaggcctgtggcccaggaagacttcaatttatagctaggcaaccagtaaccttgtttataagatgccaaaaccatattctcatcttcgacttcaaaaacagtgtccacatctatttgcctttggatcaaaatagccttcaattttccgaagtcattggactttagcgcctcaaggaaatttctcttaactaacttggcagctccagatttagtgacaggggcagtggtgccgtccatccttcctctccctctggaagctttgatgcc

SEQ ID NO: 312095 - DNA, 437 bp, Homo Sapiens
  misc_feature (380)..(380): n is a, c, g, or t
  misc_feature (403)..(403): n is a, c, g, or t
  misc_feature (420)..(420): n is a, c, g, or t
ttttaaagttataaaaatattttatttaaatgatacagaaaaaaatgtatacttaaaagtgattaaaacttcacattaggaaatgctaaaaacccagtaatgtacataatgataaaatctaaagtgatgagaaaacataaaatattttcatttggtcctgtcacctaacaaaactatcataaatatgagattatagtaattactaaagctggttaaaggcacatgacaacataattcctttatacacatccagtcattttatacaagggacctgctatcccttaaatgggaaggagtgaactacttgtttaaaatattaacaggtggcactatggtaccctaccaatggaaaccccttttctcccaagggccttcaaacngggttttaaccttggccaaaatngggtacttctggtatcnctggactttctgggaaa

SEQ ID NO: 312096 - DNA, 1022 bp, Homo Sapiens
ccgcgcgccgctgggtgtggtctcgtattgcttgtttttctctctcccttctgtccctgttgtttccttcctctcctccgtcgtgggtgtgacttcctgtcgctctacgcggctctttccgtgcggatcgcgcgtgcgcagagaatggatttgacctcgtgggtcccacttccactgtgggtctcggatctccctgtgatcttgctttaaggttcccggatgtgctttcacgacgccccgatgatcgtgtgtcccaggcgcaatcgcaattagacacggtgcggtgccacctgtggtcgtacagggatctctgccttggatgggccctccacggccagtgacagacccccttctccagcatctttggtgacaatagtgaaggtgctggcttgttgaccatgccatggctcaggcctggcccataggcactgacatggcggctgttgatggcatccacatagaactgtaaggggctcccagggatgtggttgccgtcatacttgatccccatctggtgcaggcctttctcagtgggtgcatacctcaccgtgatggtgccgtccttgttgtcggtgatgttgggccgtgccgtcttccccgagggcatccgcacctctcctgtgagctcccctttctgcaccgcgaaggggatgaccgggttgaagggcctcagcatggactccattggctccacaggcaccactggctcctctgtggcccagtgtgtggggcgggcgccgggccggggaggagcgtagggctggcgcagctgtggcacttcagagggctcctcctcgtgcggcagggggtcacacgccagcacgtggaaggggctgttggggatgtgctcacccccgaagcggatggtgatgacgtacttgcccggctcgggcgctgtgtagtagatgtcaaaggtaccgtcatggttctcaaccacatccacaatcgagctctgccccatccggcgtggacacacgcgacgcgtgggttcgacgatatcccgggaattccgggccgtacca

SEQ ID NO: 312097 - DNA, 489 bp, Homo Sapiens
tttaggcatcttatccttgaagtttaatgcttttaaccccgttccacttcccgccagaagagtgtcctcctcccatccccacagcacaccatcttctgccttttcttctcagcacctggagctgttcctgcagcaactccaggaggtggtggtgaagcatgcagagccagcggtgcttgaggctggggcgcatgccctctacctgctctgtaatcccgaattcactttcttcagccgggcggactttgcccgcagccagctagtagatttgctgactgaccgcttccagcaggagcttgaagagctgttacaggtaggagctggggctggacaatgggacaccccaaacaagggtgggaggggctgcaagacgggggatgtggactgatgagttctgggggaaatgctattgtggatcttctttccttctcagtcgtccttcctagatgaggatgaggtatataatctggcagccactctgaaacgcct

SEQ ID NO: 312098 - DNA, 570 bp, Homo Sapiens
ttttctggaactgctcctgaatcctgggaagaattggtggttccctagggacttcagcagcaccagcaactgctgctggagcttctgcctcctgtgaaccatgggccatttccttcacagggcctggaggctgcactttctctacttcctgatgcccatccaattctgtggtggagtcaatctctatttcctggactggaactgggactggctccttctcagctgcagcagctgacacagtcttggcctcttcctcttcctttcttctgattttctcttcaagttcctgccttctcttctcatcatcctggcgggccatgtggtcaaaggttttgaatacctgcagcaccaaggcctgcgcggccccgggcgggaagcccatgcggtccgatgggtggcgcagcaagcgatagaagtctgtcttgcggtagaggaagccaaagagaacgcgcaggaaatcctggacgttgcccacgtgctgcaggatgcccaaaagggcctggtcatacagctcggccgcccctgtctccatgtcgcctcccgccctaggtacgcttcacacacacagcc

SEQ ID NO: 312099 - DNA, 798 bp, Homo Sapiens
gggtcaggggaaggtccccgctcctgcacactctctatggatacttgggttgtgggggctctcttggagagtaagtttgtggtttgtttctggtttacggtggtggctgaccccccttgtaagaaagctttcctgggaagtcttctgtgggtccaaacatgttgctccgatcatcacaggagagcaaaaggccctagatcccccctttggaatgtgagagtcttgttgtctgatatttgccactgagctggtgaagcccctctaaagagatctcgaccctggggagcagaattcttgtcatctatgaggggtcctgagaaagacttgtcattttttttcctggagttcttcccattgaggtcctaggatttgcacaccactgtcccacaagagctttcctgcctaatgaaaggaggtcttgtggtgtgtgtctcctctcttctctatagttcccgagttggcccccattgcagcccccaccctgtgggtagtcttccagaagtgatgcagtggtgtgagatgccctacaccttgttatttgggagactttgagagtcattcacttccatggtgactagtgtttgttttgcctgattttatattctgtgttgcatttctccccactccctgccctgcttttataaacagcaaaccaatatctaggaagaatgactgagggatagtattgggtattggccccatggcaggaacagccactttgcatctgggtcccggtgccacactgccgtggccttggtgtgggttgtgggaccctggtccctgcgcgccctgcttccc

SEQ ID NO: 312100 - DNA, 879 bp, Homo Sapiens
tactgcttaaataccaatttattgcaaaccaacaccaaggagctggaatagctttgcaggctggacacctcactctcctcgggccctggacaagggaaatgagtcaccccgctttcctcggacctcagctggtgggacttagtggctggccaaactgcggctgttgtgtctaaaaagagaaaacaggcagggtgtgccagctctggagactgggccagtccagggtggtggctcagggcagagaatcacccaccagacagcgtggctcaacgggagcaaggcgcgcagggacaggctccacaaccacaccaagcaccgcagtgtggcaccgggaccagatgcaagtggctgttcctgccatggggccaatacccaatactatccctcagtcattcttcctagatattggtttgctgtttattaaagcagggcagggagtggggagaaatgcaacacagaatataaaatcaggcaaaacaaacactagtcaccatggaagtgaatgactctcaaagtctcccaaataacaaggtgtagggcatctcacaccactgcatcacttctggaagactacccacagggtgggggctgcaatgggggccaactcgggaactatagagaagagaggagacacacaccacaagacctcctttcattaggcaggaaagctcttgtgggacagtggtgtgcaaatcctaggacctcaatgggaagaactccaggaaaaaaaatgacaagtctttctcaggacccctcatagatgacaagaattctgctccccagggtcgagatctctttagaggggcttggtcatacagctcggccgcccctgtctccatgtcgcctcccgccctaggtacgcttcacacacacagcccc

SEQ ID NO: 312101 - DNA, 692 bp, Homo Sapiens
atgaaacccaactggtggatcgcatctattgccagaacagtctctgaaatgtagaactgtgtttcctcttctgtcaaggtgtctttcttcattagcaatgtcatcatgtcacctccagggagaaattccatgattagataaagattcctcttatcctgaaaactgtaaaacatcttcaccacccaggcaccatctgcttctaccaaaatatctctttctgctcggatatgggccacctgctctttttcaagcatatcagactttctcaatatcttcattgcatagatatggcctgtatctttcttctggaccaaccgcacctctccaaaagctcctcttcctataactttcagagactcaaagtcatccaagccaagtctggtccttttgagccgtaagaactctgtttctttgcgagcgtgttgtgatcgacgtaactttttctcttcatctgctaatccttcttcttccatggccacttctaatttcttctgcctggtttctctctcttcatgctgtaaaattaggttgctataaaaattctccaatgtgagcttggctacagtcactctttcccgggtatggttgctcataggaaaggttgttgtagtccctgccgtcattgccatagtaacggaaactgcctccggtcgcgcccgcggccggctcagcctccgcacggaccgcagccc

SEQ ID NO: 312102 - DNA, 793 bp, Homo Sapiens
caaaatgcatagcatttacatctctttcgagtaggcaccatgatatttacaccagtgctaagaattcttggtgaacacagccatttcattggatttcctactattcttatatgcaatctcaacatataccaaaattcaaatatataccttatgaatattaaaagatctatatacaacattgctaagacacagttaataggctgccttatgtgaatattaaagagaagccattattcaagtttgacagatattgagatgaaaggcctttgggttggaagcattttaaaagacaacagtgttttaggctgagaattgtttgagcccagtttatgactaaggcattgcataataaaatatacatttctatttggtgcaacgttatgtttggaatctatagtgtgtcaaatggtatattttcttgtcactttagtaaacactataaagcacacatttccaacatctgaaatcaaacttataaacttataaggaaaaaagccaaacactaaatctataatgttttatattaagctgtttataaaaaatactttaacaaacttatcttctactttttacggggacagtcacttgatcaacaaacagattctgaatgaagaaatctggcaatgccaggaattaacctgcccccttgaactcatgtccaaaatgtcttgtccagtatgggagtgaaggtaaggggggctggggagaggaaagagttccaactgcggtttttactttattgtattttttttaaagccttcagaaacattccacctaagagtttctgttagaa

SEQ ID NO: 312103 - DNA, 835 bp, Homo Sapiens
gttcacttttctggcctcataaaggccacagttaagttttcaggtaaatggcatagatggatgtagtggtttcagccattatagacacctagatacaagatatattagtggtgaggctattgatgtaaaagatacagtgatgtgatttcattcgtagtattccatgttgcctgcattctccacaagggacgattttgcagagtctcctctgaaatcattgtggtattttcccttggtgttcactagttataggggttgatttttctgttcctatttcagctccctttccttctacataactcttgcacctgagagtgggagtttcgtaggaacacaggaaggagaccaacaaacctttttccccaaaaaataggtgtttccagatctcattactgttatgcacacattcaaataaaacccaacagagtcaaaagctctctcccctagtggcattaggatacaataatgatgttaactaaaagcataggaaaatttggaaaagttaatagagttaaaattctgttggttcttttctttttcttttgcaaaacactaccctccttctccttcagcatctgttgtgtatattctgccctcacatctctgccatgatttcttagggaaacgtgtatattgtaaaataagcagattataacgtggtgccaaacagaacatctgcttctatcctcaaagcatgtatttaacttattcatcctctgcattagaaaataaaagtgcagcttatgttcaaaaagtacaactcatacaaagcaaggtttaaaagttctgtacttagtgtaacctttcaaaggtttgtcttgattagtataaattc

SEQ ID NO: 312104 - DNA, 742 bp, Homo Sapiens
  misc_feature (192)..(202): n is a, c, g, or t
  misc_feature (596)..(596): n is a, c, g, or t
gaattttaaagattcaacactggtgtacatatgtccgctgtgtgagttgacctgtggcctcgcacagtgattctgggccctttatgcttgctgtctctcagaattgttttcttaccttttaatgtaatgacgagtgtgcttcagtttgtttagcaaaaccactctcttgaatcacgttaacttttgagattnnnnnnnnnnncgccatagcacagctgtctttatgcaagcaagagcacatctactccagcatgatctgtcatctaaagacttgaaaacaaaaaacagttacttatagtcaatgggtaagcagagtctgaatttatactaatcaagacaaacctttgaaaggttacactaagtacagaacttttaaaccttgctttgtatgagttgtactttttgaacataagctgcacttttattttctaatgcagaggatgaataagttaaatacatgctttgaggatagaagcagatgttctgtttggcaccacgttataatctgcttattttacaatatacacgtttccctaagaaatcatggcagagatgtgagggcagaatatacacaacagatgcttgaggagaagganggtagtgttttgccaaagaaaaagttaggtaacatcattattgggtcctaatgccactatgggagaaagcttttgactctggtgggttttatttgaatgtgggcataacagtaatgagatccggaaacacctattttttggggaaa

SEQ ID NO: 312105 - DNA, 1206 bp, Homo Sapiens
gggaccttcgctcgcagtttgttcgcagtttactcgcacaccagtttcccccaccgcgctttggattagtgtgatctcagctcaaggcaaaggtgggatatcatggcatctatctgggttggacaccgaggaacagtaagagattatccagactttagcccatcagtggatgctgaagctattcagaaagcaatcagaggaattggaactgatgagaaaatgctcatcagcattctgactgagaggtcaaatgcacagcggcagctgattgttaaggaatatcaagcagcatatggaaaggagctgaaagatgacttgaagggtgatctctctggccactttgagcatctcatggtggccctagtgactccaccagcagtctttgatgcaaagcagctaaagaaatccatgaagggcgcgggaacaaacgaagatgccttgattgaaatcttaactaccaggacaagcaggcaaatgaaggatatctctcaagcctattatacagtatacaagaagagtcttggagatgacattagttccgaaacatctggtgacttccggaaagctctgttgactttggcagatggcagaagagatgaaagtctgaaagtggatgagcatctggccaaacaagatgcccagattctctataaagctggtgagaacagatggggcacggatgaagacaaattcactgagatcctgtgtttaaggagctttcctcaattaaaactaacatttgatgaatacagaaatatcatccaaaaggacattgttggacagcataaaaaggagaattatctgggcattttgaagacttactgttggccatagttaattgtgtgaggaacacgccggcctttttagccgaaagactgcatcgagccttgaagggtattggaactgatgagtttactctgaaccgaataatggtgtccagatcagaaattgaccttttggacattcgaacagagttcaagaagcattatggctattccctatattcagcaattaaatcggatacttctggagactatgaaatcacactcttaaaaatctgtggtggagatgactgaaccaagaagataatctccaaaggtccacgatgggctttcccaacagctccaccttacttcttctcatactatttaagagaacaagcaaatataaacagcaacttgtgttccgaacaggaattttcattgt

SEQ ID NO: 312106 - DNA, 494 bp, Homo Sapiens
gacctgaccctttttcccttggctctgtcggcagtttctccaggacccagcagtgccctctgtccactgctctgggccattccccaatcccccctcccacttgagcccctaactcagaatctgggacccaggggcccctccctaccccagctaacctcttctggaccaggagagccaacccagatcccactacctccatgagtgctacagacaggatggggcccagagctgtgccgggtctgcggctggcactgctgttgctgctggtgctagggacacccaagtcaggggtacaggggcaggaagggctggacttccctgagtacgatggtgtggaccgtgtgatcaatgtcaatgcaaagaactacaagaatgtgttcaaggagtatgaggtgctggcactcctctaccatgaaccccccgaggatgacaaggcctcacaaagacaatttgagatggaggagctgatcctggagttagcagcccaagtccta

SEQ ID NO: 312107 - DNA, 812 bp, Homo Sapiens
tgatgaaatgggtgcgaacagacaaggaaaacagggttaaaaaccttagtgaagtgtttgattgtatccgttttcgccttatgacagaaaaatattttaaggatcatgttgagaaagatgatataattaaaagcaacccagacctccagaaaaaaatcaaagttctaaaagatgctttcgcaggcaaactcccagaacctagcaaaaatgccgcgaagactggggctggtgaggtgaatggtgatgttggtgatgaagatttacttcctggttacctgaatgacattcccaggcatggaatgtttgtaaaagacctcatcctcttggttaatgacacagcagcagtggcttatgaccccacggaaaatgaatgctaccttactgcactggctgagcagattcccagaaatcattccagcattgttacccagcaaaatcagatatatgtggtaggaggactatatgtggatgaagaaaataaggatcaacctctacagtcatacttcttccagctcgatagcatagcatctgaatgggttggacttccacctctgccttcagccaggtgtctcttcggtctgggagaggtggatgataaaatctatgtagttgcaggcaaagaccttcaaacagaggcttcgctggattcagtattatgctatgatcctgtggctgccaaatggaacgaagtaaaaaaactccctatcaaagtctatggccataatgtgatttcacataaagggatgatatattgtctaggaggaaagacagatgacaaaaaatgtacaaacagggtgtttatcttcaacccc

SEQ ID NO: 312108 - DNA, 1278 bp, Homo Sapiens
  misc_feature (138)..(138): n is a, c, g, or t
gcttgtcttggatgcaagatgggataatctccaacactgccttattcattaccatctacgcccctttaagtcattctgaaatcacttaaatgatacttagggagacaccaacccaactgtggcagaacaacagctgcnaccatgccctgaggagaactggttgcctgtaatgggccaccaccagtgaaaaccccatttggaaaggggttgaacagttaatttggttaacagaaagttgttcttgaaggggtttattctctatcttttgccgtatctgtggtcgtgtgggactgcctggtgatgctgaaagagacggtgaagaacactgagatgtcttgagtcctgttcttggtcgcccattcacaggtatcaagctgatacatttcttactgcttatgtgtgagctataggagccagaatgggaaaagcgtttcttgcagtttgggcattcatatggcttctctccactgtgaattcttaagtgctcttttaggtgatgtttgtatttgaaagcttttccacactcagtgcatttgaatttacgattacacccagactgcgtcacatgtctttgatctcttcctgatttatgtgatgtcatgtgacgttcaagttgggttctgtatgcaaaggtgtaactgcacagggagcaactaaagttatcttcattcttttcatgacgatatttaatgtgttctttcagagaggtaaagcgtttatagcctctatcacaatatggacaggtgagtaattgtgaaaatgcatctggtgttccattttcatcatgaccactggcttctggtgtgccctgcctctggtcctcttcaggtgcctcaggaaaaatgacagcagtgtcttgttgttgtagaaactcttcaacattaggatcatggttttgctcattttctgcatctgactcgcattcatcatcttttactgtacatcctgcttcatctgcctgagcttcaggccccaggatttcttgcccttcctttctgtcatcctcccagcagttcttagcattcccttctctttcactgctcctccctggtaacactgtctggtctgttggcaggtcatcctctggtacaccttcacagtcagctgcatctgtaacactttcttcttccacaatatgcagtttgtcttcatcatctgaatctgaatttgtttctaccacagtattataatttgtaacgttattgcgccgcgggttcgcctgctttctgcgcttacacctggggccatccgccatgatcctctcgcttgtgtctcccc

SEQ ID NO: 312109 - DNA, 456 bp, Homo Sapiens
ttaaattttgaggaacaacttgaagttggctaggctgctcaagactgtagttgatgataattttggttgttccatcttgatcaaccaaaggaagactgatggctgaaataacagaatggccaccttgttgtatgggtgaagcattgattgtttcttgttctttggatgcaagattggcttgattattctccaacacttgccttattacattaccatctaccgccactttaagtacattctgaatatcacttaaattgatacttatgggagacaccaaaccaactgttggcagaacaacagcttgcaccatgccctgaggagaactggttgcctgtaatgggccaccaccagtgaaaaccccattttgtaaaggggttgaacagttgattcctgaagcaaccactatgggtttgaattcataatccacaggttcagttttaatttggttaacagaaa

SEQ ID NO: 312110 - DNA, 503 bp, Homo Sapiens
gcatacggagggattgaaatccatagcgccaaactaatttaatcacgttaattatgaaccagttgctctcctcaaataccagagtctctccattatatatccccagtaggccaccagaggcctgaacagcagagagacccaggtctttgacaaaacgtttcatgtgcagatttaaaggatggatgacagaacctcctgcctcgtattcttgcccctgcaccatcatggtagccaggcggcccccgacctcttctctttcaaacaggtctatcttcacatctttcccaaatttctgccgcaggtaataggctgctgaagtgccaccaattccggctccaataatcgcgattttatctggcggagcacgcagctcggcgccctcggggcatccgcagctgcacagcaacagccacaaccccagcagcgaggagacgagctccgcgacgacgctgccccatggcctccacaagctctgcagctggcctcaagagccccgcagtccc

SEQ ID NO: 312111 - DNA, 747 bp, Homo Sapiens
ggctcccgccatagtcccaccaccggtgagcgccgcccccactcggctgactctccgcccgccccgcgcccctcccctcacgggctctggccttaaccagagctcgcggactggcggggacaggtcccacctcctggctcccgggacgggtctgcaccaacctcagtttcggggctgcggctcacagaagtctaacctgcccgggacgcccgcaccaactcctgcgcgcggtccttccaaccctcctgctaccatgaagattgcagtgattggacagagcctgtttggccaggaagtttactgccacctgaggaaggagggccacgaagtggtgggtgtgttcactgttccagacaaggatggaaaggccgaccccctgggtctggaagctgagaaggatggagtgccggtattcaagtactcccggtggcgtgcaaaaggacaggctttgcctgatgtggtggcaaaataccaggctttgggggccgagctcaacgtcctgcccttctgcagccaattcatccccatggagataatcagtgccccccggcatggctccatcatctatcacccgtcactgctccctaggcaccgaggggcctcggccatcaactggaccctcattcacggagataagaaaggggggttttccatcttctgggcggatgatggtctggacaccggagacctgctgctgcagaaggagtgtgaggtgctcccggacgacaccgtgagcacgctgtacaa

SEQ ID NO: 312112 - DNA, 424 bp, Homo Sapiens
cggcacgaggcggcacgaggccgctcccccacctcccccatttctgtgtcctttattgtagcattgctgtctgcaagggagcccctagcccctggcagacatagctgcttcagtgccccttttctctctgctagatggatgttgatgcactggaggtcttttagcctgcccttgcatggcgcctgctggaggaggagagagctctgctggcatgagccacagtttcttgactggaggccatcaaccctcttggttgaggccttgttctgagccctgacatgtgcttgggcactggtgggcctgggcttctgaggtggcctcctgccctgatcagggaccctccccgctttcctgggcctctcagttgaacaaagcagcttgatgtaattcccactgtaatagcatagggattttgggcgctgct

SEQ ID NO: 312113 - DNA, 440 bp, Homo Sapiens
gaagccaccgccggctgagtcacgtgaacggtcagtgcaggcagccgcgtgccagagcagaggtgcagcatgctgcacaccagctcagggctgacctcctccagcaggatggacaggatggagctgccgtacgtgtcgtcaaaagcgtcgagtactctcagtcttgttgttgtcaatcagcttggtcacctccttcaccaggaattcacacacctcacagtaaacatcagactttgctgggacctcgtgcttcttaatgggctccaccagttccagggcagggatgacattcttggaggccactttggcggggaccagagtctgcatgggcatctctttcacctcatcacagaacccaaccagcgcacagatctccttgggttgcatgtgcatcatcatctggatagcaatttcagaatactggctgatatagttcttgc

SEQ ID NO: 312114 - DNA, 2775 bp, Homo Sapiens
ctcatttggagttgttttactggctaacagaattttattgttaaatcacagaaactttagtgcaaaacaaaaatcacgaagtccatttaatagcaacttcatgtcctgctggctttgcttgctgtctcctggcaaccagaagtggacagaagcgtgggtgcccaagtgggcacagacagcttccaacccccacaccccagcatccaatccacacccagcagacccttcggcatgccgccctctaccaggaagccagaggctaggagctcgccatccatatttatttgaaaaggtcaaaaggagcatctatgagacaagggaggggtgcaggctgaagcagcgcctcaacagccagggacatgtaggcaacacgagcaggcacagcgcggccaccactgtccacacgctcacacaagccaggccgcagggcttcggagagctagcaggttacattcaggcagatggccctcttcccacccaaacccacagaaccccaaacaaggcatcaccaggaaagacacgggaaagccaaatcacagttgaaccagggacagagaacccttggccccactgatgtcccaagccaccagcagctgcttccaaaatccctatgctattacagtgggaattacatcatttaaaaagcctgattattccaggcttctaatctttcatataaaactgcctttgttttgctgctttgttcaactgagaggcccaggaaagcggggagggtccctgatcagggcaggaggccacctcagaagcccaggcccaccagtgcccaagcacatgtcagggctcagaacaaggcctcaaccaagagggttgatggcctccagtcaagaaactgtggctcatgccagcagagctctctcctcctccagcaggcgccatgcaagggcaggctaaaagacctccagtgcatcaacatccatctagcagagagaaaaggggcactgaagcagctatgtctgccaggggctaggggctcccttgcagacagcaatgctacaataaaggacacagaaatgggggaggtgggggagccctatttttataacaaagtcaaacagatctgtgcgttcattcccccagacacacaagtagaaaaaaaccaatgctgtggtttctgccaagatggaatattcctcctcctagttccacacatggcgttttgcaatgctcgacagcattgcactgggctgctgtctctgtgttctggcaccagtagcttgggccccatatacacttctcagttcccaacaagggcttatgggccgaggggcaggctccaattttcaagcacacgaaggaaggatccatcacctccaccaggatctcgatcagcacgggctcgtactctgccacaaactgatcacactgcttctggtaagggtctggcaggaagctgcagcctttctcaagagcagccaggatctcctgcttggtgctgtctccaggttgcgatccaaataacccaccagcttcttgcacacttcgcagaagccaccgtcctttggctgagtcacgtgaacggtcagtgcaggcagccgcgtgccagagcagaggtgcagcatgctgcacaccagctcagggctgacctcctccagcaggatggacaggatggagctgccgtacgtgtccaccacctcctggcactcttccgacagggacttcggcagcttcgagcacattttgtcaaaagcgtcgagtatttctttctcagtcttgttgttgtcaatcagcttggtcacctccttcaccaggaattcacacacctcacagtaaacatcagactttgctgggacctcgtgcttcttaatgggctccaccagttccagggcagggatgacattcttggaggccactttggcggggaccagagtctgcatgggcatctctttcacctcatcacagaacccaaccagcgcacagatctccttgggttgcatgtgcatcatcatctggatagcaatttcagaatactggctgatatagttcttgcatatgtcggccatgccagggcccaggcggtcacactcctccttgacatgttccaccaaggcctggacaaaggtggagttggtccgtacagcagtctggatgtcagtcaccatctgaatgcagtcctggcaaacgtccccattatcctttggctggggcttgctgcgggggccgtcctgagggtagaggaggagagggatgttggccatgaagggggccaccacctcagtcatgtccagctctgggatcttattggactccagctgcttctggtgattcagctctgctaggtgcttctggagagactcgcagaggttgagagcagagcacacctccccaggacggctcatttctcctttaatgatgtccaggatgacagggaggtaggagtccactatctccttgcatgaagcagacatgttcggtttcggaagccagtcacaggtcttctccaagtaaacaaggatctcctcctcagtggcattgtccttcagcatatcaccagctgcggtgacaacgtctttgcatatgtcgcagggaagggatttcactgttggcttgttccaaacggtctgcaggcagtgcttcactgccccgcagtcggacgccgtcttcacattctggcaccacactgccgagcccctggtgcattctttcagtccaaggaccgggccggctagagccgcgcccaggaggctggccaggaggaagagggcgtacatagcgccgtctgactccgcagtctgcaatgcggagcgtcagcatccc

SEQ ID NO: 312115 - DNA, 412 bp, Homo Sapiens
ctggctaacagaattttattcgttaaatcacagaaactttagtgcaaaacaaaaatcacgaagtccatttaatagcaacttcatgtcctgctggctttgcttgctgtctcctggcaaccagaagtggacagaagcgtgggtgcccaagtgggccacagacagcttccaacacccccacctgtccagtcttacctgccttcatatcaaaagcactcagttaacccagagggcttcagcctgtccctgcctgactttctaggaaacccctctctccacccaccctaatcagacactgtctgaaggttccccctcatcattttaaaaggaagagaaatttttctgacacagaggttctggtgaagtggccagctcccacatcacagggtgatggtggtttggactggaccaggat

SEQ ID NO: 312116 - DNA, 955 bp, Homo Sapiens
  misc_feature (177)..(177): n is a, c, g, or t
  misc_feature (202)..(202): n is a, c, g, or t
  misc_feature (236)..(236): n is a, c, g, or t
  misc_feature (252)..(252): n is a, c, g, or t
  misc_feature (452)..(682): n is a, c, g, or t
  misc_feature (710)..(724): n is a, c, g, or t
ttttggtatatttgttgttttactgttaatttgacacatctgaaccaaagcattcacaatacttgatatactttgaagagagtcatatactatagtcttaaacataaccacggaacgagcagaacaattaaaactacataaggccttaaaatatatccacagtgtgtattatttccntattcattcatttacaaattagacnacataccattaattttatttttatttttcattgntttattcagacagggntcattcaaggaaaggcaacttagtttttgtatgtgtgagctttatttttttactatattggttaatataaaagttatgaattaaacgtattcttatctcctatacccaggagtgaatccatgaaattctcagatagtaatccaaaacaataggtcctatttttaaaaatagctaaagtgggccaggcgcagtggctcatnnnnnnnnnnnnnnnnnnnnnnnnnnnnnnnnnnnnnnnnnnnnnnnnnnnnnnnnnnnnnnnnnnnnnnnnnnnnnnnnnnnnnnnnnnnnnnnnnnnnnnnnnnnnnnnnnnnnnnnnnnnnnnnnnnnnnnnnnnnnnnnnnnnnnnnnnnnnnnnnnnnnnnnnnnnnnnnnnnnnnnnnnnnnnnnnnnnnnnnnnnnnnnnnnnnnnnnnnnnnnnnnnnnnnnnctcagtgacacagcaagactccatctcnnnnnnnnnnnnnnntagccaaagtgaaaagggatctgatagccagtctgttagtggtctttaagatcaactcatggactttcgggatttcatacaatgaagactactgcaattctatgaagactatgagatcagtcaaaatttaaaacatcgtatacaaaatcattcttgaaatctctaaatgccttttaagtaaccagcatgaaaattttaagtacttgcctcacagtaccaaacttagaagtc

SEQ ID NO: 312117 - DNA, 633 bp, Homo Sapiens
gggggaaaacaaaggcacgtaccttcatccacatggtcataaagagttcgaaacactgggtggtattccatattgtgttgtgcggtctcattcatcatgacttctattggcatggcacggccaacatcctctctgtgtcaagtatctttatcgaagcatcagcagacccagtagctattaactgtccatctctactataggtagctacacggcatggtcctttatgtgatgtgacatagcatgtttcgtactcagaagcctctgggcacatagtctgaacatctgcatctaattccaggtcaatccctgtgccaggggcaacagtatctgaacgaccaattgcatactgaactgcggtgtcatcgttttccattccttgccatgggacgtatggatttgtgttcacaatctaccgagtttgatgagatgcaggagctgctccgagggtgcacacacagactgaggcttgatttcattgatgaggccattggcgatgctgatgtagccgtcatatagcagctggctaatgatcagcttgtagagctgctggcggtccttcaagcccactttggttctgtacatcttggagaaaaggaagacagtttccctgccagcagctggtccggttctctt

SEQ ID NO: 312118 - DNA, 1693 bp, Homo Sapiens
ccaactttttccaccatgattctacatcaaggtaaaaaaagattcttttatacaaatccaagaagaatgtggacagaggtggcagcaaaacgtcaaggatggtgcacggacttacgactgcagctgagacaggacgtgtgggaggagggtagagtcctcgagaaagacccctacggagagggtggctcagtcagtggtcgatctccggtaccaaaaccgcgctctgaagtcatcgctgcacgtcatgaacccggggttggtgggggagtgcactatgcagcgtacaatattgttgtgcgcccaacgacagcaggtttctccgctcggctgtcctcgagtcccagcagcaaagactgatcgtcctctcgtcgggcagcaacacatagtcctcggtgtggttaaacacagcctgtgtccggtgcacctggcgtccactttaacccgcgcccgtgtatctgaccagtgttcgtcccgttgatatttcccaaagtttagctacagagtcttttccacttgagagaatgtatttagaatttttggaaaaaatggcagaacaaacttcagcaccgtcatgtgctttctcaaaagttgtgatgcatcgatttgaaacaccatcccataatttgatgcagccgtccttgcttccagttacgtacatattggcactagaattgtaattaacggaacatatagcatcggtgtgttgatcttgaggattgcaagagacaaaacattgaaaggtgttgatatcataaaggcgaagagtaggatgctgagttccgacaagtataaagtctccagaaggatgaaaagagatggaacgtaacatttcagcttcctgaatgtatttgaaggctctttttgctgatggtttggaataatcaaataatttaagagtataatcccttgaaccagaagccaggatctgttctgttgggtggaaagcaaggcacgtgacttcatccacatggtcataaagagttcgaatcactgggtggttttccatattttgttgtgcggtctcattcatcatgacctctattggcatggcacttttggccaacatcctctctgtgtcaagtatctttatcgaagcatcagcagacccagtagctattaactgtccatctctactataggtagctacacggcatggtcctttatgtgatgtgacatagcatgtttcgtactcagaagcctctggggacatagtctgaacatctgcatcaaattccaggtcaatccctgtgccaggggcaacagtatctgaacgaccaattgcatactgaactgcggtgtcatcgttttccattccgagtttgatgagatgcaggagctgctccgagggtgcacacacagactgaggcttgatttcattgatgaggccattggcgatgctgatgtagccgtcatatagcagctggctaatgatcagcttgtagagctgctggcggtccttcaagcccactttggttctgtacatcttggagaaaaggaagacagtttccctgccagcagctggtccggttctcttggtatcccgctctctcctggaaaaatggaggcgcgaatcctgcccaatctaccgctccgagcgcacgttcactgcgcacgctgaaagggcgccaagccgaccgctgcgctatcgatcggtcccactctctcttgcttttctcgccatcttacttactcc

SEQ ID NO: 312119 - DNA, 1246 bp, Homo Sapiens
  misc_feature (974)..(998): n is a, c, g, or t
cccagtattttaaatttctccagcacacattccaggatcaatgctctgaactgtaatcagctagtaattcataacgggaatacagccttagaatggaagctatattgcttccctgccccctttctcttacaattggagagtgtaggtattaagggatacaaagtcagaggaagaataattaaaaagaaaaatgcccaaagctgcagctgtttggactaggaagacagcattttacaaacgttcaaaaaatcccaaggccaagtaacacaatttgttcactagcactcttacttgaaggaataaagagatcagcatcttagttagtatataactgtactttcagaactgtattacaggttcaccagaaactatggatgtagttttaggcatcatcaaggaaaacaggttcagttcagatcaagttagatactgtacatctagcctagctagatctggtgtctggatctgctcactgtcaccctgaacagctgtgaactaaacaatagtacgtaactccgtaggaagcttaaggactgaagaaatgtacacagctagttagatctccgcctgttcggcgctcttagagctcctcctgtcttctgatctgccattagcactctcataggaccgcttcttatctttccgatctctgtcacgaggtgatctgtctcttgaactcctgtctctgtcacatgatgctaagtcttggtctctgaatctttcttttgaggatctcctcttggatcgttctctgctcctatctctagaactgtgccgacttctctggtggctacggctgcggctacggctgctggagcgggacctgtggcgatggcgtttctcccgagatttggatcgagttctcctcttgcgttcacgtgacatggagcgagatcgatgtctgcgatgctctctggacctggatctttttggattcttgctgtgtgatcgggacctcctcagcttctcccttnnnnnnnnnnnnnnnnnnnnnnnnngtttcagccgttcctggtttcttttctcctgcttctcagctacgactctctttaattcttcaagcttctctcttatttcaataaatcccaggtgcagtttacccccaaaatgatcagccagtcgtctgtcattatcatgaagtcctaaataggcagagcagacttcacagactcgaagtttctgctgctgaaaactggaagctggcatagaattccgataaacttcctctgcttctcttttctttgcc

SEQ ID NO: 312120 - DNA, 465 bp, Homo Sapiens
  misc_feature (447)..(447): n is a, c, g, or t
gccgggaatctgggcaccttttaaaaatagagaaatgagtgaatgtgggtgatctgcttttatctaaatgcaaataaggatgtgttctctgagacccatgatcaggggatgtggcggggggtggctagagggagaaaaaggaaatgtcttgtgttgttttgttcccctgccctcctttctcagcagctttttgttattgttgttgttgttcttagacaagtgcctcctgggtgcctgcggcatcccttctgcctgtttctgtaagcaaatgccacaggccacctatagctacatactcctgggcattgcactttttaaccttgctgacatccaaatagaagatagggactatcttaagccctaggtttctttttaaattaaggaaataattaacaattaaaggggcaaaaaacactgtttccgcctagcctttctgtattttaaggnaacttaagcagccgggca

SEQ ID NO: 312121 - DNA, 514 bp, Homo Sapiens
gcctatgacttagggaggagagaaagtgagacttagcatgtgaggctgagacctcagtcatagtgaagcacctttaagttcagcagaagctaagcctagggcataaacgccatgttgaattcaagatagcttttaaaatcctggcttttttaagaacataaagttaaattccttgtattaacattatattaactgaaggtaattattttctctatcccacttcaatattgcaatttataattcagattacaacccatcaaattttaggtgggaagattaacctagaaatatttttgtgtataattttcaggaaaattaaaagttaagtttagaagaaagcttttgaaaacaaaatgaaatggaagtgatgtccccctttctggttcatcggtgtggcagtgaagtggccttaggattcatggaccctcagtctgtgcgttgaatcacccttgaaaattcgggtggtgaatggttcaggtctcagtcacctgttctgcacagcctgtgttctaga

SEQ ID NO: 312122 - DNA, 496 bp, Homo Sapiens
attatcagtttaatggacaataaggacagttgaagtatgtgtcttcaagttcgagttaagccattaaattttttaaagtaaatacttaaaggtaaattttatataaatatgtacaaaatgtagatctatttatttagcactttgttcactcagataaatttatattgcatatctaatgagatatgcaatcatctccaaagattataactcctataattcaaaacaaaacaaaacaaccctttaaaggttattcactatatgaaaacagaaagggaacaattacaacaatgaaattgttttaactttttcaaatctgattctaatgtgtattgacatatatttaattatataaaagactgtgggaaaggggcattaacagtactctagaagagtaaaggataaaaatccctctttttcccctagcttccagtttgacaagagggaatacttaatcgaatcctgtccacaaaaacagctaacagtactgtgctttgaa

SEQ ID NO: 312123 - DNA, 914 bp, Homo Sapiens
  misc_feature (568)..(569): n is a, c, g, or t
  misc_feature (577)..(580): n is a, c, g, or t
  misc_feature (582)..(582): n is a, c, g, or t
  misc_feature (584)..(587): n is a, c, g, or t
ggaagcagtggtatcaacgcagagacccattacggccggggttctttttgaggaagacgcggtcgtaagggctgaggatttttggtccgcacgctcctgctcctgactcaccgctgttcgctctcgccgaggaacaagtcggtcaggaagcccgcgcgcaacagccatggcttttaaggataccggaaaaacacccgtggagccggaggtggcaattcaccgaattcgaatcaccctaacaagccgcaacgtaaaatccttggaaaaggtgtgtgctgacttgataagaggcgcaaaagaaaagaatctcaaagtgaaaggaccagttcgaatgcctaccaagactttgagaatcactacaagaaaaactccttgtggtgaaggttctaagacgtgggatcgtttccagatgagaattcacaagcgactcattgacttgcacagtccttctgagattgttaagcagattacttccatcagtattgagccaggagttgaggtggaagtcaccattgcagatgcttaagtcaactattttaataaattgatgaccagttgttaaaaacanncacccccnnnnanannnnacccatggtcgggccgcctcgggccctcggagaaagcttttctaggaccaattcggtttgggcgcgcggggccccagtagggtaagtggaacctgggccatagctgggttccctaggaaataccttggccatggactaagggcctgggattccccccccattaaaaaacccgccccggcgggaaacccggaagcgtttcgtgaacaaattccccagataggggggtttcccggaggggcccctttcacgtgggaacccttatcccaaccaggggagaccccccaaggcggagacgtttcgcacatgatccgccctttttatccgccc

SEQ ID NO: 312124 - DNA, 522 bp, Homo Sapiens
ttctttttgaggaagacgcggtcgtaagggctgaggatttttggtccgcacgctcctgctcctgactcaccgctgttcgctctcgccgaggaacaagtcggtcaggaagcccgcgcgcaacagccatggcttttaaggataccggaaaaacacccgtggagccggaggtggcaattcaccgaattcgaatcaccctaacaagccgcaacgtaaaatccttggaaaaggtgtgtgctgacttgataagaggcgcaaaagaaaagaatctcaaagtgaaaggaccagttcgaatgcctaccaagactttgagaatcactacgagaaaaactccttgtggtgaaggttctaagacgtgggatcgtttccagatgagaattcacaagcgactcattgacttgcacagtccttctgagattgttaagcagattacttccatcagtattgagccaggagttgaggtggaagtcaccattgcagatgcttaagtcaactattttaataaattgatgaccagttgttaaa

SEQ ID NO: 312125 - DNA, 842 bp, Homo Sapiens
gagaacccacagttcggaggtttgataactagcagggagagtcttccaggtttctctttggtccagtactcactgaagtctcatccgtttttcagggggccctttagcactcactgtcggtgtacatttctttgtggtctctttctcctcaggttttacagtttctggtataggttctgcctctttctttgtttgatccactggaacaggcttttctccaggctttagctgcacaaatttgggtggaaatttttgtctgaggtctaaaagtaaagcatccacacgttgtctctgaaaaatagagcttggttcttctttccttttggctttaggtctgactttatcttgctcttcatgatctttgaagtgccaccaataccctttggaaggatgatatcgacagtatgacatagcttcatcaaaagctgactgaataccatgcactgcagtaagcactctagagtttataactgatcccaagtctggagctggtcatcaatttattacaatagttgacttaagcatttgcaatggtgacttccccgtcaactcctggctcaatactgatggaagtaatctgcttagctatctcagaaggactgtgcaagtcaatgagtcgctcgtgaattctcatctggaaacgatcccacgtcttagaaccttcacctcaaggagtttttctcgtagtgattctcaaagtcttggtaggcattcgaactggtcctctctctctgagattcttttcttttgcgcctcttatcaagtcagcgcactccttttccaaggattttacgttgcgcgcttgttagggtgattcgaattcggtgaattgcctcttcccc

SEQ ID NO: 312126 - DNA, 400 bp, Homo Sapiens
ggaattcgcacgaggtaagggctgaggatttttggtccgcacgctcctgctcctgactcaccgctgttcgctctcgccgaggaacaagtcggtcaggaagcccgcgcgcaacagccatggcttttaaggataccggaaaaacacccgtggagccggaggtggcaattcaccgaattcgaatcaccctaacaagccgcaacgtaaaatccttggaaaaggtgtgtgctgacttgataagaggcgcaaaaggaatctcaaagtgggaccagttcgaatgcctaccaagactttgagaatcactacaagacacaagcgactcattgacttgcacagtccttctgagattgttaagcagattacttccatcagtattgagccaagcagagaggagggtcaccct

SEQ ID NO: 312127 - DNA, 983 bp, Homo Sapiens
  misc_feature (60)..(60): n is a, c, g, or t
  misc_feature (151)..(151): n is a, c, g, or t
  misc_feature (208)..(218): n is a, c, g, or t
  misc_feature (294)..(304): n is a, c, g, or t
  misc_feature (314)..(329): n is a, c, g, or t
  misc_feature (377)..(498): n is a, c, g, or t
ccgggttgtgtttcccccggggctatttattttcttttgccgggttttcttgttgcgcgncggggcggtctccggcggtttttccccccttttttggcggcgcctgtcccgcttttcgccccgtggtgggcccttcccggggcgcccggtntggtttttctggggtttcttccggtctttgcggcggcggggggcgctctcttggggnnnnnnnnnnncctcgtgggtttccccgggggcccctttgacgtcgcgcccgctttgccctccgcggtttcctcttggggggtcgcnnnnnnnnnnntgtttctctnnnnnnnnnnnnnnnncgggctctcctccccccttgtcttcttctctttttttctttgttcccnnnnnnnnnnnnnnnnnnnnnnnnnnnnnnnnnnnnnnnnnnnnnnnnnnnnnnnnnnnnnnnnnnnnnnnnnnnnnnnnnnnnnnnnnnnnnnnnnnnnnnnnnnnnnnnnnnnnnnnnnngaaaaagtcatggatttattaaaatagttgacttaagcatctgcaatggtgacttccacctcaactcctggctcaatactgatggaagtaatctgcttaacaatctcagaaggactgtgcaagtcaatgagtcgcttgtgaattctcatctggaaacgatcccacgtcttaggaaccttcaccacaaggagtttttcttgtaggtgattctcaaagtcttgggtagggcattcgaactggtcctttcactttgaggattcttttcttttgcgcctcttatcaaggtcaggcacacaccttttccaagggattttacggttgcgggcttgttagggggtgattcggaattcgggtggaattgccaccctccggcctccacgggggtgttttttcccgggtatccctttaaaagccatggggctgattgcggcgcggggctttcctgacccgactttgtttcctcgggcgagaggggaacagggggt

SEQ ID NO: 312128 - DNA, 424 bp, Homo Sapiens
ttttaacaactggtcatcaatttattaaaatagttgacttaagcatctgcaatggtgacttccacctcaactcctggctcaatactgatggaagtaatctgcttaacaatctcagaaggactgtgcaagtcaatgagtcgcttgtgaattctcatctggaaacgatcccacgtcttagaaccttcaccacaaggagtttttcttgtagtgattctcaaagtctgtaacaaaagacaaagggaaaccaagtgtttatcgttttatactttatccctaggaacatctggggaaaatcattacttcttaatcatttcattaggtttccctttggggatggattcccaatttacacttaatagggattttcagggtccctgggggttgaaaatgcccgggggctggtttttccctggtgctgggggca

SEQ ID NO: 312129 - DNA, 392 bp, Homo Sapiens
  misc_feature (330)..(330): n is a, c, g, or t
  misc_feature (335)..(335): n is a, c, g, or t
gacgcggtcgtaagggctgaggatttttggtccgcacgctcctgctcctgactcaccgctgttcgctctcgccgaggaacaagtcggtcaggaagcccgcgcgcaacagccatggcttttaaggataccggaaaaacacccgtggagccggagtgggcaattcaccgaattcgaatcaccctaacaagccgcaacgtaaaatccttgggaaaaggtgtgtgctgacttgataagaggcgcaaaagaaaagaatcttcaaagtgaaaggaccagtttcgaattgccttaccaaggatttttgaggatcattacaaggaaaaattccttgtnggtgnaaggtttttaaggacgttgggttcgttttcccagatggaggattttcaccaaggcga

SEQ ID NO: 312130 - DNA, 1051 bp, Homo Sapiens
taggccaagagtaaacacacttcatactggggaagaagaataaaccaaaataactcaaaacagtaactgaaaacaccaatcccaaaatacttacacagcgaccagctggattttgaatttgattgacgttgggttaaattctggcttgctcaaattatgttcacatttacggcagcgcagggaccgtttgatcagaagatgtttgtggcgaggatagagctgtgaagcacagactggctggaagtcaggctgtaacagacgctgctgaagggttgttacctctgttaaatttactggtcttgtataatagtcttcaggtagaggttccacttcatccacagcctgagctggctcaatctttatctctttctgatcctctccttctttaagggaaagtccggcaagggtactgatggatgcaccagctcgtggtcgctgaagcctgttcccaagaccatatttgtccgaaaaagccagaggcatatagttttctacgtcgtgccagtttcttgcgatctcgctcaaccttctctttctgagcaagctgctggtaatattcaatcaatttgttcatccgttgtgtgtgaggattttcaggttcctgccaaccgccactagctacagatttgtctgccatgcccacatctctagacgtccagcgacaaaatccacatgccaggtaataggctttcttcatggtggtcttggctgggtcatctggaagctgtgtggagatgctcgtggcccgagtagagagggtgtgcatgcagccaggacagtcaaaacaattggcacatctattcttttttagtttggcttcagccgatggcatattttctaaacaactgggacaataatgggagtccacctcgtgagacacacattccagcgaccgcagttcgctacaatagcggcagaagtagagttgcgagagcggggcccgaaccttcttttctccctggactagatagagaacccggtccgactgcagcaaggacgccatcttggggagggaggaggcgatgacgctcccggcgcatcacgtgacccc

SEQ ID NO: 312131 - DNA, 1144 bp, Homo Sapiens
  misc_feature (130)..(130): n is a, c, g, or t
  misc_feature (653)..(653): n is a, c, g, or t
aggagtccctggagcagaaaagtgagtccagtccagagcagaaggttagcaggaagaaaggaagatgaactgtcagggtattaaggcaaacagtgccacctagaagcgaagctttattcaaacggaaatnctgcacttggacagaaatcaccgttcaacagcaaaaactatttctgttggacatgccaagccatggcccctccccatggccacctgcccagagaacttgtcaccatctgctcttaagcttcacagaccctgccctgcctgccccagcggggccagaacctcctgacccaccttggaagggacaggggagggactgaggggccttcggcctcctgggctaaggcaggctttgcccaccctcccttggtgccctttgaggttaccagcctcttgaagcatcagatctgagcccaagctgagcccccccaaggagggtggggatgggggctccagagttgaggggaagaaagccagggcaggtggtaggtgctcttcccgacttctggtccccacctggcatagaggcccaggggcctgactctcctgatcttgccccccacatcctgcctgcatgggggtcagtatatcttctgacgactgggtagaatggcctctttgatgaaggagaagacaaccaggatccntaagcgtttgccccgcttgcctttggtgaaataattggagacgacatcatctcctggctgcatggtagagggcaggacgttctccccggccgaaagtgacacaaaaaacgcaaacggaattatccacaggcagaaagtgaaataggccaggacctggcaacaagagagactctgagaagggataatattcttctgcaaaaaactgaaatgctaggtaatgattcaccaccactagtccacacgacaggatgaagttaggcgaggtcagcatgatgaaggggaaggtctggaggaggccaaagtagacgaggttggtgaataggcccactccaatcatgctggtggggaagcgctcaaagacgtagaggccaatcagtacagcggtggagaaccagatcatgtattttatgatcctgctggtggccactgtgtattcttctatcagttctgccaggtaatagagtccagcctcgtgccgaattcgccaccca

SEQ ID NO: 312132 - DNA, 923 bp, Homo Sapiens
ttccagcctgggtggcgaattcggcacgaggccgaagcgcgcaggcccgtcccggtggccggggagcgggcgggtgggggcgccatgtggttcatgtacctgctgagctggctgtcgctcttcatccaggtggccttcatcacgctggctgtcgcggctggactctattacctggcagaactgatagaagaatacacagtggccaccagcaggatcataaaatacatgatctggttctccaccgctgtactgattggcctctacgtctttgagcgcttccccaccagcatgattggagtgggcctattcaccaacctcgtctactttggcctcctccagaccttccccttcatcatgctgacctcgcctaacttcatcctgtcgtgtggactagtggtggtgaatcattacctagcatttcagttttttgcagaagaatattatcccttctcagaggtcctggcctatttcactttctgcctgtggataattccgtttgcgttttttgtgtcactttcggccggggagaacgtcctgccctctaccatgcagccaggagatgatgtcgtctccaattatttcaccaaaggcaagcggggcaaacgcttagggatcctgggttgtcttctccttcattaaagaggccattctacccagttcgtcagaagatatactgacccccatgcaggcaggatgtggggggcaagatcaggagagtcaggcccctgggcctctatgccaggtggggaccagaagtcgggaaggcacctaccacctgccctggctttctttccctcaactctggagccccatccccacccctcccttggggggctcaccttggctcagatctgatgctttcagaggctgtaacctccaagggcaaccagggaggggggaagagcccttgctttacccggaac

SEQ ID NO: 312133 - DNA, 561 bp, Homo Sapiens
gttgctgcagctctgacttgctttttcctgcctccttcctctcctctctcttcttgcttagcttcttgccttctgatactactcccaagatggaggctaatcactctgaacagctctcagcggaacgacagtcaacacctccaggtgacagttcatcattacccagtcacaatggcctggagaaggaagatggccaggattctccaaccccagtccaaccaccagagaaagaggcaagtgtgcaccccgatatctctgaagagctgaatcgacagctggaagacatcattaacacttatgggtctgctgccagcacggcagggaaagagggctctgccagggccagtgagcagcctgagaatgcagaatcacctgacaacgaggatggggactgtgaggaaacaactgaagaggctggaagagaacccgttgcttctggagagccacccactgtcaaagagcccgtcagcaataaggagcaaaaattggaaaagaaaatcctaaaaggattaggcaaagaagccaacctgctaatgcaaaatctgaacaagttgcaaacac

SEQ ID NO: 312134 - DNA, 1104 bp, Homo Sapiens
  misc_feature (17)..(17): n is a, c, g, or t
  misc_feature (24)..(24): n is a, c, g, or t
  misc_feature (34)..(34): n is a, c, g, or t
  misc_feature (49)..(49): n is a, c, g, or t
  misc_feature (97)..(271): n is a, c, g, or t
  misc_feature (286)..(372): n is a, c, g, or t
ccatgtgaaaatacaanactgttntccttaaaanccaaatgtttaaagnactgaacctcaaaaaacggtactttatgggccgggccatgagtgtcannnnnnnnnnnnnnnnnnnnnnnnnnnnnnnnnnnnnnnnnnnnnnnnnnnnnnnnnnnnnnnnnnnnnnnnnnnnnnnnnnnnnnnnnnnnnnnnnnnnnnnnnnnnnnnnnnnnnnnnnnnnnnnnnnnnnnnnnnnnnnnnnnnnnnnnnnnnnnnnnnnnnnnnnnnnnnnctgtttgaacccacnnnnnnnnnnnnnnnnnnnnnnnnnnnnnnnnnnnnnnnnnnnnnnnnnnnnnnnnnnnnnnnnnnnnnnnnnnnnnnnnnnnnnnngcagtacttactcaaactggtctataattcaacgtcggaaactaaagattctttagagaggtgcttatatctatatccctatgattaaatgtattctcaaatttgttttttaaaacatatatattgcacaagtagtagaataccagcattctggtatctctaacataaaatcctatcttaacacattcaactattctactgaaaattaattttatcacaatgtttaaaatcagtcacgtaggacttttaagcacattaatctcaaaacattcctaaacaagatgaaaaaacacaggcacttgaatgtaggctattagtgacaaaaagtagaggtcacaacaatttcatgactaagggcagttatgtctttacatataaacttgaggtctttcaccaatccaaatatagaaataacgactatttacaaaacttggataagaaaatcagatctcccaaaaatttcctaccaaataatttttgcggaataaagcagtgactgctccaaggcctgatgaagctttttcaaacaaatgtctaagacacagttgtttcaattctagttttcttcttttctctatgccggtataacccacaacccttactgttggtctatccatatcctctagtgcaaagataagtcacctcaagattcagggcatcaaaaagtggttagtaatttcaaaagtagtccacattttagtataaattttacagcaccacagacatcatgag

SEQ ID NO: 312135 - DNA, 651 bp, Homo Sapiens
cagctcaggatgaggcagggctctctcctggctctgaaacctgagatggtaaaatcggtcaagagtccaaggtgttggaggagataagcaaaggagtttgaaggcagctctttccctgcagattgtcatgaaccaaaccagaaaggggtatcctgtagagaagttaggggacggaggataaacttgacagtgcatgaaaaaatgtaataaatgggatacagaggactatcaaatagaaacaggtgatgggggaggaaggcactagcaacctcctcatttttcttcacatttggacacacatgtgcctaaaatggtttaggcagggtaggaaaggaaaatggatggagaagtttccaggaggttccagtaaggactctcccgtcctagctgtggggagactcacctctgagagtccagtgtcaaaccagctgggtgcccgcaggaaggagggtggccgaaggtagaagggactcagggaagtagacgtcgggaaaagatcagactccaacaggtgctctccgaagaactggtcaaagaggcggctgggggagtggaaaggaaagaaggggcggcggatccaggggtggtggatggcgatgtccatggtggctaggtgagtgtgaggggtcagctggctggtcagctccttcc

SEQ ID NO: 312136 - DNA, 1217 bp, Homo Sapiens
  misc_feature (22)..(22): n is a, c, g, or t
  misc_feature (38)..(38): n is a, c, g, or t
  misc_feature (43)..(44): n is a, c, g, or t
  misc_feature (65)..(65): n is a, c, g, or t
  misc_feature (94)..(94): n is a, c, g, or t
  misc_feature (96)..(96): n is a, c, g, or t
  misc_feature (102)..(102): n is a, c, g, or t
gcctttcaccttgggtcccttnaggcatcaatccgcanccacnngaccagctgagctggactganggggaacagactccatgagctacctaccntnacagcntaccttcaaggccactcctcctcccaacacaccccagatccccaggacctcgagggcgactggcagcaggacgtgcaggaaagcagcaatgtagtcagcatcccgcatccccacctggttccaaggcacattgatggtatatccttggccttggccgaaacctgtggtggaccagttagaggccttcaggtggggccagaacctaccctgctcgtagcggtggatggagaaatagaggacactggggtcctggtcgaaggtgaactgtgttccttgaccgtggtgcacatccccaatctacgataaggaccctccggatgcggtgtttctgttgagcatagcgggctgccacagccacgtggttgaacatgcaatagccatccataagactgtgctgggcgtgatgtccaggaggcctaatgatggccatgccattccggatctcagcccccaggaccgcatccaccagcctgaggacagagcctgaggccaggcaggcacaggagtatgagttcggatgcagataaactgagtcgtaggtgtctgctaggacacggagttctccctcattcatgtactgggttgtttccatcagatcaatatattctaggctgtgaaccaacatcagctcttccttttcagcaaaccgggcctgaaaggacacgcagcgatctaggaggccctcctggatcagttgctccttgatggcatggagccgctcagggccttccgggaagctgtcatcccagaggcaatggaattcatttaactgctcatccaacaccaagccagtgccagccagtgcttcagcctcaaggttcagatccatcccttgcagtcccacgattaggtcttcttccattgcttggccgagcttcttcattttgcctttcttctttacctccgctagattggggatagagcggggaacggctccctttttaatatttcgcttcgaagtgacactggagtcctgagggggcgactgggggttctgcctacttcttcgctgcctggttgtggtggaatcctggccggttgaggtcatagttgaggaggcttggcccctgccgcggttcgctccactcattggacgcagcccctttctccccggc

SEQ ID NO: 312137 - DNA, 1262 bp, Homo Sapiens
  misc_feature (524)..(524): n is a, c, g, or t
ggcagtgacttctatgttttgggttgatgctgaattagggagtgatatttaccttgatggtatcataactattgtggattcaaaatatggattaaaagtgaaataccactaaaggcagaagagaatgaaatcatcccacccactgacccgttcccaatctgagcatatggatagggcccaaagcacatttaacagaagagaaacctgatggccttatcaatgaagctactaggcaagttgctttggcagatatcattctcattaataaaacagacttggttccagaagaagatgtaaagaaattaagaacgacaattagatccataaatggactaggacaaatcttagaaacacaaagatcaagagttgatctctctaatgtattagatcttcatgcctttgatagtctctctggaataagtttgcagaaaaaacttcagcatgtgccaggaacacaacctcaccttgatcagagtattgttacaatcacatttgaagtaccaggaaatgcaaaggaagaacantcttaatatgtttattccagaatcctcctgtgggaaaagaatgtgagaaacaaggacaatcactgccatggaggtccataaggcctgaagggattggtgtcaatcaaagacaaatcaccacaagtgattgtccaggggtgtccatgagctctatgatctggaggagactccagtgagctggaaggatgacactgagagaacaaatcgattggtcctcattggcagaaatttagataaggatatccttaaacagctgtttatagctactgtgacagaaacagaaaagcagtggacaacacatttcaaagaagatcaagtttgtacataacactagtggcatttcttatcaaaaggattggataataaaaataagtttctactgggtatatttcaagcatttatttattactttagttacgaattccaatatactttaaaatggtatttgttttacagcatacataaaatgtagcaaatcagtactgtaaaacatttaacattcatacaattatatataatatccttttttttaaagaatggtatttcacaaaaatatcttttgaaattggctttggagtttacatatactgaacatgaaagtttataataatgatgatacaactttcaacattgtcattttttcttagaacttcagctgattgcagagatataatgattacattgttattaaatttttttaacacaagtaagtgtcaccattttatgacatgaaataaa

SEQ ID NO: 312138 - DNA, 1288 bp, Homo Sapiens
  misc_feature (8)..(8): n is a, c, g, or t
  misc_feature (16)..(16): n is a, c, g, or t
  misc_feature (21)..(22): n is a, c, g, or t
  misc_feature (52)..(52): n is a, c, g, or t
  misc_feature (54)..(55): n is a, c, g, or t
  misc_feature (65)..(66): n is a, c, g, or t
  misc_feature (82)..(82): n is a, c, g, or t
  misc_feature (99)..(99): n is a, c, g, or t
  misc_feature (106)..(106): n is a, c, g, or t
  misc_feature (111)..(111): n is a, c, g, or t
  misc_feature (117)..(117): n is a, c, g, or t
  misc_feature (133)..(133): n is a, c, g, or t
  misc_feature (186)..(186): n is a, c, g, or t
  misc_feature (201)..(201): n is a, c, g, or t
  misc_feature (207)..(207): n is a, c, g, or t
  misc_feature (228)..(228): n is a, c, g, or t
  misc_feature (235)..(235): n is a, c, g, or t
gataaganatgcctcnagtgnnatgtacaaacttgatcttcttggcacgtgncnnccactgcctnnctgtttctgtcacagnagccataaacagccgtntaaggcnatccntatctnaatttctgccaaggcngcccaatcgatttgttctctcagtgtcatccatccagctcactggagtctccnccagatcatagagcncatggncaccctgggcaatcacttgtngtgattngtctttgattgacaccaatcccttcagccttatgacctccatgcagtgattgtccttgtttctcacattcttttcccacaggagattctgaataaacatattaagatgttcttcctttgcatttcctggtacttcaaatgtgattgtaacaatactctgatcaaggtgaggttgtgttcctggcacatgctgaagttttttctgcaaacttattccagagagactatcaaaggcatgaagatctaatacattagagagatcaactcttgatctttgtgtttctaagatttgtcctagtccatttatggatctaattgtcgttcttaatttctttacatcttcttctggaaccaggtctgttttattaatgagaatggcatctgccaaagcaacttgcctagtagcttcattgataaggccatcaggtttctcttctgttaaatgttttaatccatattttgaatccacaatagttatgataccatcaagataaatatcactccctaattcagcatcaacccaaaacatagaagccactgcaccagggtctgctaatccagtggtctctaacagtatgtaatcaaatttccccttcttttgcatcaaattctcaatagctctaaggccactgtccttcactgaacagcagaggcaaccgtttctaagttccagccactcttcatagagctctccaccttggctgacagctaaggatttctccagcgcacttccttccccaaattcatttaaaatgaccgctactcttttactatgttgctctgtcaaaatatagttcagaagtgttgtcttcccagcacctaaatacccggtgataattgtgactgggatcttggcgccgaggccagacttttcctcctcctcgctttgcgtcgtctccatgggaaccaattcaggacaatcctcctccgcaggatcctcctcctcatccgcagatccaacagccggtaacattccggcctacagcacgtccctacctcagctgaaccgctgggaccaacacgccgtaccgcagccgcgcacgcccagcacccc

SEQ ID NO: 312139 - DNA, 778 bp, Homo Sapiens
tttttgatagtcatttattttttataaggttgaacacttagaagtatgaccaatgacagattaaattcagaataatcattttttacatatgagactttcatgcactagagattaaataagccctgacatcaaaagcaataaaaactcaataaaaggaccaaaacattagagcagatagaaaagacagcaaaaacactttaagaaaatgcttcctaataagtttattttctatttgtttgaaaatacaatgaagcaaactgtgtaaattcagttaaattactcaagaaaattaaagctggaaatataatcaataaacatttctagtaaaccatgtacacagtaaacacattcctcacttcactgaacagcagaggcaaccgtttctaagttccagccactcttcatagagctctccaccttggctgacagctaaggatttctccagcgcacttccttccccagattcatttaaaatgaccgctactcttttactatgttgctctgtcaaaatatagttcagaagtgttgtcttcccagcacctaaatacccggtgataattgtgactgggatcttggcgccgaggccagacttttcctcctcctcgctttgcgtcgtctcaatgggaaccaattcaggacaatcctcctccgcaggatcctcttcctcatccacagatccaacagccggtaacattccggcctacagcacgtccctacctcagctgaaccgctgggaccaacacgccgtaccgcagccgcgcacgcccagcacgccccc

SEQ ID NO: 312140 - DNA, 825 bp, Homo Sapiens
  misc_feature (14)..(14): n is a, c, g, or t
  misc_feature (132)..(132): n is a, c, g, or t
  misc_feature (146)..(146): n is a, c, g, or t
gatctcggtgtttntaagattgtcctaagtccatttatggatctaagtgtcgttcttaatttcttttacatcttcttctgggaccaaagtctgttttattaatgagaatgatatctgccaaagcaacttgcntagtagcttcatgnataaggccatcaggtttctcttctgttaaatgtgctttgggccctatccatatgctcagattgggaacgggtcagtgggtgggatgatttcattctcttctgcctttagtggtatttcacttttaatccatattttgaatccacaatagttatgataccagggtctgctaatccagtggtctctaacagtatgtcatcaaatttccccttcttttgcatcaaattctcaatagctctaaggccattgtccttcactgaacagcagaggcaaccgtttctaagttccagccgactcttcatagagctctccaccttggctgacagctaaggatttctccagcgcacttccttccccagattcatttaaaatgaccgctactcttttactatgttgctctgtcaaaatatagttcagaagtgttgtcttcccagcacctaaatacccggtgataattgtgactgggatcttggcgccgaggccagacttttcctcctcctcgctttgcgtcgtctcaatgggaaccaattcaggacaatcctcctccgcaggatcctcttcctcatccacagatccaacagccggtaacattccggcctacagcacgtccctacctcagctgaaccgctgggaccaacacgccgtaccgcagccgcgcacgcccagcacgccactcccccc

SEQ ID NO: 312141 - DNA, 1090 bp, Homo Sapiens
  misc_feature (353)..(353): n is a, c, g, or t
ctgttttttcccaattctttttcccacaggagattttggataaaacatattaagatgtttttcctttggcttttccgggtacttccaaaggggatggtaccaatcttctgatcaaggtgagggtgggttctgggcacatgcggaagttttttctgcaaacttattccagagagactatcaaaggcatgaagatttaatacattagagagatcaactcttgatgtttgtgtttctaagatttgtcctagtccatttatggatctaattgtcgctcttaatttctttacatcttcttcctggaaaccaggtctgttttattaatgagaatggcatctgccaaagcaacttgtctnagtagcttcattgataaggccatcaggtttctctttctgttaaatgttttaatccatattttgaatccactatagttatgataccatcaaggtaaatatcactccctaattcagcatcaacccaaaacatagaagccagcctgcacctgggtctgctaatccagtggtctctaacagtatgtaatcaaatttccccttcttttgcatcaaattctcaatagctctaaggccattgtccttcactgaacagcagaggcaaccgtttctaagttccagccactcttcatagagctctccaccttggctgacagctaaggatttctccagcgcacttccttccccaaattcatttaaaatgaccgctactcttttactatgttgctctgtcaaaatatagttcagaagtgttgtcttcccagcaccagtgagcaatacgggaaaggcccgagcggcacgtttgaaatacattgttttggacaagaaatttgttcatcttctcagcagagcagcctctgaataactaaatacccggtgagtaattgtgactgggatcttggcgccgaggccagcgttttcctcctcctcgctttgcgtcgtctccatgggaaccaattcaggacaatcctcctccgcaggatcctcctcctcatccgcagatccaacagccggtaacattccggcctacagcacgtccctacctcagctgaaccgctgggaccaacacgccgtaccgcccc

SEQ ID NO: 312142 - DNA, 804 bp, Homo Sapiens
  misc_feature (61)..(61): n is a, c, g, or t
cccaaataaaaattttctcctaaaggtaccattacccccagatagggaaaacagaaatttnttctagatattccaaacaaaaaaggggttgtatataggcaattagtgctaatcactggaggtgctagaggttggtgaaggttgtggggatggggttgcaccactggctttcaggctactttaccacagttgatttccagaggatggaagaagtcaggaaacttgggaaaccgctgctgaggtccttgcagccccacggtccccaggctggtgactggtgggggagtatggagtccagctgaccaccagagcctgcacacctgctgctatgggggaggaaaggatgacttctacctcctttccacattccaaattccacgtgactacattttattggcagcaccccgctggcaagtgagccttgatgtgtgcttcctgggcttctggcaccttttgtgttctggaaaaaatgctgccacagaggtctgattttgaagtggctgccaacatcccagacagcgaaggtgttatttttatattctactgtctccacacagaaacctactgtagggacggcaggcacagtctcccccagcttcaatttatacaagatggtggtttttccagctgtatccaaactcaatataagaatccgcatcttttttttcccaagtagacttttaaagagcttttcaaaaatgtttcccattgtaatttaatcgaattctgttgccactcaaggtaccgctacctacaacaccgccgactccgcggcctttaggatttcagctcagttcagctccc

SEQ ID NO: 312143 - DNA, 1787 bp, Homo Sapiens
  misc_feature (531)..(543): n is a, c, g, or t
aaatcctttgtccaagtaaaattagctccttccaaaacgcagttcccacccatttcttaacccaccatagattccatcctgccccttgaacagctggcctaggtgtgtgtgtatgtgaattaggggtgcttattgattggcacatattttccccccctggagtttaggggtggcagaaagcttttatagtaccaaaaaagtaaacattgataatatggcctgacaacaatcagatatgctaagctctagaagcaaaagcaaggtaggattgcctccaaatgttgacaggtattagccataccacagtaactagatctaatgtgagggctaaatgcctggagaggcagaaccctaaaggatgcttagttatagctccaatgtgccgccgagtggcttgatgctccattacaccctccttggatccaaccttccattaaggctgaaggctctagagggcagagtattcaagatgttagatctggtccaagcccaaattctagagttaaaagcagaggggttcttagtggctgnnnnnnnnnnnnncctgatgacatttgggactccagttttgaggaaaggctctgatgatgaggcttacttctgcaggctaccagagactcctgagacttcaacagcttgactgatttatcacacactccaagtggcccagagacaaggacggccagaagagatgggcccccccgggaggcatggttccaaaagtgtgaggagcaaagtcatgggaggcagggtaggaagaggggacagaaagaggggcttgcaacagatcaaatgctgacctcccaggaacagggtttagggcaggtgtgatgtttcccctcctggccctcatcttgaacaaagaaaagggaagccacatgaagctggtttgaaagattatatcaaaattaataccactgcagcttctatccttggctaatggcaaaagcgagaagggtacctggaaaataacttctttcttttcctctagattttcgaagaaggcaaataaatcaagaatagaaacctatatataggaggttgggcctcctgcaaagaatgaagcactttttgttaaatacaggagaggctacttggctgcactaatatgtgctttttggaatcttatagagtgtcaccaagttgaactttggaatggcttgaatcatccctggagcatctgtgccgggcagtcaggagtgagtgcaccgcctcccacccagccccattgggcctcacaccctcttcattcctttccccatgaggcaggcaaacacggtcatgaccattttggggttcacttcaaccaggtcttctggcagggcatacactcttgctccaatttttcgggccatagagatggcatattttgcattgttgagtttctcatcatcattcagattttctgtcttcagaaggtcatagttaatggaacctggttggatggcatcgatgaggtccagaacaggcagacttgtactaatcttcgggtccttgaaactagagatggatgaacttttctctgcttccctcaatgtttcattcacccagttgacaataatgtcatcattgaccttctggccaccaccaatttcttcgaggatattcagtgtataccttctcattagctgccaaatcaaggccagtgtgagagtgcggtttccttcattgagatcttgtccaccgatgccaaccagggagaacttcgcttgattcttccccaattctaccgcgtagttacaattctcaagcttcttcatattgcctcccagtttggggtatggccc

SEQ ID NO: 312144 - DNA, 1030 bp, Homo Sapiens
  misc_feature (127)..(140): n is a, c, g, or t
  misc_feature (142)..(157): n is a, c, g, or t
  misc_feature (164)..(164): n is a, c, g, or t
  misc_feature (167)..(168): n is a, c, g, or t
  misc_feature (171)..(172): n is a, c, g, or t
  misc_feature (180)..(183): n is a, c, g, or t
  misc_feature (185)..(185): n is a, c, g, or t
  misc_feature (187)..(244): n is a, c, g, or t
  misc_feature (246)..(246): n is a, c, g, or t
  misc_feature (248)..(248): n is a, c, g, or t
  misc_feature (251)..(258): n is a, c, g, or t
ggggggaggtcccacgcccctttttcttgggcccgggtttttcctttgagaaacaggtatggccccagtttcccgttctcttttgggggccggggggcccaaaaggaatgtttttgaaaaatttttnnnnnnnnnnnnnntnnnnnnnnnnnnnnnnttttttnttnnttnntttttttnnnntntnnnnnnnnnnnnnnnnnnnnnnnnnnnnnnnnnnnnnnnnnnnnnnnnnnnnnnnnnntntnttnnnnnnnnataaggaacattttatttggaaagattttgagcatcattctcttttcattttttattaaggcagtaacattctttcttcctggaggcggaggggggaaatcatctgaggctacagtaagttcaatctgaagtcaaaaccaaccaatttgtattcagaagcagcaaaaatactggttatgggctgggaggagccacatgttggctttctgagtccactgccaaggaacagatccagagcaatgcatttcaattgctttgaaaaatggctaagttccattacataccaccactaaagaagatacctcattgatggagcttttcaccatgatagagggcgtcttgcattggttcacaatggcctgttgctttttagccttcagttggtttagggggaaattgctcaacctatgagacctgctcaaattcatactgttctggttttgctttggaattctttgtccagtaaattagctcttcataacgcagttccaccatttcttatccagcatagattcattctgcccttgacagctggctaggtgtgtgtgtatgtgagtaggggatgctattgattggcacatattgtcccccctggagttttaggggtggcagaaagcttttatagtaccaaaaaagttaacattgatcatatgtgcctgacagcaatcagatatgccatagctctaggagcaaaagcgagtgaggggttggcctcctagaggtgatcaggtattaggcatagcagcagtaactaagttctaatgtgtagggc

SEQ ID NO: 312145 - DNA, 1298 bp, Homo Sapiens
tattaaaaaccccatatatgtgtaaccccgagcatttgtggacaacctgtctcccagctgcatgaagcgaaacgtttggactcccgcccactgcttgcatggcgaaatattgggcatcctgagttacaaaatagtgtagccttaccgacctgtgtacagctcccatggaggttggggatacatgtgggagtaccccaattgcaaaagcttatgtggatgccagagttcagccaatctatggtggtacaaatgaaataatgaaggagctgattgcaagagagattgtctttgacaagtagacatctgcccacatcctggagtcctattacagctaatctcgttttaaatctgctcaagataaaatgtaacttggaaagcgaggaaacactaaacatgtttttacctgctctctctatagagaaggaaataaaatataaatataagattaacacagtggaaggacaaatctttgaagccaaaattctagttttccacatataaggtttaacttacagttttttatgtagccaaaggtaaacggttttctgaatcttgcctaggtgtttcatttatctctaaaattctaaaaagcataaatcattcaaatcttcaaaccaaggcagaaataattttatgtcgctatagtataaaaacattaataagatagcacattgacttttaaagggaaaagtaaatataacttagcatgtaaactcatttcggctaccatttgctccaaattccctagaacagtggtttttaccactgtactccaaccccgtttttaagcaatggaactctttcttcaaacaaaagcttatgcagaacatctctgtgaaacgctgctgagtgagaactggtttcattgaagctggaagccatcataccttactggcttgaaacccctaggactcagctaagtatttgcctaaccctgaccagggaatgccttggttctgtcaattgctgacatctgagaacacagaataatccatcatttttaatttcaagatattggtacattttataggtatcaaagcaatggcttttcttttgcaacagttaatgtatttattaacttaataattactttatgtcttctataaaccaggctgttaatacaatgatgacaaacaaaactggcaagatcactaaaaaataagtgaataaacaaataagtagtaaaataaggtaagaagtaaatatgtaaaagagataatttcaagcataagtgcaatgtaaataataaagtaagcatttaaaattcaaaagtgaggaaatgacatttgatttaagac

SEQ ID NO: 312146 - DNA, 973 bp, Homo Sapiens
  misc_feature (450)..(450): n is a, c, g, or t
  misc_feature (731)..(731): n is a, c, g, or t
  misc_feature (843)..(843): n is a, c, g, or t
tttattaaaacctagactttatcgtacttttcagaatttctgtggaatgtttaatcttctggatccatgactgtctgatacgttggcaatttaaagtccttttgaaagagagttcatgttacccagctattctctagtatgtattcatggaatactccatcgtttctgattacacttatgagacataattcttcagagcacacttagaattatttctctaacatatttatgcagacagaattccatcttgaattttatcaaattcactttaacttcttaagtcttggttattgtaagagcccaaaggtatggccccagggaacaattaagacttgatgatttgtcacctaccaaaatatgttcattatgtaaaggtttcaatgcccataaggctgtcatttggtatttagtgcagtgctcatataaatataaatatttggacaaatattngagatacgtactttttccatcaaattttaattgaggttctgctgtatactagactctatgttcttgattttgttcttactagttaagtgaagtaagtattaacaaatgtaattattaattttaatgggaaaaggaaacaagtattagagaagtaggactttgcatatcttaaccaccttttggaaaacggaggtatacatgcattacaaaataactttgaactgtatattttggctttacaatttaatgtcattgttgcttttagttgtatttggtctggnttttttattgtggtttttcctcagaacaattttggaaactatattcatcttcatatagaattatgggcagtttataggcccacctgtttgaaaaaactttatccacagttgntgttcctaaaatcagttgtcccagaattgtgacaggaaagaagctcttttgaacttgaatgcatatctaagttagatgagattaatacaatttatatcctgaatgtaatttatatcctaaatgttgaact

SEQ ID NO: 312147 - DNA, 722 bp, Homo Sapiens
acaacgcctgcctcaagtctggtgcacctcatggaccatcagttcacggggaatggctgctggaccaaaccttggtgtctgccctacgctcaaagtcagcaacattgtgtttgacagcctcatcaaaaaccatggtggccagctgggagtgcagcagagaacgtacttcaaaggaaatcgaaaagtccacagtgcaggttcgagtataggcaggaataccagggctgaatcgccaaatagtctctaagtggttgaagagcttgccatcagtacaaacagccttgaccatgtgaggtttgaccatggaaactgcagaggtgtaacgttccatgacaggtggaaagccaacctccagctgggctttcaaatgacccttacggctggataccaccagagacttcttacaccagggcacaaactcacgatactcctggacgttggacaccacctcatacatctcctgcattgagtaccccatgattctacgctccgagtaagcctttcgcttgttggtgaagggagcagcaaatcccatgaaggaacggctcgaaggtaagccagcctcagccgccaagatctgggcagcccgaggcaagaggaggctgcaggaggtcagaaacctaaggccaaaggaaagaggagccaaccgtatagttcttcgtaatcctctatcatatgtaggtgaaggagaagaagagtgcatcccagacgaaggtcgtccc

SEQ ID NO: 312148 - DNA, 760 bp, Homo Sapiens
tttcacactgtcacaatttattgaaattttataaaaactcaggccaagtggaagaataaggtacaactcaagagtacaaagacaactccgtttccgttcagtacttttctcctcagcactggtggtaagaaagccccttgctctctagtagccaggcagcatggacttacagtcttaaaatgaggctttatgtatttcaggctggaggcaggttgctttttctcctgaggaatctcaggcagggtaaaagttacttaccactcagtacctctgtgccagaagaaaagctcaatttattcaatccttagaaaagttactatcgtcccctggtcagacactaaggtgtctttgataaggtccagagacaaccacatagtccttattctaattcgtagtgaaaaggctgcaggcatatggtgctcctacgatgggcctgaccctttcctaagcacatctcatttccacatcctttgccttctctttcccccaacatttcccagccagcatagaacccaatttctgggaaattgagaggagaaacagtattatgaacacagactcctttcaaattggaacaggagccaaaccaaataaataagagaattgtgtagggaagtggggtagaagggaggtcagggagcaatcccttgcctcaagtctggtgcacctcatggaacatcagttcacgggggatggctgtttctggaccaaacttggtggctgcccgacgctcaaaggcagcaacattctgtttgacaac

SEQ ID NO: 312149 - DNA, 1051 bp, Homo Sapiens
  misc_feature (758)..(790): n is a, c, g, or t
tctgaagaactctatctttaaaggaaataccaattagcaaataaaacagttgattccccccaactctcattccccagagcttgcttaagtgtgtggtttgcacacattccctaaataaaaacattgctggctcataactatgcttcactttcataagccttccaaatgttagtaacttagccttctccttttgaagggttagtctgtaagtgatactggaagccatgtggtaagaaagaggacagaagtataaaatcagactcagaaagtaaaatctggcatatttggcatagatccattcagcttcgtatactttgttaggacccgagggcatgcctgattttcataaaatcgatgcactgttattaaaacaaacaggtgaaaatcacttttgttaaactacttgacaaggcatctgactaccttaagtgtgttataaattttgcaagtggttaaaattttatgcttatgaattcaaaagatagactttagttaaattaaaaactaatttatgtagatattttccctaataatatagcacaaatgggttttatttccaactgaaaagagtatttattaccatggatataactagaagaatcatataaatatatgtaattccattagaaaatatttttcttaaaatttgaaatgacaagaacttaatgaatcttaaatatctcttgttttattttgaaaaattgttttcataagatacaattgagcaattgagatttgttctcccagtatctgaagannnnnnnnnnnnnnnnnnnnnnnnnnnnnnnnnggccctaaaattaggtgaattcagctttgggtctatttcatccattctggaaggtccttgggtcactgatctgaggcattcttgatgtggttaggacttcccagcattattttttttagatcttgtccctctgggccagggcctcagtgtattggtcgggcttgacctggtctcctggtacatcttcccagtttttggtgactcccttcagtttctctgagagctccaggttacactccttctctgcttccaccagagctg

SEQ ID NO: 312150 - DNA, 386 bp, Homo Sapiens
atgagttttctagaaagagtactattttgttgaattttggcatagaggaaaagtaatgttttatatcttttgattttatacatgaaaataaaagatgatttttaccacttttaatggacctctgtcttttaggagcacatctgacttcacgttagagttatatattaagttttctcaagctacatattctttactgagatgcttaatatttcacatatcatataaaaggaagattgttctttaatttactaaggtaaaattaaccaaaagtaatttaaatttcagttattagtgtagcaatctgtaggaattaggtagaccctgagtttgaattggaaacttgcttgtatttagttgtgtttttttaaggtaaaataatgtgctta

SEQ ID NO: 312151 - DNA, 1065 bp, Homo Sapiens
  misc_feature (38)..(38): n is a, c, g, or t
gcatgtgtttgagcaggcatccaatcatcctttcctgntgggctgcattcttgctttcagacagaaagcagatgttcttgttatagagtatgtaaatggaggagacctaatgtttcatatgcagcgacaaagaaaacttcctgaagaacatgccagattttactctgcagaaatcagtctagcattaaattatcttcatgagcgagggataactttatagagatttgaaactggacaatgtattactggactctgaaggccacattaaactcactgactacggcatgtgtaacggaaggattacggccaggagatacaaccagcactttctgtggtactcctaaattacattgctcctgaaatctctaagagcgagcaagattatggttccagtgttgactggtgggctcttggcagctgctcactgtccgacatgaatggcacgaaggtctccatttgatatcgtcgggagctccgataaccctgaccagaacacagagcgattatctcttccaagttactctcggacaaaacaaattcgcataccacgttctctgtcctgtaaaagcctgcaagtgttctgaagagttctcttaataaggaccctaaggaacgattgggttgtcatcctcaaacagcgatttgctgatattcagggacacccgttcttccgaaatgttgattgggatatgatggagcaaaaacaggtggtacctccctttaaagcaaatattttctggggaatttggtttggacaactttgattctcagtttactaatgaacctgtccagctcactccagatgacgatgacattgtgaggaagattgatcagtctgaatttgaaggttttgagtatatcaatcctcttttgatgtctgcagaagaatgtgtctgatcctcatttttcgaccatgtattctactcatgttgccatttaatgcatggataaacttgctgcaagcctggatacaattaaccattttatatttgccacctacaaaaaaacacccaatatcttctcttgtagactatatgaatcaattattacatctgttttactatg

SEQ ID NO: 312152 - DNA, 527 bp, Homo Sapiens
  misc_feature (223)..(223): n is a, c, g, or t
aaggccttgcatttggaggtgattggattaacaattttattctgcatccactacaaaagggctggtgttttgttccaaatgtttagctgggagggctgtagggacccctgttacccccattaaacacagtaaagcatggatccagtcagccccctgctggcaggtgtgggcctggcaactacacagatccaaccccaccctcctgggtgcggccagagcaagngcagtcgcccgagctcctgaatcccaagaatggttctggcaagtactgctgtttgtttgtaggggcaaagagttaaaataaaacgaggttctgccatggctaagccttgtggaaaccagaccccaaagcccctgccatgccaggggtctcaacgccagacgcttgttatggaggcaccagcaggtagtggcccctgtaagcagggccagagtcgggacaaagagcaagagtgaagcagccaagagacagaggaccaggctggagccagtgggcacgcaggagcctgcctgggaaaagccggggg

SEQ ID NO: 312153 - DNA, 899 bp, Homo Sapiens
  misc_feature (131)..(171): n is a, c, g, or t
ggcgcgtgcctgtagtcccaagtagctgacactacagttgtgtgccaccacacctgggtaattttttgtgtttttagtagagactgggtttcaccgtgttagccagaatggtctctatcttctgactttannnnnnnnnnnnnnnnnnnnnnnnnnnnnnnnnnnnnnnnngagtgagccactgtgcctggcctgttttttgtttctttaacaatataatcattgagcgatattcatttttccaatcagtatgggatttatatctatttatacatgtttttaatcattttgatcaatgtttatagatttcaaggtacaaacctcactttttatgtttattcctaaatatttcttactttaagttctttagcaaatggaattggtttttaattttcttttaaaattgtttattgttaatgtatggaaattcaactaatttttggtgctgttattctattcttcaaatccactgcatgtgttttttagttccagttgcattttggttgactctttgtgattttcttcacagaaggtcatgtcatctacaaagaaatagttttactcctttctttctgatttggatgagtttgatttcttttgctatttcattgctctagctaggacagccagtattgattgaatagaaggggtgagagcattcttgcatcatgtgagatcctacaggaaaagcattccattttccctgactggttatttctgctgtggtcatttcatggatggtctttgtattgttgaggtaaatttccttctctttctattttgtttaggatttccatgatgactggatgttgaattttgtgaaatgctttttctccatgtattgagatgatgtggttttcatctttcgttatgttcaagtggtatatcacattgatttg

SEQ ID NO: 312154 - DNA, 756 bp, Homo Sapiens
agcatgagccactgcatccagacctaaatgcctactttcttttaactcagttttcattcacatgaaggaactccaaaaaaaattcaagtctgattattgtgataatggtataaaatgtttgtcaaaaaatgtcatcagtgaactaacaaaccagctcctttctaaattaaaatgcttctgaaataatcactataattttaatattccattttaaatctctgttgaaaacactggccatctatgaaaaaaaatgtagttatctgggattgtagattgaccttattcacaaaataaaattttaaatgaaaattaagtttcttggtgacttgctatctctcaagtgctattactgatataagtgattctttactatactgtatcagataccttaaggaaaggtaattgcctaaaaaataatctgtcaaaaatatgtgctgttatgcactgcgagtagaatcattacatttaatcatttaaagagtttaattattttctttcatttttggcagtgagatggggacactttctctaacatgaacacattaagaagatacacatattttgaacaagagattttaactttttatggcaaaatttactggtgtcaattgtattttaattgagaggttaacaccatgttgctgtctctattccactgaacaaaaatgactttgaaatagaggaaaagaatagccagttttaactggcgataattttttaaaatcacattttcacaacactacaacatatggagat

SEQ ID NO: 312155 - DNA, 763 bp, Homo Sapiens
  misc_feature (58)..(58): n is a, c, g, or t
ctttatcactccactaggtgttgtgtagttctgggaacattcaggacctctcttgaanatttcataacgtatggaaaatcctgcaccatgtgtttcgtagtcagagacagatttgataaaaagaaatggccctgaagacacaacaggaggaggggctatctttccacagaactttcccctaaaatgtccattttcattttctccatcgaagacttccacgtagtcatacttgcagtctctgtcctccaaatcgaagtgagggttgaagttgatcataattctctggtatgggtccggagcctgaatcagccattcgcatttttcacttgggtgataagaatgaggataaccaggagatgtaaggtacccggggctttcaatttttatagtatcgccacatttatcgttgcgaaaagcgccggccggggcgaggacgagggcgagcacggcgcagaggagcggcagccccctctccattctcccttctccgggtccgcaggcagacgcgggagaacgaggacgtggggggaaatgcagcaaagaggagaatctaagcgatccgaagagccccaactccgcctagagctgtacaatcctcagcccgtcttggagaaaagaaagcagcgaggcaatgcctggatccgagaggaacgcttctctttttgtgtctcaagtcgcctgcatcctgtcatttagctccggcttcctctcccttttcccacacttgttcctcttccaggagccactgcccgggccatgtctc

SEQ ID NO: 312156 - DNA, 893 bp, Homo Sapiens
  misc_feature (787)..(787): n is a, c, g, or t
  misc_feature (860)..(860): n is a, c, g, or t
ggaacccggaagtggtcacggaactcggctgcggctccatggtctgagttgtcagccgttgttttttcgtgctcgctagtcgccgccgccgctccgccatggggaagcgacagcaccaaaaggacaaaatgtacattacctgtgctgaatacactcacttttatggtggcaagaagccagatctcccacaaacaaattttcgtcgtttaccttttgaccactgcagtctctctctgcagccctttgtctacccagtctgcactcccgatggcatcgtctttgacttactgaacattgttccatggcttaagaagtacgggaccaaccccagcaatggagagaagctggacgggaggtccctgatcaagctgaacttttccaagaacagtgaggggaagtaccactgcccagtgctgtttaccgtgttcaccaacaacacccacatcgtggctgtgaggacgaccggcaacgtctacgcctatgaggcagtggaacagctaaatatcaaggccaagaacttccgggacctgctgaccgacgagcccttctccccggcaggacatcatcacccctccaggaccccaccaattctgggacaagttcaatgtctctaacttctatcatgtgcagaataacctgaaaataatagacccagatgaagagaaggccaaacaggacccgtcttattatctgaaaaatacaaatgccgagacccgagagaccctgcaggagctctacaaggagttcaaaggggacgagattctggcagccaccatgaaggccccgngagaagaagaaagtggacaagctgaacgctgcccactatttccacaggggaaaggtcagcgcttccttcaccntccaccgcgaatggtccccggagaccacacatg

SEQ ID NO: 312157 - DNA, 597 bp, Homo Sapiens
tgggtctcgagttctgccattgttgctgttagatgcgactatatttatgcaagaaaattagaatcaatatgttctacttaaaaatcattttgggaacacaaaattttatctccttaaaagtctctcccacatttataaagtataactgtgtctgttgcatgagcttctgtataacaagagatacacggttgcattgtattctcagctaacagaaagtgcatctttatgccagagattaggataacccaagattagcacaatgcaagttatacaagtacagttcttttgtgagaaataagttgattcctacagacctatgttacatattcaacaatcagaatttagaccgatattaagtccttttcaaaattcagttcccttatttagcaacactcactattaggaattgtctttgtagggaaatttaaatactttgcctctgttaacttttttacccccaccaagtggatttagggaacaactgattattattctaagtagtgagtagtttcatttcttctgtattccaaggtgtgttacatggaaccctgttctcataagatcagttttctattctattaatcattttagttacat

SEQ ID NO: 312158 - DNA, 1263 bp, Homo Sapiens
  misc_feature (57)..(159): n is a, c, g, or t
  misc_feature (161)..(175): n is a, c, g, or t
  misc_feature (284)..(340): n is a, c, g, or t
  misc_feature (918)..(973): n is a, c, g, or t
  misc_feature (1167)..(1167): n is a, c, g, or t
  misc_feature (1227)..(1227): n is a, c, g, or t
  misc_feature (1233)..(1233): n is a, c, g, or t
  misc_feature (1242)..(1242): n is a, c, g, or t
tacaaaaaaattgtccgggcgtggtggcgggcacctatagtcccaactactcagagnnnnnnnnnnnnnnnnnnnnnnnnnnnnnnnnnnnnnnnnnnnnnnnnnnnnnnnnnnnnnnnnnnnnnnnnnnnnnnnnnnnnnnnnnnnnnnnnnnnnnnncnnnnnnnnnnnnnnngaaagaaagaaaatacagtactttcacaggatgcaaaatctgcttatgtgcaaggtggaattctcccatgcacgggctccacaggactgaaggagttcagtgtgtgcannnnnnnnnnnnnnnnnnnnnnnnnnnnnnnnnnnnnnnnnnnnnnnnnnnnnnnnnatatgtctctttcctgcaggaagaggggagttctcaaaagagatgtgaaggaatactgggaatatcacattttagttagaaacagaattttatttttgaaaatagaaaaatcaaacaatatttttaaaatgcaatctattgatgtcatcatatttggtttggaatacctaagaatgcagtgactgaaatgtctgttctaaaaacataaacattttttgatatcagtaccaacccactttaatttatatgtgaataagagaacttcgcttgaaaaatacaaatatacatattcgagagcactaccaaattttgaagcttaatgtattcattgccaacgtactgtacataactaaaagtcattttaaatgttttctaaacagggactgatgtggatatcaacaatggtttcatcctaaaactgagttttagcatttgtttagtatatttacctatttacgttaaagcacattacaataatctttcacccattccttgtggcttatgtttattttcattttttttagagatggaatcttgctatgttgtccacgatggattcaaaatcctgggctcaagannnnnnnnnnnnnnnnnnnnnnnnnnnnnnnnnnnnnnnnnnnnnnnnnnnnnnnntccacagctgatgttttaataaagtgccactgagtatcagactgatcaaactgaaaacatcccagaacttcagaccaggttaagggggccaatgagaagatcatgaaaagtgacatcagatgaaagctgagatctgtgaaagtttcaaatcagtttttccaagtaagtccacagaccatttgatagggctaagnccagttctttacacaatgtaggcagccatcatgtctgaggtactaattgttctcttcccnctgggnttttgtggnattttctgttctgttaccttt

SEQ ID NO: 312159 - DNA, 360 bp, Homo Sapiens
cttttttctccagagaagatcaccccctattcttccaacactagattccttaaaaaccctagcagatgcagaagataaatgtgtaatagaaggcaacaactgcacatttgttcgtgacttgagtagaattaaaccttcacagaacacagaaacattagaattactactgaaggaattttttgagtattttggcaattttgctttcgataaaaattccataaatattcgacagggaagggagcaaaacaaacctgattcttctcctctgtacattcagaatccatttgaaacttctctcaacataagcatgtaagtcgccagctgcaagatcgaccttccatatcagttcggccctggggg

SEQ ID NO: 312160 - DNA, 575 bp, Homo Sapiens
  misc_feature (462)..(517): n is a, c, g, or t
agaaagtgcctggattttacaacaggaagatacagatcgaccttccatatcaagtaatcggccctgggggctggtatccctattgctaccatctgctccaaacagaaagtcctttaccaagaagaaaagcaataagtttgcaattgaaacagtcaaaaacttgctagaatctttaaaaggtaacagaacagaaaatttcacaaaaaccagtgggaagagaacaattagtactcagacatgatggctgctacattgtgtaaagaactgggcttagcctatcaaatggtctgtggacttacttggaaaaactgatttgaaactttcacagatctcagctttcatctgatgtcacttttcatgatcttctcattggcccccttaacctggtctgaagttctgggatgttttcagtttgatcagtctgatactcagtggcactttattaaaacatcagctgtggannnnnnnnnnnnnnnnnnnnnnnnnnnnnnnnnnnnnnnnnnnnnnnnnnnnnnnntcttgagcccaggattttgaatccatcgtggacaacatagcaagattccatctctaaa

SEQ ID NO: 312161 - DNA, 482 bp, Homo Sapiens
  misc_feature (20)..(20): n is a, c, g, or t
  misc_feature (315)..(315): n is a, c, g, or t
gaaaaagtgaacatccaganggaaaagctgaaggaccggtggaaagtttccaaaaccagtttttccccaaagtaaagtcccacagacccatttggaataggcctaagccccagttcctttaacacaatgtagcaagcccatcatgtcctgagtactaattgttcctcttccccactggtttttgtgaaattttctgttctgttaccttttaaagattctagcaagtttttgactgtttcaattgcaaacttattgcttttcttcttggtaaaggactttctgtttggagcagatggtagcaatagggatacccanccccagggccgattacttgatatggaaggtcgatctgtatcttcctgttgtaaaatccaggcactttctcgggccaaatctacaaatttttgcagctggctttgacttacatttttgcttatgttgagagaagtttcaaatggattctgaatgtacagaggagaaga

SEQ ID NO: 312162 - DNA, 1038 bp, Homo Sapiens
  misc_feature (18)..(18): n is a, c, g, or t
  misc_feature (34)..(34): n is a, c, g, or t
  misc_feature (40)..(40): n is a, c, g, or t
  misc_feature (48)..(48): n is a, c, g, or t
  misc_feature (67)..(67): n is a, c, g, or t
  misc_feature (136)..(136): n is a, c, g, or t
  misc_feature (159)..(159): n is a, c, g, or t
aaaaaagaatcccctagncaaagttttggaaccngtttcnaaaatggncaaaaacctaatggccttncccctccctgggtaaaaaggaacttcctgtttgggaagcaagatgggtaagcaaataggggaatacccnaagcccccccgggcccgattacntgaataagggaaaggtcggatctgtatccttccctgttgtaaaaaccccaggcactttcctcgggcccaaatcctacaaaatttttgccagctggctttgacttacatttttgccttatgttgagagaagtttcaaatggattctgaatgtacagaggagaagaatcaggtttgttttgctcccttccctgtcgaatatttatggaatttttatcgaaagcaaaattgccaaaatactcaaaaaattccttcagtagtaattctaatgtttctgtgttctgtgaaggtttaattctactcaagtcacgaacaaatgtgcagttgttgccttctattacacatttatcttctgcatctgctagggtttttaaggaatctagtgttggaagaatagggggtgatcttctctggagaaaaaagatgaccatcattgtaagggagaaatttgtaatccatgcaccaggaatactacttgttagtgaatgtgctcgagcccagcaccgtacactgaacaccaaggctctcactcttgagtctagggcaccatatatataaaggagttcggaacttgtcaaggcaatcctattgttcgtagtcaaatcacactgaaatccggaggcctggtgtgagaacctcacgagcggacaccgggcatttaatattttttgcacacccacacagccagggccaaagtggtcaaggcactctcctaacacagacaggatcttctgagttgcaattctttctgaaggaacatttttcacttgaaattccatcagaaaatttcctgagatcttgtgagcgctgaggtttctggtttcatctagatccaaaaacatgtccaaatcacatcctaacttcccaaaagtgttgacctga

SEQ ID NO: 312163 - DNA, 341 bp, Homo Sapiens
cacaactcaccaacatacgctccctgcctaggacagagtttggcacggaacaggagctcagtaaacatcggatgaaagagtaagttaagctgaaaggactggggggcagaggtcggcgatccttaggccttggccctgagaccccaggcgaggtcagcaacccaaccggggtgggacaggacgagcaagaggttctgctcacgcatgtccccactaacctggccgaggggctcccgcccggcttatcggactcggattcggactcggagtcaaagcccgaagctaggaactcgtccaccgtcagctccgccaggcgcctcttgcggctccccgcagctgcc

SEQ ID NO: 312164 - DNA, 1238 bp, Homo Sapiens
  misc_feature (1095)..(1095): n is a, c, g, or t
  misc_feature (1119)..(1119): n is a, c, g, or t
  misc_feature (1133)..(1133): n is a, c, g, or t
  misc_feature (1138)..(1138): n is a, c, g, or t
  misc_feature (1149)..(1149): n is a, c, g, or t
  misc_feature (1152)..(1152): n is a, c, g, or t
  misc_feature (1172)..(1173): n is a, c, g, or t
  misc_feature (1236)..(1236): n is a, c, g, or t
tacctgggttctgcgtgtcatacagtctgatagtcctgtcctgacggagacgacggtgttggcggccgtgctgcggcacatcagcgtgctggtgccctgcttcctgaccttccccaagcagtgccgcatgctgctcaagagaatggtggtcgtatggagcactggggaggagtctctgcgggtgctggctttcctggtcctcagcagagtctgccggcacaagaaggacactttccttggccccgtcctcaagcaaatgtacatcacgtatgtgaggaactgcaagttcacctcgcctggtgccctccccttcatcagtttcatgcagtggaccttgacggagctgctggccctggagccgggtgtggcctaccagcacgccttcctctacatccgccagctcgccatacacctgcgcaacgccatgaccacccgcaagaaggaaacataccagtctgtgtacaactggcagtatgtgcactgcctcttcctgtggtgccgggtcctgagcactgcgggccccagcgaagccctccagcccttggtctacccccttgcccaagtcatcattggctgtatcaagctcatccccactgcccgcttctacccgctgcgaatgcactgcatccgtgccctgagcactcggcatggggtggaagacgttgaataggccgaggaggagggcgaggaggacagcagcaactcggaggatggagacccagacgcagaggcggggctggcccctggggagctgcagcagctggcccaggggccggaggacgagctggaggatctgcagctctcagaggacgactgaggcagcccatctggggggcctgtaggggctgccgggctggtggccagtgtttccacctccctggcagtcaggcctagaggctggcgtctgtgcagttgggggaggcagtagacacgggacaggcttatattatttatttttcagcatgaaagaccaaacgtatcgagagctgggctgggctgggctggtgtggctgctgaagccccacagctgtgggctgctgaagtcagctccgcgggggagtctgaccctgacgtcagcagaccgagaccagtccnagttccagggggagcctgcaggcncctggccccttccnccacntctgccctccntcngcagacctcgtccatctgcnnccagctctgccttcactcccttaagtctttggaaatttgttcttttcctttgaagtcacattntc

SEQ ID NO: 312165 - DNA, 2769 bp, Homo Sapiens
  misc_feature (52)..(52): n is a, c, g, or t
ttccccaccgctttaatttctttcggtttcggatgcaaaacaaaaaattttnaaaagaaaatgtgacttcaaaggaaaagaacaaatttccaaagacttgggggagtgaaggcagagcctggtgcagatggacgaggtctgcagacggagggcagaggtggtggaaggggccaggggcctgcaggccgtccccctggaactgggactggtctcggtctgctgacgtcagggtcagctcccccgcggagctgacttcagcagcccacagctgtggggcttcagcagccacaccagcccagcccagcccagctctcgatacgtttggtctttcatgctgaaaaataaataataaagcctgtcccgtgtctactgcctcccccaactgcacagacgccagcctctaggcctgactgccagggaggtggaaacactggccaccagcccggcagcccctacaggccccccagatgggctgcctcagtcgtcctctgagagctgcagatcctccagctcgtcctccggcccctgggccagctgctgcagctccccaggggccagccccgcctctgcgtctgggtctccatcctccgagttgctgctgtcctcctcgccctcctcctcgtcctcttcatcgtcttccaccccatgccgagtgctcaggggcctcagtatccctctctccgagaatccctcggtgtcgtcctcttcagagctgttcaggtcaaagaggtctttaaattgcttcctgtcctcatccttcctgtcagccatcttccttcgtttgatctcagggaagttcaggtcttccagccgctctttgccactgatctccagctggatctcccggtcacgcagcttgcgccagtggctgtagtacaaggtcaagggtgtcccctcttcccgggtcagcttctcccaggcttccactgcctgctgctcagagacgccgaaggaaaccctctggcggcggctgcagatgtatgccgagttctcctgaaccttcccaagcagctgctgcacctgccggcagtagttggccaccttgcactcccggaggaacgacttcagctgcaggaccacaggcagcaccagctccgggaagccgatgcagtgtgcctggctgtgcaggtactccagggtgaggtcgtacagctgctccaccaggccgtcccggtacgccttctcctgcaggttgacattggacagcttcaggatcacggagaagttgatgggcttggagctcatgcgccctggcttcctgttgaagtcgacctgctggaacatctccaggatgaaaggcagcaccgggatgaaggcccccgagctccccgagagcagcgtcagggcacggatgcagtgcattcgcagcgggtagaagcgggcagtggggatgagcttgatacagccaatgatgacttgggcaagggggtagaccaagggctggagggcttcgctggggcccgcagtgctcaggacccggcaccacaggaagaggcagtgcacatactgccagttgtacacagactggtatgtttccttcttgcgggtggtcatggcgttgcgcaggtgtatggcgagctggcggatgtagaggaaggcgtgctggtaggccacacccggctccagggccagcagctccgtcaaggtccactgcatgaaactgatgaaggggagggcaccaggcgaggtgaacttgcagttcctcacatacgtgatgtacatttgcttgaggacggggccaaggaaagtgtccttcttgtgccggcagactctgctgaggaccaggaaagccagcacccgcagagactcctccccagtgctccatacgaccaccattctcttgagcagcatgcggcactgcttggggaaggtcaggaagcagggcaccagcacgctgatgtgccgcagcacggccgccaacaccgtcgtctccgacagacaggacaccagctgtatggccgagcccaggtaagccttgatgtccacacgaagcttcccccagagcgggctgctggacggctgcagcatcctgctgctatcctttgccacctttccaaacagcagcttctggagacagccaatgaggtctctgatgcagaaggtaaccagagcattgaatgcagcactgtccgtgacctggaatttgttggcctcagcactttcctggtcccctcgggtggtggccacagctgctcggaacgcctgtaccacttcatggaacagctttggagtgaggcgttgctttgctgcctgcttccatctctcaaccatggcgacggtcacaggaacagaattcttcttccccttcagccctctggggactctgtccccatcttctccttcctccgctccatcctcctcctcactggcttcctccagcacatctggcagggagtggaacggcccctcttcctcctcagagctgtccgagtcgctgaagtttagcaggctctggtcattctcctgcaggaacttgtagaactcggggtctctgtccttcagccgagagagctggtctttgtgctcagaggcacggcctttacgccggctggccgaggggctcccgcccggcttatccggactccgggcagcctcgcgtgcttcccgtgtctccgcttgtggagaattttcggactcggattcggactcggagtcaaagcccgaagctaggaactcgtccaccgtcagctccgccaggcgcctcttgcggctccccgcagctgccatgacaccaacccgaagcgtgcaccccacttccggccccagaat

SEQ ID NO: 312166 - DNA, 520 bp, Homo Sapiens
  misc_feature (278)..(289): n is a, c, g, or t
aacgcagattattagggcaacaaaaatgagggggatggctgcagccgatatttatagacttgcttatggcactgccatctgtgtaccttgactaaaatgcattatcctcattatacatctaaatgaaatcattctactgataaaagtatatgtaggatctaaaataataatctaaagcctctggtccaaataaccaccttctacattaggctggtcctttttagatcctcctggtcctgttagcaaatgctatcagagcatcttgcattgttgtaccnnnnnnnnnnnngtcagaagtgctggtctatcagattttctattacattacagatcaacactggtccagttcagatgaatctgacagtcctttcattctaatatagagtggttgtatccagttatgtgggcaaggtagatatacgtaactcgggatgtccctcttttattagtaaatgtgttaactcttgtatagtgcatataaagattttcggcatcaaatttcttgacagtacagtattga

SEQ ID NO: 312167 - DNA, 758 bp, Homo Sapiens
cgcgggtgatcaccctattttatatgctttatacaaatcttagatttgccacccatctatgagtggggccaaaatcatctccacttctgaatacccctttgggctcagggtccgacctttagcagggtctccatgacggtcattttctgtggcccacgaccgcacttcacacccatcagagattcctgggtatttgtgcctccctctgctggcctggagggcaggaactatgtcttattttgtagcctgggtcttccaaatgcttagcacacagtaaatgccttataaatattgttgaattgatacccatcctaagggaaaggggcccactgcccattgccgccttaggcagttaagaccacacaatacagaagtggttaagacgcaatacagaagtggttatcacagacaacagatgtcagtttttggagtcaagatactaaatcagtattaagcacaatccataaagataagtgatctatcacactggtctattaacactgttatcatgcctattaaaggctgtctagggaagtggtgagtgtagctctaagtagtattcattggatggagaaatgccacagatcctatggggagtatttaaccttccaaaggaaccctagggaggaaattttctagcaagactgcatggggccctgggggttttagcagaacatctttgtaaattcttaggctttccagatgtgaaatctcgggattgaagcatcgcatcagaatcactggtggtaccagttaag

SEQ ID NO: 312168 - DNA, 1205 bp, Homo Sapiens
aaacacttctgtgtgagagggaaaagggacgaagaggggataaaccacagggcaaagaattaggaagtgttagcaaatgctaccatgtggaacactcaactttatttgctttatttatatatttaacaattctaaagtatttacttcttgctttgacaaaaaatgaaaaatataggagcactgactgactcctctttaggagaaaagggttatatgtacagctatggagagttacggttcctcctttaacaaaggaaaatattaataaaaaagtgcttcatcgatcaaaaaagagctaagagctgcaagcatttattcacactgtacatcagacccaagaaacccgtatcataacctcttggcacctgtcactaggaaatgcacaatcttcaattagaccaactttttccctacctgcacgactagatgacacagaatgtggaaaagaactacaccctgtttcaccacattcaaactgtgttgccactggaagtcagagacgtgctcagatgctctgggctttgcctggactgagagcaccagggaagccttctgggccacgccttaaccacacccaggcatgcacagaaccaccttcctgagacacaccttgcccttggtcagggaactgctaccaaggggaagaggaatacagggcagggccagagcttaagcattccctgaccttacccctagtcctcaccatgatccaccctgtcaccagttagcagctttcagcagagtcaagcatggcctccccaagagggagggcaggcacaaaacatggatgccaagattacaaagcacaaacctaactcttctccaaccttccccacacctacctccacaaatattcttgatttaaggctgtttttggaccatatcaaagctcactgaggaaaggtgccctgaatctcctcaaggccatgtcacttctctaaggaaccctacgaagtcaccaagtggcccttacactgctggccagcagcccagacaagtgcccactcagacagccaggagtggcaaagggggactgctcagcagttattcctgtcccaagaagagaagaggagaaaggctgattgtatgggacctgctcccttttccaggggcttgtaactctaaaggctgattctaccccttaaagggaagatccatgattggtttggtttgggaacgggggatttctggaaccctgagtctgg

SEQ ID NO: 312169 - DNA, 670 bp, Homo Sapiens
  misc_feature (160)..(160): n is a, c, g, or t
  misc_feature (191)..(191): n is a, c, g, or t
aattgggtggggaaatcccggaggccgcttagggtccatggggcccagggttttcgcttaggaaaccaaggtttatggcccccagggttccgggttagccttacgggggggcgcgcggcgcccaaagggaattggggttggaaagcttttttgggagggnccgtgggggggcccggcatgtgggtttgtgnaggggtgggttgggtgtgtccggtggcaatgtccattgcaaagctcatccagtctgctgtccatgtgtccgagcttgaattagttctgcatctgtctttagccgtctatatctctcctgggtttcctttatcactttctttagttcttcaactcgctcagcagtcaatttccgaacaataacatcttcaacagtttccaccacttctcccttttcacctcgtttccgttttggtgtctcagtggtctctaaaagctccgagtgctgggaagcacaatgtttttgagagaaccagtctggagggcggccaggttctgcaaagggcttgattgctctgctaactgatacccaattttgatcgccacttctcatgacagaagatgctaaacatagcttctctcggatggaccatggctctgtggggccagtgcttagcagcttgtgtttgcccgttcccgtcgccatcttggccccgaaccc

SEQ ID NO: 312170 - DNA, 555 bp, Homo Sapiens
ggtatgaacttggctttgagcattaagcctgcaactcaaaattcagcaaatcagaacaaagaggacatcaaatccatgaatggggaagagaaattggaaaagaaatctccatctcctgtgaaaaaatcaatggaaaccaagaaagtggccagtcctgggtggacgtgttgggagtgtgactgcctgttcatgcggagagatgtgtacatatcccacgtgaggaaggagcacgggaagcaaatgaagaaacacccctggcgccagtgtgacgagtctttcagctcgtcccacagcctgtgccggcacaaccggatcaagcacaaaggcatcaggaaagtgtacgcctgctcgcactgcccagactccagacgtacctttaccaaacgtttgatgctggagaagcacgtccagctgatgcatggcatcaaggaccctgacctgaaagaaatgacagatgccaccaatgaggaggaaacagaaataaaagaagacactaaggtccccagtcccaagcggaagttggaagaaccagttctggagttcaggcctccccga

SEQ ID NO: 312171 - DNA, 1808 bp, Homo Sapiens
  misc_feature (24)..(24): n is a, c, g, or t
  misc_feature (29)..(29): n is a, c, g, or t
  misc_feature (37)..(37): n is a, c, g, or t
  misc_feature (40)..(40): n is a, c, g, or t
  misc_feature (42)..(43): n is a, c, g, or t
  misc_feature (45)..(45): n is a, c, g, or t
  misc_feature (49)..(49): n is a, c, g, or t
  misc_feature (56)..(56): n is a, c, g, or t
  misc_feature (60)..(60): n is a, c, g, or t
  misc_feature (62)..(62): n is a, c, g, or t
  misc_feature (68)..(68): n is a, c, g, or t
caaacagaacagagtccataaggngagtngcgactgnctngnnangaangcaagcntgtntncctggnagccaggcgctgggtggcaggacaccgtgttggggggtgcccagtgggaggtggtgtggtctacacccagagaactaaaggggtgaccgcagtcactgctccctaaagccctctgctctgcacctcccgccacagctgggtgggcagtcagtgtggcctctgtccaggtggtgggggcatccggggaccaggtgggggcgcacgcaggagcggtgcgtttcaggctgcaggtgccgtctgcccgtctcacttccggcctctccactgtgctggacaccctctctgagcagctttgctggaaagagcggagagcctgctgcaaaccaggcaccttgtaggcaggcaaggaggcagagtcctcaccagcccttccagagccaggccagttagagagggcggccctgcagagtcctatgtccaaacgcagaaggcgcagaagcagagcagggggagggccggccagggcctctgccaggttagaagtcaccatcgcgctcccccaggggctgtgccgcctgctgcctggcagcctccaggaaggccagctccttggcttccttcttctggtttcgcgcctcatactccaacctgttggtgatgatccgctggacgatgaggtctgtggtgaggttgctgccactgtcaatctgacggaagatgccccttctcttgggctcctggtatgggtcggagccatccctgtcagggataatttctgtcttgccgtgacacaccaggtccaccttgaagtgacttaggagctctgctgtgaccgcgtacggggctccaatcaccacttctgacacgtaccggcaggccagcacgctcagagtccgttcatgcagattcatgatggggtagttcttccccttgtagtgattgacctcctggtcaaagtgtaagcccgcgatgatgtagggcctctctgccagcctgtgcaccttctccaggaagtccacatgcccgatgtggaacaggtcgaaggcaccagccacatagatgactgtctcccctggctggggctccttcccagaagcaaactggatgatcttctgagatgtctgcaggaactgggataccccggtccaggggttccgcccaccagggcacttgccaaaactgtctgcatactcccggtactcagaggacatctcctggctgctgtgatgggctttggttaccagcagcatgcggcccacgagggtctgtgtgtggacaccccttgcgtgcggcttgcattctctgtacctcccagcctgctttacttcctcatagtgtgtcccggccatcctaccagtcagcggtgatgtcatttccgtgatacacagaagtcacagttgtatttgtccagggtctctagtgtagtgacgtagggagccgctggcaccacctcgtccacccatttgatggcctgcaccatcttgtatctctcctcctgagtgtacaccgggggccccttgtgcttggcgatctcctcatcggtgtgcacgcctacgatgaggtagtcacccatggcccgtgcactggcgcagctggttggagtggccgtaatgcaccatgtcatagcagccatcgcaccacaccctcacggcgcgcctgccccccgggcccggctgctctgcgccgcctgcagccccgcgcccgttccggatcatggccccgcacgcggcggcgtcgtacagcctggcagctcccggcgacgcgtgggtcgacatatcccggaattccgggccggtacca

SEQ ID NO: 312172 - DNA, 861 bp, Homo Sapiens
accgctgcccttcccggttttgggtgcatggtgggggcagggccaagagggtctccttgctgagtggttccctggtccttcccagcagggctggagaccccgcgcagcactgccaccagctttattcggttgtaccaaagagatttccgtcagccatgtacaaacagaacagagtccataaggagagtggcgaagctgccgggaaggaaggcaagcgtgttttcctggagccaggcgctgggtggcaggacaccgtgttggggggtgcccagtgggaggtggtgtggtctacacccagagaactaaaggggtgaccgcagtcactgctccctaaagccctctgctctgcacctcccgccacagctgggtgggcagtcagtgtggcctctgtccaggtggtgggggcatccggggaccaggtgggggcgcacgcaggagcggtgcgtttcaggctgcaggtgccgtctgcccgtctcacttccggcctctccactgtgctggacaccctctctgagcagctttgctggaaagagcggagagcctgctgcaaaccaggcaccttgtaggcaggcaaggaggcagagtcctcaccagcccttccagagccaggccagttagagagggcggccctgcagagtcctatgtccaaacgcagaaggcgcagaagcagagcagggggagggccggccagggcctctgccaggttagaagtcaccatcgcgctcccccaggggctgtgccgcctgctgcctggcagcctccaggaaggccagctccttggcttccttcttctggtttcgcgcctcatactccaacctgttggtgcctcgtgcggaattcgccacccaggcctcgctcgtt

SEQ ID NO: 312173 - DNA, 998 bp, Homo Sapiens
  misc_feature (205)..(205): n is a, c, g, or t
gacccgggtacggggtttccatccaccccttttgacacgtaacggcaggccagcacgctcagagtccgttcatgcagattcatgatggggtagttctcccccttgtagtgatgacctcctggtcaaaaggtaagcccgcgatgatgtagggcctctctgccagcctgtgcaccttctccaggaagtccacatgcccgatgtggancaggtcgaaggcaccagcccacatagatgactgtctcccgtggctggggctccttcccagaaggcaaactggatgatcttctgagatgtctgcaggaactgggataccccggtccaggggttccgcccaccagggcactgggagcagccttctgaggaaagtatgtccccggcgggtatcgggtgagggggcttgccaaaactgtctgcatactcccggtactcagaggacatctcctggctgctgtgatgggctttggttaccagcagcatgcggcccacgaggtctgtggtggacaccccttgcgtgcgcttgcattctctgtacctcccagcctgctttacttcctcataggtgtcccggccatctacagtcagggtgatgtcattgccgtgaacacagaagtcacagttgtagtgacgtagggagccgctggcaccacctcgtccacccatttgatggcctgcaccatcttgtatctctcctcctgagtgaacaccgggggccccttgtgcttggcgatctcctcatcggtgtgcacgcctacgatgaggtagtcacccatggcccgtgcctggcgcagctggttggagtggccgtaatgcaccatgtcatagcagccatcgcaccacaccctcacggcgcgcctgccccccgggcccggctgctctgcgccgcctgcagccccgcgcccgttccggatcatggccccgcagcggcggcgcggacagcctggcagctcccggcgactccgagcctcgtgccgaattcgccacccaggcctcgctaccta

SEQ ID NO: 312174 - DNA, 322 bp, Homo Sapiens
cgaaggctggcaagaagccatttattcatgaggcccatggggtggggacagagctgctgtcacaggtaagcacagcctgagaggggccagagacggcaaccacgtggagaggtccaagggtttttgcaggagtcttggtaaggctcccctccttcccacgactccaggccgctggtgtcagcatcacacatgggagatgagacgtccctgcacagccttccctgggcttcctgggcacgaggtttagctggacatgatgtgcttcacaaatgcttcatagttgatgcagccattggagtcctcttgcccagccatcaacttc

SEQ ID NO: 312175 - DNA, 1169 bp, Homo Sapiens
  misc_feature (726)..(736): n is a, c, g, or t
cttcttgataatgccaaaagctttgggaacccctcgctggatgaaagaagcattcttgcccctctctatcagtgttgcatcattcgggtgtccacctggaacagactgaactacctaaagaatggtgtgctaaagtctgccttaaaatctgccatggcccatgaccccatctccccagtgctctctgatcctcatctggacgccgtggaccagcggctcctgagtgtcctggccaccgtgaagcagtgcaccgaccagtttgggatggacacagtactggtggaagacaggatgcctctctcacacttgtaattctcgacacaaaataagtgaaacttctttttacaaagatagagaaacagcacaatcaattccaaatggtatgagatggattggaagtggccagcagcaagttctggtgacgggacagggtggccttggatgtctttggtattttctgtagtagaaactaaagcaaagaccacaagtttcagagcatggagacattcctgctgaatcgccttctcacctcctcggcaattgctcattctagggttgggtatcatagttggtcagtcttaattcccatgccaaaggacaaacaggtgtgacatttggatagatgaatactgggattggctctggagcatgtgttttgagttgaaccttgcagtcctttctctacgcccgtggattttgtggaagcactttgcaatctctttgtcnnnnnnnnnnnaccagaactagttacattgtaatgcttactgtcctacagagtggcagcaaataaaaccttgcattccatcaagccaaaatagcacactctgttagaggagatacatgtttaagatagaattggagggaaggacaaaaacagaaaaatgtttgggcttttaagccattgggtagtattgttttgatgatcttagaggagggaagaagagagagagacccaatggtagaaccagaatcagggagatgactgaactactgaaaaacaggttcccttgtatttaggatcttaaggtgtataaaaagcaaacatgactttgcacctaagtaaattctgcattctcatagttgtgtcccaattaaccaaaaagttgtctctagagaaaatactattacagtctaagcatgattctctgtggagactaattttttcccct

SEQ ID NO: 312176 - DNA, 544 bp, Homo Sapiens
attctgcattgcatttggttatctctctttagtgtattgtagcatggaaattccatgaaagtatgctctcaaattatggtgggtatcagaatcccctgtggaacttagtaaacctacagaagtgtagccctagtttataagcctgggcctctgttttttattatttctccaggttttgtgtctgtgataccaaccagagttagagagccactggtctagaacatttctcattttaaaaaaatgacattgaattttgagtagcccagaaatgttgttggctatgtgtttagatttctttctttatagtgtcatttagccttgttcttggttgtattttctttacaagggaaagtaagtccagaggctttcttaggtctagattaaacgttttggggaagaatactttgtaggttatttctatgtcatattgtactgtcagaaaacatttaagtacaggtccttgcattagtgaaactaaggatgatcatttgggtaagctggtaaccgccgtaagtccattgtaaagatttagtttgtagtgggt

SEQ ID NO: 312177 - DNA, 241 bp, Homo Sapiens
ctttgaccctttccagtttctgaagataaagcaggaaataatcttctctgaagatacttgataaaaatttccaaaacaaaacacatgcttccacttcactgataaaaaatttaccgcagtttggcacctaagagtatgacaacagcaataaaaagtaatttcaaagagttaagatttcttcagcaaaatagatgattcacatcttcaagtcctttttgaatccccgtccgtaatggccgat

SEQ ID NO: 312178 - DNA, 1778 bp, Homo Sapiens
  misc_feature (7)..(7): n is a, c, g, or t
  misc_feature (14)..(14): n is a, c, g, or t
  misc_feature (20)..(20): n is a, c, g, or t
  misc_feature (37)..(37): n is a, c, g, or t
  misc_feature (44)..(44): n is a, c, g, or t
  misc_feature (48)..(48): n is a, c, g, or t
  misc_feature (108)..(108): n is a, c, g, or t
  misc_feature (130)..(130): n is a, c, g, or t
  misc_feature (148)..(148): n is a, c, g, or t
  misc_feature (159)..(159): n is a, c, g, or t
  misc_feature (186)..(186): n is a, c, g, or t
  misc_feature (206)..(221): n is a, c, g, or t
gaaaatnttgcgtnttaggnagcagagaggactggcntcctggnttcnatccgcatcaccttggtgtgcaggtcagagcataggggagagggtggtgctgtcacacanccacaaacaggcctctcctcantccctgagctaagttctnacaacaaaggntaagaatgaggcagagaacacaatggntggaagagaaatgaagtttnnnnnnnnnnnnnnnncccagagggtgtgagcctctgtcagtgcaacgggcttccgggttccctgtgctgaggaaggatgggcagcaagacccaagtttcctgggattttgcagactcaggagtgaagccaccgcccagatgggatgtgtaccttaggttagtgtttgttcctcattagataaccagtgagacaaataagcagggtcaaaggcagccgtcctccgcgggacaagcaggctttggggaacaggcagcacattctggaaacggggctgctgctaagggccgttgtttttcttcccccaaaccaggatgccaatgtgaatgcacaggacgggaataggtccgggaaggctctctggcagctcagcccgctgaggacgcagaaaatgggagggccgcggcgtggagcgcgtggcttcaaggcaggagcaagcggccttggactcaccggtgtccatagcgtcccttagcaggcgcctgcgctttcccttgggcagcagatgggccttggcttgtcttggaagaggcgcttgtggacggcatggaggcagaaactttgtggggtgcatagaggcttggcgaggccttacctgagtaagagatttcagaaacggaaggagaggatctcacgcacagtaggctttgtacactcaacccatgctgcaaaaaccactctagactcttggaactcctgggacttgttcatacacagctcactcagacggctaaggaaagacagactcccaaaagatcaaactagctaaaagaagcccctctgccatcaccaggaagaatggacccgtgttggtggaatctggaggtttattttctgcagccctgtgccttgggcatcacctggagatgctgtgtagtgctgtcgtgggcgtctaaatttcttgaggccacaaggagtctcatggctatagagagggtctaggggccaatgtcacctggcatgttggtcacattcccaggaccacactgcctctgggagctgaaggtccctggcagcccaggagccctggaggcagggctcgggacaggagctaggagagttcaaagcccgtgttcatgctgatggcgtacgcagcttctcgcggaggacgctcttcttgctgtagttgggcagcttgagcaggttgaagcaggtggaggaggtgggcaggcggccgcctggctcccgcttggggatggtgaagaagccccggaggacgctgcccagagtgtccccggtgtcctgatcgtccgacacctccacgcagcggatggagaatggaggcttgaggtaggcgaatcccaggagcgggggtctggagcagctggtcacgaacttcagaaacatagctctctcatccggtgtgaagtcagaggccagaatatcccagagccagatgatgactctgtgacttccatggaaaccaccgtagtagactgtgtgcttctttaaatcttccagatcaatctcagcattgtcgccagagatgagacgctgcagttcaggagttgagaacattcggatccactcgggtttgataatggaacggaatccgctaatgagggcagctgttt

SEQ ID NO: 312179 - DNA, 944 bp, Homo Sapiens
  misc_feature (27)..(27): n is a, c, g, or t
tcctcgttggtaagaacagcgtcaggnccccaggtcagtgatgtcccccatcatagccgcttgatggaggtgaggtttttatagaactcggagtccagagaagggcagttcatcccaccgaggctatagaagacgctgtggtggtgcccaagcagttggctcaggaagaaggatgcaaatggcacgtccaccacaattccttcatacacagctttccccagcatcttccccacaaactcgaagagctgcaggtaattctcatggatgtaggatgtgggtgaggggtacagcctctcatccccactggttgtcttgaacagattgagtgctgggtcaaaaactctcttgatgatctcttccaagaactccttaaaaacaccgtcttgatcaatccctgcttcgtccaccccgaggtcattgacaaacttcacacggatgacccccttcatggcgtgctgggagagctgcctaagctgctcgtagccgtcctccagcatcctggaccggcggatggtgatgtgagtgacatgcggggaggcagagctggtttccaccagccccagtttctccttctccttggtaaccatggttcgaaacagtagaactctgtttttgtgagggatgacatgtgggatgtactgcaggatcaactgtgcccgttttctgtccctgtcgagttcttggaagagcacgctaggtttgagatcctttcgcagccagtggtcctcgggggtgaagcgccgccggcagtcccgctcgtacagcaccataagccacccgtggacagactggaacagctccaaggtctcacccttggcgttctctacaattccatcccagatcatcttaaacacaaaagaattcaggaaagaggagatagtgaccagctcttccagtttgaatgaaatctgttcttcataaacttcaatgtcatcaaggattgt

SEQ ID NO: 312180 - DNA, 461 bp, Homo Sapiens
  misc_feature (13)..(13): n is a, c, g, or t
  misc_feature (33)..(33): n is a, c, g, or t
  misc_feature (40)..(40): n is a, c, g, or t
  misc_feature (89)..(89): n is a, c, g, or t
  misc_feature (97)..(97): n is a, c, g, or t
aaccatcattaanaggcaacctaaaacccaaanacggccnactgggtttttaaggggaagtaggaactctcatttgaaccaccccacantgggcccngcttgagacacacagagctcccgtaaaccctgaaggctttccttctcctttggccaaatgaggaaatgaagcagcgagcctggacgtgcacagcctgatcgtccgacacctccacgcagcggatggagaatggaggcttgaggtaggcgaatcccaggagcgggggtctggagcagctggtcacgaacttcagaaacatagctctctcatccggtgtgaagtcagaggccagaatatcccagagccagatgatgactctgtgacttccatggaaaccaccgtagtagactgtgtgcttctttaaatcttccagatcaatctcagcattgtcgccagagatgagacgctgcagttcaggagttga

SEQ ID NO: 312181 - DNA, 510 bp, Homo Sapiens
tcatggatgtaggatgtgggtgaggggtacagcctctcatccccactggttgtctgcaaggcaaaaagacggggagaggcagaggtcaagtgccttgcaaggagcaagcccagctcttcacttcttgaatctggctgctgtcagatctttctattggcagcagagcaggtggatggcagggatcaacgcagggagcagagaccgagatgtgggggtggtgctgggcctggacttctggctggtggtcagctctgttaggacacagccattcagcacatctactccatccagacctcaacatgcacagccccagaaccacaactttggagttctcctactaaatcatctgtttagtttgtctcttgattctaatctgttgaggccttcctggcttctggttccatcatctaatgcattcctagtacttggggtgctgaggtttttatttcagagcagtgactataaaaacagtgctgaacagcacagggcccagggaagagtctgttggcc

SEQ ID NO: 312182 - DNA, 876 bp, Homo Sapiens
  misc_feature (516)..(595): n is a, c, g, or t
  misc_feature (854)..(854): n is a, c, g, or t
ggtattaagtggatatactgttattcttaaagatgtttgaaatgaatatacctttctaaatatctttttaaaataatacattaaatgatactgctttagaattcatgaactgcatctcatgagaatatgtagagatgacgtgggcaggtaaagtaaaacttcaggttgaatatcctatgataatttaaaaatgacaaaatagtgtggtgaataatagagcttgagcactttaaggcaccatagggacccctccaatgtaatgatgacagtgctgaggtgcagagaagttaggtaatcagcccaagccactactctaaggacagaccctatctacttttcctaatttgtcagaagactgcctatgatactactaataaaaagtcctatgaaattggtattgtcattattttacaaataaaataatcttcaatttttgtttcctctatgcatgggttacttagtattttgtaatttgaatttcaagcataattaaaaagaaatcaggtatctaggctnnnnnnnnnnnnnnnnnnnnnnnnnnnnnnnnnnnnnnnnnnnnnnnnnnnnnnnnnnnnnnnnnnnnnnnnnnnnnnnnatcttttgttgatctctacactgattgtattctctcttttattctatgaaagttaaagattttttctgatactacatattgtcagttttttaaatactcagtttgtgccaaaagaaacattcggcaactgatatctgctggttctgtatgtatctgtcaagtccagatttgtccattatggtgtatgaatctaataggacctccaccaatggtaatacctggccttcttggaaatcattaccggggatagctaatattnaaatatcccgggttggcccgga

SEQ ID NO: 312183 - DNA, 749 bp, Homo Sapiens
  misc_feature (704)..(704): n is a, c, g, or t
gattgtatttttgacttggttattaagattattaaaattagcccttcctttgaaatatgacatcagctttgctgttctaaatttaaaattagttgcttcatcagtaccacacttccagtttctataccaagccagtctcctcagttttcccattagaatggacatgttctgttcagcgtgtcatttctgtaatgcttcatgcagagagcttggtcatagtattaaagagaaaatacagtgaggtcaccatgtctccagagctaaaagttagtgaacaagaaagaaagtccaaaatgaagtgatgagagaatgaggacttttcttatattctgcatatttcttggaagtcaggacaagatgaaaagaaaaacatccaaaagaagtgaaattggtgacagaatgagaggagcaaagcataccagtgtagtgagtggaatgtttgaatgactttgccaggtcagagcaagtaatatttctgtatctgagtttttgtttgtgttttgataaggctaatgaaattgcattccaggtaggggttaacgtcaaatttccatggctggtatctgtgcttttggcatatcacagtgttgtgtcactactacaaggtaaagcatctacagcggagaatgagcttgaaaatgagagacctattgtgaattaatatgcccatgagagcatatttaataagcctctataacatgcangccaaaccagacattcactcctgcagagaaatgttgccctggaga

SEQ ID NO: 312184 - DNA, 686 bp, Homo Sapiens
  misc_feature (662)..(662): n is a, c, g, or t
tttcagcttctccccaaactcgaacttgtcaatctccagctggtgcagggtctcccagagctccttggccttgtccctcagttgttcttcaccaaggtgatcgatgttgagcggcttgcgtctctcagccagaatcttcttcttcatttcccgggctgtctgcttcttgcctctcttctggtcagccttggccaggtagctgctgtagttggctcccatggaagacagagctttcttcttcttcaggtcgtcctctgccctcctcttggcatcctcctcctcccttctggccttttcctccgccagtctgttctggcgctccctctccttctctgcacgaatcctctgctgctccgctctctctgcacggcgcttctcgattctctctttgagagcgaccagctcctcctcctccttcttccgggcttcaaagtggctgtcgatgagggcctggagctccattaggtctttgttctgacgcttcttctggatgtcatcgaagtccactttctccccttctgggatcttaggagcagtgagtttgggtctcggtttctcctcttcttcttcgtactgctcctccacctgttcaacttcctcgtcagacatggtgaaggtgggtggtttctgcgggtcgagtgtgagaagggctggagctcccntgtagacagcaccggctgcaggcc

SEQ ID NO: 312185 - DNA, 551 bp, Homo Sapiens
gaggtgcaaatagcttgctttattttgttgttactatctcaaggcggtccaacaattataactaacaattgaatttatacttgcatgaaaagaactacatcaaattgacattttgggcaattagtaatattgtttaaaatttaacaacagctttattttgttgttgttctttactttttgctgtggctcattgcttaggtgcccaggtttttcaggtgcaattaaaatttagaactaccacacaaaggcattggctgcactctgggacctccaagagttggcactgctctggcataggaatacttgaatagcttggttaaatgaagggatggccaggagatgttacttttccaagctattcaggcactccttatgtcagagacagcgtaaaatgatcgaacaaagtgttggccgttacactttgctctggtaatatttgtcatgataattttgtgtgacatcatcagagaaaatgtaagacgttaaagtgttgcttacaggagggtaaatgcaagcatcaccaatgccttacatttgtgattcagtaggta

SEQ ID NO: 312186 - DNA, 588 bp, Homo Sapiens
gaatccctggaattattattactcccagttcctaagggaagagcttctaaaccctccaattcggcctcagaagaggaaagtggaaagcctttccagtgtccaatatgtggtttggttattaaaaggaagagttactggaagcggcacatggtgattcacacaggtttaaaaagtcatcagtgtccgctctgtccattccggtgtgctcgcaaggacaatctcaaatcccacatgaaggttcatcagcaccaggaccggggagagacctttcagtgccagctgtgcccttttacttcctcacgccacttcagcctgaaactccacatgcgttgccatcagcacttcctgaggacagaagccaaggtgaaggaggagatcccagacccagatgtcaagggatctccccacctcagtgacagtgcctgcctggggcagcaaagggaaggaggagggacagagctagtggggaccatgatgacgtctaacactccagagaggactagccagggaggggctggcgtctcgcctttgctggtgaaggaggaacccaagaagatacgggctgcccacctcctttactttgaatgc

SEQ ID NO: 312187 - DNA, 733 bp, Homo Sapiens
  misc_feature (22)..(22): n is a, c, g, or t
  misc_feature (107)..(107): n is a, c, g, or t
tccataaagagaggtatattcnacactttccatcacatagaggtcaccacagaatcccattaatttgggggtatgttctttatcttgaagtatcaccatgagaaganattcattcagttgaagaagtgcccatgccgactttgcttctcccaaggaaacctggccatctttgtctccatcagccaccgtcaagatgagattgaccagttcagagaggtttccttggtcacccaattttgccttaaagagactatagaccatttctttaaatttttgtacagtagttcctctagttggcttatcaaatagcactatttcttttcttggttccaattcagttccaaaatcaagatgaagcgcttgttccatttgacatttcacaacacctggtagattatcccaaatccctaaatacatctgattgttgggcttggtggataaacattttccaaagtaaagagtttctgtaacacaaaggctgttacatgcaggcccatcaataactccagtcttgtacttgtcacatattattttcttacagtcctttcctctgcataattctgtataggtagaatactgcacatatataatccagcttccaacaaaaaccactaaccaggaaaagaaaagatatttcatccgcacatatgagaagcgagcctggaggtaatagggtttccttagccaggcccccggacagaactcctcgccatggtaatcacacatcgccccc

SEQ ID NO: 312188 - DNA, 557 bp, Homo Sapiens
gtgccataccaaggtcattgtcctagttaggaatgtgggacccttacactgggatggggacatctggatcgatactctagaactctagaaaacctggacaccccagccccgccaccctcccccacaccctgaaacctctaagcccactcctccctgttaagggccggtgctttgctcttgtttgaaggtcatgcccaggcctctgccacctccccttaggatctgtgctcaccacccctcctggccgctggaccaagaaggtcagcaggagggtgctgggcctgccagagaagaaagaagatgagctgcctggggggagcaggagtgtgcctgagacaagggcatggccatatggggctctgctatgacctaggactcagcacccttgcagagcccccaggaagcagtgcccgtaggctgccagctcggtcggctctctgaaacttcccaggaagccatggcccacaaggaagagaatagcaacctaggggcaaccgtggcagctctgcaagaagcgaacgaacgcccagagaagcgggtgtgggagagtggaaatg

SEQ ID NO: 312189 - DNA, 1124 bp, Homo Sapiens
  misc_feature (576)..(588): n is a, c, g, or t
  misc_feature (722)..(735): n is a, c, g, or t
tatttgaggttgttaatgttattacctatatataaatgttgaggactgcagcacttaaaattcagacctactatttagtttccttttgatagcgtaatgttcatttttgtttttgtgtggtatgatttcaggtagtagctgtttttttccttattaagagggcagcatgtttgctatagctgaattctgctgtctgatttttcagaatgatctagcttcaagaaaagcaagcagttagtagtgcttaagaaaaattgattcagtatctaatggatagttgataactgtcacagcacagcattttatatactgttaagtgaaactgcaatacaatctaagtttattttgagagtgtttgctgtataattggacttaataaaatgtttagaggtacagtaggcatgactttggggtagataataaaatgcaaaatgctcattgattcatgatgtggttttatcttagcttgggcaaaccatgcagtatttaataaatagtagcagaacttttactatagaagcttgaaaagatgtgagttctttgtgtgcaatttttgatttatgcatgtgagagggnnnnnnnnnnnnnaagtatttttacattgcagtacttgttttgcttgttggtgatgtttgcttatttaatacattccgtcagggacagaaattacatgcttttttttctttctaggaagtgtgttgagttccccccttccccgacannnnnnnnnnnnnngggtggtggtgatggtagtggttatgtctgtttaaatgaagttgcttttacagcaccaaagacttaatcatccatttcctatataaaggtagctactttttgcatagacctcaagtatattgtagtgtaaaggtggaatttaaggaaaggtattaaattgaggctgtgttttagcttacaggcaagtaataaattgtatcatttatcttgaatgtatcatagataagctgctatataacgattgccacttcagatagctgtgaaattaggtgattaactagttgttatttagccttctaatttctgtataagtctaattacatgaatagaaattggggttttgattttttactttgcttttctgtttggagtgtcattgtaactactgt

SEQ ID NO: 312190 - DNA, 1381 bp, Homo Sapiens
  misc_feature (46)..(55): n is a, c, g, or t
  misc_feature (300)..(311): n is a, c, g, or t
  misc_feature (1291)..(1291): n is a, c, g, or t
tatggtaacttttaatgatctattcaggcagtagagctcttaatgnnnnnnnnnncccactttctctcaagcatgtatttaggggttgttctcaattgtgctgctgattacctgtcttatgtaactacttgagaccatctgcaagagacatgatttagtgtgtctgtaattcaatcttcgctgtgtgtggtagaagcagtagtcacttttgtaagccagtctcttcatgcctaaaagacactaccagtcacctttgattcgcgacttttaatttatgattatacttagcctcctcctccnnnnnnnnnnnncccaagttgacttgactttgcttttttccccccaagtagaactaatgctagcttccagcttgaaagtaaaactccagtgtggagtgaattttgtgtctaattataaacctgtaaccaaaactcagacatctggtactggtctttgcattgagattggtccctgtaaaaccccctttaaaagcatattgcatttagtacagagctcttttttgaaatgaaggctggagatgtgcatttttcacggtgttaactggttgtatcttattagcaaggagattggggttttgagtgtttgcgtgggtggtttcaatttgccagggaacagtggcaggctgctagcaaggcagtgagaagctcttggcagccaaatgggtgcattcagggctgatttatagagacccttggcttctccttctcctactccctgtctttctggcattttgtagcttgttagattttctgccagaggggtgggtcagagcagtggaggggagacatcgcccatgtgcttctgctactggtccttgggctgggtggttggtagaggagatgttgacactatgagctaagggttggcttttgtaattacctgaatctgaaaggaatgcctaaggttaccttggggtttctcttctggtgagatagggttcctggtttgagtaagttaatgtcctggatatttcttgtggcagggggtggtcaaagagcctgattgctgacccagtctcaggcctgtggtcgatgacctctcggtagtttcaaagggggctggagggggatatttgacttgttttttcgaaatgtagccttctaaccctcagtctttagaagctgggtgggactcttagtggtcctgcagcgtatcctaaaagactacctttgaaacagggattcttgtatggccaggatcctgtctgggaaaccagaaaccctacaccctcccccttcagggaatgcttgagttccattttgagcaaaanggaggcaaaattcacctgtagccttccgccccgggatttgtggggggtgaccagcccaggcggtggggggtgtaacctgccttgagtttg

SEQ ID NO: 312191 - DNA, 755 bp, Homo Sapiens
  misc_feature (722)..(722): n is a, c, g, or t
ttcgaccagcaatgtgaagagacgatattctccaaggtgaggaccattgcgagcctaatgtgtgactggggatcacaacaagagtgtgatactcatgctgttcagatagcgctgatggccctgaagctgatgcagctctcgaatgaagttatgtctccccatggagaacctatcaagatgcgaattggactgccactctggatcagtttttgctggcgtcgttggagttaaaatgccccgttactgtctttttggaaacaatgtcactctggctaacaaatttgagtcctgcagtgtaccacgcaaaactccatgtcagcccaacaacttacagattactcaaagactgtcctggtttcgtgtttacccctcgatcaagggaggaacttccaccaaacttccctagtgtaatccccggaatctgccattttctggatgcttaccaacaaggaacaaactcaaaaccatgcttccaaaagaaagatgtggaagtatggcaatgccaattttttaggcaaagcatcaggaatagattagcaacctatatacctatttataagtctttggggtttgactcattgaagatgtgtagagcctctgaaagcactttagggattgtagatggctaacaagcagtattacaatttcaggagcccagctcccaatctttctccctgtttaacatgacaaaatgtactcccttcagtacttcccctcccccntcggctgtcccccccggttatcctttcttggtg

SEQ ID NO: 312192 - DNA, 771 bp, Homo Sapiens
  misc_feature (74)..(74): n is a, c, g, or t
gatctcaaagcgtttcaaagctattaaagacctctccttccaaaacccctgctctgctggggcaagtgacaaanacaacactctcccatcatttcctctccttgtttgtatccctccttcctcctacactttcagacttttggggaaaggggtaggagcccatgaggtgtattttatgggcgaatgatgactcttgcacattttgtaagtggtagttgaagctagtagtttttaaagtgaccccacagaggatttctttctgattggtttattaccaatcctttagttctagtgtctagggatatgcaaagtcagaaaaaaacagtcaccacccaaaagaaaatagtgcagacaaggtggtaaggccatgctttggccacaaaataagtgcactgtgcaatatcaagtgtttcagcaagtttttggaatctcaagcacattttgacaccttattatgtggctcagtacacccaggatatgcaaatcaaaagtgtttgcccgcatacgtgagttgtatggcatgacctcctaatgctaagtggaagctgatttggtgaattcaccaaaactactgctatacatgtaatcgatgaaaggtgatggtgacctgtccgcctttctccttggcattgtttggtgagttagtcatatcctaaggtcactactgcctagctcttcttagcccaggcatatggctcctaattgctcctagtatgacctaaacatccctaacacaacagggagcaggggagcatgctagttttttccccc

SEQ ID NO: 312193 - DNA, 1094 bp, Homo Sapiens
  misc_feature (7)..(7): n is a, c, g, or t
  misc_feature (11)..(11): n is a, c, g, or t
  misc_feature (28)..(28): n is a, c, g, or t
  misc_feature (32)..(32): n is a, c, g, or t
  misc_feature (55)..(57): n is a, c, g, or t
  misc_feature (60)..(60): n is a, c, g, or t
  misc_feature (63)..(64): n is a, c, g, or t
  misc_feature (74)..(74): n is a, c, g, or t
  misc_feature (78)..(80): n is a, c, g, or t
  misc_feature (83)..(83): n is a, c, g, or t
  misc_feature (146)..(146): n is a, c, g, or t
tccttancttntccccccaggccagttntttnagacttcctggctggagggtcannnganctnngggaatccanctcnnnttntaagaggtctcttaaggcagctgggagatctttcttgtccgccatgactgtagtttcgtgtcngatacaggagcctcaactgcattgatgagcagagagcgaagcccccactctctagaaagtgcagggcgtggatggtggctcccccaggggagcagacattgtccttaagctggcatggatgctgctccgagtccagcagcatcttggcagctcccagcaaagcctgggccccgagttggattgccaggcgccgtggcaaacccatcttcaccccaccatcagccaatgcgtccagagccatgaatgcataggcaggcccgctgccactgagccccgtgacggcatcgatgaggtcctcttccacctcagtgcagaagcccacgctgctcatgagctgctccaggagctgcccatcctccaccagggcatgggtgcccgtggcgtacactgtagcgccttcctgcactaccacaggtgtgttggtcatgcagcgaatcactttgggggctggctggaatgccatcagcttcttctccacagagctgatggtgacaccagccgcacaggagaccacgatgtgtctggcttgcacgtcggccccaatctcatccaggatgaaggggatgatatgtggcttcacagccagaaacaggacgtcgctgtgcttcaccgtctccttgttgctgcgtgtcaggttcacacccatcttcctgagcgcggacaccgtgggcaggttcatttctggggagctggctattatcttgtgagccgacaggaatcctgcggccgtgaagccccgcgccagagcataggccagctggccggccccgatgaagcccacgctcatggtccgcggttcacgcctcctgggagccgcacgaaccccctcagcgagggaccggaagtaacgctaggggaagggcggacagcgcaggggcgaacgggcggcgtgccgaggaccggcgagctaacagcagcttctgggatggtgcaaccctattctccccc

SEQ ID NO: 312194 - DNA, 1591 bp, Homo Sapiens
tttttaatttaaaaataaactttattaaagcagttaaacttagcattaaataacactctttaaatggtacacctatgaagcaagagttaaatataaacccagtctaatcctgtacacttgtgattaattgtgacaatcttaagttgctcacttctttcccatttaccaattcagagaaagcccgtttcctgttttctcctcaccactttgccttggcatcacaccaaccctgcctcgggcttcagctgcagatcctccccagcccctcctcccagctgggctgactccagtcccagccccagtctccaccaactgaggcagcgtacgcaggggttgtgtctggcttccagcatctaccaccccttcagagcaacttccaacatgggacaggagaggaagctcgcattgcttggtctgaacagatttaaggaggttttatcacaaggacctgaaaacttcctaagcatgctttctccttgcacagctgaggaggggcaatgttgggagcggggcaggggggtggcaggggcggcaggggctctcaactaagggctctgaatcacagaggggacagatgctgccttagtccttcttgcctcccagggccaggcttcttgtgaggagcttccctgggctggagggggtcagtgtggagactgtgggggattccagcttcactctgtctaagagggtcttcttaagggcagctggggagatcttttcttggtcggccatggactgtagctctcgtgttcggatacaggaggcctcaactgcattgatgagcagagagcggaagcccccactctctagaaagtgcagggcgtggatggtggctcccccaggggagcagacattgtccttaagctggcatggatgctgctccgagtccagcagcatcttggcagctcccagcaaagcctgggccccgagttggattgccaggcgccgtggcaaacccatcttcaccccaccatcagccaatgcgtccagagccatgaatgcataggcaggcccgctgccactgaggccccgtgacggcatcgatgaggtcctcttccacctcagtgcagaagcccacgctgctcatgagctgctccaggagctgcccatcctccaccagggcatgggtgcccgtggcgtacactgtagcgccttcctgcactaccacaggtgtgttggtcatgcagcgaatcactttgggggctggctggaatgccatcagcttcttctccacagagctgatggtgacaccagccgcacaggagaccacgatgtgtctggcttgcacgtcggccccaatctcatccaggatgaaggggatgatatgtggcttcacagccagaaacaggacgtcgctgtgcttcaccgtctccttgttgctgcgtgtcaggttcacacccatcttcctgagcgcggacaccgtgggcaggttcatttctggggagctggctattatcttgtgagccgacaggatgcctgcggccgtgaagccccgcgccagagcataggccagctggccggccccgatgaagcccacgctcatggtccgcggttcacgcctcctgggagccgcacgaaccccctcagc

SEQ ID NO: 312195 - DNA, 801 bp, Homo Sapiens
aggagaaactgaacgttttcccctagaacctggcctgggggggctttttttggaggcccagcaggattttgggcagcccccccgggagggcctggggcccccgaggggggattgcccgggcgccttgggaagtcccttttttcacaccccccatcagccagggcatccagggctgtgaatgggtaggcgggggccgctgcccttgagcccccgtgacggcatcaatcaggtcttcttccacttccgtgcagaagcccacgctggtcagcagctgctccatgagcttcccgtcctccacttgggcgtgcgtgcctgtggcatacacggtggccccctcccgcaccacgactggagtgttggtcatgcagcggatgaccctggggggctggccgaaacgctgacagcttcttctcaatggagctgatggtgacgccggccgcgcaggacaccacaatgtgtctgtcctcaatgtcggcgcctatttcatccaggatgaaggggatgatgtgtggcttcacagccaggaagagcacatcactgtgctgcaccgtctccttgttgtggggtgtcaacttcacccccatcttcctgagagcagaaactgtggccaggtccatgtctggggagctagccattatcttgtgggcagccaagacgcctgctgctgtgaagcccttggccagggcaaaagccagctggccagcgccgatgaagcccacgctcatgctgtccggagacccctggcccaaagcccccacagatggcaccggctccccctcgtgccgaattcgccacccaggc

SEQ ID NO: 312196 - DNA, 1433 bp, Homo Sapiens
ggtttctccctgaatggagggcagggagggcccgggagggggcttggatcccccctttggtgagcttcacagagggggtccttgaccttgcctctcaggaaggaggcccgtgccagctgatgctggagtaggagtggggtgaagaccctccgggctcccgagctctagaggaaggtggtcctgacatggtttgggagcagagaagaaaggaggttgaggttggggaatccacccctgttctgggctgggaagcacttgcagaccacagagatttccagtgggaagtgatgtggcccctccctggctatgtccctggctggcccctgcgctgatcagagccacagaaagtgggccactttggggaccccctagtccccctagtgacaagagaagagaaggtggtggcaggatggtggtcaggcaggacgtgtcaatccttgcccgctggggccaggctgcgggggagcagcttggtgtggccagaaggcgacagagcggtccctgcaggggagtccagcttcaccttgtccaggatggtcttcttgatggcggctggtgacacctgctcctggtcagccatggactgcagctcccgtgtgcggatgcaggaggcctccacagcgttgatgagcagggagcggaagcccccactctccagcacatgcaaggcatggatggtggccccaccaggagagctgacgttgtccttgagctggcctgggtgctgttctgagtgcagcagcatcttggcagcccccaggagggcctgggccccgaggcggactgccaggcgccttggaagtcccatcttcacacccccatcagccagggcatccagggctgtgaatgcgtaggcggggccgctgccactgagccccgtgacggcatcaatcaggtcctcttccacctccgtgcagaagcccacgctgctcagcagctgctccatgagcctcccgtcctccacctgggcgtgcgtgcctgtggcatacacggtggccccctcccgcaccacgactggagtgttggtcatgcagcggatgaccctgggggctggccgaaacgctgacagcttcttctcaatggagctgatggtgacgccggccgcgcaggacaccacaatgtgtctgtcctcaatgtcggcgcctatttcatccaggatgaaggggatgatgtgtggcttcacagccaggaagagcacatcactgtgctgcaccgtctccttgttgtggggtgtcaacttcacccccatcttcctgagagcagaaactgtggccaggtccatgtctggggagctagccattatcttgtgggcagccaagacgcctgctgctgtgaagcccttggccagggcaaaagccagctggccagcgccgatgaagcccacgctcatgctgtccggagacccctgcctcgtgccgaattcgccacccagg

SEQ ID NO: 312197 - DNA, 2270 bp, Homo Sapiens
  misc_feature (138)..(339): n is a, c, g, or t
  misc_feature (395)..(465): n is a, c, g, or t
  misc_feature (512)..(550): n is a, c, g, or t
  misc_feature (559)..(576): n is a, c, g, or t
cgggagacattgtcgttgtttaagaccccaaaccccgggttagggcccagagactttattcgccccgtggggcatgagggccgatggttatccggggattagaagaaccgaggttatttgggcggtggttccagaaannnnnnnnnnnnnnnnnnnnnnnnnnnnnnnnnnnnnnnnnnnnnnnnnnnnnnnnnnnnnnnnnnnnnnnnnnnnnnnnnnnnnnnnnnnnnnnnnnnnnnnnnnnnnnnnnnnnnnnnnnnnnnnnnnnnnnnnnnnnnnnnnnnnnnnnnnnnnnnnnnnnnnnnnnnnnnnnnnnnnnnnnnnnnnnnnnnnnnnnnngatcacaaaaaaaagcccgctcattaggggggttaaattcccgggtactgcagcgnnnnnnnnnnnnnnnnnnnnnnnnnnnnnnnnnnnnnnnnnnnnnnnnnnnnnnnnnnnnnnnnnnnnnnnaccactttgtacaagaaagctgggtcaggaaacagctatgaccatgnnnnnnnnnnnnnnnnnnnnnnnnnnnnnnnnnnnnnnngcctcgagnnnnnnnnnnnnnnnnnnagattacattgacattttaatcagtaaggcagatgccctccaagatgtgggcgggccttgtctaatcagttgaaggcctccactattccacccacagtaaccaccctcccacacaggcagggcctccctcctcatgtggcagacagaagtcaggacactgggggctggaaaccaacttataaaactgaaagggccaggacagaactgatagcaccctcccagggaggtcaggagcaggaggtggtggccacagaagttcaccagcagcccaaggagccctttccccaaatgtccatgggatctgcgtgcttggcagccaagaggggctgtggcccttcacgctggacttgggatgcctggaccctctggcccttctcacacgggaaggagaggtttctccctgaatggagggcagggaggggccgggagggggcgtgggatcccacctctgctgagccttcacagagggggtccttgacctttgctctcaggaaggagcccgtgccagctgatactggagtaggagtgggtgaagaccctccgggctcccgagctctagaggaaggtggtcctgacatggtttgggagcagagaagaaaggaggttgaggttggggaatccacccctgttctgggctgggaagcacttgcagaccacagagatttccagtgggaagtgatgtggcccctccctggctatgtccctggctggcccctgcgctgatcagagccacagaaagtgggccactttggggaccccctagtccccctagtgacaagagaagagaaggtggtggcaggatggtggtcaggcaggacgtgtcaatccttgcccgctggggccaggctgcgggggagcagcttggtgtggccagaaggcgacagagcggtccctgcaggggagtccagcttcaccttgtccaggatggtcttcttgatggcggctggtgacacctgctcctggtcagccatggactgcagctcccaggagggcctgggccccgaggcggactgccaggcgccttggaagtcccatcttcacacccccatcagccagggcatccagggctgtgaatgcgtaggcggggccgctgccactgagccccgtgacggcatcaatcaggtcctcttccacctccgtgcagaagcccacgctgctcagcagctgctccatgagcctcccgtcctccacctgggcgtgcgtgcctgtggcatacacggtggccccctcccgcaccacgactggagtgttggtcatgcagcggatgaccctgggggctggccgaaacgctgacagcttcttctcaatggagctgatggtgacgccggccgcgcaggacaccacaatgtgtctgtcctcaatgtcggcgcctatttcatccaggatgaaggggatgatgtgtggcttcacagccaggaagagcacatcactgtgctgcaccgtctccttgttgtggggtgtcaacttcacccccatcttcctgagagcagaaactgtggccaggtccatgtctggggagctagccattatcttgtgggcagccaagacgcctgctgctgtgaagcccttggccagggcaaaagccagctggccagcgccgatgaagcccacgctcatgctgtccggagacccctggcccaaagcccccacagatggcaccggctccccctcgtgccgaattcgccacccaggcc

SEQ ID NO: 312198 - DNA, 716 bp, Homo Sapiens
caatggaaatgaacaggggcccaaagggaaggcaaggcgaagcaattggcccccaaggacccggtacaacagctccctcccttcctcctgctggaggtgtcgccgcagctgcacctccttctcccagggcctcacgcgtgagaagcaggtcttctgacagcctgccttgacaggaccacctggttgcggcttcggacatggaggtcctcattttcctgttgcagggtcgtaattttttcctccaatatcagatttttctctttcactgtttccatgaggatcagccgcctgtccagctcatgaatacgctcattcttcatctcgatgacaaagtgtaagctctccagctcctgctcccagaactggctggggctcccataatcctggatatgtttcttatagtttcggctcagaatggactcctccaccctcttcattttggcctggaaagcctccagctgtgaggtcagtctgtctatggtctcctgctgggtagaactggcctcccggaaagagtgggtaagcgcttctttctcctgttcatatgaggcccggaggacttgcagggcctcttcgttctttccttccaggacccttcgctgctcatccagtctgtctcgaagctctagctccctttccttctccacctgtgtgcccatttcttcttttcctcctcatgttgctggagaattctggttatatccttctggtgccgc

SEQ ID NO: 312199 - DNA, 512 bp, Homo Sapiens
gctttttcatctctagctataactgtccagctctgtgcatcagaggaggctgagcggcaccagaaggatataaccagaattctccagcaacatgaggaggaaaagaagaaatgggcacaacaggtaagtccaggtgcccccaccccctgtctttctcctgctcagctaactttggtgaatcccagagtgagtgccctaccttaaggtttttgttgcctgttgtaagagtccccttactcattttccccaggaagggagtcctttatctgttgaacacatatttttatcagggcactgtgtgctgggcacattggttaaaacaagcagagctggcagctgctttcacgaagctgagagtctatttgggaagagtaaaagctgttgatgccactagattaattgcctttctgggcccacctcatggttgggtgggaccacggaactcgttctggctgatgcgttatagaaagaagaaccagtgtcacttactagggcaagcatttagttgccag

SEQ ID NO: 312200 - DNA, 692 bp, Homo Sapiens
gagataaaaattacataagggactttttgcctgcattctagtgcaaaacatctgaagagctgtacacccacaagggtgactatttcccctgagtggccgtgttgtcccagtgccctggttcagtgtctcctgagtggatgacaggtcttcattctctatcttgaatgtattatggttactaatagttttataatggaggtctaagaattaaagttgtgtgggagtttcaggacaaaggaaggctaaaagtttgtcaagacgttgagcgtattttggttacctatgagaagggttgtgacagtgtacagtggcagctgttggccacgctgcagaaatgagctggagctcatgggttttcagctacatttttcataactttgtagtacatccatcttgagtaaattaagccacaatttggtacctagggtctcaaactaaaatttatttttataaatgaattttaaaagaaaaaatatctacttcttttaaagttagaagaaaattaacctgctgacaggcaacatttttggggtgctttctgcactagttttccttgtaaatgatctgagtgagtaggtttggtttctgacgaaagtagactggagggtagcattgtatgccctcaaatgtctcagtgtgtttggctcatacgtgggctatactttattattttggtatgcttacaaatgact

SEQ ID NO: 312201 - DNA, 675 bp, Homo Sapiens
cagtgactgaaagcttttttccaggcctgagatgctcattggtgatttcaataatagaatttagactcttagtgtttctccattgccccagggctgtctgtgtctattaatgatggctccagtgaaatccatggcttttactgcaccttatctttctgcttccagcatcatattttcctgcttcctgagagacatggaatcatcagtggtgttcatcaccaggccctgggggcaagaccacacaggtcccagaatccctgcagtttttcttaattaggtgacatctggtgccgtccccagtgcacaggtccaccctggtcagtcagcctgttgccatgctgtgagcctgggctgtgcccgaccttgtaggcttcttgcagtcactggttctgtgagccttggaggctcttccacgggggtgattctgacccctgggagtgagaaggagagggcctttctgcagttcagccaagaataaaggagactcagggctgagctccctccttcacttcttttttgtttccttgaggttgttcttggccctcacagtacctctgtctaggcttggagctctggaagtagacacaacccgggttcttctgccccaaggcctcctctgttagccagaaggatcctggctgtgcagtggaaatgacctcgtgcaaagacattatc

SEQ ID NO: 312202 - DNA, 356 bp, Homo Sapiens
gtatacatcttcctgaatccaaaattctcctgttatccacacagtttgaaatctcatattaaacagtggtaaatttttaaacattaggacattagctggctgcttctataaatgtacctgtattgtctgcctgctccttttgtggagatgtgttttgtattggatgtttgggccaatgggaggcttcaagctacaacatattttcccactttaaataatatttaacatatgacaaaccccagacaaggcttttaatatgtataaagaactgcagtgttaggtggtttatttgcaaactgttttcagtgttgtccatttttatggcacctttaacaatattcttgtttccaaagtac

SEQ ID NO: 312203 - DNA, 549 bp, Homo Sapiens
tttaggttacatatagatataatcttttcccccactttcccatgccctttaatgcacacgacaaccaaccatctatgcaaagaaaactttccagagggcctgaagaatggatgtggatttgtgcaactcctgcctactttcccttctttctcacctaccttttattctagaggttttttcttccatcgctaattatccaacactcggttctcttgcatttacagacccccaaggcaggtccagtgggtggcatcaaagaggaagcctggaggtgttcgttggttccctgagaaggctgaggacgtacccttgttaagtgggggatgtatgtgctctgttgaaatatcagctgttgtagttgccaaagacgttcctgagccaccagaagccttttctcttcagtccaaccatgtgttcaccttgccccaaaggtcagaactaatattaacaagccactgcagaatggggaaattaaaaccagccatggagacaggcaagttctggatttcgctggtgctgagtttcagatcgatcttcagtgtaaactgg

SEQ ID NO: 312204 - DNA, 440 bp, Homo Sapiens
  misc_feature (36)..(36): n is a, c, g, or t
  misc_feature (56)..(56): n is a, c, g, or t
  misc_feature (399)..(399): n is a, c, g, or t
aaaccctacccttttaaatccctaaaagggtttttncccttccccatcggcctaantatccccaaacactcgggttcctccttggccattttaacaagaccccccaaggccaggtccccagtggggtggccatccaaaagaggaagccctggaggtgttccgttggttcccctgaagaaggctgaaggacgtaccccttgttaaagtgggggatgtatgtgcctctgttgaaatatcagctgttgtagttgcccaaagacgttcctgagccaccagaagccttttctcttcagtccaaccatgtgttcaccttgccccaaaggtcagaactaatattaacaagccactgcagaatggggaaattaaaaccagccatggagacaggcaagttctggattntcgctggtgctgagtttcagatcgatcttcagtgtaaatgg

SEQ ID NO: 312205 - DNA, 698 bp, Homo Sapiens
  misc_feature (175)..(198): n is a, c, g, or t
tagttcactacaaaaaaacagaaaagaaggccataaagaggaaatgaggggccaaaaaagtatatgacatatagaagaagtgttaaatggtagaagaaagtccttccttaattactttaaatgcaaatggattaaattttccaatcaaaaggcagaaattggcagaatggacagnnnnnnnnnnnnnnnnnnnnnnnngatagtgatatgctgtctacaagagactatagctccaaagacacaaatacatggaacacatagaaaaagatactctgtgcaaaaatttttttaaaaaaagagaaccttaacacattgtaaaccaccttgacctaagagacatatagaaaactacagtcaacaatagcatgataaatattttgctcaagtgtatgaggaacattctccaggacagaccatctatcaggccacacaccaattctcaaaaacattaaaatcatactaagtatcttctctaatcacaatggaatgaacttggaaatcaataacaaaaaaacagtgggaaattcataaacatgtagaaattaacacactcaaccaggggatcgaagaagaaatcacaagagaaataaaacatgacattatctagcaattctactcaagatgtatacccaaaagaacttagaaacaggcaatcaaatacatacttgttatgtcaatgtttactgcagcattattca

SEQ ID NO: 312206 - DNA, 688 bp, Homo Sapiens
cagagctaatttctcttactatgaagttgaagaatatcttccaagtttgaaaaaattttccgtagctctgagggtgacagaattccttctctggatactcgctgatagaacacttgatcaagaaccttcagtgttcgaacatgagctctttcagtgtagaacaattcattaatcacttcctgtcttttgatttcacaaggttttagtcccagtaacacttctcgactaacaagctgctgccagttgggtggatctgtctctaagtcattttcaaattgttcatcctcactttgactttctccaaaagctacactgtcaaacctatgaagaaaaaagagtgaattcaatttgaagactttaggtggacaatgagaaacagcacaaatctttatattacaataaattctaatcagattcctgaatctgacttagcactgaaatttcatcctctcctacaaatggctgttttatacatacttcaaaatacagcttttgaatgaccagtgtttcttaagagctttcttttatactacataacagattggtatacagggtttcttttcctttaaaatgaaactttagaggaaaaaaggttacgtttcttaaaatgcgccttattgaaagctgcttaagatttacttacttttgaaaagggctttggtgtcccatgttcagtcacccctaaaac

SEQ ID NO: 312207 - DNA, 566 bp, Homo Sapiens
ttggtcaaaatatcaaagagaaaacaaaaccccccacaaacatgctagggatacaaagaatacaaagaaaaaagtgatgaacacaagcacacagtatgaagtgcagcacttgttcaacgcaaaaaaagcagattttggcaaagcggttattgttagatgaattgccctaatgtgaaaccataatctgcatactcaaaaaggagaagaaaactcagaacccagcaggtccttggcgagtcacaatctagtaactttaatatgttcaatatcatcttgtagagtacaactaattttttacctcagactttggatatctaagctgtgcacatatgtatgcaagtggggagcatgctatgtaatgctggtgtgggttgaggggtttggaggagtcagaccatctctacctttttaagttttccatgaggaaagctaagcttttttccaaactcctaatctattaactgcactgaaactcaaaattaacaggtaagcagcagctcagggccatccaagataaaagtggttccaatttccccaatatacagttactatggctctgacagact

SEQ ID NO: 312208 - DNA, 946 bp, Homo Sapiens
ctggacgatggggcagcccacgtcatgcacagggaggtgtggatggccgtcttcagctacctcagccaccaagacctgtgtgtgtgcatgcgggtctgcaggacctggaaccgctggtgctgcgataagcggttgtggacccgcattgacctgaaccactgcaagtctatcacacccctgatgctgagtggcatcatccggcgacagcccgtctccctcgacctcagctggaccaatatctccaagaagcagctgagctggctcatcaaccggctgcctgggctccgggacttggtgctgtcaggctgctcatggatcgcggtctcggccctttgcagctccagttgtccgctgctccggaccctggatgtccagtgggtggagggactaaaggatgcccagatgcgggatctcctgtccccgcccacagacaacaggccaggtcagatggacaatcggagcaagctccggaacatcgtggagctgcgcctggcaggcctggacatcacagatgcctccctgcggctcatcatccgccacatgcccctgctctccaagctctactttgactcgctacccctggacgatccttggcttggacgccatgtatgtcatcatgtggatcacctacatggggtttttgcttgtgttttttggagcattttttgcagtgtggtgctacagaaaacggtattttgtctccgagtatcactcccatcgatagcaatatagctttttatgttaatgcaagtgacaaaggagaggcgtcctgctgtgaccctgtcagcgcagcatttgagggctgcttgaggcggttgttcacacgctgggggtctttctgcgtccgaaaccctggctgagtcattttcttctcgctggtcttcattactgcgtgttcgtcaggcctggtgtttgtccgcatcacaaccaatccagttgacctctg

SEQ ID NO: 312209 - DNA, 1267 bp, Homo Sapiens
tgacgatggggcagcccacgtcatgcacagggaggtgtggatggccgtcttcagctacctcagccaccaagacctgtgtgtgtgcatgcgggtctgcaggacctggaaccgctggtgctgcgataagcggttgtggacccgcattgacctgaaccactgcaagtctatcacacccctgatgctgagtggcatcatccggcgacagcccgtctccctcgacctcagctggaccaatatctccaagaagcagctgagctggctcatcaaccggctgcctgggctccgggacttggtgctgtcaggctgctcatggatcgcggtctcggccctttgcagctccagttgtccgctgctccggaccctggatgtccagtgggtggagggactaaaggatgcccagatgcgggatctcctgtccccgcccacagattataggccaggtcagatggacaatcggagcaagctccggaacatcgtggagctgcgcctggcaggcctggacatcacagatgcctccctgcggctcatcatccgccacatgcccctgctctccaagctccacctcagttactgtaaccacgtcaccgaccagtctatcaacctgctcactgctgttggcaccaccacccgagactccttaaccgagatcaacctgtctgactacagtaaggtcactgatcagtgcctgtccttcttcaaacgctgtggaaacatctgtcatattgacctgaggtactgcaagcaagtcaccaaggaaggctgtgagcagttcatagccgagatgtctgtgagtgtccagtttgggcatgtagaagaaaaactcctgcaaaaactgagttagtccaaggataagtatgtaaatacggggcgggctctgggaggggagagacttcacaaaaatgagggctttcattttccatttggaacgtgggacaacagaccacaacgcaattccattttgcaagtctttccaagggagaagctgttcaaccacccgtttgggggatgagtgagccgacactttcctttggtctttctgaatcgtaactgcactgctttctggaccatttctaaggcggcctttacaagaagacattcctgtcggagaggagggtggacttcggagaaattctcatactgaagcatgagcttaggagtttctgttagtggtagtggtgttttggacacttcattccttggcaacaccgaggttttgggtgttgacataaagtgggaccacacaccacatctgctgccgtcttgacac

SEQ ID NO: 312210 - DNA, 664 bp, Homo Sapiens
  misc_feature (80)..(141): n is a, c, g, or t
ccttttttgtgagtaccatgcctcctaaacaattatatgaggatttgagacagttagaactcagtggtgttatccacacnnnnnnnnnnnnnnnnnnnnnnnnnnnnnnnnnnnnnnnnnnnnnnnnnnnnnnnnnnnnnnaaattaactgtattatagaaatgggaatggtgttaggctagaagtagcccaaaggaaaaaaggataaatttgctaaagaaattcacaaaatttaagttgtctttaaaaagtaggattaatacgtattattttaaatcatgaaagttttcaaaatcattaaataagtagtttttttcttttcttgcccaagtaccgagctaatattttcttgattgtgtttgactctttccatctcgggagtgacaggtagaggggttcccttgcccatgtcttctttgtataacacctgtgcgataagaaagcaaccagaaaaacaaccatgagtaacatttcatttgttgaaaggttttaagggtaaggtcagcttccttgttaagacaaaacacagttgtccaaggagccagaagttatatgctgacaaaatgccaccgactactttactttagtggaagttgttgggatggggaatctgcaccctctagagaagcagggacctcagctgctggggaaaggctgtcagagt

SEQ ID NO: 312211 - DNA, 572 bp, Homo Sapiens
  misc_feature (34)..(34): n is a, c, g, or t
  misc_feature (51)..(51): n is a, c, g, or t
  misc_feature (190)..(231): n is a, c, g, or t
agtgacttcattggtgtgaagctcaaaaacgaanacaaaaacctgttttanttttgcctgtatatacttttcattaggctttttaaaattcctttggctatccctaagaatctgtgtatatcaagttggaattctcacctcggattatcttatgtacatggtaagaccagtgcctaccatgaacctatcnnnnnnnnnnnnnnnnnnnnnnnnnnnnnnnnnnnnnnnnnnaattataggaatctcaagaagccacaaagaagggattttcattgatataaaatgaattctttttagtcctagggatactatggccaccgagtttatgcatatcctactttgtacatatttaaaggtagttgatttatcaggatcgaattcatatttgtttttctttggagttctctatatataacattcactaaagttatttgccctcaaaaaggatgaaaacactggatgtttgaaaaacttttaagaaattgtagcattgaactgtttatagtccttgtcacatatccaagccttttatttttctaggctttatataattggttaaatgcaattttgat

SEQ ID NO: 312212 - DNA, 1917 bp, Homo Sapiens
gggggaggcgaggaggagctctgcgcggcgcggcgggcgatccgagccgggacgggctgcaggcgggggtgctgcagaggacacgaggcggcgggctggagacatggaccgcggcgagcaaggtctgctgagaacatacccagtccctgaggaaggagaagatgttgctgccacgatcagtgccacagagaccctctcggaagaggagcaggaagagctaagaagagaacttgcaaaggtagaagaagaaatccagactctgtctcaagtgttagcagcaaaagagaagcatctagcagagatcaagcggaaacttggaatcaattctctacaggaactaaaacagaacattgccaaagggtggcaagacgtgacagcaacatctgcttacaagaagacatctgaaaccttatcccaggctggacagaaggcctcagctgctttttcgtctgttggctcagtcatcaccaaaaagctggaatatgtaaaaaactccccaacttttaaatcatttgaagaaaaggtcgaaaacttaaagtagggggaaccaagcctgctggtggtgattttggagaagtcttgaattcggctgcaaatgctagtgccaccaccacggagcctcttccagaaaagacacaggagagcctgtgagattcctacctttgttctgctacccactgccagatgctgcaagcgaggtccaagcacatcttgtcaacatgcattgccatgaatttctaccagatgtgcttttatttagctttacatattcctttgaccaaatagtttgtgggttaaacaaaatgaaaatatcttcacctctattcttgggaaacaccctttagtgtacatttatgttcctttatttaggaaacaccattataaaaacacttatagtaaatggggacattcactataatgatctaagaagctacagattgtcatagttgttttcctgctttacaaaattgctccagatctggaatgccagtttgacctttgtcttctataatatttcctttttttcccctctttgaatctctgtatatttgattcttaactaaaattgttctcttaaatattctgaatcctggtaattaaaagtttgggtgtattttctttacctccaaggaaagaactactagctacaaaaaatattttggaataagcattgttttggtataaggtacatattttggttgaagacaccagactgaagtaaacagctgtgcatccaatttattatagttttgtaagtaacaatatgtaatcaaacttctaggtgacttgagagtggaacctcctatatcattatttagcaccgtttgtgacagtaaccatttcagtgtattgtttattataccacttatatcaacttatttttcaccaggttaaaattttaatttctacaaaataacattctgaatcaagcacactgtatgttcagtaggttgaactatgaacactgtcatcaatgttcagttcaaaagcctgaaagtttagatctagaagctggtaaaaatgacaatatcaatcacattaggggaaccattgttgtcttcacttaatccatttagcactatttaaaataagcacaccaagttatatgactaatataacttgaaaattttttatactgaggggttggtgataactcttgaggatgtaatgcattaataaaaatcaactcatcattttctacttgttttcaatgtgttggaaactgtaaaatgatactgtagaacctgtctcctactttgaaaactgaatgtcagggctgagtgaatcaaagtgtctagacatatttgcatagaggccaaggtattctattctaataactgcttactcaacactaccaccttttccttatactgtatatgattatggcctacaatgttgtatttgttatttattaaa

SEQ ID NO: 312213 - DNA, 328 bp, Homo Sapiens
  misc_feature (33)..(33): n is a, c, g, or t
  misc_feature (43)..(43): n is a, c, g, or t
  misc_feature (86)..(86): n is a, c, g, or t
gaagtcggtagggtccagggagaggaccccctntcagcattgncctatcataagtatcatcaaatacaactcggcaggtcttcccnttattcaggatggtcttggcagaggctaccatcataagacacagaccatggctgcagagaagggtcatgcctgatgtctttagtatgcagctcaatgggcgaacgtggttttcccccttggctatttgggaaaagttcatgccagtggtcaggaccgttgtgactggcgtagccccactccttggccatggtcgccttcctccgtgctggacggctcctgctttctcttcccctgcgtggtc

SEQ ID NO: 312214 - DNA, 766 bp, Homo Sapiens
ctcatccctgtaatcgtgctccttctccaggacactcaccgcatcacactttgtgcacaccaccaacaccgggatccccaggttatgagtcagcacattgtcacccagaggcagggcaacattttcttcatcggagcctgaggtcagagggcctcttctctgtggggaaccttgacaaccttcttcaggttccatatagtcttgaaaatctttcacaaacttccgttccagctccctcattttttctggtggaattttcattttatcaatgtgctcacgtaaaacactagcccatttctgcagagattccatcacagtccaaggtctagacatgtctgcaacaaaaatgacgagggtctctggcaaggattcagcagaaactgcaaatttcagcaggcctttgtggtacaagtctccatccagaatccacacgttgcagcgcgtgtgatcatctcggtcctcatcatggacactgaggtagagatattctaggcctcttccttttttgccatgctcagctccttgtagtttagtcatgagggttgttttaccagaaccatcttcaccgaagaccaggatgttcttgccggacggcagcttggacctggcgcgggtggacacttcgctcagaatggaggaccataggctctggccttcctcctcctcactggtcaggtcgccggcggccgccaccgcgggcccgttgggacctagcagcagcttcttctccacccccaccggcgccatcttgccaactgcagccacc

SEQ ID NO: 312215 - DNA, 820 bp, Homo Sapiens
acggaagacttaaaaatctctgttttgcccattagtcccgtaagtactttgtaggaaataaacacatacccccaacctggtaacactgtcacaactcataaaaccagcttcagaaatcaatagttacaaaagccattttgagtaagaaagcattccggttccaacttggtcaacgagtcacttttagcccgagggtgttacgtgttcgcactgcccacagccacggtgaggagacccacccacggtctgtgtgcctgtgcttccttccaccttgccactcggtggtcggacacggggcagggcctcaggtccctcacaacactgtctgggacgacaacaaacaaacacagctccttccttgcatatttggtcagtgtttgtagtgcaactgaatggggacctccagccgccagtggccccctcgggcgctggctcctcttccctctttttaagtcacagtagtctgggggcaggcgagagcgggcagagacagcaagaggagcagaggtagaaaggaagggcagagagagggtaaggaacgatgctgcgggatgacctctgcacaccagcggctggcggggccctcccgtcacccccagcatgggaatgtgtcatacgggtagcccaaagcggtgcttctttttcttcacaggcttgaggggggtcagtctgcggaggtcctcctccacgtcggactcctccatctcatcatccgctgagatcaggatcgcctgtacgagcacatcccaatgcctcagcctggatcacagggcattgccgatctagctcagcctgtgcctcacttcttgtccttctgtcc

SEQ ID NO: 312216 - DNA, 915 bp, Homo Sapiens
gccgggccgacaagatggcggacggggagctgaacgtggacagcctcatcacccggctgctggaggtacgaggatgtcgtccaggaaagattgtgcagatgagtgaagcggaggttcgaggcttatgtatcaagtctcgggagatctttctcatccagcctattcttttggaattggaagcaccgctgaaaatttgtggagatattcatggacagtatacagatttactgagattatttgaatatggaggtttcccaccagaagccaactatcttttcttaggaggttatgtggacagaggaaagcagtctttggaaaccatttgtttgctattggcttataaaatcaaatatgccagagcaacttctttctcttaagcaggaaaccactgagatgtgctagcatcatatcgcatttatggattctatgatgaatgcaaacgaagatttaatattaaattgtggaagaccttcactgattgttttaactgtctgcctatagcagccattgtggatgagaagatcttctgttgtcatggaggattgtcaccagacctgcaatctatggagcagattcggagaattatgagacctactgatgtccctgatacaggtttgctctgtgatttgctatggtctgatccggataaggatgtgcaaggctggggagaaaaatgatcgtggtgtttcctttacttttggagctgatgtagtcagtaaatttctgaatcgtcatgatttagatttgatttgtcgagctcatcaggtggtggaagatggatatgaattttttgctaaacgacagttggtaaccttattttcagccccaaattactgtggcgagtttgataatgctggtggaatgatgagtgtggatgaaactttgatgtgttcatttcagatattgaaaccatcc

SEQ ID NO: 312217 - DNA, 922 bp, Homo Sapiens
taatgtggatttaactttgttgactataccagagtatacttattccaaatacagtgtagcacatctttctattagaaaaaaaatttaagatcctttacccgtctctttaagttaaaaggtgtgacatcataaagggtgtcaaatggctggatggttttccagtgcacacttatatattatgaagtatgtctttaacaaatctgatggtttctttacagaattcctttcttcaccttttcttcggcggattagctgttcgaggtggagtgacaggacgtccagaattcagtccaccatactggtatttagctttcttttcagatggtttcaatatctgaaatgaacacatcaaagtttcatccacactcatcattccaccagcattatcaaactcgccacagtaatttggggctgaaaataaggttaccaactgtcgtttagcaaaaaattcatatccatcttccaccacctgatgagctcgacaaatcaaatctaaatcatgacgattcagaaatttactgactacatcagctccaaaagtaaaggaaacaccacgatcattttctccccagccttgcacatccttatctggatcagaccatagcaaatcacagagcaaacctgtatcagggacatcagtaggtctcataattctccgaatctgctccatagattgcaggtctggtgacaatcctccatgacaacagaagatcttctcatccacaatggctgctccagcagccgggtgatgaggctgtccacgttcagctccccgtccgccatcttgtcggcacagactctccttcccagcagcgggaacaagggcttctcggcggcggaggctgcggcgacggctcggcgttctctcacccaggccgccacctcctcctcctcggcaccgccccctcgtgccgaattcgcc

SEQ ID NO: 312218 - DNA, 1558 bp, Homo Sapiens
acaagttactacaatagaactgttttattaaacatatgactgtatttattttgtacaaaacgcagtaacacttcttcttttcctctgcccctggaggcactaccgcagaacttcatgttcacagaaacacacgtcatggcaagtgtgtcaaaaagtcatgacaagcaggaaagtgcaattctgaaagtaatgccacacaaccaaagtgggaaatgaaaacaggcagaggccagcaggtttctcggctagggctctgcctataacgccctggtcctgctcatctttcagcagtaaacattttaagaagagaaactcctgagcactatgtaagtactctcctggtagcatccttccaattccatctatcttgatgttgtaacaagcttatttgtaacttcctcaagaaatcccaccctggattgcatccctgtcaattgcccatctccctctgagcttcaaacaaaacaaaataaaacagaagagcagtaagtttcaaaaggaagtcagaggagacatttgatagatgaaacctacttcctagaagccccctggccagacatatgcagagctggagacaacagattgtgaaactaggtccagctgtaaaatatctcaggtacccagttagatccagttattctgcatctgtggatttaaaatggtcatcatccacagtagaatagatgtgcccctcattgctcagaaaatccacagcttgcttgattgaggatacagacatgtgtttcagctggttcttgagatcctgaaagttcaacccttcaggtcttggacaagccttaatcaaattcaacacctggttttgggccacagtgaggccatttgctggcatgaagctattcccaccaaagttccctgcttcactcattcctggattgctgataggtgctctccctgctgagggctggctgttggctttgcttagtaccatgtgtgcattgatcacttccagaatatgtgtggtgaactcattcatatcctccaggggcatgatcttaaaggctaccaggctctttttgttctgaaaagatctcaggtggcctgccactttcacatatgtttctggaggaaccacagtgttttcactgctggtgtcatctgtgtcaacccactggcgaacgtccatgggtgcagctgtcatgtcatctattttgtaaacaatgttggttggagccttctctgcatgtctgatgatccccacaatagtgacctgtgaaatctcaacattcccaattctgaacacttcatcaaccaaagtggcagaaagcagctgagatatagtacagggcacaatgtgctgggctcgggctcttgatttcttttcggcttgagaaggtgcgggcgatccaaagccccccggggactgcgtgtagccgccggctcccccgtatgaggagctgccatagctttcgaatccactgttccacatcttggtcacgattctccgcaaagaggccgagaaggtgcgggtctgggggaatagcggaaaaccacagaacgcggccgccactgcgccgctctggctacttttctctccccc

SEQ ID NO: 312219 - DNA, 794 bp, Homo Sapiens
  misc_feature (38)..(38): n is a, c, g, or t
  misc_feature (93)..(93): n is a, c, g, or t
  misc_feature (181)..(181): n is a, c, g, or t
  misc_feature (183)..(183): n is a, c, g, or t
  misc_feature (214)..(214): n is a, c, g, or t
  misc_feature (371)..(371): n is a, c, g, or t
tgtacaaggcagttgtgaaaaacttcaggacaaaaatntttcatttaaggacttgtgctgctaagttgaggccattgacggcttcccagactnttaagacattttcacaaaacagaccagcagcagctaggacatttcaacagattcggtgctattctgcacctgttgctgctgagccctntntcagtgggactagttcgaactatgtggaggngatgtactgtgcttggctggaaaaccccaaaagtgtacataaggtaaggctcgcagggctgtgggtctgcctcatgttggtgtgttggcctgttcctgactggtcaccagggtaagtgtgtgcgtcctgtaggagtcagcgggcagacaggcagctnggagcgcccataccaaccaccgtttctgtatcgggcccagcatagccccagcagaagccatggtccctgggttggcgtccagcagtagacactgtgcttaactctgcgaggatgtgaagaagcatgtgtgtgaccctccagcatccccgcaagggctgcttcaggatgaagccgctgaagaaagaagaaagaaagaaagtgtgtggaaaagagcaggacctcaggaagctcctccattctaactgtctggagaggatactttcatttgtaacatgccgtagtcacctcatgtaatttctgtatgaatggccttttagctcattatgttcgtatttttttcctgtttgtttctaacttctctgtattacatataagggcattttctaaacttttcaccacatgattactgatgtaagtcatgtc

SEQ ID NO: 312220 - DNA, 513 bp, Homo Sapiens
tttttttctatgggagaaggagccaatgcaatggctagtctttactggaaagaagaaactttacagcacattttgagtaatttagtgcaggtgctcagtgtgccagctgctggggcaccagcttgtaatgggctccacagcgggggcatcgctgggcctcgcctttgtgcagccaaaaccagacgacgctggtattgtcctcttcacagatgcagcctactattctcttgttggagatggaggggactaaattagggtcttccctggtgcctgaagctccctttggggccagtacattgtatgggtccagtcccttctttgcagccagcatgatctccctctccaacccagtcgcctgctcttcatcagtgggaacaccacctccagatgccatggagcgcatcgcggccgcgccactggggccgcgagccctcagggcctgcgcggccagcgttccagctccgcgaagtaaccttgaagccattgcgtccgcgactagcagcaaaacttccg

SEQ ID NO: 312221 - DNA, 849 bp, Homo Sapiens
gttttaagggggctcaaattaaagccaaccttgtttaacaagttctttaaattctcccccggagttcctacaccccaggtgcaccacacgcttctcccagcaactttacctgcgcctggacctttatgtgctttgcaaataattttataactttgccgtctcctctgaatgctgtcatcgacctaatgagctccagggctcggacggccgagctgcagatgatcagcatcaggaccgatttcttctcactgtggttcttcctaagttttacccacttaggacaaatttcttttaggtatgaggaaagactgtgagtcaaatcattggccttgaggaaacaggagtctggcaggttcagttcttctaattcaatcaccaagcgtctgctgctataatagtccttcatcagcttctgtaggtcttcaggtaaccctggttttggttctgattttgcaagaacatcagtaattttcttctttcttcttttcctggtcttggtggtattctcttttctttcctttggttgtatcaaaaaacattctttaggctgtttggttttctctgaaggtacaggaactggaactgtctcctgctgcatcacttctgtgtctccttctccttcaccatctgatgcttctgggctgctgcctgctccagtcggctggttctcccaccactcgtctccgagatcgtctgccatttcagctcaggtctcgacgtgggcagaacatcacgggtaggcgaccagctgcggagaatcacgttgtctcaaagccaggcggccggcgtagctacacgcggagctcccgctagacactgtcgcctccgccccgcggcgatgacgtcccc

SEQ ID NO: 312222 - DNA, 369 bp, Homo Sapiens
agtttccaggattaaatagtagagctgtagtgaagctaccttgtcacatccagaggtcaagtctgcaagcgaggtcaggacttccacatggtcactacgaggctaacttatattcttcctcagtgaccactggctaaactgttacagctttataggcagctaagcatttgaaacatgcactcccaggcaaacaggctctcttgtgcctctctcttccctgaccatatttagtcaaccatagcaaaaaatagcctctcagctgtcgattgtcgatccaaaaggctgagggaagcctcaatcttgctttctgcctattgattgttcatcctgcggtccaaacactgcttagccatttgtcctgccccccac

SEQ ID NO: 312223 - DNA, 361 bp, Homo Sapiens
ccatcgctgttcacccttgaagtatgggctcgagacctcatagcgtagcttgtcgtttcccttacagtcactgaaggtcaagtttagaattgactggtcctcaatgaattcagctggctgattgatatggaacactttctgctgaaatccaggagtgcagtccaaatcttctgcagatgttagcagcagcacctgggacaggagaacgcacagaacgagcggagttctcggctgcattttgtccgactagaagggcccggcggcgttttcattacatgcacgcggctgcactgagcatattttccgtgggagccaggctttgaggagaggccctgcctcgccagccagccaacttcccacc

SEQ ID NO: 312224 - DNA, 826 bp, Homo Sapiens
gggtttataatgttatatattaaaatttttccttgagccaaaatttatacttaaaagctaggaagcaatttatgtttgaatttattgacaggagattacctactaattgtatagcagtgtaacctgtatcccttataagagttaaaatactaatattacctcttaaaatgatactataaatgcaaataatactataaatgaccatgctacatctggataccaggaacaactgctaatgtaagaggtcaaaacatgcaatttgttgaagtgttcaaaatgataaaaagaaatatgtgattagtaaaataattaaaaaagactgatgtgggttgagaagaactgcaataggaataaagtggttcaggatgatacagatgggaatatttaaagataatatagctttctagatgataactataataacagccaacatttattgagctctttctgtatgctaagtgctttgtatatgttatttcatttaatcttcacaatcccctgcgtgaatactgttatccccatttcattgaccaaatcaatgcttagttacttggcctaaagtcatatttgctaaatcccaaggacttagtagatctagattttaagctttctatataatacctctcacatttaattataggtttaagtgtttatattttatcttaaatatatgttttattttcagcagaaactatatctttaaaagattagaatgtcagaaacagagtcagaaagggaaccagtaaaagcttattaacatttgattgagattattgtcacatcaaaagaccgaaaagagtcttatacagtcctttaaaattatgag

SEQ ID NO: 312225 - DNA, 785 bp, Homo Sapiens
  misc_feature (445)..(445): n is a, c, g, or t
  misc_feature (555)..(555): n is a, c, g, or t
  misc_feature (619)..(619): n is a, c, g, or t
catgaggcagcgtatccaaggtgggttggtagttttctatgtttgtggaggggaaactctcacttgcttcagcatggttcctttttctctggaactgttctgtcaagcctgccgtcctccagcgctaatgaggggctgagggaggaagcactgccttttgttcttttatctgacaggcacaaagcttgaaggctgactgcactggcagccccagattgtgttcccctaaaactgcagctgtcatctgaatttgggcaaagttgtagtttgctcctgagatagaatttccagaagggtgtgtgtgaaagagataattgtgggttgaaagtgtatatttaataagcaattaatctgtcagcttgtggaccaagaggagaaagccttcttctctgtggaatcagtgctttcatacatttcactattaaactgagaaaaactaccacanaatagttcaatgagcaagactggcattaaaatgttaaaatgagtgggttgtgttgagaaacttgaatacttaatgaagtatatgaaaagcagttacagagaggctcacanagcagtttttacagagttctgatgaaaagcaggttccatgtgtgcagcttttggggaaaagttnttttaacctgagaaatcatacttaaaatagtaggtgaagcacgcatttaagaggggatggtgatttatgaaatccactctgcctgtagccagccctccttgacccagtcatttagtgcagaaactaatatggaaagaggtgtggtgagttgagctttatttcccct

SEQ ID NO: 312226 - DNA, 393 bp, Homo Sapiens
ctctgcttatgataatgtcaacaaagttcgagtagctatcaagaaaatcagcccctttgagcaccagacctactgccagagaaccctgagggagatatcttactgcgcttcagacatgagaacatcattggaatcaatgacattattcgagcaccaaccatcgagcaaatgaaagatgtatatatagtacaggacctcatggcagatctttacaagctcttgaagacacaacacctcagcaatgaccatatctgctattttctctaccagatcctcagagggttgctgctcaacaccacctgtgatctcaagatctgtgactttggcctggcccgtgttgcagatccagaccatgatcacacagggttcctgacagtatgtggccaccgttgg

SEQ ID NO: 312227 - DNA, 854 bp, Homo Sapiens
tttgaaagcataaaagccacaattacccagaaaccgcccttccaaacgggttcaaaggagtcaaagtggataagccaagacgggctggagacaggaccaggggtcaagaactgggaagaagaacaccgatgtctgagcacgtccagtcctctgagcccttgtcctgacaaatttaagatctgtatcctggctggaatctagcagtctcttcaaaaattagttctttgagcttttccttaggcaagtcatccaattccatgtcgaacttgaatggtgcttcggcgatgggctcgtcactcgggtcgtaatactgctccagatatgggtgggccagagcctgttctacttcaatcctcttgtgtgggttgaatgtcaacattttgtccaataagtccagagctttggagtcagcatttgggaacagcctgttccatggcaccttatttttgtgtggaagagaaagcaaatagttcctagcttttaaatttattatacaattcaggtcttcttgtgatggggatcccaagaatacccaaaatgtggttcagctggtcaagataatgcttccctggaaagatgggcctgttagaaagcatttctgccagaatgcagcctacagaccaaatatcaatggacttggtgtagcccttggaattcaacataatttctggagccctgtaccaacgtgtggccacatattctgtcaggaaccctgtgtgatcatggtctggatctgcaacacgggccaggccaaagtcacagatcttgagatcacaggtggtgttgagcagcaggttggaaggcttgaggtcacggtgcagaacgttagctgaatggatatattttaaccctct

SEQ ID NO: 312228 - DNA, 430 bp, Homo Sapiens
acaactttctaaataatttttaattctaaatttaaaaaaataccttccaataaggagcttggaaaagaatacaaaataatggaccttgaggaacataatattctagaaacaaaaggcagcgctcccttgctagagctcactgtattaaactccaggtacctgacaaatttaagatctgtatcctggctggaatctagcagtctcttcaaaaattagttctttgagcttttccttaggcaagtcatccaattccatgtcgaacttgaatgggtgcttcggcgatgggctcgtcactcgggtcgtaatactgctccagatatggggtggggccagagcctgttctacttcaatcctcttgtgtggggttgaatgtcaacattttgtccaataagtccagagctttggagtcagcatttgggaacagcctgtt

SEQ ID NO: 312229 - DNA, 1178 bp, Homo Sapiens
  misc_feature (53)..(61): n is a, c, g, or t
  misc_feature (126)..(136): n is a, c, g, or t
  misc_feature (165)..(176): n is a, c, g, or t
  misc_feature (365)..(401): n is a, c, g, or t
  misc_feature (858)..(873): n is a, c, g, or t
aagaaaacgaatcgggggttgtcgccccgcggggcggttttttatgttgggtnnnnnnnnnctccgcagcgcccctttgtctctttgcgcgcgcggtgtttccctctggggagacacgagtttttnnnnnnnnnnntgcgttgttcccccctaggggggcgccgnnnnnnnnnnnnacaaaatgggtttttacaaaaaatttttttcaggggggccgggaggcggccgccccacacagccagctacccattccgggatcctgccacaggccacccccgaggaatggaccctttaatccacgcttctgatagagtggttctgtgtgtttgggtctgtgatggactagtccgcgtctcgttggttcnnnnnnnnnnnnnnnnnnnnnnnnnnnnnnnnnnnnntagagtcatagattttatttaattaaaatagattaaaaacagactgtgtaaaagaattagaattctcaataatttactattatttacattagcaaatgtcggtcgttagtagacactgagcagagaagcttgaagaacggggatcctctcctgtgggcaggggagccccagcttccctcgtgattcccgtcctttcaagttcattatggcagctctgtcaatgagcaccccagggtggtgtggccgcagcaccaggacccgcgctgaaggcccagagacctggcaggccgggagaaattcctttcctttgggaagaaccaccaacgctcagtccaagctcacacggttatctagtcggcaatgccttccctgccctgcagccaataccccccactgtgctgggccttctgcaaatactcctggggttgacccaaacccagtttccagataaaagatnnnnnnnnnnnnnnnnggccacatatcccagttctcagagaaatcctggattactaaacatcccctgcctgtggcacctggaatgggtgacttgtcaaaatctccctcaagacgttttgtgcgtttgccgtgggagggaatggtggggagtcagggtggctggggggcactaggccacttcaccaagagggatgcacctcccaggaagcagtagcagtgagagcgagccccacaggaactgtccctgccctggcagtgcgcagccctgtgggcaccaagcagggagtgaagaccctcctcgtgccgaattcgccacccagg

SEQ ID NO: 312230 - DNA, 633 bp, Homo Sapiens
tggatgttcttggagtcagggagcagcagcctcccacaggatgtgagagatgaactggggtctccagtcacgggagccaggagccggccagggccgcaggcatgaagggagcgaggctgaagggaacgtcgtcctctcagcatgggggtcccgcggcctcagccctgggcgctggggctcctgctctttctccttcctgggagcctgggcgcagaaagccacctctccctcctgtaccaccttaccgcggtgtcctcgcctgccccggggactcctgccttctgggtgtccggctggctgggcccgcagcagtacctgagctacaatagcctgcggggcgaggcggagccctgtggagcttgggtctgggaaaaccaggtgtcctggtattgggagaaagagaccacagatctgaggatcaaggagaagctctttctggaagctttcaaagctttggggggaaaaggtccctacactctgcagggcctgctgggctgtgaactgggccctgacaacacctcggtgcccaccgccaagttcgccctgaacggcgaggagttcatgaatttcgacctcaagcagggcacctggggtggggactggcccgaggccctggctatcagtcagcggtgg

SEQ ID NO: 312231 - DNA, 1513 bp, Homo Sapiens
gggcccaaactcgtgttatattatcgaggtggaaaacagccatatgtattaggaggggaaactgaggcagaccacaggacggggctccagagggaggacaactaggcccagaaccccttctggaggctcagagatgccagtgttccaggaggtctcacagcatgaaaggggcctgactacattcgcttttagcagtcggaatggcggatggtcaggcggtggctggaatcacatttacatccttcaaatcagcatcctgggcctcccctggggtgggcaggaggaccccggtgtcgtctccacgaagggagatccaaggggctggcagcccactcctcatccttctccacaacagagctcctcctacagccgctgccgtgagtagcaagacaccgatgacgattcccaccacgagcacggaggacttggctggagattccagctccaccctgaggggctgcgccagccccgcgtgctgcacaatgcagcagtagtggtgctcatcgccacttttgactgttagtgacgacgaggcgtggaaggatccgtcactgttggggccgaagtcaccctggccggtgccagcggccagcccattccgcaggaaccgaagttgcagctccggagggtagaaggagaaggcgctgcaggtaagcacggaaaagccagggctgctgggtcgggccttcaggcgcatggaggggggctccttccactccaggtttcccgcggcccctctccaggtgctcccgcaggcggtgcgggcaggagaatagcaggaaggtgagctccttgttggccgccttgtcctgctgctgccaccgctgactgatagccagggcctcgggccagtccccaccccaggtgccctgcttgaggtcgaaattcatgaactcctcgccgttcagggcgaacttggcggtgggcaccgaggtgttgtcagggcccagttcacagcccagcaggccctgcagagtgtagggaccttttccccccaaagctttgaaagcttccagaaagagcttctccttgatcctcagatctgtggtctctttctcccaataccaggacacctggttttcccagacccaagctccacaggctccgcctcgccccgcaggctattgtagctcaggtactgctgcgggcccagccagccggacacccagaaggcaggagtccccggggcaggcgaggacaccgcggtaaggtggtacaggagggagaggtggctttctgcgcccaggctcccaggaaggagaaagagcaggagccccagcgcccagggctgaggccgcgggacccccatgctgagaggacgacctggggcgggagggggcacgtgactcctcccgacccccggcccgccccttcctcccgggacaccgcgggcacggccgggaccaggacgccgaggaggggctctgcgggctcggtccagactgacaacaatgccctcctcgtacctgaagaactttcacccctgaactgtatctcagttggttaattaatt

SEQ ID NO: 312232 - DNA, 821 bp, Homo Sapiens
ggggcgccttttctgacgatgcgaacaacatggcggcggaaagtggtagcgattttcagcagagacgtagaaggcgccgggacccggaggaaccggaaaaaacagaactcagcgaaagagagctggcagtagcagtggcggtgtcccaggagaacgatgaggagaacgaagagcgctgggttggacctttacctgtggaggcaacactggccaagaagaggaaagtcttagagtttgaaagagtctatcttgataatctccccagtgcatccatgtatgagcgcagttacatgcatagagatgttatcacccatgtggtatgcaccaaaacagattttattattactgccagtcatgatggacatgtcaagttctggaaaaaaatagaagagggaattgaatttgttaaacattttcgtagtcacctgggagttattgagagtattgcagttagctctgagggagcattgttctgttctgtgggtgatgataaagcaatgaaggtgtttgatgtagtgaactttgacatgatcaacatgcttgaaacttggctattttcctggacagggtgagtggatctattgcccaggggatgcaatttcttcagttgctgcttccgaaaagagtaccgggaaaaattttcatttatgatggcccgaggagataaccaccccacttcatattttttgacaaacttccatacattcaccttcttactcaaaattacggcctaaaccccatttttaccaaaccagtcagtggcccttcctgcacaaaatttgtgggaatgattcggaatccctggcactgggggcccctca

SEQ ID NO: 312233 - DNA, 645 bp, Homo Sapiens
aagttaagtcatctggtctgtcgacaggtgtctgacgtgtaaacttggaatcaacgtgacttacatcctcttcagattgcaacagaggtttaaaggggggctccacctttcgagccagaagttcttcccagttaatgtgtctaaagaatggatgagcttgcagcagctttttaagcagatctctggcttcttgtgtgaggtagggaggcaaattgagtttacatttgaggattttgtcaattgttttctttctattctcctcagtgaatgggggtgctccagtcagcatgtcatacattaatgctcccaaactccaccaatccacagcacgattgtggccacttctcatcaagatttcaggggccatgtattctattgttccacaaaatgtgtgtgtgactgttccatcatgaatagattctttgcatagtccaaagtctgttagtttcacatgaccttggtgattaagcatgatattctccggcttcaggtctctgtagatgatccccttttgatgtaaatgccccaaagccatggagatttctgccaagtaaaagcaattcaaggaaagaaagccgcaatgagaatggttctgttaggaacaactggtgtgaagagcgttccactcaagccaggcagtgtctt

SEQ ID NO: 312234 - DNA, 1293 bp, Homo Sapiens
ttgcaccattgattgattttttaaaatccacgtttatttttcctgtgtctgaagtgttctatgtaatgacattgactctctgaaactgtcattttgagtcgtttcaccttgcaggatgctcacacatctccctctccaccttttttgccttaaattcattaaaagcattgctctgtcatagattcatacgcaggtgctctggccgtttggagatcatgggaaaagcttgttttttgtatggcccagagttcggctgtcgtattggaagtggtgccgatgcttccccactcattgtcacatccatctgctctatgccacttgtttccattgggtattccacaggtgtctgaggatttgctgtgctggccgaagcacctcttccccagaaatccccaggagaaaatttgactgggctgacaggtgttcgtgggctgccaataaatcttcgaggtgatcggatttttggttcaaaggaaaacttttctttcacactttcaagtacagatggagccacatatgtaaaacccagaaagacctgattggcactttcactgagagttgagtcatctgggctgtcgacaggtgtctgacgtgtaaacttggaatcaaactgacttacatcctcttcagattgcaacagaggtttaaaggggggctccacctttcgagccagaagttcttcccagttaatgtgtctaaagaatggatgagcttgaacttctccagcgtccccaggaccagctcccagacgagaagcagcatttcttttcagcagctttttaagcagatctctggcttcttgtgtgaggtagggaggcaaattgagtttacatttgaggattttgtcaattgttttctttctattctccccagtgaatgggggtgctccagtcagcatgtcatacattaatgctcccaaactccaccaatccacagcacgattgtggccacttctcatcaagatttcaggggccatgtattctattgttccacaaaatgtgtgtgtgactgttccatcatgaatagattctttgcatagtccaaagtctgttagtttcacatgaccttggtgattaagcatgatattctccggcttcaggtctctgtagatgatccccttttgatgtaaatgccccaaagccatggagatttctgccaagtaaaagcaggcagtgtcttccataaatattccctctctttctaactgcataaatagttctcctccactgagatactcaaggatgaggtagagttttccaccagtctgaaaggcataaattaaatccacaatga

SEQ ID NO: 312235 - DNA, 660 bp, Homo Sapiens
ctttttgggaatattgttgcatgaagtctccactgtgcttttccggagcagaggaggaaaggagatgtgctggcttttgagatggagttggaggaggaggaggcggcagaaacatcgatgaactttctctttcagatttctcatctactggaggtggaggaagagggaggcctggaaaactttcaaattcagcctttatcttctctgtggacagtgagggaagaaacccatttttttcagggaaacatcatcaaaggaggtggaggaggaagaggaaattcaatttcagatgatgcattagaaggtggtggaggaggtggagatggaggtggaagggggcactcactttcttttacattattctcagggttaaagttgattggattcgaggacctttccattgccatttttaagcctgtggaagtatttgttttcattagaaagtcctggcttttcgagtgaacatcagtctcccgctttttgttggttgccttaaatgtattgtgacttttttcagggactttcatttctgttacattggatgtgtcttgctctacaggcaaaacctgccacattggttgaaggtttatattatttttctttatatccttattagaatattttgtttcttgctttaacaaagtttgcttctgaaagtcc

SEQ ID NO: 312236 - DNA, 1046 bp, Homo Sapiens
  misc_feature (48)..(66): n is a, c, g, or t
  misc_feature (405)..(406): n is a, c, g, or t
  misc_feature (412)..(412): n is a, c, g, or t
  misc_feature (418)..(418): n is a, c, g, or t
  misc_feature (423)..(423): n is a, c, g, or t
  misc_feature (704)..(757): n is a, c, g, or t
  misc_feature (986)..(986): n is a, c, g, or t
gctgggtggcgaattcggcacgagggagagagagaactagtctcgagnnnnnnnnnnnnnnnnnnnatctttatcctccttgattcaaaaatacaatttattttaaaaacaaaaagagggaatggatgcagaagcccgtctgggctttccgtggagtcgccccttcccaatggcgatggccgctccctgtggcctcagcttcctccgtggaatgaaggggtccaggtgacaccttcctcgaagggtgggcgtgggcctgaggctcccaagtcggccaggggctcggcctggctcagaagaggtgcttcacttcaacagtggtacggggtggccgctgggccctgggtagcgtggggtaggggtcgggggaagtcgctgtagggcaggctgaaggggtagaggggnntgtaangtgagntttgntagagaaggttgtccttcacgaaggcgacggtgggcagccgccggaccaccgcccggggtttgagcagggcggacccatttaagccggacaccccaattcaggcccaggccccgccctcagagaaggccgccgacgagggtcggcgggcaaaaaaaacccggggtggccgccaacccgccacatccgaccgcgccatataaatagcaccgcgcggcccgccacactcggttcgcggcgcccgcagacccgcttgtgcgggcccaacgtgtttgcgcgcgannnnnnnnnnnnnnnnnnnnnnnnnnnnnnnnnnnnnnnnnnnnnnnnnnnnnnacgaatggaatacacgcgtttggtccgtccccccccgtgcgatttcacgccagaagccagcccgaataccccgcgagtcccccgctccccagtaagcgacaaatgctacgccacggctcacggccggcggatggcgcacgagacgtgtgcaggcccagatatgcccgccgcctgtccatccagacggacgaacgcgccgggcggaagggtaagacgacgcgagagaaanttcgcccaccagcgaagagattacacagcgccgcggactccggcgcgaataacgtcatga

SEQ ID NO: 312237 - DNA, 427 bp, Homo Sapiens
ttgaggaaaacaaatgtgtttattttctctatttttctgtaaattctgtgttttacattagcgttgttaacactgcaccaatttctgtcaatagatttctccagaggacattgtgttcatgacaatctatcaccacaaggcaaaatcagacagaatttggggagagcatgaaatttgttaccttctgcttgtgaggaaacgtcactctgaacccggatcccagtgaaacgaaaagcatcctctacctgtcccaggaggagctgtgggagctgctggagagggaggcgaggggtgaagtcaaagtcaccccctggctaagaaccattgccgagaggtttctgtaccggtggtggcctcacctggatgacgtgaccccgtttgtggagcttcacaaaatacacagagtgtgagaggcaggggaggtcgc

SEQ ID NO: 312238 - DNA, 729 bp, Homo Sapiens
  misc_feature (253)..(253): n is a, c, g, or t
gggagttcccccgaaatgtttggttttgggaatccaagctctcccgagaaccccctttttttggccctggcgggggtccccataaatggcaaatcggtccggttgggtccctccaaggttcaaagtttttggataaaaaggtcaatgccattggttgccggataggtgtgtcaaaactgtcatccatgatctggtgatcaaagatgtctttccaacgctttgctcccccagggaccaccagcttgaatttccntcggcggattcccgaagtctccgcccgtggacattgtggaactagaggagcggccgccgcctcggcctagagacttcccggaccgatgctgctccagccagctgacgaaaaaggcgagcggaagggcgggcaccgagctctctcggcccctgcaaggcccggtggaggagcccggctggagggcagcaggactctccacagactggcagtcgccgccgcctcccggcagagtagcctagcaccgagcgaggcccgcggctgggaagggaaggagggcggtgtcggcaggagccaggggtgtcctctggcttcccaaagctagggccgttccctccttccgcactcggctcccagacctggggaagagaagctgagggtggcggagccggaaccgcagacgtatctgggacctctcacgcgcagcgcctgagcttccacagctgccgccgccgccgcagcccaacctgctgagtccc

SEQ ID NO: 312239 - DNA, 751 bp, Homo Sapiens
aggggaaaatccaatggttttgcccattaatggaataccacctttcatttccccacgcacaatagccacgcccatcaaccttttatatttaaatcactggtagcattgctggtaatcctttcagtagatgccttttgaacattcaaacttttcactccacttggcaaatgaaactcatgagtttcatagtctgtgctgaataagatattttgagtcctcgggtcaaaaaactgcatgccgatgtcacttgtaatagaagttttgttgttttctacactgagctttgttgtcccttgctgaaaaacaataggctggttgttgccagtgatgaccaaattttcatttcgccttcctcctactgtgcttttataaagagggtggatcactcccatgtcagatacttgcttaaatcgaagcaggccactttcatgaaactccatactatcacagccatttggtccaatgcgaatcacggcccaaataacaagtgttattattaaattgatgacagccaggataaacaagaggataatcacacagatggctaaattgccctttcttcctctcaaccctgttttgtggagacgatcttcatcaatcggaatgtatccagctttaaagttactgttgtgctctttattgacactccttctctcaacagccttctcacgcatggacttctttacaggaccattggaactttgctgttctgcagccgccgccgccgctgccgccatcttcccgcgccccc

SEQ ID NO: 312240 - DNA, 748 bp, Homo Sapiens
cacaaagagagatgtggactcaaagtcaccggggatgcctttatttgaagcagaggaaggagttctatcacgaacccagatatttcctaccactattaaagtcattgatccagaatttctggaggagccacctgcacttgcatttttatataaggatctgtatgaagaagcagttggagagaaaaagaaggaagaggagacagcttctgaaggtgacagtgtgaattctgaggcatcatttcccagcagaaattctgacactgatgatggaacaggaatatattttgagaagtacatactcaaagatgacattctccatgacacatctctaactcaaaaggaccagggccaaggtctggaagaaaaacgagttggtaaggatgattcataccaaccgatagctgcagaaggggaaatttggggaaagtttggaactatttgcagggagaagagtctggaagaacagaaaggtgtttatggggaaggagaatcagtagaccatgtggagaccgttggtaacgtagcgatgcagaagaaagctcccatcacagaggacgtcagagtggctacccagaaaataagttatgcggttccatttgaagacacccatcatgttctggagcgtgcagatgaagcaggcagtcacggtaatgaagtcggaaatgcaagtccagaggtccatctgaatgtcccagtacaagtgtccttcccggaggaagaatttgcatctggtgcaactcatgttcaa

SEQ ID NO: 312241 - DNA, 1104 bp, Homo Sapiens
  misc_feature (15)..(15): n is a, c, g, or t
  misc_feature (39)..(39): n is a, c, g, or t
  misc_feature (64)..(64): n is a, c, g, or t
  misc_feature (366)..(374): n is a, c, g, or t
ctgaacaagggtcgncttcctaaaggatggacaattggntttcagtaaatctgactaatcctgntttcactttccatcttctttctaaatgaaaaaccaaaaagtgctccctcccttccctggaaacctcagtaacactatgggaaaagtagaacatgacattgcagcctattgatttcttcttccagataggtttaaagtactccttaagttctgactaaatagaactaagccttattaaaaataactgcctcttgttcatgttatctgtaccttcagggacctgcctttcttcaagtatttcctagagtatctattatgatactgaagaagctaattatttgtgttgtaaatgggtataaatgnnnnnnnnncatactggtttctctagccaggaaaaatgctttctggtgtaatatatcttgctccagaaccctcattctaattgtaacactaggatcaaagaaacaaagtcactttgtggaccacagctaaactgtggatattttcccaaagacataagatttttatggcccgagcctctagaaaggaagccatgtttaggagcaaccagctttcctcccagctttagggggcagagttcctgagccagaggacttactgtccagctttgagaacctctccagagtatatgcactgggtactgctctttttcaagagaaccaaattaagaggatggcaagaaacagtagaagcacagaggaaagacaactctgcatgtgcctgtgtgaatgtgtgcatccatggagtatttcccaggtaaatactagtactggggacataggctaattgtgtgtcccacactgcaagatgctagggcgtagttaacactgtggtatacatacaaatcaggcactgtccaaaagattttttaaaatctaaagtctgaaatgtaaaaatataaggtctcaacccacttttacacttttaaagagatcccatacctgtttcactgactgccgttaattacacttttggatcacagctggttaaattgatagatttcagtttatctcagtgaatttttagaatggagattatagcattttttaattggagaacagacatttcctaaagtatatg

SEQ ID NO: 312242 - DNA, 644 bp, Homo Sapiens
ggatagtccaaacaaaaaagaaggctttttcaaaaaacattaaattcacatgcagtctcagagactatttagacaaagttcaagttaggagcttttaggatgtgggagtaaaactttaatgggaggggagggctggctgctggaagaaggaagaagccagactggttagacagtactcttaactcctagcccagcctagcgtgccctgcccctctggccactgctgcagacacctgccttaacacacacacctctaggactccacagttttgccttaaaggaccttcccaagtctccctttccctgtctggcttctcccttaagaagagagagatacttgtagaattgggtggggggaatgagcatgaactgtccttccatttgggatatgttacattagagtgagagagagaataaggagcctttcttatggaagaaatgggagaagagagacagggttcttttcagcagagtctagtagtttctctgtaaggcaaaataatctaaaaagactaacctgcccacccactccttatattgctgtgagattgcccctatcttgtgctcttctgtctgcagtgtgcacggccttgttctaacccggaataaaggtgattgattgtattgcaaaaaagaacacaaag

SEQ ID NO: 312243 - DNA, 506 bp, Homo Sapiens
  misc_feature (39)..(39): n is a, c, g, or t
  misc_feature (406)..(406): n is a, c, g, or t
  misc_feature (454)..(454): n is a, c, g, or t
  misc_feature (471)..(471): n is a, c, g, or t
  misc_feature (484)..(484): n is a, c, g, or t
  misc_feature (491)..(491): n is a, c, g, or t
ttaatcaccgtttattccggggttagaacaaggccggtnacacatgcagacagaagagcacaagataggggcaatctcacagcaatataaggagtgggtgggcaggttagtctttttagattattttgccttacagagaaactactagactctgctgaaaagaaccctgtctctcttctcccatttcttccataagaaaggctccttattctctctctcactctaatgtaacatatcccaaatggaaggacagttcatgctcattccccccacccaattctacaagtatctctctcttcttaaggggagaagccaggacaggggaaaggggagacttgggggaagggtccttttaagggcaaaactgtggggagtcctaggagggtgtgtggtgttaagggcaggntgtcttgcagcagtgggcccagagggggcagggggcacgctagggctnggggctaggggagtttnaaggagtactgtnctaaccnggtcttggctttctt

SEQ ID NO: 312244 - DNA, 680 bp, Homo Sapiens
ggccgggggcggcgaggttgtctatggagaggcggcggccgcggctgctgaggcggaggctgaggcagtggcgatggcgccctttcctgaagaagtggacgtcttcaccgccccacactggcggatgaagcagctggtggggctctactgcgacaagctttctaaaaccaatttttccaacaacaacgatttccgtgctcttctgcagtctttgtatgctactttcaaggagttcaaaatgcatgagcagattgaaaatgaatacattattggtttgcttcaacaacgcagccagaccatttataatgtacattctgacaatagactctccgagatgcttagcctctttgaaaagggactgaagaatgttaagaatgaatatgaacagttaaattatgcaaaacaactgaaagagagattggaggcttttacaagagattttcttcctcacatgaaagaggaagaggaggtttttcagcccatgttaatggaatattttacctatgaagagcttaaggatattaaaaagaaagtgattgcacaacactgctctcagaaggatactgcagaactccttagaggtcttagcctatggaatcatgctgaagagcgacagaaattttttaaatattccgtggatgaaaagtcagattaagaagcagaagtgtcagaacactcca

SEQ ID NO: 312245 - DNA, 768 bp, Homo Sapiens
  misc_feature (294)..(294): n is a, c, g, or t
taattacagacatcattataatttacccatgaatttcatcactgctagttttccaaaaatatataccaccaaaacatcatctaactataaaatctactttttgattgacctctcagagtttctctctctggccttgctcattaatgtaaatgaatattcatctaggaaaaatacatgaaaatattttaaaaacccatttacctacctctggcccaatgaacagggtaaagatgtttccaaagcgatcccgtttttgtcagctgagaccatttcatgcttacttgactgcatcgncataactcttgaggattaagatagctgaaaattgacagcattacctcaggaggaagatgggttatacctgtggagtgttctgacacttctgcttctttatctgacttttcatccacggaatatttaaaaaacttctgtcgctcttcagcatgattccataggctaagacctctaaggagttctgcagtatccttctgagagcagtgttgtgcaatcactttctttttaatatccttaagctcttcataggtaaaataattcccttaacatgggctgaaaaacctcctcttcctctttcatgtgaggaagaaaatctcttgtaaaagcctccaatctctctttcagttgttttgcataatttaactgttcatattcattcttgtcgcagtagagccccaccagctgcttcaatccgccagtgtggggcggtgaagacgcccacttcttcaggaaagggcgccaatcgccacctgc

SEQ ID NO: 312246 - DNA, 953 bp, Homo Sapiens
  misc_feature (77)..(78): n is a, c, g, or t
ttttgggcgccggcggccccaaaaggaattggttttagaaaactttttgaggggccgaagacgggccgaccaagacnntttttacccattttggttttttctgtggtagttgggatttggttaggattttttctttcccctccacccgtttaaaggtatttagttgaagaaaggtggcagatagagagtgccaggacagacaggcagccagtgtgaggccccaggagagtcattcttccggagttatcagtccatccatccatcagtgggagagagagctttgattgcctggttgtcagtggcttcaaaggcgggtcagtccatctggggcctttcacagtcttatcagcaccctttgacagaagcaatttcacacaggaaacatgaccctcatagacagcagacagaagaggagtaatatgatgtttatctggagcattaatatctgctcctttcagcagcagaaattccaggatttcaagctgcccacaatctgctgcataatgaagaggtttccttccaccttctagtgtccggttgacatcttctcccttggccacatagtctttcacctcatccaagtctccgtttttcagggcccacatgaactccttgtcgcacatcactgcagcggggcaggccggttggccgggcagaagatgaggaggcggtggcagcagcaagcggatgccgccgggcgagagggaggcagggccgcgcgaagccggagaggagaagaagagaaggagggttaggctgccaggcgggcgaggcagttggccgcggcgaccgttcgggcgggagaaagaaagttcttttgcggccaccgggcccagcagagaggttccgcctggccgaggagaggcaggaacctttacacttccggttcactccccgctaggaccctcccccaacttcctcttcctcttctcctccgcggaacgcctctcccc

SEQ ID NO: 312247 - DNA, 618 bp, Homo Sapiens
ggagaaagttgccatttgaaaattaacttgatttcagaatgaggcattgatttagagacagataacatttttaaaatttatccttttaattcttgaattagtaaggacaatattttgctgtttattggtataaaacagccctgtcccaggtatacaagggtatacgtaagtctgtaacatcattagctacagtgaatttactttacttgaaagcatagcaaaataggattaacgaaagatatatttttaataagaaaatgctttgaaataacatgaaatcaatgaacatttgactgtacaatttactcgtcaaagtatcaacgtatgtcagctcatgtatgaattacactagatcattctaaacacagccatgtgctcaggaatgtgtgaaataactcataagctattctctaagggggtgtactgaaaacttctaaaagtaccccagatatttggtcatagataagagatatactttaatgcagccttccaagtgaatgtaaacttttcggaagtggcctttccagtaacatattactattgtgaatactctgtacttatgtgtagtgcttgtggatattttttgcagcacattatcacacttatcaatatttttgt

SEQ ID NO: 312248 - DNA, 1049 bp, Homo Sapiens
ggcctcggccatgactgcggagctgcagcaggacgacgcggccggcgcggcagacggccacggctcgagctgccaaatgctgttaaatcaactgagagaaatcacaggcattcaggacccttcctttctccatgaagctctgaaggccagtaatggtgatattactcaggcagtcagccttctcactgatgagagagttaaggagcccagtcaagacactgttgctacagaaccatctgaagtagaggggagtgctgccaacaaggaagtattagcaaaagttatagaccttactcatgataacaaagatgatcttcaggctgccattgctttgagtctactggagtctcccaaaattcaagctgatggaagagatcttaacaggatgcatgaagcaacctctgcagaaactaaacgctcaaagagaaaacgctgtgaagtctggggagaaaaccccaatcccaatgactggaggagagttgatggttggccagttgggctgaaaaatgttggcaatacatgttggtttagtgctgttattcagtctctctttcaattgcctgaatttcgaagacttgttctcagttatagtctgccacaaaatgtacttgaaaattgtcgaagtcatacagaaaagagaaatatcatgtttatgcaagagcttcagtatttgtttgctctaatgatgggatcaaatagaaaatttgtagacccgtctgcagccctggatctattaaagggagcattccgatcatctggggaacagcagcaagatgtgagtgaattcacacacaagctcctggattggctagaggacgcattccagctagctgttaatgttaacagtcccaggaacaaatctgaaaatccaatggtgcagctgttctatggtactttcctgactgaaggggttcgtgaaggaaaacccttttgtaacaatgagaccttcggccagtatcctcttcaggtaaacggttatcgcaacttagacgagtgtttggaaggggccatggtggagggtgatgttgagcttcttccctccgatcact

SEQ ID NO: 312249 - DNA, 773 bp, Homo Sapiens
  misc_feature (54)..(64): n is a, c, g, or t
tcaccttaagaatacattgcttctaccacaattaaaaattttttaaactgaagnnnnnnnnnnnctacattgctccacatacctgatacttaattttctatgtttgaaactacttgaacaagtgtgacagtgctaatctactatatttagtaaatcccttagtacctataaatacacacccaaaagcccttccctccttctctaatggtaactgttgtataataaaattgtcaacaactctagaaagatgaaataaagattactatagcaatcttcaattaattcatttcagaaatcaaggaggcaagtcatgttcattttaaagatgacaaacttactattttgaaaatgagctcataaatacattagaactttgaatgtgctttattatgccacaaattcccaggagatttaagaaatagtatttctgaacaggaataataatttcacaaatactaacactttattgacaatagacaagtcttttagggtagtgcacatgtacttaaaaactaccttctaccaatctcaacactttttataaattttcaggtgaaactgtagcagatcctactttatttttcaatggttagtgtaaaattctgtatgtaaaataagtacatattttgagatggaagaaggactgcatgtgaaatgctttgcctaagttgtaaggctcctgtctttacgctatcattaaaggccaaaaaaccactgctagaaatgttccccaaaaaattcttaaacagctcagtctttaaaagtattaataa

SEQ ID NO: 312250 - DNA, 801 bp, Homo Sapiens
  misc_feature (15)..(15): n is a, c, g, or t
acaaaaaaaccaaanccccaaagatagtataggctatatttcctgtttggggaaggtttacccaggcaaggtaaactgtcccctgagcaatacaaatttgttgtcccagagaatattttggcttttaaaatattggcaaagttacactcagatacgagttttgtttggtttttttaagagttagctcaatatcagggacattgtaaattaattttataacaataatctggtagtatttctcattggaattatctactttagtaatatacatgtgccaagaacactaataagacaaaatatttcctaagagtgacaaaaagttgctttttctcactaattttttactgctgcacacataggtatactggcatttaattaaagcataaatgttaatgccaacttgctaaatgatatgcgctggcaatgtaatgtaacaaatgcaaattcacatcagtctaacactgtataaacatactcatgcatttgtgtactgatagtacagtcaaataaaatgattcatattttgacaaaaactaaacttggaatggagggctctgtgaaaggcagacttgggtcttcaaatatctccgtatgtgaaatatcagtatttatacataatcagtttttaaaggcacacatccaaaagctcccttcatctagatctgtcattttctctatctaatatgccaaaacccacagaatatcccagagttctctcagacttggtggtggttgcaaacttctaaatgactacttatatttgtagaaaaaccagtaccattatcaggacacttccttttg

SEQ ID NO: 312251 - DNA, 804 bp, Homo Sapiens
tggggcctgttcgatggaagttcatacccttccaaatgccttcataggaagtatgagtacgcaagttttttccagtcctttttctttctgctgcatgggataatacccggactgcatgtccaaaggtggcctgcaatttagggggggcagtagatggcatttgctgtggttcgagcagaagttaaggcagctcgggctttcggcaggttgctcagggcatggtatgttttgctttctaaaagctgtacttccaccaaaagagctttgtcgtccatctttttcaactcccgcagcagctgagaacccaaatgcaatgcttcctggtacctcttggtatcaaagtacaaagacaccagtcttgcctccaaagcttggcgtaagaaagttcttttctctgacttggcccattcgatgcactctaaacacagctcgacctcctgccctgtagctgcttccatatcaagaaacagatcaagaagagatcggaccaggcgagctgctttagccttgctgatggaattcaagaagggtcgtacatacttcaggagtcctccaagctctgcagcttgtccagtctttgccaggagagatcccagttccaggatgctctgctctttgacttgcactgcctcttcatcgttttcctgaatgtcacgcttcacgatggagtggaggatgtcgatggaggcctcccggtcggtgctgagtagagactgggctctctggaactccaccaccgccgccgccgccatcttaccgctctcacaccgtccccggccgcggccgccgacgccggaaacacac

SEQ ID NO: 312252 - DNA, 653 bp, Homo Sapiens
  misc_feature (469)..(578): n is a, c, g, or t
gtttttttggtgtgtttttctgtgaaacacgatttattatataaaacaaggtgcatccgaattcagtgtcagaagagctttgtatttcaagggctaaggactggaccttctcccttaaaacctccttacccaacccttgctaaggactcaggcctggggcagaggctgtcagtctctaaagaccccagccctggaccaggacggggagaacaagtttggtgcatagcgtggggctagggcagtgggtcaggcaccatcccttctgcaagtggccacaggtcaccacagtgggggaaggtggggagcttgaacctccaaagataggttcattgtaggaaaagctagaccaatgccttgggtagaaacacccaaatccctctacaacaactaaagcaagaatgtggaacccatcgaaatcttcccccaaaatgccaaccataaaatagattctacagaaataaagaaaggnnnnnnnnnnnnnnnnnnnnnnnnnnnnnnnnnnnnnnnnnnnnnnnnnnnnnnnnnnnnnnnnnnnnnnnnnnnnnnnnnnnnnnnnnnnnnnnnnnnnnnnnnnnnnngcagcacacacctgtagtaccagctactcactacctgggaggctgtggtgggagcatcttttcgccacccaggcc

SEQ ID NO: 312253 - DNA, 2119 bp, Homo Sapiens
  misc_feature (296)..(358): n is a, c, g, or t
  misc_feature (488)..(538): n is a, c, g, or t
ccctctgggggccagagtatttatatatgcggatgcgcgcggcggcgggcgtgtggtaatgcgcccgcgggcgatttcccgggcttccgttgaagagcccgtgttggcggaaggggtcttccagcgggccgccccggaaagggcctgtaaagaaaacttcaccaacccatttctttgcacgttaattctgccccggtccggggggccttaaattgggataatgggaccgccccgctggggacctcccgggtgggtaaattccgcgggagggggccctccgggagactcccctcgtnnnnnnnnnnnnnnnnnnnnnnnnnnnnnnnnnnnnnnnnnnnnnnnnnnnnnnnnnnnnnnnggaatcccaaaccggtagtccatagacccagaatttccggaggaaggcagcatatggcgcgtggtcccctttcccggccgggccccccgccccaaaggaatggtgcggggaaagcttctggaggggcgannnnnnnnnnnnnnnnnnnnnnnnnnnnnnnnnnnnnnnnnnnnnnnnnnnatttagaataatcttttttttgttcttgttcttgtttggtaagcaatttccccactcccaagttgggccagtaaagattacatgaaaactggcacacctattggctggaatacagatgcaccaaatgaggatttaaaaactttccgagcgaaaagtagaacaaaaagaaaaaagaatctcctagcattttcccccaaggtttcactctcccgccacacacactctccaaaggaccgctacagatccaactctatgtcagtttcttggctttgttgtagagggaatccactactttgctcatgttctgaattgtttccagagcagcttcgtaagttttatctactgggggttcatcgaaaataatcaggacaccctccccctggtccaaaatcccatgaaatttcttgtcaagaatcatctgtgataatttcctttccacgtcggccttggagagtttgatgagactagatatgtgttcaatctgtactctggaaaaaggctcaatgactcggatcagattctgttctagtaagttatcatacaacttggccaagtgtgtgctgatgattgggtcatcccggagctctgcccggtaatctgtcagagccttttcaaaatctgccagtgatctgttcttgctagcctgagccacgcattttaatgcttctgtctgcctccctgcataccgaagtgcaagcttcccgctcaccaaagcctggacatcttctggggtgttgagcatgattttgcacagcaacatgtacttcagagatgtgatggccttggggctgtcgatggagtcataaccctcaaatgcctcatagaagtatgagtacgcagttttccagtccttctcttctgctgcatggataatacccgactgcatgtccaaggtggcctgcaatttaggggggcagtagatggcatttgctgtggttcgagcagaagttaaggcagctcgggctttcggcaggttgctcagggcatggtatgttttgctttctaaaagctgtacttccaccaaaagagctttgtcgtccatctttttcaactcccgcagcagctgagaacccaaatgcaatgcttcctggtacctcttggtatcaaagtacaaagacaccagtcttgcctccaaagcttggcgtaagaaagttcttttctctgacttggcccattcgatgcactctaaacacagctcgacctcctgccctgtagctgcttccatatcaagaaacagatcaagaagagatcggaccaggcgagctgctttagccttgctgatggaattcaagaagggtcgtacatacttcaggagtcctccaagctctgcagcttgtccagtctttgccaggagagatcccagttccaggatgctctgctctttgacttgcactgcctcttcatcgttttcctgaatgtcacgcttcacgatggagtggaggatgtcgatggaggcctcccggtcggtgctgagtagagactgggctctctggaactccaccaccgccgccgccgccatcttaccgacgcgtggcgcacgcgtgggtcgacgatatcccgaaattccggaccgtaccacct

SEQ ID NO: 312254 - DNA, 723 bp, Homo Sapiens
aaggaaacagcaaagccagatcctgagcactgaggcttgggcacaggactgttgccaatgaacccagaaacaaatccaatgagacctctcagactctagcagcctgtttcttcctactcacagacctaagttaatagagctggtataggttaggaggccaggctctatacagagtattcatttcaggaccagctgtggctagttaataccatagatgatagggacgaaacagagggctagatctggagtaagcctgtaaagcttctaaagtgggatatatcatgcccataaccctggccacaagtccaagacaaggaatggtgttctctggaaataaaagctaaaagtctaagaaataaaagctataggtctactgtgagagctttagccacacagtatggaataattttctgtgaagggtccaagaaagtgacagtggtaggctatgagactgtggtctctgaagaacagttcattcatctgttttggtttaggcatagtttactctaagggtacggagggaaggatgggagaaggatacaatgacgcttcacggggtctttgatctataatttacgacagagctgtccgatgtatgtatgcaaaaccccataacaaatcaatgcattttgtagagagggttggatttttccaggtgggctagtcctgcctctctcctctggctcagcaatgaggaggatatgaggatatactacccggccg

SEQ ID NO: 312255 - DNA, 885 bp, Homo Sapiens
cttcttgccagactctttatgcactaaacctggaacaataccaattcctagcttctttcctgaatctttgcttagcagtcctactgtagtgatagttcctggctttttgcctaagtttttattaatgaataccgctgtagtgccagttcccagttttttcacagagtccttattgaccaatcctactgctgcattaaacactggctttttcccaggatctttagttaccaatccaactgctgtgctgatggttgcttttttattaagtccttatgtattattccagctacagagccaacacctgctttcctgatcaaatccttgctaaccaatcctgctgtagtgccagttcctagcttcttcggttttgtcttggaagacttggaaggaggacaggtagcaatcagctgtgccaacttttctgttacactagttcctccattaagtaatgctctgtcctttaaatcaggatcccggctaccaagaagagtagatggcgttgcattaatataatctgccatttctgagtgtactggagacagcttcttagacaaaggattgttttctccctgtgaatgaagacggatgacttcttcagactggcattcaatggctgcaacatcatctgctttcctgtacaactttgaagggtctcgttttgaaggacagtgttcattcttttcacccgtcatctttccacttttaagtgctttccttgggtgcttaatagttgtttttatggcaggtcgacatacatagttctccaagttctttggaggttttttagttctcttagcctggaggccaattttcaattttaaatttcccttctgaaaagtttgtttctttcactgaaaactgttgctgtgcatcagtcaaaccatc

SEQ ID NO: 312256 - DNA, 495 bp, Homo Sapiens
  misc_feature (279)..(310): n is a, c, g, or t
agaggttgcagtgagccatgatcgcgctgctgcacttcaaccaggtgacagagtgagattccgtctccaaaaaatatgttggctggaagatattttattccaccgttgtatctgggagaagaaggcttgggtgactccctgaaacttctaagcaagaggagaaaatgtatcctcccaaagcagggaaggtaggtggcagcaacagcagcaggaatgctttgtcgctggtgaggccatctctctcccgccaagctcagcaccacatgcgcgcacgcgctnnnnnnnnnnnnnnnnnnnnnnnnnnnnnnnnaagggagagggcggaggggtggtctcgcacacagtcttcagcccctattagtcctcctctgatctttagcagattaattaggaagtttgtcaggaaccagccgtgaactccagccgctcctctctgggagtggtaacagtgccagcgaaatctaagctgcaggaattcctctagccacgctgctc

SEQ ID NO: 312257 - DNA, 1147 bp, Homo Sapiens
  misc_feature (996)..(996): n is a, c, g, or t
agctcaagtgtgctaataattttaattgtcgttccctcatgtcattgctcttatataataatactatatttattgtaataaattaaattagaacttgcaataattttatcaagaacaaagtctaaatgatttctccttcaaatttgagatgcaattagatgtatgaaatcctaatatcggaagttaagatcttttgacataaatatatcaagaaaatccttcaatccctcacatgtcaaataagtaaactaaggttaagaattcagttaagtaaaaagattggttaagaatttatttccttgggcttttcaaaataaaatccctttataattgcatggaaaatgttttccaatttattttggcttctggggactctgaaattttacagttcagtagatgtttctgttggtttctttttgaagaagagtggaattttagtttctgaaatataaagtgggagcactggatcctaatttcagtgtgttcatttatgcgtgttcctgagtctaaatttatttttttaaaaaataaaggtaattatccctgatctgcccatctgagaagatgttgtatagggcaaacatgaaaacatatgtgaaaggatatgaaaatgtgtaaacttctagataagcatgtaacagatacttaggcattttttcttataaaatcaatttcaacacagatgacataaattatcaaattactttgatttcattgagttttatagctttccccctctagtataaaagtgctgattactcatgatattcataggttgttttcatagccacagtatatcaaaagaagattgactagaatataaagcacccacactaataatagtaccaaacagacaattgatttgaaaacattgtttctttcttctgatcatcacattggtgtcagtttcattaattttataatgtctcctctagtggacaagagactggaaatggttcttagagataggatcttactccttcagatgattttatnaattttgtttactaaaatcttcttttatcttattaaagcttaggctcttggattgtgtgaaaaaaatgaggttctttcaatggctatttttatattgacttggaaatcattttcagttttaaatattgtatgacaatggcctcatattttt

SEQ ID NO: 312258 - DNA, 1334 bp, Homo Sapiens
  misc_feature (14)..(14): n is a, c, g, or t
  misc_feature (60)..(60): n is a, c, g, or t
  misc_feature (77)..(77): n is a, c, g, or t
  misc_feature (1047)..(1118): n is a, c, g, or t
aaatttaaataccntagactggggtccccaggtaggccagtggaaagagcctaaatgttnacagtgaagaagtgagngcagctttgtaagtgtctccacaccttcacattttgtgaacgtggactggagataactgaaaacccatctgctatccttacctggggatccagattttcctgcaaaatctccaaatatttataaagtggcttcactttttgaaacgctgtgctgaccaaacaaaacatatgtttagagtgcctgaggtcatagtcctgacaatgatagtattgtgtagttgaaatcctcttcatcaggccaaactgtgcttgagcaatcaggagcccagaaagatggaacccattggtgtttgtatagaaagctagaaaatcaagtcaagtgtaatgaaaaagtaaacacgataaagcctagagtgagaatttgctcctttttagaaaaggatgaaggctgggagcagagaatagtaacataagtgcaggggaaagatgaaaaaaagaacaatttttcattagtagatggtggggcaatcgcatggatggggacatctgttctgatttttctgcaacccatgaaggtaaaaagtggggttcaaaacattcaaggtattaaagatggggtagagtttctaaactaggttgagggagagtttctaaactagccccccagatttggggcttggagcttaaatgaaaagtccaggagaaataagggcacacaggaaccccgggaacactggtcctcaaacagtgccactgtacttagttccatggccagaagagaagtgctaggcagggaatgattattttgcaaaagcaagtgcaatgtggtcatagctggctgtgagacatggagcctctttcctcatgcaagttcactgttttacagtcagagaaccactgcatgtgtgattgtcaatgctaatgctgtcatgggtcccttccttctctgcttggttctggagttctccaataaaaccaatttcctgggaatatttgatgtttttccttgtctcttttcaaggtatggctnnnnnnnnnnnnnnnnnnnnnnnnnnnnnnnnnnnnnnnnnnnnnnnnnnnnnnnnnnnnnnnnnnnnnnnncaggcattaataaagtgcaatgttattggctattgtaaaaatcaatctcatttcctgaggaagtgctaacacagcttatcctatgacatgtcaaggcatagaatgctctatgtcacccactcctgctgctgttgtttccggaacgcgtgggtcgacgatataacgggattccggaccgtaccagcctgctttacgccacttagacccaatgcactt

SEQ ID NO: 312259 - DNA, 454 bp, Homo Sapiens
taatttttttagtatttattgatcattcttgggtgtttctcacagagggggatttggcagggtcataggacaatagtggagggaaggtcagcagataaacaagtgaacaaaggtctctggttttcctaggcagaggaccctgcggccttccgcagtgtttgtgtccctgggtacttgagattagggagtggtgatgactcttaacgagcatgctgccttcaagcatctgtttaacaaagcacatcttgcaccgcccttaatccatttaaccctgagtggacacagcacatgtttcagagagcacagggttgggggtaaggtcatagatcaacaggatcccaaggcagaagaatttttcttagtacagaacaaaatgggagtctcctatgtctacttctttctacacagacacagtaacaatctgattctctatcttttccccacctttcccccc

SEQ ID NO: 312260 - DNA, 961 bp, Homo Sapiens
cgtgtgtccggctgtatcaacacaacaaaaacaaggggagatttacctccgcggaccctcgggggctttgagccacctcaggtggggcctgcccccccaggagggagggccctgctgccgggcctcccggtccgccggctccttttccggagccctggtcccaggtaattgccacaagcgtgtccctactcatgtaaaggtgatgggacttcctaacaccatgtcaacatgactgctaacaaggagcccacacacacaactgaatttcacaggacctcatatcctccaatgggctctttcccacatctactcgaaaggaatcgtgggtttccctttgggcttttcttcctgggaatcagtccatgggagatgccaagcgcccctggaacatgaaattatccacacatgtgtaactgcacactctagattaacaggagagaaaacacgctcatttttgtttccagctacacatacttagctttctaaacacaaaaactgaataatttatctgatttatgaatgatggtttggtatgtctaagaaagctatataaaacataaaatgaactcatgttcatgcatgaattaaactgacttcatgagttctagggagacgcattaacctgtgctgttcccctggacgcacacttggcctcatacaggtgccactaacagccctgatggcagtgtcagaggacagcaaggtgaggctggggaagtgaggctgtagggcccagagaggccctagtgcctccaacagtctcagatgctacttgattacttctatgctatgggctgctaactcttacatagcctagaaaatatttacccatgaacactaccatgtttggatttcaaacaactttaaacatttggtatcagattgggggagcaacaaataataaaatttagcgacgcgtggtcgacgatatcccgggaattccggccgtaccagcctgctt

SEQ ID NO: 312261 - DNA, 944 bp, Homo Sapiens
  misc_feature (596)..(607): n is a, c, g, or t
gttattgttctccctttatccaattaatagagtctttatacaaagcccctgtccctattagttatccttatctctttactatggttaaattatttttccaagaaagattatttacaaaggcattatgccaaagtttctttaaataaaaagccatggccccgatccccccaaatcatttaagtgatcatatccacagtctggttcttgtaattatatgctaaaaatttatgcactgttctcattaacagcattccccccccttcattagagacatcaagagcttctgagaatgtgtagtttttcctaaagtactactaaaagtatcatgaacaccgtttgtgcagcattcatttacatcaccttttatttactatattctaaactcataaaatatttaacatttctctacttcatttcttatttacagtacagaggctcatctcttgtcacaatatggtttgtgcattaaaatcccctgggaatagtactttcaagaacattttaataaattgactccgattatttaaaataagaacacaaacaaaagctttttcacccagaagaataattcttccagtagacttattcaggacttnnnnnnnnnnnntccctctttaagtaaaatacattcttcaaccattactggattatactatcatgcatatttataatgctaataatgacacacgtaaagccagctatgacttttaaaattccatttagaagagtacagtagacagaaagtgctttggctttcactctcttgttatccataatccattattatttcacatgggtatattttatttattcttagtatataagtatttaatggttcagtaataactggcagcttctgacagtcctattttcttggtcgccgacgcgtggtcgacgatatcccgggaattccggccgtaccagcctgctttttacacgtgttc

SEQ ID NO: 312262 - DNA, 673 bp, Homo Sapiens
  misc_feature (493)..(493): n is a, c, g, or t
  misc_feature (597)..(597): n is a, c, g, or t
  misc_feature (610)..(610): n is a, c, g, or t
  misc_feature (628)..(628): n is a, c, g, or t
ttttaaattgatcattcttgggtgtttctcgcagagggggatttggcagggtcataggacaatagtggagggaaggtcagcagataaacaagtgaacaaaggtctctggttttcctaggcagaggaccctgcggccttccacagtgtttgtgtccctgggtacttgagattagggagtggtgatgactcttaacgagcatgctgccttcaagcatctgtttaacaaagcacatcttgcaccgcccttaatccatttaaccctgagtggacacagcacatgtttcagagagcacggggttgggggtaaggtcacagatcaacaggataagaatttttcttagtacagaacaaaatgaaaagtctcccatgtctacctctttctacacagacacggcaaccatccgatttctcaatcttttccccacctttcccgcccttctattccacaaagccgccattgtcatcttggcccgttctcaatgagctgttgggnacacctccctcctggacggggcggctggacaggaatgtattttaaatattggtgtggaatgtctagtattctcacagagtttctcctaataattgtctttactntccttgtagggtntgaagactgggatgtatnatttaaggacaagaccagcggctaaatccaatccagtttcactgc

SEQ ID NO: 312263 - DNA, 471 bp, Homo Sapiens
agcatatggaggatccgcgccgtctctgagttcccttagtatttattgatcattcttgggtgtttctctgagagggggatgtgtcatggtcataggataatagtggggagagggtcagcaggtaaacaggtgaacaacggtctttgcatcatggacaaggtaaagaattaagtgctgtgcttttagatatgcatacacataaacatctcaatgctttacaaagcagtattgctgccttcatgtcccacctccagccctaaggcgttttcttcctatctcagtagatggaacgtacaatcgggttttataccgagacattccattgcccagggacgggcaggagacagatgccttcctcttgtctcaactgcaagaggaatgccttcctcttatactaatcctcctcagcacagaccctttacgggtgtcgggctgggggacggtcaggtctttccttcccatgaggccata

SEQ ID NO: 312264 - DNA, 497 bp, Homo Sapiens
cttgtgcaatttcgttttttgaaaaaatagctaatggagattctgataattcttattgtttcctggtcaacttctgtgtctttcctaattttcaagctgtcagtagaaatgatgaactgtagcaggccagaagctcagcttcatttggtcactttttcctttcctgtcttcttgcccatccagctttcccctttctgatggtgtcttcttatttctgacaatgcttgggagcgagctgtgtgacacccagattttacgagttgccagcggtggagaggagagagccgggcatgcagattcttcatggaccctactagagaggacagagaaaaagagcactggtgtaggagcccacgggtctggctcttaaccctggcctggtgacttcagctatttgaccttgagcaagtcacttcatttctcctttagcaacatctctaaaatgagggagtgagcaaaaatgttcccttagatttcttctaattcagaaataccag

SEQ ID NO: 312265 - DNA, 534 bp, Homo Sapiens
caaaacctcaaacttttgtctttccaggaacggtaatggtaggagagagagagcagggattggggaatgctgcccccccaaagtttctgtggctgcgcttagcaccccaaccatcctcctttgtcctcagtggatctaaagtttgataccccaggaggggagcgcttcaccgtctgtacactttgctggttaatcaacgtccaggcaagagagagcctctcgggtcgccagaaagataactgtcttggaaagtgaacgggaaagacacttggaatgagatatctgacacctgggtgcctctttgtctttgcaggaagtggttacctggaaggaaaggagctgcagaacttgatccaggagctccagcaggcgcgaaagaaggctggattggagttatcacctgaaatgaaaacttttgtggatcagtatgggcaaagagatgatggaaaaataggaattgtagagttggctcacgtattacccacagaagagaatttcctgctgctcttccgatgccagcagctgaagtcctgt

SEQ ID NO: 312266 - DNA, 1597 bp, Homo Sapiens
  misc_feature (1548)..(1548): n is a, c, g, or t
tttggtgccgtgactcggatcaggggacctcccttgggagatcaatcccctgtcctcctgctctttgctctgtgagaaagatccacctacgacctcaggtcctcagaccgaccagcccaagaaacatctcaccaatttcaaatctggaagtggttacctggaaggaaaggagctgcagaacttgatccaggagctccagcaggcgcgaaagaaggctggattggagttatcacctgaaatgaaaacttttgtggatcagtatgggcaaagagatgatggaaaaataggaattgtatagttggctcacgtattacccacagaagagaatttcctgctgcctctttcgatgccagcagctgaagtcctgtgaggaattcatgaagacatggagaaaatatgatactgaccacagtggcttcatagaaactgaggagcttaagaactttctaaaggacctgctagaaaaagcaaacaagactgttgatgacacaaaattagccgagtatacagacctaatgctgaaactatttgattcaaataatgatgggaagctggaattaactgagatggccaggttactaccagtgcaggagaattttcttcttaaattccagggaatcaaaatgtgtgggaaagagttcaataaggcttttgagctgtatgatcaggacggcaatggatacatagatgaaaatgaactggatgctttactgaaggatctgtgcgagaagaataaacaggatctggatattaataatattacaacatacaagaagaacataatggctttgtcggatggagggaagctgtaccgaacggatcttgctcttattctctgtgctggggataactagagttggtggccgcaaccacttgctagtgatacactgtatctaaaaaataactgtgcactataagggagtaggctgtattttcttttatatctgtaaatttaactgcatatagataattatccaggatgtgtggctcattcttttcagcttgtttctatactgtttgtaatatacagtttttgtaaccatatgattgaaaagaagaaagtctatgcttaggccagtcagtacacccaattttaaaaaataacatattcttgctttcacaaatatagttgaacaagatttccctaaaaattccaccaggattaatctctaaaattctagtctctgatttgcaaatgcacatttgtcactgaataatggaattatgtataacaagccaaacattcttattttagacaaccatagaactgtcccacaaaatatttctaagcttatttctaactattaggaggaatgtgcttttccatctaaaatactcaccaaaatatagttaattgtggctttatgaagttaacagtctcattacagatttagtttaccaatcaacagcatgtctactgcttggatccatacaaaactatcggttcaagttgatgtgacaagggaagggagcaccagatgacacataaatctgtctgattctatgcctgtatttccaacaaacttactgtcagagaatatgacctanatccattttctaaactgttttcatgtgttgcaaattattctagtcaact

SEQ ID NO: 312267 - DNA, 1133 bp, Homo Sapiens
  misc_feature (460)..(460): n is a, c, g, or t
agacccatctgacctctcccttcctcccaggctgcttctcgccaggccgagctaggtcccaattcttcctcagcctctgctcctccaccctataatctttttatcgcctcccctccctcacacctggtccggcttacagtttcgttccgtgactagccctccccctcctgcccagcaatttactcttaaaaaggtggctggagctaaaggcatagtcaaggttaatgctcctttttctttatccgaaatcagatagcatttaggctctttttcatcaaatataaaaatccagcccagttcatgacttgtttggcagcaaccctgagacactttacagccctagaccctaaaaggtcaaaaggccgtcttattctcaaaatacattttattacccaatctgctcccgacattaaataaaactccaaaaattaaattccggccctcaaaccccacaacaggntttaattaaccttgccttcaaggtgtacaataatagaaaaaagttgcaattccttgcctccactttgagacaaaccccagccacatctccagcacacaagaacttccaaatgcctgaaccgcagcggccaggcgttcctccagaacctcctcccacaggatcttgcttcaagtgccggaaatctggccactggaccaaggaatgcccgcagcccgggattcctcctaagccgtgtcccatctgtgcgggaccccactggaaatcggactgtccaactcacctggcagccactcccagagcccctggaactctggcccaaggctctctgactgactccttcccagatcttctcggcttagtggctgaagactgatgctgcctgatcgcctcagaagccccctggaccatcacggacgccaagcttcgggtaactcttacagtggagggtaagtccgtccccttcttaatcaatacggaggctacccactccacattaccttcttttcaagggcctgtttcctttgcctccataactgttgtgggtattgacggccaggcttctaaacctcttaaaactccccaactctggtgccaacttggacaacattctttttatgcactcctttttagttatccccaccttaactgagtgattaaccttgtgaaattcccc

SEQ ID NO: 312268 - DNA, 573 bp, Homo Sapiens
  misc_feature (330)..(417): n is a, c, g, or t
cggatgggcacggttttattctggaacggtgaacccagtggggaaggatcctgcaggcggacggcagttggggtactatagatgactaagtagggtccagtccatcgaggttgtagagtttgaggggtcaggttcttaataagaactgatcgtccagctagggtgtcttcatatagttgggaatccgatttgaaattcatgagatgttccttgggctggttggtctgaggacctgaggtcgtaggtggatctcctcacggagtgagggcgaggacaggggactggtctcctgaaggagtcctcctgtcctgggtcttcagcaccaaatgnnnnnnnnnnnnnnnnnnnnnnnnnnnnnnnnnnnnnnnnnnnnnnnnnnnnnnnnnnnnnnnnnnnnnnnnnnnnnnnnnnnnnnnngttctccccagtgactgcccaatctttagtgtgttttgctgactcctgtcgctctggctcttccataagaggcgtttttgcacgattgcagacaggaataaaaatgagctctgcctactgggccgtcctggttagcaaggtctacaccacctcccc

SEQ ID NO: 312269 - DNA, 528 bp, Homo Sapiens
tccgatgggcacagctttattctggaacggtgaacccagtggggaggatcctgcaggcggacggcagttggggtactatagatgactaagtagggtccagtccatcgaggttgtagagtttgaggggtcaggttcttaataagaactgatcgtccagctagggtgtcttcatatagttgggaatcctctactgtaagagttatccaaagctcggcatccgtgatggtctagggggcttccaaggcgattgggcagtgtcagtcttcagctgctaagctgagaagatctgggaaggagtcagtcagagaggctttggccagagttctaggggctctgggagtggctgccaggtgagttgaacagtccgatttccagtggggtccggatttgaaattggtgagatgttccttgggctggttggtctgaggacctgaggtcgtaggtggatctttctcatggagcaaagagcaggaggactggggattgatctcccaagggaggtaccccgatccgagtcatggcaccaaa

SEQ ID NO: 312270 - DNA, 338 bp, Homo Sapiens
  misc_feature (29)..(29): n is a, c, g, or t
tatttaaatgtccaggaacctgaactggntgttaaaaatgccataattaagaatgaagatggccttcctgacccttcagggtcttagggctgtaaagagtcttaagggttgctgctaaatgggccatgaactgggctgggtttttcatatttgatgaaaaagagcctaaacgctaactgatttgggagaggtccgataaagaaaaaggagcattaacctttactatgcctttagctccagccacctttttaagagggaaattgctgggcaggtggggggagggccagtcgcagaacgaaactgtaagctggaccaggtgtgaggagggggaggtgata

SEQ ID NO: 312271 - DNA, 536 bp, Homo Sapiens
ggggagggaaatgcatcggcactcatttggtgtaaccaagaagagggggaaagatgtcttgatagaatcaaagttgccaaaaacaaagaagagtttatcaagcagatttctaacatttagtagaacctacttcatggctctcatttttagggggttcctatcctataatttatggtaaatagttgggaggcaaagggaagaatgtgtgtggggggattattaatttgaagtataagctaaattgtttattaaaaagcctattttggatgaacaagtttagagagataaactgactaatgtgtcctccagtttagaatttcaccttacccgacccaggcacttcttaaaaacacagatcctcagtgcagctctgccagcatcaaggcttttaaaatatgtagtatttaggccatttaaaccatacttattactcaataacccaagaaacaattttgggttagccatctaatatagcaaataaaatagattttttaaagaaatccaaaattgtcttaaaggaatggaccccttgaaga

SEQ ID NO: 312272 - DNA, 822 bp, Homo Sapiens
  misc_feature (109)..(109): n is a, c, g, or t
  misc_feature (124)..(124): n is a, c, g, or t
  misc_feature (172)..(172): n is a, c, g, or t
  misc_feature (468)..(476): n is a, c, g, or t
agtgccaaaaatcttttgggtagtcttttaaatccccggcagttccatctcacaatattaagttcatttgaagatacaatagtaatctttggataggcatgaaaataanacattagaatcccanatatactcccctagggccaatcacataagcatattagagataaatganattttttacaaatagcaaacctttatttaccaatttgtggttttttccccccggtcttaaatcttgggtattttgtattttcacatttttcactttccttctgtccctagatcctcctaatttcctattactcaagtaatttgttctgtttaatcaaagaaatcaacctgatatttcattacattttgctaaaaactcagaaataaacctatttatgaagcgcactatgtcatatactgtaaaaacttcattttagccgtgttatattgctggcaattactgaactacgaaaggcnnnnnnnnnccccctctctctctctcaacttaataaagcttgtcaaagtttccaggaaacaaactgtgacttccgcttttattgcattctgatgggatgagtgattacagaagctcagcatcacagatcgctctccccgtagagtgcggaagagaacgcagcgtaatccagtgcaccaggcacactgcctgggcccgagtaggcgggcatcctcttgatgcagtactgggcctgatccgggggcagctcccgacgcagctcctccgccaggatgtatggcttatcagaagccaggatccggaaggaggcgatgacctgctcggcagtgtcggtgtcagccgtctctctagtcatg

SEQ ID NO: 312273 - DNA, 1298 bp, Homo Sapiens
ttcttctcttccatatagttacttcttgaggggtgaggttctcttttggagcttcaattgatacttttcttctttaaccactctttttctgaattcagtcactttagctggtggttcctcctctcttttaggtttgagtttcagaactttttcttctgggacagctctcttcggttcctctggcactcttgcttttggaggcgcttcttttttagttacagcaacaagaactttttcttcctgggtaatttgcatgtgcctctcagtcactttggctgggagaggttcttccatcttaatgacttttggaggaacctttttttctggaactggtttctttggctcttctggcactttaggtgggggcaccttttcctttttaggaactggagcaggaactttcttttctgcacaattttcttaggtgcttcaggaactttagccggtggaggctcctctattttagcaggaatttttggtttcagtacaattttcttctcctgcctctctgtcacttcagctggctcagcttccactctcttagaaataatgtgcagcttttcttccacaacatattcctcaggctcttccatcacttcatattctgtaacctctgcttcttcctcctcctctctttcttcttctctataaactgaaatggacacaccttcctcctcttctgagtaactccattcctcctctgcagatacttcgtgccgcgtgacttccactctttgaggaactgcgaaggatagtttttcttcagcaacaaatctcttttcttctacaacagttttcttagagacttcagctcggggaggaggagctttcttagcgacaggaactggcactgcaactttctcctctgggacgggtttcttaggcagagctggcacttttggtggtggtggaacttcttcctccttccgaggaacaggtttcctttcttcaggaactttcttctttggtatttctggcactgctggtggtggagattcctctctttgagttacaatggttattttttcttctgtcacaactcccttctgtacttcaggaactttagctgggggagcttcctttttctttgcaacaggaacgggaatcttttcttcagggacaggtttctttggcacctctgggacttttgggggagcagcaggttccttcttaggcacaggaactggctttttctcctctggcacgggtttcttgggaacctcaggaacttttggtgctgggggctccacttttttagggataggaacaggggccacttcttctggagctggtttctc

SEQ ID NO: 312274 - DNA, 687 bp, Homo Sapiens
  misc_feature (291)..(328): n is a, c, g, or t
tcgcctccctgtcagccgaggagctgaaggagctagagagagagttggaagacattgaacctgaccgcaaccttcccgtggggctaaggcaaaagagcctgacagagaaaacccccacagggacattcagcagagaggcactgatggcctattgggaaaaggagtcccaaaaactcttggagaaggagaggctgggggaatgtggaaaggttgcagaagacaaagaggaaagtgaagaagagcttatctttactgaaagtaacagtgaggtttctgaggaagtgtatacannnnnnnnnnnnnnnnnnnnnnnnnnnnnnnnnnnnnnagaagacagtgacgaagaggaaagaacaattgaaactgcaaaagggattaatggaactgtaaattatgatagtgtcaattctgacaactctaagccaaagatatttaaaagtcaaatagagaacataaatttgaccaatggcagcaatgggaggaacacagagtccccagctgccattcacccttgtggaaatcctacagtgattgaggacgctttggacaagattaaaagcaatgaccctgacaccacagaagtcaatttgaacaacattgagaacatcacaacacagacccttacccgctttgctgaagccctcaaggacaacactgtggtgaagacgttcagtctggcccaacacg

SEQ ID NO: 312275 - DNA, 1266 bp, Homo Sapiens
  misc_feature (479)..(535): n is a, c, g, or t
aaatttcactcattttaatccaaaaaaggacatactgggggaaggcatccaaatgtgccctagtggttttcaagtcccgacttttcccctttttcccaaaaacccaggcaacgcccaccccaaaacccccaccttatggtcaaagcattcctgctgatgttactcaaaatgtgtcaggatcaggaggacaagtgaggggggaggcgtgcaatgtgatcaaaaccctatgatttctgattcctgaaattaaagacacaatgtgccttatgtttgtatgtctggagcttaaactataaattcctctggttgtgggtgcctgttgtttatgaactggaaaggaatgataaagccgcaatcaagatcacacaacacaagaaattttacaaaaggaaaaaatattttgtttgaaaatctttgctacatgtcattatttttgccactgtaaagcttagcacagatgccagcaatacagaaatggnnnnnnnnnnnnnnnnnnnnnnnnnnnnnnnnnnnnnnnnnnnnnnnnnnnnnnnnnagtgattttttctcccccaccccttatcctcaccccaatagttctattctgaaaaggggggaaacatagttagatcagggaattcttcattgttgtagctgttgctctgatctcccagcatggacagcatctcctggaagacctcaggctggccaggttgctgtgctggcggttgttgaacatgttgctcactagaacttgaacgatgatgaggctgctggccctgccactgtggccagacacccacaccctctgctgtccgtgtctggaattgtcctgcagtctgtccagtctcaggagcaaagttagatccacgattggtgagactagggtaggcagcagcaccaggcgatgcagttggggcacagggagggacatggagctgaaggaggatggagtctgaaagctgcccacaccaaactgggaagtacgagtcttagcagtagcctgggtagccacctgctgggcagaaaagcctgagcgggtagtagggggtccaagtgggggtgctcctcgggtgggggttgaagtggcgggaaattgtggcaacatatgtcctccagaaaaattatgttgggcaaaagttataagaagggggcaaggcccaatatccctgaaattcctcttccggccggggggtaaggaggaaaatttttttcccctggaaaaatacccttttggttgccagggaaaattgtggaggagatgccttttacctcaatccgcattga

SEQ ID NO: 312276 - DNA, 463 bp, Homo Sapiens
  misc_feature (438)..(438): n is a, c, g, or t
tttaaatttcactcattttaatccagaaaaggacatactgggggaaggcatccagatgtgccctagtggttttcaagtcccgactcttcccctctctcccaagaacccaggcaacgccaccccaaaacccccacctcatggtcagagcattcctgctgatgttactcagaatgtgtcaggatcaggaggacaagtgaggggggaggcgtgcaatgtgatcagaaccctatgatttctgattcctgaaattaaagacacaatgtgccttatgtttgtatgtctgggagcttaaactataggattcctctgggttgttgggggtgcctgttgtttatggaacttgggaaagggggaattgataaaggcccgccattcaagggttccaccaccaacacaagggaattttttaccaaagggggaaaaatattttttgttttngaaaatcttttgctacaagtccatt

SEQ ID NO: 312277 - DNA, 323 bp, Homo Sapiens
ccctgcctgatgttacctcagaatgtgtccagggatccaggaggacaaagtgaaggggggaggccgtgcaatgtgatcagaaccctatgatttcctgattcctgaaattaaagacacaatgtgccttatgtttgtatgtctggagcttaaactatagattcctctggttgtgggtgcctgttgtttatgaactggaaaggaatgataaagccgcaatcaagatcacacaacacaagaaattttacaaaaggaaaaaatattttgtttgaaaatctttgctacatgtcattatttttgccactgtaaagcttagcacagatgcc

SEQ ID NO: 312278 - DNA, 875 bp, Homo Sapiens
  misc_feature (242)..(261): n is a, c, g, or t
  misc_feature (280)..(409): n is a, c, g, or t
  misc_feature (412)..(431): n is a, c, g, or t
  misc_feature (477)..(538): n is a, c, g, or t
  misc_feature (560)..(569): n is a, c, g, or t
tattcagtatattttaagatgaataatcacagaagtaagtttaataatttgtcctgtttttctctgtcacttcctttttctctaaggcaggaaaggaaagacattaaaccattaattaagtcaatcctcttggagactcaaaagactatgaagtgatcactctatataaaatataaatacagtgtgggttcaaatggccattttttgtgtgtccctctctctcatcttatgcttcccttccnnnnnnnnnnnnnnnnnnnnggagacggagtcttgctgnnnnnnnnnnnnnnnnnnnnnnnnnnnnnnnnnnnnnnnnnnnnnnnnnnnnnnnnnnnnnnnnnnnnnnnnnnnnnnnnnnnnnnnnnnnnnnnnnnnnnnnnnnnnnnnnnnnnnnnnnnnnnnnnnnaannnnnnnnnnnnnnnnnnnngtatttttagtagaggcagtgtttcaccgtgttagccaggatggtnnnnnnnnnnnnnnnnnnnnnnnnnnnnnnnnnnnnnnnnnnnnnnnnnnnnnnnnnnnnnntgagccaccacgcccggcctcnnnnnnnnnnagctgccaatctttttgaaggaatattcttacctctactttgtcaccttctactggctccttaactaaaatctgccatttggctctctggttaacagtcccttcctgtaaagtctaaaatcttaattctaaatccacagtttaattcacaagctagtacttgactttttttctgtatttgacatttttgacaacccctactttaaagatttattcccttgacttcttacattttgctcactcctgaaccaccccccaccttttggcctcttcatttattccttaaatgttattcctcagacctcca

SEQ ID NO: 312279 - DNA, 2030 bp, Homo Sapiens
  misc_feature (117)..(130): n is a, c, g, or t
  misc_feature (428)..(436): n is a, c, g, or t
  misc_feature (921)..(954): n is a, c, g, or t
  misc_feature (1519)..(1519): n is a, c, g, or t
  misc_feature (1781)..(1790): n is a, c, g, or t
tcaggggtttccattcaatccccggttttgtggaaggggctttgccaatgttccgccaaagaaatgtctttaattgaaattttccaccccggtttcttgggatagaaggtgggccannnnnnnnnnnnnnttaaatttgaatattggaagcttgggccttgggacttcctgttgattaggatccaggttaatggccttcaggaaactcccattttgggatttggttcagaaaccgctcgggtttgccccgccgggccgtttttttatttggggaggaattccaaagccctaagttcatgccccaggatttccttagggaaaccagctaagggccaattttcactttccttactggggcccgcgcggccaaacgaaatggtttagaaagtttctggagggccggaggcggcccgacaagattaaaagannnnnnnnnagaggtcgggttcgggtaccaacatttttatttattcaaacattaagctaagaaaaattgttgtatgaaataatttataacacttctccccttcccttcagaatcttaaacaggaatccatttatctaccttataatcctaggaaggtattatttgattattcaagaaattcctcaatgatgctgccttttcccatgaaagaagttcctttttttccccgaatagacccctttcatgacccaccaaaaaccacaccaaatcttgaatacaatttcagctttattgaccccctaaagtctacaaatccttgggactctactgacccttgctgtaaagtgaagggagtgaaagtatttggaatataggtaggacctctaatataataaagatgtcactttaaaatcaatttattcaacaaacatttattaaacattcatatgccaaaaactatgctatggagatgcaaaaaataaaaaggttccttnnnnnnnnnnnnnnnnnnnnnnnnnnnnnnnnnnacttttgaaaaataaaacaatacagtacgatttaagtgacatacaatagaggtaggttgtaattacagtggtgacacgaaagtggaagttagatgactctccttgagtggagcaaaggaggtttcacagaggaaatgcttatgtcaggcctgcaagatgcataggaattttccaagtggggaaggatgactagcatacttgatgcaaagagtacagcatttaccaaggcgggaggcctggccaaatgtggcttctgaagaagtgtaagtctgtttcaccagaacattcggtggaggaaacacatcagaagaccttgtacaccaaacagaggagtttgggctttctcctgaaagttcctgaagtcactgaaggatattagggagtaacactgtcagagtgcttctagaaagcctgctgtggtaacattgagcaacagagaggagaccagctaggtataggaggcaggttagtactgtaggtatttattaataatagcaatgaagatgaaagagtgatgtatcagagaggtggagataaaatcagtaaaccttagacacctaaatgnataggggaaggtggaggagaggaatgagccctagaaaacttagaatataatggttcctaaaattaacccaaagtaagggacacaggcattagagtaggttttgcagagaatgaatgttttaagacacacacaggtgtctctgggacaaccaagaaaagtgcaacaggcagatggattgaggagtctggctaaagataaggatttaggaactgctgaattaaaattacccaagcgtgagaagtggtgttgtgattaagagagnnnnnnnnnntggaggtctgaggaataacatttaaggaataaatgaagaggccaaaaggtggggggtggttcaggagtgagcaaaatgtaagaagtcaagggaataaatctttaaagtaggggttgtcaaaaatgtcaaatacagaaagactttacaggaagggactgttaaccagagagccaaatggcagaagttaaggagccagtagaaggtgacaaagtagaggtaagaatattccttcaaaaagat

SEQ ID NO: 312280 - DNA, 762 bp, Homo Sapiens
  misc_feature (724)..(724): n is a, c, g, or t
gaattgctctgttcttattccaacaacaaaggtgagttatgggtttctctcatagaaaaagcatacatgaaagtcatgggaggatatgattttccaggatccaactccaatattgatcttcatgcactgactggctggataccagaaagaattgctatgcattcagatagccaaactttcagtaaggataattctttcagaatgctttatcaaagatttcacaagggagatgtcctcatcactgcgtcaactggaatgatgacagaagctgaaggagagaagtggggtctggttcccacacacgcatatgctgttttggatattagagagttcaaggggctgcgatttatccagttgaaaaatccttggagtcatttacgttggaaaggaagatacagtgaaaatgatgtaaaaaactggactccagagttgcaaaagtatttaaactttgatccccgaacagctcagaaaatagacaacggaatattttggatttcctgggatgatctctgccagtattatgatgtgatttatttgagttggaatccaggtctttttaaagaatcaacatgtattcacagtacttgggatgcttagcaaggacctgtgaaagatgcctatagcctggccaacaaccccccagtacaaactggaggtgcagtgtccacaggggggtgctgcagtttgggttttgcttagtagacacataacagacaaggatgantttgcgaataatcgagaattatcacagtggttgtatac

SEQ ID NO: 312281 - DNA, 691 bp, Homo Sapiens
  misc_feature (19)..(19): n is a, c, g, or t
  misc_feature (61)..(217): n is a, c, g, or t
  misc_feature (229)..(264): n is a, c, g, or t
  misc_feature (281)..(325): n is a, c, g, or t
ctgtattagactgatgganacattacctcattcttacaatgttagaaagatattcataggnnnnnnnnnnnnnnnnnnnnnnnnnnnnnnnnnnnnnnnnnnnnnnnnnnnnnnnnnnnnnnnnnnnnnnnnnnnnnnnnnnnnnnnnnnnnnnnnnnnnnnnnnnnnnnnnnnnnnnnnnnnnnnnnnnnnnnnnnnnnnnnnnnnnnnnnnnnnncattagcctggnnnnnnnnnnnnnnnnnnnnnnnnnnnnnnnnnnnnaaagagtgagacccttnnnnnnnnnnnnnnnnnnnnnnnnnnnnnnnnnnnnnnnnnnnnnggtattcattacccattagctcctatttggtcaagaaccaagtagatttgaagacagtcactgtatgtattttttagatagaagaaatacccacacttcagagaggactgaagatatttatagatcacttcaatatgctaccttcaaaatttttcaaactcataatatataagagcttcaatgcatcttttattgggctaaataatattgtaaggctcaaaataacttcctgtccccatctcatctctgaaaagacttaataatttaaatgtatctaacgtcatgggggataaatttacttttcaaaacaaaaaaattttaaaatgatttatcagtaaacatcacctttagcagcaattattaatg

SEQ ID NO: 312282 - DNA, 821 bp, Homo Sapiens
  misc_feature (416)..(416): n is a, c, g, or t
gtaagtaaaggttcaggagcgggaagagagggctgaccagctgcggtcggctctgggaagggaaaaccaagggaagtgccgtgctcatgcttttccaaaccaaagccacagccacggtggctgctttcaaatatgaacaggcagccacgcgagtaagctgagttgaaggaattgtgataaaatgagaaatgatttcatacaggcaaataacataagaacagacttgctttgatcccagcagctggctgcgttaaagtgggggtgggagacatggctagacagcccaggagcgagtgacaggcagtgctccttgaaggcgccagaggccagcacctgtgcacagctgccagaggcctcggtttaccctcagcggggctggaagactgagcatggccgcttggtgccatccccatganatgggctgaggcgccccaagaggcgagtaccagagtgaggtgaggacagaacacgttgcccttgaaattgcaccacagaaaaacgagcatgaggtttgttggaaaagaatttctcccacagtacagttgagctgatcccccctcaggtgactattctaaacgtaaaaaaggacataggaaaataaaggcctgtttctcttctctaaaaataccttatatgtacacaacagtaattgttaacaggaggaccccgtgcatgaagaaaactgtggaacagagggcagtggcctgtcttctccccaagtacttcattcaagacagttttcaagttgtggccaagagctgagggaagccacggggctggcaatgcatcttgaagtgagtggtgtttgttgttactgcccg

SEQ ID NO: 312283 - DNA, 715 bp, Homo Sapiens
  misc_feature (85)..(85): n is a, c, g, or t
cattgatatctagtgtgagctttttcattctcatcctctcttcatgttctgcctgttgctgattccagtgatttgcagcaagtgnagaggacatgggtacattaaggatcttaaactgctgttagttgccttttcttgttaacatgacaaacggcattgtgtctgcagactcagcctctccttccccacctcccagtgggggccctttcctcagctggcttttgagatgcaaaggaatggcaacatctagttggtgcactttaacagattcaccacttcgttgttgtagattttctagcatcattttatccagagcttgaatgaagtcctcatcttctacacaaggtacatgcttaagtccaccgcctttaatcattacctcagtattctcttcatcggtttcattttccttattggaatctgtaaggtaatctgtattctcttcctcctcttcttctccctcatcatcatcattatcagaaccctcctcttcttctggctcatttacttcactttcatttccagattgttcttctgtttcagccccaccttcttcttcttcttcatcctcttcaagattattctccttcatgtcatagaatcttttgagtctttgtcatttactaggcctagttttattagagaattctcgttccaagtcttgtacctgcctgatggattacttccagagaattacagagtttgatctttggtc

SEQ ID NO: 312284 - DNA, 1280 bp, Homo Sapiens
  misc_feature (17)..(17): n is a, c, g, or t
  misc_feature (585)..(593): n is a, c, g, or t
  misc_feature (853)..(869): n is a, c, g, or t
cggccggggaagacatnaatattttactttctatttcttaccctattgggaagaatttttaaaagttgtaaaattgacttaaagttaaaatggttctgaatttggtgttccatgtcaactgttcccagttttaattttaactttgcaaaaataatgttgtgaaattccctttaagtaactaacacctagaaatagagtatcaccaaaaacaaatgtatttaggaatcccagttacaataaaaactgaaacagcatggctaagcatcttaaggataattaagaaattagcttatttgtatgctgaacaatggaatcgaactttaatttagcatagtcttattaatttggaaaattgtaaaacatctcaagagagaagttattaatactggtttattaatctttctagagaagaagtgtagttatacattcattcagtgcaatcattttataacagtagttaatatttcatttataatagttcttaatatacatttgctttcaaatattctgaaatgaaattatattcatgctatacctacagtgtatgtaaactaaagagatcactacatattgtttaattatttnnnnnnnnntttaagtaaaccctgttgtcattagctattaagaacattgattaagtccctggacttggataaacatatatccttgaacatatataatgaagaaatacagtggctctttattaaaaataatagttggataatataaactgaactatttatgcatttttatatacttataaatccttccaaatagttttaattctatccttttacatataaataacttaataagtgtgctggaaaaacacagatgttcacagcaccactgnnnnnnnnnnnnnnnnnggaaaataatataaaatcccagtgaaaaatcggggttggaatattgggttaaccttggttctccataatgtgaaccccactctccaggccttcgtgtcttgtcctcccctttatacccccaagaatattcacaagaaaatttttaggacaacaggtacccattatatggggtgtcggaatgcatttcccatgtttaatctaaatgccatgtccataagccccgagtatttacctaccaatgggctactatcgggatattttaattgaacccgaacattttgggctacaataatcttccccaattataatggtgtttcgaaattaaacatttaattttttgccctttgaattaaaaaggtcctcctttgaagcccttctggcgtgtactttcaccatgtttgggcggcacca

SEQ ID NO: 312285 - DNA, 1930 bp, Homo Sapiens
  misc_feature (1408)..(1427): n is a, c, g, or t
  misc_feature (1712)..(1712): n is a, c, g, or t
  misc_feature (1774)..(1774): n is a, c, g, or t
  misc_feature (1796)..(1796): n is a, c, g, or t
  misc_feature (1802)..(1802): n is a, c, g, or t
gggcgcggcgggagcggaggctgctgctggcaggtggggcgcgggccggcgcgagctgaccgagcactcggcgggcgcggcgggactgcggcccgtggcgggcgtgcgcggggacctgcgctgactaggtccggggaagtttcctgactttctgagaagcccctggttttcccccaaagaagtgatttcctgataagaaatcctggaaggtcatctcccagaaaacaagagatctagtatagtcaatgaattaaagacaagaaggtttccaatcagtccctgttatgtggatatttggtagcaatgactgatgtggaaactacatatgcagattttattgcttcaggaagaacaggtagaagaaatgcaatacatgatatcctggtttcctctgcaagtggcaacagcaatgaattagccttgaaattagcaggtcttgatatcaacaagacagaaggtgaagaagatgcacaacgaagttctacagaacaaagtggggaagcccagggagaagcagcaaaatctgaaagctaacaccccactttgaccctcgaccacacctgaaaatgtctcaaatctccaggagtatctggaatgcatttgtttccatgagtgaaaagaggaaaaagaaaatggctgtgctgcattgcaggaacctgctcattatcatgttaaaaatgagggcagaggctgtggctgcaggcagacttttccctacctctgtcattagcaatggttgaaatcatgtggcttgtgtttgggcgtcatttttgtatggatcctttcacttgatcatatgacgaaatgcttatagagagtagctccgacctagatgatgattcttcctgtagcatctggcccctcacaatgtcagaggatttaattgtgtctaattgcgaagggttgattgaaccccagagtttaaatatctctggctcaagtgttcacccagtaaaagaaagatccagaaagcactgtttttagcattacgtatctgtgtgttactgctgtgttatttacactgttttgtattgtacaatatatatgctcagcactgcccccttctctgattgcttatgaaaaacaaaatgatgtacattactgtgaatttttataccactcatttttaaaagggctgtcttttcattttagttttccatactgtggtggtgtacacaggatagaacacccttttttaaaacacagtctttccccttgctcattgtatgttgatgagttgattaagtctaacagattcatcaagactccattgctttattatagagacatttgaaaatatccattaatgtgaatatcacctgaattcagtctgtttggtgtctgcacagactggaattcaatctgtcaaatttgttttattctcaagtggagaacttctcccgcatannnnnnnnnnnnnnnnnnnntttaatttatgagaattttggacaattggaaaggtagaaaagaaaagccaagatcatactaaggactggaaatattttgttctatggaatcaaatttctcacaatgctgtatgatactatttaaatttggaggacaacttatcttcactaagctgaatcaggtggagaaagtagtctccttgcaatcatgtggacaccaatcacaaaagtaaagccctggtgttgtgttttcatgtcttttttcagccctctcagatccaaatgttattatgcactttttaatgnttgtaaacttttactaataattagtgtgaattgcatcctgatacaataatgattatcattanaagctaacaaaattctcattantactgngtttgatggcctctgctgcgttttaacatcgtgcttcttatatggaaagtttttgtgagctgtgtaatccctctggtcagtattatgaaatcatttgtcagtggtaataaataaggaaccagtaatat

SEQ ID NO: 312286 - DNA, 849 bp, Homo Sapiens
tacgttagctgggtagtattggtcaaaggtactctgaagagtgaatgcagaaatcagttggctgtgtttgtaatcttgtcccgcatggaccctaacctttagtagacttcagtcttttagtccagtagaagacaatggccctgaatatgtgttttctgctttttggtggaaggtttcctgcaggtggttgggtggtttttgggttattggctactgttcgttcagtgccatttgaagacctgttgtttcttaatcctttttcttggtgtgactggccaggaaaaagtccattgagtcctttttttctccctggtgtcttaccccttctgtagaataatccatattttaaaatttgtttcacatctttatagcaaacctgccacagacttgcaagcagtgattttatctttccttcctgagaaggtgatctcacttttgatgtttgggtcacctgtggacacctgtgctcttttgagtctcaaggcttatagctttcacattggcttgggaacaacagacttgtgtgtggttctagagtgaaatgggcagtgttctgctggtcctcagtctttgagaggtcttaggcaacatccttagtatagtggaatttctgaggtcaaatttaacatttaatatattctccttttagttcattgaatctgaggttctaaatctgtagcttcattttgagcacaagtctgcattgtcattttttaagagattggcaggcatatccttttgtgatacttaggaaaagactatggatggcagcaaatgaaagtaaaggttctcaactgtgaatgaaatttagaaagataattcttcagcagttggttgattagatgggtt

SEQ ID NO: 312287 - DNA, 982 bp, Homo Sapiens
  misc_feature (7)..(7): n is a, c, g, or t
  misc_feature (46)..(46): n is a, c, g, or t
  misc_feature (57)..(57): n is a, c, g, or t
  misc_feature (61)..(134): n is a, c, g, or t
  misc_feature (980)..(980): n is a, c, g, or t
acgactntcttcttcttctctgtcacgagccctttcttttctcttnttcctcttccntcgnnnnnnnnnnnnnnnnnnnnnnnnnnnnnnnnnnnnnnnnnnnnnnnnnnnnnnnnnnnnnnnnnnnnnnnnnnagacgctcatcacgatcaggttcttcggttcttttccttaacttttcttttaattcttctacagtagctttaattttggcatagcccatgtgttgttttcccatcaaatggtcatctacccgggactgggcatctcctactattaaaaaggctccacatacttcacaaacttccatttgtttttcttgtgcagcaaagctttcaattgtcgacgttgtggaccttagcagttctctctcttcttttaattgctcaactaatttcatcatcccctgggcttcttctacttttccttcagaccctaattcttcaatctgttgcagaagtacatcaattttgtctgttagaacctgaattttttcttcatttttgcctgttgggccagcggccccagaagactgctggttttgagataatgccaaacgagcatggcctcgtctgatcctacgttctacttctgcaagtaagctctgtaagtatcgcaaaaaatctctctcatagccaactttcatgaaacgagagctcttctcatactgttttcgtagattttcatcatgaattttttcacacggaccaagatcagaacgtgtatttgtgaacaattccgcaggacaaaaaccacagagataatatttacaaacgctctcgtggtcccaccgcacgtttgtgcgcttctcgtccggggctaggtttcggtcccggcccattaactcatccaacaactgcgcggccgaaatcatggtgcttcttcgggcggctgttcccaccagcccaggcacccgccaacgaaaacacggcgacaccgtcgccaatctcctcggcccgctctcaggccgaaatccctcnta

SEQ ID NO: 312288 - DNA, 2114 bp, Homo Sapiens
  misc_feature (1431)..(1582): n is a, c, g, or t
  misc_feature (1590)..(1607): n is a, c, g, or t
  misc_feature (1629)..(1641): n is a, c, g, or t
  misc_feature (1683)..(1710): n is a, c, g, or t
  misc_feature (1724)..(1748): n is a, c, g, or t
  misc_feature (1792)..(1808): n is a, c, g, or t
caacggtggagccttcgcactcaatgccaactttttgttacagattaatttttccataaaaccattttttgaaccaatcagtaattttaaggttttgtttgttctaaatgtaagagttcagactcacattctattaaaatttagccctaaaatgacaagccttcttaaagccttatttttcaaaagcgccccccccattcttgttcagattaagagttgccaaaataccttctgaactacactgcattgttgtgccgagaacaccgagcactgaactttgcaaagaccttcgtctttgagaagacggtagcttctgcagttaggaggtgcagacacttgctctcctatgtagttctcagatgcgtaaagcagaacagcctcccgaatgaagcgttgccattgaactcaccagtgagttagcagcacgtgttcccgacataacattgtactgtaatggagtgagcgtagcagctcagctctttggatcagtctttgtgatttcatagcgagttttctgaccagcttttgcggagattttgaacagaactgctatttcctctaatgaagaattctgtttagctgtgggtgtgccgggtggggtgtgtgtgatcaaaggacaaagacagtattttgacaaaatacgaagtggagatttacactacattgtacaaggaatgaaagtgtcacgggtaaaaactctaaaaggttaatttctgtcaaatgcagtagatgatgaaagaaaggttggtattatcaggaaatgttttcttaagcttttcctttctcttacacctgccatgcctccccaaattgggcatttaattcatctttaaactggttgttctgttagtcgctaacttagtaagtgcttttcttatagaaccccttctgactgagcaatatgcctccttgtattataaaatctttctgataatgcattagaaggtttttttgtcgattagtaaaagtgctttccatgttactttattcagagctaataagtgctttccttagttttctagtaactaggtgtaaaaatcatgtgttgcagctttatagtttttaaaatattttagataattcttaaactatgaaccttcttaacatcactgtcttgccagattaccgacactgtcacttgaccaatactgaccctctttacctcgcccacgcggacacacgcctcctgtagtcgctttgcctattgatgttcctttgggtctgtgaggttctgtaaactgtgctagtgctgacgatgttctgtacaacttaactcactggcgagaatacagcgtgggacccttcagccactacaacagaattttttaaattgacagttgcagaattgtggagtgtttttacattgatcttttgctaatgcaattagcattatgttttgcatgtatgacttaataaatccttgaatcatannnnnnnnnnnnnnnnnnnnnnnnnnnnnnnnnnnnnnnnnnnnnnnnnnnnnnnnnnnnnnnnnnnnnnnnnnnnnnnnnnnnnnnnnnnnnnnnnnnnnnnnnnnnnnnnnnnnnnnnnnnnnnnnnnnnnnnnnnnnnnnnnnnnnnnnaaaaccgnnnnnnnnnnnnnnnnnnaaaaaattttttaacccatttnnnnnnnnnnnnnccgccccgaaaaagaaggaacaccggtgactatttttttctnnnnnnnnnnnnnnnnnnnnnnnnnnnngggcgtgggtccannnnnnnnnnnnnnnnnnnnnnnnnggggggggaacaaagggaggtttttttaaaaaaacctacccgcnnnnnnnnnnnnnnnnncagactttcccggcgggcataccaccccaagggggggtgcccgcgcggggcctctcaaaaaataaatgacacccacccccgcccgcctttgccactttttttaagggggagagggcgtgggataatcctatacaaacctcctcccgcggcggaaagggggcggaccacctctccacacaacgggttattttgtgacacactgttacactcgccgcgcggggataatcaacaaacctccctgtgccccgccgtgatagccataaaatatttctccccccccagcgggacgaaaaagccgggggagac

SEQ ID NO: 312289 - DNA, 848 bp, Homo Sapiens
  misc_feature (700)..(757): n is a, c, g, or t
ttttgagcaaacgtacaaaggttccaagggacaggaccaagaacgaggggctgagacatttacaacagcaggcattttctcttcctcttcttcacgggaggcgggcagaggactgctcggatcgcttcgtcaaacactgtcttgaggcctcgctgtgtgagcgccgagcactccaggtattttacagcaccaatctccttagccatggctagaccctgcggataggtgatgggagtcagcttcttctccttcagtttctcgatcgtgtctttatcatccctaagatcaagtttagttcccactaggatgatgggagtgttgggacagtggtgccgcacctcaggataccactttgcacggacattttcaaatgatgcaggactcacaagggaaaagcaaattaagaacacatctgtttgcggataggatagggggcgtaatctgtcataatcttcttgtccagctgtatcccataagcccagattcaccggttttccatctaccataacattggcagaataattgtcaaagacagtagggatatattctccaggaaatgcattggttgtgtaactgatcagtaggcaagttttacctacagctccgtctcccaccaccacacacttgatggcctgcatcagggccgctcgctgggccgcggcggcggcggcagggcgctgagataggaagcggcgggctnnnnnnnnnnnnnnnnnnnnnnnnnnnnnnnnnnnnnnnnnnnnnnnnnnnnnnnnnngctgtccacgccgcctcgccctccgcggactggaagccgatgcccggcagcggccaccacccaaagctgaggaaaactgcagagaaacagg

SEQ ID NO: 312290 - DNA, 448 bp, Homo Sapiens
gaaggatttattaagtcatacatgcaaaacataatgctaattgcattagcaaaagatcaatgtaaaaacactccacaattctgcaactgtcaatttaaaaaattctgttgtagtggctgaagggtcccacgctgtattctcgccagtgagttaagttgtacagaacatcgtcagcactagcacagtttacagaacctcacagacccaaaggaacatcaatagggcaaagcgactacaggaggcgtgtgtccgcgtggggcgagggtaaagaggggtcagtattgggtcaaggtgacagtgtcgggtaatctgggccaaggacagtgatgtttaaggaagggttcataggttttaaggtattatcctaaaatattttttaaaaacttattaaagctggccaaccacatggattttttacacctgggttacctggggaaacctagggggg

SEQ ID NO: 312291 - DNA, 465 bp, Homo Sapiens
gtttttcctcctccttgtacctcttttattgtagtgacagagactggagtccagtctgggaaaggagggtgtgtgtctcccactcagggcctggtgtactcttggggaaccagctggcaaggccctctgggtcttaacgtcagcgttggaaggtggaagcagggctgggagccggcagaaggcgcccgggccccaggagctgcctcccgctggtggtgtgatcagaagagagtggggtcgagtgtacattgccgtgtggtcgtgtttcctgtaggtgctgtaaaatacctggagtgctcggcgctcacacagcgaggcctcaagacagtgtttgacgaagcgatccgagcagtcctctgcccgcctcccgtgaagaagaggaagagaaaatgcctgctgttgtaaatgtctcagcccctcgttcttggtcctgtcccttggaacctttgtacgctttgctcaaaa

SEQ ID NO: 312292 - DNA, 525 bp, Homo Sapiens
aaatataaaatagcaatttttaaacccttgagttttttaggaaaaggagtatttaaaaatctacaatgaaagatatacaggactttgaattttgctcatggcacaagcccagtaagtggatgaacttgctatcatccattagttgtcttcctgaaagaataaggccttgttcaaaatccaagctgagggtggcactaattccaattagaatggcaagagtcatgccaaggaccagcaccctaagagtgtttctccccgcataccaaagcatcactgcaatgtgcagaagagctgataacggtaggattttgtaaccagctgcatcgttctgttttcagagggtcaaggaaaaaagatccctttccccatgattattttcccctaatcatttaccacttataaaacctttgtgctcatctactattttgccattttctctaatattaattaaattaggtcagctttttctactacattttttcctcacaaaaggcaagttttaaataatgccttcccggccgtaag

SEQ ID NO: 312293 - DNA, 986 bp, Homo Sapiens
  misc_feature (718)..(718): n is a, c, g, or t
ttgtttttaatttgtctccaataagcaatgtcttctgcccatccagcatgggaagtgggtcccacgtgaagggggcccaccacccactttgggagctgaaggcagagactcgggagccctcccggctcagactccccctacgctgggtgtgggttatattcagaggcccacacccacactggggtaggttaggtatggtttacttagccacaggcccccgggggcaggagacagagtgggggcccgaagctccctgtcctggaagagttaaaagttctggggtagccctggccccgtgggggcagttagagatgagggaggttactccttagcccaggagtggttagagacagtggggctggtagagatgcctgtttaagccttggcctctaggaggtgttagagatttgctggggttgggggccaggtttgctgggaccccagttcttggggagggagctgctaagagattgggggatgcttctgagctcgccagacaatgaactgctggttaagagggggcctggcccggttggggctcagctgtccctgaggagctcggcatcccgcctgggagatgcagctgtcactggggtttctccctctctgttgtcctggcctcgtccttggcaggtggcggggacttcttgggggaagctgaagtgctggggttggggacccccgcccccgactgggcatctatgctggcgtgcttccntccggacaaggtcctccagctccttcttccatccaaggagctcagcaagggccaggcagccctggtcgcattcacccagccaggccacgtccctgtaggccttcttggagtcaaagtccatgcctcctccgaggcccataatcatccccaggaaagggtccgactggccagctttctccttgttgatgagcaggcgaggggtggagaggggtgccttgctgatgagggaggcaaagggctgcacctgcaaggaggtacccatgaccag

SEQ ID NO: 312294 - DNA, 1071 bp, Homo Sapiens
  misc_feature (34)..(34): n is a, c, g, or t
  misc_feature (51)..(51): n is a, c, g, or t
  misc_feature (79)..(79): n is a, c, g, or t
gcaacccctggtccgcaattcaaccccaacccangcccacgtcccctgtangccttccttggaatcaaaaatcccaatnctcctccggaggccccataatcatcccccaggaaaggttccgactggcccagctttctcccttgttgatgagcaggcgaggggtggaagaggggtcccttgctgatgagggaggcaaagggctgcacctgcaaggaggtacccatgaccaggaggaggtccaccttcaggaagtctgactgcatacaggagaagaaacgcgctgggaggctctcaccaaaaaagacgatatcaggcttcaccaggctctgacagtcttcacacttgggcgtcacctcagagaagatcttctctttcatccagcttagcgggtattcgtgccggcagctggcgctgacgcagtgtgatgtgtagaaggtgccgtgcgcctccaccaagtcctcctgttccagcccggctattcgctccagggtatctatgttctgcgtgtagcagcgcaggagtagccccttgtccttcagcaggcgcatgaagtagtgacagatggttggcttgaactgcccaggatagagttccttggcgagggcgaagaagggttccggatgtttcttgaaatagctgatctcaaagatggcctctgggtagggaagatggtacttctctaggttgtcatagaggccggtggatggagagcgaaagtcggggatgcctgcggatgtggagattccagctcccaccaaacagatgactctgcgacagcgttcgctctgcatgtaccgggccaccccttccaaggtcagctcgtccagcagacgctccttctggctgcccaggctgagcgtctgggagaataagttccgcaggaagtccatgtctgcttctccaccagcggctcctccctcagagtctgaatctgagtcggtctggctctgccatgggcgcggtgctgaagcccttgaggctgtcaccgaccgctctgtcccgtcaccaaccactgtgtcccgtcaccgactgctctgcctcgtgccgaattcgccacccaggcctcgctcc

SEQ ID NO: 312295 - DNA, 379 bp, Homo Sapiens
tttgttagttgtttttgtttttaatttgtctccaataagcaatgtcttctgcccatccagcatgggaagtgggtcccacgtgaagggggcccaccacccactttgggagctgaaggcagagactcgggagccctcccggctcagactccccctacgctgggtgtgggttatattcagaggcccacacccacactggggtaggttaggtatggtttacttagccacagggccccgggggaagggagacagagtggggggcccgaagctccctgtcctgggaagagttaaaagttctgggggtagccctgggccccgtggggaagtttttaggagatgaggggaggttacttccttagcccagggatttgtttagaagaca

SEQ ID NO: 312296 - DNA, 972 bp, Homo Sapiens
cttttcatcggggtaatgatataaaattgttccacaaagtgtactatatgaaccacttttcacagttcaaataacatattttagaaataaatatcataactagcaataacctatctacacaaggtggagaggatgagattaacaaaaaccaaattatatttccatatatctcatgttcaattcctaaatagcttgttttatttttcaaaatccaattgcacataacccataattgataggccacttcctctccaaaacaaataaactgtcaaagaataaagtgataaattataaaaaaggaaaatatgtatcatttactacagtcattccctttccccaaaacttggcaaacatataggaaaagtgctatcaagtgggtacactttgattataaatccaaagctcatttggagcagatgagattaataaaaataggacagaatgagtatatatttttatatacgtgagatgagtgcttgatttttacttaagaaatcaggaggatccatattaaatgggaaacaatggcatttatcaacaggagaacccattcatccagttactaccaaatctacaaattccaaatgtttctatcattcttatcatataaaagattggggcaaataaaattattgttattggttgtgtaaacttcaagctctctaagcttaaggctaatggtccttagggacatagttttatttggtgatcttcgcggggtgtacattagggccaaggttgcctttaaccaggttggtgtagtttttagggtgagggtaaggctcccagggtatgtgaaattcttctttaatagaggacaagggataaaatgcaaatccttctagttgaaacaaccaaatgacttaaatttatgctataaattaaatgattcatatcaattacttcattgagagcatgattttatggtagaaaataaactggggcaagaggcatggaggaagaggaatgtcc

SEQ ID NO: 312297 - DNA, 279 bp, Homo Sapiens
gtgttcgagctctgcctctcgttgtttctcgcttttccactgttgctcccccagggtcacagggtgggctagaagtgtcttcagatcctcctgcttctctaaagtaacagcagcttcatactctccatctctgaaatcctcaggaaggaattcccctgcctccccattgccattcttctttccagtgaccagttcctctactttcagtaccatcatgttggctgaaggagtcttgtatgtttttctgtcgtggaaggaatccctggagttggccctccc

SEQ ID NO: 312298 - DNA, 541 bp, Homo Sapiens
  misc_feature (91)..(155): n is a, c, g, or t
ttctaatgtgattcttatctgatagaaaatgagaagttcttttcctcttctcaacccttctctcaacttactgcagaagtttaaagctttnnnnnnnnnnnnnnnnnnnnnnnnnnnnnnnnnnnnnnnnnnnnnnnnnnnnnnnnnnnnnnnnntatctgaagtgccagtttctcacaaatcattttagtgattatttaaatctagtgattttagtgattatttaaaatcactatcctagcttgcattaagcataggctgaaacaacacttgccttgattaggcacttaaacttgacaattaactgaaaataattaagcacataagatgactccattttctaatggagatgagcccttcctaaggaaattaagctggtgctaagtaaaatgaatcctatttcaacactagtttcccattcatcgttgttattcagatgtttcttatgattgccaactaattttcactttctgtacaagcagcaaattagtagttttaaggattttgtaaagcagttattactacagatcctcggcacgag

SEQ ID NO: 312299 - DNA, 975 bp, Homo Sapiens
agagggccgagtcacatgagctgaggcctgcatgcgggggccgtccactagtgcttctaagatcaggtggatgaagttgaccctctcgtcttccagcccctggtgggatttcaccggcacattcatgtacccataacggtgctcattgcacacgtggacggagaccccagcagcctggcaggcataggcgaagacgatgatgtcgtcgaaaaggccaagtgtagttgggatgtggcgggtagaaagcaagctggtctgccccttcagcccgcagggatgcaaggaaggtggagtggaccatggggacacggaagcagccccggcgctggcggttcttggtggggaagtactcggctgtgcggcggtagtagccctggggggtgatcccacaccagaagttggagtagtaggtctgggagtccagcattggggccaccactggaagcccctgccccatgagaagccgcagagtctgattgttggtcagaatgttgtctgtgtctgcaaacaggatatagtcggccccccagttcctggcaaaggtgagggcttcctgcttcagctccatcagaaactggtgcctttctttggtccagtgcttgggaccctcttcatctgggtagaacctgggctcgccctcaggcctccagaccacagcagcatagtcatcgcccacagccgccagccactcctgcagcatctctgtggtgttgtccacattgtggtccgtggcacaccagagggccatcctggcccgggggtagtccagccgctccagagcgcccaggtagtggggcagcgagtgttcggcattgcgggccaggatggcaaggaccacggcgggcagcggcgactccgcaacgcccgcagcctccagccacggccccagcaggagcagcagctggagcagcggcgcggcgcgggcagcgcgcatggcgggcgcttgggcggctgcagcggcccccggagctctcg

SEQ ID NO: 312300 - DNA, 979 bp, Homo Sapiens
cccgagggggcccagcttggaaatgcaatgtttttaaaccccaggaaaagccccctggcaggtagctgacaaagtgagctgggcccaggactgcccaggtcgttatcaccattcacaggctcccgcgggctcccccaggacagcggcatcggagagtgtttattttctgcaagcacagtcatagaagcgaggggcctcgatgagaatcagacttggggagagcggcgaacaggcacggctgtccaaaggcactggtggagcggcagtttggagaaactcaagattcctccagcgtctgtgggcttcccgaaaggtcagctgttagctcgccaagcagctggggcattaacaaaagctctgctagtggccttgccagctttctgaagccccagaagaggaatgtttctgaaagaaggaaacgctatgtgctgccaactgtgtgtgagcagatgacttgcaggaagatgggagagccgtctgcaaggggacctggtttctgtgtctttgccgttgggttgggcagtgggtggctaaggggagaagagcaccgctgtgtgtgcacggacggagcggcagtcaccgtgggcatcctgtctcactccgtgttgtgctgctgggcatggggcagggtgggaagggctgagcctgctgtaggggcgtaaggtgaatccacacctgcagagctctgcagcccgtcctcagagctgggaagggatcctaggcacggctcctcagcttcatctgagaggcttggactaggggctcttaggaaatcggcacgggagtttgaaaaggcaacgtgctccctttgggaggtggccttcagacactgcggctggggctgcagggccgggctcaggcactgagtttagcagcatcggcgtgcactggatctctacaagctactgttaggcaaagctttcaggttagtctgtctcaaggaagacttggagttacctcgtccgaatcgccacccagc

SEQ ID NO: 312301 - DNA, 763 bp, Homo Sapiens
  misc_feature (108)..(108): n is a, c, g, or t
caataaagatggtataaaggaacataagattatgcttgatatttgccagatgctgggtgtgctggaatgtgaagataactgaccccagcagggtaccttggcagggtnatgacatcttcagccattcatcaccttctggtttccaatctccttttaccaacctctcaaaattcgttaataatggtaccaccctgcacctcgggccccatcccaatagctatcatgactatccagcccatttttgtaatagctattagcatgtgtgactccacctactattttccaagttctggtcacttccttcatttccgaagccagtagttgaacaggtagatatgaatagccctgggaaactaggtcatgcgggcaaaaaaatgtaatataccagattgaagatgccagtaatatgttagtgtggtttgcaagaaacttcaatggaggctctgcaagcagtagacaggataaaattcctccaccaaaacagtggagcatagcagtaaaccagcttgaaataggattcttccatgccaatgcagctgctcccggctgacgtttcaccgccatcactgacactagatagtgcgcgatgtcaaaaaagggaaacatggacgtgcgggagaaggccagagccaactcgtcccatggagaatccataacgaccaccgaccgcggcaaccgaagcagccgcggctactggttccccgcgctcgcgcggtgaggagtaggagagggcacagccgcggccgcccgctccccccggccg

SEQ ID NO: 312302 - DNA, 722 bp, Homo Sapiens
caactaaatgagcctcgggaagcatataaataatgcaaacacgtacttctagacagacacagaaataaataatcgtcacaatgggaacaaagaacattcatatgatgaatttagaataacttaaaattagaaatgatacgtgcaccttaaaatacagaacactaaaccagaacaaatattgccagtgatagaataactatgtagaaaggccaatgtacatgagtaacgcagaaataagaattaaattgaatagaggcagatgctgttagaacatatttccatccatcatgacttgcaacattttgtggcctctgtggagccctggtgccaccaggccaagcatctggctaagtagatacagacatatgtgacctataaaacaccaaactcacttgctaatgaagtatacaacaccatgtgctgctttgattgctcttgactggtttttaaaatcaagttcacttttgaatcagaaaaaaagtcatccttaaattagctctcataaataatccatgaaataaactttacttctggctcctctgaatagtatcatgttattcccggaacacaaggtattagtcaagtggctgctgtgaagtcaagaaatgcacattcataaatatatgtctacgctttaaaaaatcaaatacatccaggcagttgctgtgcagagttcttgctataagaagaagcccttcagcagtatattatgaagtggttac

SEQ ID NO: 312303 - DNA, 1710 bp, Homo Sapiens
  misc_feature (193)..(193): n is a, c, g, or t
cgcgttttggtccctgtttggtgctttctgtttgcagctacggcagtgagtatgtatgtgacggaccccgagtcacccgcggcctgggacccctgcctaccctccgtctcgccagccgagctgtggaactagcgcgtgccccctcgccgacctcggcgtctccggtccgcccctcacttgtggtggggcgcantcctggtccctcagctgcgcgccgccccacgcggccgggctgcgggtctagggggtccgcatctccctggctttccaagggctaaggtcgtgattctagggcggctgggcgtccagggcctcggtgggggtggcgtgtctgccctttttatctccccgcaaggcccccagtcttctagggaagccagtcagtgaagcgcggaggtccgggcgcgccgagagagagtccagtctttgaggaccgagtagtcctgggccacctcccgcctctgctgtcagaagcagcagctgccgccgtggaatccaaaatttcgggagctgtgaccctttcctcatgtaaaacgagtagtcttggacgatctgggcataggaaccaatcagaaacaatcgcttcagcaatcaagaccattgttcatcatggaggaacccatggatacctctgagcctctatctgcattaccattcactgggcagcagtcttttgagccaagtggcaaatttggacagtatccatcgatgcagatgaaccacatccaggcactggggaagtggaggacatagaacagctcaatcagtgtttgatccaacacttccatctcattaagacaagtttgatttttctttgctttttatttcatggaatacatgagaatctcttaactgttggagtttccaaggaggcatacctcgtgacttcagttaatggaaagaacaaaactaaaatgctgtatggccaaagccacaaagggaaggatccgcaatttacattcttggagctatcatctgtactgtactgttgtgatctactgattggcattggcatagtagtaggggtcaagtgacagaatccgtgccagcagtctccaggttcagaagcaattcaagaccctgatgatagctctccagcaaccaacacatggtgattgtgccaacttgttgctcagttataatgcagggccagtgattggtttaagtgaagaccatggttgagatcatttgtctttggtctaatagaatttgagtctagtagaatttgagtctccagggaaagagctacttgaccaaattaaactagtagcaggtagagcatgaatgacagcatattataccatcaagatgttcttagagcagtgtatggatggatcgattgtactgccatcagttgtgactgacgttgtattcaaggagaaagagaaacttgtttagaaagcactttgaaagttttttgagtacgggggtgccctgtatcaccccgttatggttgaactttctccttcaaaattaccagacttggcagcagtggcaaattattgggctaaaagacttaatcagacatattctgggttcaaggctcctaatataatacctggtgcaaacattatacttccactcattcagatggttgcatcctgccaggcatccagtgggactgggaatatggacacttgaacattaaacatcctgaagaattttggaatgacaggttacaagtgaacataatcagttctctatattaaa

SEQ ID NO: 312304 - DNA, 1211 bp, Homo Sapiens
ttcatggatttagttatacataccttaatagttttataaaattgttgacatttcaggcaaatttggccaatattatcattgaattttctgtgttggatttcctctaggatttcgccagttcctacaacgtgcagtagggcggcggtagctcttgtgtctgtggactctgctcagctgtgtccgtaggagtcggatgtgtctgtgctttattatggccttgtttatatatcactgaggtatactatgccatgtaaatagactattttttataatctttacatgctggtttaaattcacaaggaaatagatcaaggaaatatatatattttcttctaaaacttattaaattcgtgtgacaaataatcattttcatcttggcagcaaaaagttctcagtgacctattttgtggtgtttctttttgaaaagaaaagctgaaatattattaaatgctagtatgtttctgcccattatgaaagatgaaataaagtattcaaaatattaacattttcataaatataaggatgtattattgagaagtaagtcgaagggcttataaggaaaaatgttttataactgagtaatatattaagagaattgtcatggttcataaatcacattgtgctaatctgaaatttcttacataaaaatgaagtgtcttatgtttattttaattgctgttgtaacttactcatgaaacagtatacagacaccttgtacttttcctcaactgtaagagcagactttcaatgttagcaattaagctgttgtcaaacaatcagtcatgagctttgttaattttcaatgttttcccagcctataaaaaaaggaaggtacacgttgtccttttaaaggttgtgaggtagattggagtgagtagacaggatattgcattaaaaattgaaagctcgatctgattattgtcaggaacccccagtgtgacctcacacataggatgtgggacctttgagccgatgtgcactggccaccaccagggttgggggcgccacagctgcgagcccggcccctgctgttctcagcagccacttcccaggctgcctcactttatgccatgactgaccttaatattgggatattgttatgcaatttttatcctgtttagactgttaaaagcaggtttctgtacttaagagtcccccagacctcctgtgaggtgaggctctgttgcagtgtcgtaggctgtgtgtgtctg

SEQ ID NO: 312305 - DNA, 577 bp, Homo Sapiens
  misc_feature (24)..(24): n is a, c, g, or t
  misc_feature (34)..(34): n is a, c, g, or t
  misc_feature (58)..(58): n is a, c, g, or t
  misc_feature (80)..(80): n is a, c, g, or t
ttgggctgggattattccaaggtngggtgtgtangtacttatcactggacccactttngtttaatcggaaatcccttttngctgacaaccatggcttaaaccaggatagtagttggccaagatgaaatgcccagaattaaaaccaatcataagtagaacccacttcaaaataaaaaaacagcattactatttctaatcccaaggaatcactttattgtaaacactagcagaactcttctccctatacaaggtggatggctgattttaacctgaaattttaaatccacagattgagagctagtgtagaattgtctgtgtttattgtttttatgagtaaatacatgcattgtcataataaaatgcatttcagagaatatgcattttacctttgggaatatgttaatttcaggcagcattccctatgggaaaggtgataccagctctgatatgcaaagcatatgataatttatcattctaacttcaacgtataatagggattgtgacctgatatttggagatgtaaatattgctcagcatattaatcccgatggaatatagcattgtagttgactttttt

SEQ ID NO: 312306 - DNA, 648 bp, Homo Sapiens
cgtctgggactatgtcaaacccagtcacagtggcagctgcaatgagcatgagaagtccagtaaatgtttcaagtgcagttaacataaccagcccaatgaacatagggcatcctgtaactataaccagtccattatccatgacctctcctttaacactcactaccccagtcaacctccccacccccgtcactgccccagtgaatatagcacaccctgtcaccatcacatctccaatgaatctacccacacctatgacattagccgcccctctcaatatagcaatgagacctgtagagagcatgcctttcttgccccaagctttgcctacatcaccgccttggtaaacagtattataaaatcaaaatatgggtaaaagtaaatatttaccagcaacttaacttttagttgattaaagcaaaaagtaaaccatgaaattgggagattttattacattagttaataagagtgtggtagcatttttctccaatttggctgggattattcaaagtagggtgtgtatgtaacttatcactggaccactttagtttaatcagaaattccttttagctgacaacattgcttaaacaggatagtagttggcaagatgaaatgccagaattaaaaccaatcataagtagaacccacttc

SEQ ID NO: 312307 - DNA, 694 bp, Homo Sapiens
  misc_feature (33)..(33): n is a, c, g, or t
ttttcaggaaggtgtctgttcggaagggtcctnctcccttcttcacaggaggagtaaagactgtatagaagctctcatttgctacccaagcctcaccatcaatgttccgcaagtatttggaaggggttttagggaacctctgaaacgacttctgcatgttttctcacgtatgcatagtgcccgatacagacctttgcaaacaatttcaaaatcttcaactgtaaccccagaggcatagtcaccagtaatctgcactctctgaaaatcaggcacggtctggtaggttggagatgaggaaatgtattcatcaatgtgggacagtttggtggaagatgtttcacttagtggaatggacaaattaacagtcttccgtccttggaaacgcttttttctcctggcttctgtggaggtggacagagtctccagatggaatatgtgtgcttgcatctcatgatgagaaatcggacagatctcatccacatcaaagggggaaatctcctgacgacctccttcatctttgacttcagaggcaaacactttttcagcaaagttgcgcattgcatcatcaatttgtttctcttcagctgggagtttgaacagaggcattgttgctgaaatccttgattctaggatagcacagtagaaaagaagagagaggagactgtggggtgactgactgacactataaaatatc

SEQ ID NO: 312308 - DNA, 1870 bp, Homo Sapiens
  misc_feature (14)..(14): n is a, c, g, or t
ctccttgaaagccntccataccagtgatgggtgggccagccagaggccaggaagtgagcagtgcccattaactggagtgaaggattccagtgaggttcctgagactcccttacaaccccgcagtttgtatttagtcctaatacattctcctcccctagcctcaaagttcccaagatttagataagcacaatttaagacaggttccctgaataccctattagggaatgttgggacgtagttgaaatggcaacttttattaatgatgaatggcaatgacttttaagtttgatcacagagtgtttgcatattttcttactatttttggtatgatttaaaaattattggttcattaaccatttaaaagaggaataattcagtagaggcactaggaggttgaacaggatcattcttcagtaatattcagccttgacaagcacagcggctacaatacccaggaaagtgagcaacaggagaccgagtttttctttgttgaaccgtttcaagagaaaaaattttccccaatccacctttgactggctgttgggaggatatctgagtttgttagcaccttctctctttaaactttttaataaacagggacgctgatgagaaaaagtatcaaaactatgttttccgtgataagctcccatcccactggaacccactcctccaaatgggaaagagttgagcgtgaagtgcataatgacgtcattgcctgtgacacctccactggatgtctcatcaatcatccgtttgatgagcttatggttatgcgaaaatacataaagagccagaggcttttcacgttcatttatgaaatttatggcctcatctacatttttcaccaggcactattggaagaaattggtccaaaaatttcttcttgcatcaccttggttttaggatcaacatcggtaagtactgttggggctatgtagcgtgtggcctcatcagtctccccaccaaaagctatcttttgtccttcaagcaaacttagtatcctcttaaaatgacgaagattgatgatcctttcataatcaggagactcttttatattttctccataaaattccttcactgtttccttaatcttccatacaatttgattttggagggatgcttcacagagaatatagtcgggtgcaatgcaggtttggccacaattcatgtattttccccaggttatgcgtctgcaaacaatgtccaggtcacaatctttatcaatataacatggacttttccctcccagttcaagagtcacaggggtcagatgcttggcagcagcttccatgacaattttgccaaccgcagtgtttcccgtatagaaaatgtggtcaaatcgctgcttcaggagctccgtggtttcctcaacaccaccattaataacaatatagagatcctggtctaaatactgagggagaagctttgccaagatcttggctgtattttcactcagttcagaaggctttataatcacagcatttcctgcagcgatggctcctatcagtggctgaatggtgagaacgaaggggtaattccaagctccgattatcagcaccactcccagaggctgtggctgaatataggcctcatccagcatggtgagcacgttcttcttaactggtttagcagtaacccattcaggaagattctcaagcataaaatcaatttccccaaggacagtaatgacttcctgactgtacacattgaattcactcttgcacaggtcggcggcgatggccgtcaggatatccttctcgcgctcctgcaccatcctccgcagggcctccagctgctgcagccgaaaccgcagaggtcgcgaccggccggacaggaacgcctgtcggacctcgtgccgaatcctgcagcc

SEQ ID NO: 312309 - DNA, 404 bp, Homo Sapiens
ttgcttttctagcaatcagcttttatttgccttaatataagcttttaagcagttatctaactagtgtccacaaccctgtaaccatacttccacatcttcagcttaggcagacatcgaacctctctgggatgtttccagcaaaagtgagcttttctaatcgtctcattgtaacatggcttattttgtagaggtattcatcagccacacacttcatgttggtttttggtttttaagctaactacaaatctagtaaaaagctatctgaaattcacaaatatcatgtgtgtgcgtgcgtgcgtgcgcgttgtgtgtctgtattcatagtggactgcttttgggtttaaccagtttaggtatcgttactgtgtgggatcgtcgcgctgcagtattgacttgggaaatcc

SEQ ID NO: 312310 - DNA, 1991 bp, Homo Sapiens
  misc_feature (12)..(12): n is a, c, g, or t
  misc_feature (44)..(44): n is a, c, g, or t
  misc_feature (77)..(77): n is a, c, g, or t
  misc_feature (118)..(118): n is a, c, g, or t
  misc_feature (163)..(163): n is a, c, g, or t
ttaaaaaaaccnaaattcaaaaatccaccaaaactggtccaacnccccagttgaactaaaaggcccacaaaaataantgtgaagctccttgaaaatgccatagctaaatgtaaggtantccttcccactgtggcaaaatgccgccaggatcccaattccctgnatcgagcccatcagtccctaagacattgtgtggcctgtcccattgctagggcaagtggaggttgctttggcagattgtgggtttcctaatattgcactgttaaagagctgagcacacaggttctctctgaatcgggtcaagctgatttccaactgggctgttcccagggatctgaatatgctagtagactgaatgcatccttcaacatttttttgtttgcagtgttcttgccacagtctctccttagctgttcactcattgcttgcagctctcgtccaaagtggatcattctttctatggcggcctgacttcctccacacaactggcgtctcaactgacttgaatcaacttccatttcggtgtcacaatcttccatttcgtggtcatgtttagagctaccatttaggaaaccattggatgaagtttctccaactccattggagtagtgatctgtttccatgtctacatcattactggtgaagttattaacttgctgtgatcttgacatatttatactgtttagttctggtacattcaagttggatgactggtgtttattactatggcaatatgattgatgtgctttatttgatattacaccattactacaactttcaaaacctgaaaaatgtgcggtgcttcctttgcctgatgctaaattgtggatattcattccatggctggggctcatacttgggactactaaaaggtcgaggactaaacaggataactgtcttgagactttggacttcggcctcccgaaacatcgtacttcactatctgtaccattcaccatttctataaactgacgcacttttaatgtgaaaaggagattaggatttctttcaagtaaacttgggtataactgttgtgttgtttcaatggcttctcccattcttcctgctaataccaatttctgaattctttgtctattcttaatggaagctaattcttctagaacggtctggtctgtagatctggcaaaggcctctgctgtggcacagtacccatggtggactaaataagatgaaaccattttttgtatcatggtctgccattctccttctcgatctccgataggaaatcgatctatctgtgcctggattttggttctccactcccgcatatagtcttctatatcacacacgaaaggatgttgcccaaaattggcatcgaccacttctcctggtgtttgaagccccacagtaggatacaaatttggcggtaggtcagtgaaagcaatccctaaactatgtccattcttggtgtaaaagcaggtattgttgataagattaacacaacagccaatgacatcaccagtagtgaaagttggtccataaggttgtccagttccagaagaacaaaacgaatgtccatcatccccatggtaaccatatgaatgcttatcccaacctggtagtctattcatgttcacacctacttcaaaataataaatcccacaggctgctggtattggatgcgtggctcgaactgacgcggcatcggggttttgccatgacctttgtagtgcacccgcagtgttgttctgagagaggccgatgtagctgaacttgtccttcgggctccaggacagaggcagcggcgtctcttgttcgtccgcggccgggtagagacgcttcagccgccgctgcaactccttctcctgctcgttcagggccgagtccccgtgagggaagggggccgcggcgctgctgcccgccaccagagctggggtcggggctcctccagccgggccggggcccgctgcaaggcccgggggagcgggcggcccgctggcgggggcagccgctgaggcagggggaggcgg

SEQ ID NO: 312311 - DNA, 701 bp, Homo Sapiens
  misc_feature (56)..(56): n is a, c, g, or t
cagcctgaggttggctgaatatgccaaggtaaaatggccaaacctggcttggtttnagccctccaaatgtaaatgaagtgccctggcttgttctatataccacagttttggaactggcctcacaaggttttctcagcaactgcagggctcttgtgaggtaaaagtggaaagctttgaactggaagccatagatataatcttctcgagattggccagccatcttcacagcttcactgaacagatggtaaaagggagtttgctcttgagcttcggaaatatatgccatcggggctattccatggttatccttaaaattcatagggagaaagatttgagtctttcgggctgcccatttggcttttgcattttcccacacagtatctaattgttggtggcttgctttttcctcctttagcagttggggaacgtatttaatttccatcctgtccgtacatttcaggtattcatcatcaaatgcattatctgccatgtctaacacttcagccttcacctggaaaatgtccactagaatcatggttgccagcagcatggtgactatttcaaaatgtcccgtcttcatttttctcttctggcttttgtgcctttgggggaagtttaagtgatgctaggcctcaaactgactccccgctctcggttgtggtaagcaagtcttcaggatgggatgttgttgacagtgagtc

SEQ ID NO: 312312 - DNA, 861 bp, Homo Sapiens
  misc_feature (529)..(529): n is a, c, g, or t
ataccccgccctcccattgattaacctatatattgatacctacggagtcaaggaagcattttgggttggtaaataaggttttttagaccccttggtatgaaaagtgttgtaatgttcttggtgggcgggtatatattaatgaagggtcgtaaggttgtatttcgaactcgcaggacagagaataggctgtccaggtgtccttgtgtccgtttgtaaaacttctatagaatacgtcgaactagggagagttgtgtaacaatattaggtagggtcagaaataattgacaaacagtaacgtcgttagtaatgtcgtgtgtgtcgaagtgtaaacagacgagagtcacaggttgaagacaagtgtgtaaaatatctatgtcagcctaaatagtttatcagtctatatatcctgttgttcacttggcttttgatttttaaaaagaatccaatcgatcaactttgtaagcgctaccacatttcaagtgatgaaaataaattagttcccccccaaagatattgtttaacttctaanagcataaaaagctctataatatcttatacaaattaaccagtgtttttacaaaagtaatgcagttttggactgatgatattacactgtatttgtggtaaagtactaggcacaagaatatatatatcgattaggcattttcagtctaatcagtctctaagtttatcatttaattcttggcaatatataataactggtatgcattttggtacttaagtcatgaattgtgaagaacaagaagcaacgtactatagtcacagggtttacatctaacaaacaattgcagtgttgaacaaatctcgtctatgaacttcgtaatttgttttgctgttggt

SEQ ID NO: 312313 - DNA, 288 bp, Homo Sapiens
gcttttttttacagctagacctgtgtgctgcaaggagctaaggccttcagtgtccccttccttacccaggtttctcacagaatggattcccagcgggaacttgcagaggaactgcggctttaccaatccacccttcttcaggatggtctaaaagatctcctggatgagaaaaaattcatcgattgcaccctaaaagcaggtgacaaaagtcttccttgccacagattgattttgtcagcttgtagtccttacttccgtgagtactttttatctgaaattgatgaggcg

SEQ ID NO: 312314 - DNA, 893 bp, Homo Sapiens
ttggtgatttgagttactaaatgtagcatttatttataaggaatgcattgtgaatagtttctcagttttcattatggaaagatgatgatttcagcccacattcagtgtatgtttctaaataacacaatcgacaggactgtctgttcagtacaatggaggacagctttttcagggcaaatgggatttcttgataatgctaaatctgtcttgtcagctgaatttcttgggctttatgtggcagtgtggtaaaaatatatgatcagatttcactgttaagaaaattctttcagcaatacatgtagagtcaagtttcttgcatggataactgaacatgtgggttatgagattttaaaaaatgtctcgtgacaaactttacggaaatgcaacaatctggacatctagttttgtctgagagtggcgtggatatgaagaactgtgctgttggtgctgatgccacactaagttttggcagtcacactcttggttcttcatatttgaggagatgggatggtgaggaggcctgttggctttattttattaatgccaccatctagaatacagattcttggatatttcatcttcacaaggtgagctgcaaactcagctgtgtgttttgccacatgccccacgatgacaatgaccttccctttgaagttctggagcatagcagtgtaagggccctgggtaagctccccttctgcagtgaaggcagcactgaatggaatgttgatgcttcctgaaatgtgaccacgaataaagtcttcactattccggatgtcaaccaccaggagctttggtttactggactttgttttcttgctgggtgttttgaagtggcctgtcactgtgagctcacacaagtcaatcaggtcctctgctgaaatccgtggtga

SEQ ID NO: 312315 - DNA, 719 bp, Homo Sapiens
caaagccataaatcatatattttaccttgggacaatgaattccaactgtctggaataattttaaaacacagtatatgaggtgtgattatatatgtaaagataccccccaaaacacctaaacttaattaaatgaatattatctttcaaagtgtttcccttgggaggtagtagtcaaatgaattgtgcctctgtttacaatatctgagtcaattgtcagtttattctaatgttgactatgataaatctgagcttaattcaggatcttggcacagactgggagatgcaaagaaccttagaggaacaaacacaacaggatgtggtactcactgatgtctaactgtttttaaaacaagttatggttttatagggggtacttatttggtaaaatggaagttgggagttagtttagcaaggttcaggttataacaatgaataaatggctgaacctaaaatctaatcaatttcctttagagtcaaacatatgtaaattggaaaggatataccccaattggcagatcttcatttttgtcagaaagaagagttctgtgaaataatctggccaatgtcaatcaagctcttaggttattgtttgattgtgatgagttttccagcttctttaaggatccagatcactccatcagaagctggctatacctattagctataacaatcaatagatactgtaatattggctactggctaccctcctgaaaccaatg

SEQ ID NO: 312316 - DNA, 419 bp, Homo Sapiens
  misc_feature (29)..(29): n is a, c, g, or t
tattagcagcatgaggacagactaatacntagggtgaaacttttgattatatatgtaaatatataaaaatagcctttccactaataagacttctttctcctcagatatgaaactatccatgaagaacaatattatcaatacacagcagtcttttgtaaccatgcccaatgtgattgtaccagatattgaaaaggaaatacgaaggatggaaaatggagcatgcagctccttttctgaggatgatgacagtgcctctacatctgaagaatcagagaatgaaaaccctcatgcaaggggttcctttagttataagtcactcagaaagggaggaccatcacagagggagcagtacctgcctggtgccattgcactttttaatgtgaacaacagcagcaataaggaccaggaaccagaagaaa

SEQ ID NO: 312317 - DNA, 894 bp, Homo Sapiens
  misc_feature (693)..(693): n is a, c, g, or t
  misc_feature (737)..(737): n is a, c, g, or t
  misc_feature (794)..(794): n is a, c, g, or t
gaaccagaagcagaatgttctatgaatacctcatatgaagctattctgttgtgtacctactaaagttctaatgagaatcaagtgagataatttatgttaattgtgcttattaatagcggactgttctgtacctgaagataacatatgtcacatcttctggggtaaatgacctagaaaaaggagacttagaagatgtaatatattagaatacatggtcaaagttgtatccagtaggtgtgtcaaaactgtggtgttttgagggttaatgtggtggtttagacaattcatgatatatacttttctacatactcactgacaacgataaatgaacaaaaagaaatcctataccatgtctaaaccatctgacagaaggcagagaagacacagaacacccttctcttcctcttttcttggtgacttcatcacatcctggcaatgtgtgtccaacaccaagcatattccttgacattggtgctccttgtcctgaagcaaggagctttatgggagactctgatcttctcagagtgggagaggccttgggaaccagtgggtggacagattcatgttttgtggcaacaaaagatttaaaatgtttcataaatctgaggaaatgagatctttaaagtaatccattttaacatatcatctcccttttctctcatgtgattcctgttccggacctccatgtccagngcttactttctggatgggtcagtattttatgttatcatcatgtntgctttattatattattctggaagaattcgttaagaaagagttagtgctgagacatnttcattccattgtaatctggtagtatgtaaataaaaatgtggagtgagaaggaaaagctcattatatttcattctgcccttatacttcactagacggaat

SEQ ID NO: 312318 - DNA, 886 bp, Homo Sapiens
ggtacggcccggaattacgggatatcgtcgaccacgcgtccgaatttactttacttgtatgaatttaacatctctagcatgtatcttacttgatatttgttcctatcaacagcattagaaaggaaaggagacagaatgagcttggttatttctattgcacagaaaaggatttttaaaattagattagtataatatctggccatagagtgataagaacaatatgacttagattttctgtatttcatctgccagattatttgaatcacacaggatgatgtgttaacagtattagggtggaagaggactcaagagtaaagaggtaggggtttactcatttttcttccctgagccaggtgtgacaagccaactctgtcaccattcgtgaggggagagtcgcagtcctcttcaagctgttatcataagtacagtagtcagctacttggatatcaagactaagtgctgatatgaagacttgcctttgtgttttgttatgaaacacgcaagcataaagcaggactcaagcacaaggctgactgttctactttgaataacagcttccttgcagtctcctccacatgggtggtactgtgtttagaagggattaccaaaggctggagcgatttaagctatgcactagccttgcccctcttaggttgcattctctttaggccactggttctcaaacatctagggtgcaactgtaacccattacagagttgtgaaaagtgccgaaacctgagcctcaccttatgagattctgattcagccagggggaggacaggaatctgtatttttcatagcaacctcaagtaatctttattctgagggtctcgggattgcaggttgaaaaacacaaccttaatcagcagtaaattcttctctactc

SEQ ID NO: 312319 - DNA, 561 bp, Homo Sapiens
tcataatatactggctaaagcacagttttgaacaaatgttcaacactgcaggtccacgcatcatctaatgcatgctgacaatcctgcaagcaaagaccctgcaaaaacaagacacccatcctttagagaagctcctattaataatccaggcattattattatattttgatctttgcttctttttcctttatggtcatggtgtaccctctgtcacagtaatactggacttttcttgggggtatttatgaagcagagttaggtccaggcccggtcgaccttttgctcattacaataggcaacttggtctccttgccccagtcctcccttctcctccaccctatgttgcatgctgccaccaaatcgatcaagatattcccaattataactctgctgaccaaagaaagtccttacttttagctggtcttgcaggcccataccctgagctcactttactctcctgctaatccactgaccaaacccattcttctttctttccttcccccaatgcttgaatagtttccattttttacaacaattgtaccttcacttgtgctcttcctt

SEQ ID NO: 312320 - DNA, 816 bp, Homo Sapiens
  misc_feature (40)..(40): n is a, c, g, or t
  misc_feature (60)..(60): n is a, c, g, or t
  misc_feature (95)..(95): n is a, c, g, or t
  misc_feature (100)..(100): n is a, c, g, or t
  misc_feature (102)..(102): n is a, c, g, or t
  misc_feature (104)..(104): n is a, c, g, or t
  misc_feature (145)..(145): n is a, c, g, or t
  misc_feature (214)..(214): n is a, c, g, or t
  misc_feature (280)..(280): n is a, c, g, or t
agaatttagcctgatttttcaagtttcctcccagctcctngtttatagctggttaaaggncaatgtgggatcctgaaattgcaaaaaaccttccnccaangngncccagcctttctcgtgcttggctcgagcaacttaaaaaaanccgagtactcccccaggcttttatcatattcaaagtcatgaatatctgaaaaataactctctacagaanaggatctgggagggagcaatgccagcaagctgatttcccataatggcaagcacctctgtggtcttnagtaaggttaggatataataccctaggcctcgggaaagtgtcaaaatcgttcagaggctcacaacgaggtcatagtagactacttcggggacgggacgggaaaacgcgtcagcagcggggaagttgtttctacgaagggtctttcttcatagacaggagatgggctgttggtggaggggcgcagaaaagtcccgatcttcaggaaccccggtggtcctgggaggagaactgggaaagctctcggggtctcagcagagagaagaagccacgctaaagagtctccacaagtaccgcgggatttgacccctccagccccctaacctgccctgggggccatgcgttcccgggcctcgtcttcctctagcgcggatcgctacacccgtccgagccctcctcgagggcctcaccaccgggcggggggagatggaccccgggagagaagtgcagaccgccagtcccaagaaaacactacacttcagctgctgcagccccagcaaacgccgaactcccgggaaagcaaccggtctgacctcccc

SEQ ID NO: 312321 - DNA, 753 bp, Homo Sapiens
  misc_feature (54)..(54): n is a, c, g, or t
  misc_feature (398)..(414): n is a, c, g, or t
catttccaatagatatttcaaaagaaaaatttcagaacttcaaaataatccacngagaataaacttgttttgtattgcttgcaaatgcagataatgttgaaattaagtttttcctctatttgttaaattgtaaggaggaagtgccgcacaaagaattagaaatgtgggttacatagaaacaagaacagagcacagattttccttctccaatattaataccaagagcacagttgagttgtgacattagaaagaaagaatagccccaacagagttaggcatatgtgaaaattccaactccagtgaacaatgggcactgtgtgctgcttaagcagggagtttctttaggaattccatttcatggtagcagcctgaactcaaaaccaaagatctcaaaagcnnnnnnnnnnnnnnnnnttcatcaccaaggattttgctggacaatgaattagaatcttttaataacctaccctcttttccgtatcttttacatttttagagcatgtattattaaaaatgctactgtttaatccactctacatatcaaatactatctttcactatgtctagtaaaaatcaccaatttgtataatgaccaatatatatgtatcctagaaatgttaaataacaaaatattattactgcatctaatattcaatatgaatttccagatctaaacattttacttgtaaatagtattgtccatacagtaccactatgtgatattaacattgtggatattacaagtaaatgatg

SEQ ID NO: 312322 - DNA, 633 bp, Homo Sapiens
  misc_feature (54)..(54): n is a, c, g, or t
ttatacagaatttaataattaacaaaaacactttccattctcatggcactttantaagaggtaaggaaagaaaaatattatgacgctcactctgtggaaaaagaatgagataatggctgcagctgtgaaaggacaaaatttacgacagttgtctggttgcaactgctatcttctctcttcattagcatgttctagaacaagaaacatgatactgtacactcacaaggtctttcatttgaagatttcagaacctttaataaaggtccatctgcactaaccagcactactaatcccatttggatgttttccgcctcatataactgtgcccctcactatcaatagcttcatagaggtcctttttattctcttgtattgcatgtagataaccaatatatgccacgcaaagtgaaagagttaccaatccgaaagccattacaggtttgttaggtttaatgaagagctctggattcacagcacgaaataaggttgttgtgcgcacccctctgagccctgggctttgaaactctttctctttgggtggttcctttttgaatgttggaggctcaggtgctgaagacatcttgatcaatgatgatttattatctttcgcggggtcacctcctctcctcgccc

SEQ ID NO: 312323 - DNA, 1002 bp, Homo Sapiens
  misc_feature (933)..(933): n is a, c, g, or t
  misc_feature (965)..(965): n is a, c, g, or t
ggagattttaatcttcatttaacaaatgtgtattgagccacctacaataaccagggccctagagagtgtacaaaatcaattcaaacaaaatccaacactcaggagcttatgttttggtgtatatagctaacatatatgacaaaagtgatgaaaaccttaagaatctatgatactttgcgcctaggtcaatagcttgcttccttactttgtggtccaagccatatactaattttcctggcttttctaatgtttgtgtttattcttccttcaaagggcaacaatttttatgatcccaaggcaatttcatcaaattttaaatacagttatgactctcattcagttcatttatgacacagatgactattatacagagatggtactcatttagtaccctggccctaatacagggctgtccctgtaatagaataatgctttgcttcttttggaatctgagggaagtatagtattttcccttttgccagagagatcttttgtctctatggagtcaaaagtgggaggggtgggaagagaggttgggaaccaggaaactagccacagtattgagtttcagccaggtgcatcagattgagaatgtaatgtccctagtttattgaacaagagcagaaaaatctcttggagttcaaagcaaccatggtgttgattttctcctttcttgaaaacaagttttgaacttagactgtagaggttggagatttagggggagaagataaccatttaggataatccataaagtttaggacttgacttagttgacctagttaattttagaactaggttgacctagttaattttagaaaatttaacactgctacagtacaatttaaacttgaacatttgatttcaattttttttagagctgcatttttgcaagaggtaacagagttatctcaacaaagtgagttcttgagagtnttgaagaaataaagtatccaaccattaagatntatgtcttccagtcttaactgagggtttctatatagt

SEQ ID NO: 312324 - DNA, 220 bp, Homo Sapiens
aaaatcatgaactttttattgaaagtttttttgttctgaaaacagcagctttgtcatattatgacagatgtgttttttattgcatgcttaatagttaatgtagttaaatataagcacttagaggagccatgcctggcacacagtgaatgttacatattagctgagctgttactgttattccttaataattaagttctgataattattcagcctgaaaatt

SEQ ID NO: 312325 - DNA, 1196 bp, Homo Sapiens
ttcggcatttcagtaaatttttttaatgactttaatgattcttatttaagaaaaagcccttaaataaatgctaccaaggcagtaatatttgaccatatgaaccagaccaaataccctttaattttagtatattaacctctgctgtaaatgctcttttaacattgccacatgtacaaatttgtctagaacttcacgacacaaaagtgtgcaaatatgagtctaagattgtgctgaaatagggaaaggctaacactgatgtgcaaagtaaaaaagaaagataaccgcttctgcaacaggtaataaaacaaggaaaaaacgagttaggtcctgcatgtgtctccacttcattgcttccatgtttgaaaaagggagtctgttcttttgctaggccatgaggctggaatccacttggcatactgtgttgagaggtctaagttcagtggtgctctcagcagcagccgggaggtgtgattctgaggctgggtgacctgtgctttcagagaagcaggaaagggccctctaggtgtgctgcagtctctcagaaagagttcatcaaagtagcgagcaacgaaagaaactggtcttctttgatcggttttctgttattttcactggtccacctgctcctgctgaattgctgtcattcatttttctgttgagttttgtcattatatctcgtgcaagtgtaaaaaatgcctcttctacatttgcactggattttgcgcttgtctccaagaatttaatcccatagtcaattgctagcttctctcctctttcttttgacacttgtcttttgtcattcatatcacatttgttacccaggatcattctttcgacatcggaagaggcatgctcttcaatgtttctgatccaatttttaatattgtcaaaggatttttcatttgtgatgtcatagaccagcataatgcccatggctcctctgtagtacgctgtcgtgattgttcggaatctttcctgacccgctgtgtcccatatctgaagcttaattttctttccatctagttctatcgttctaattttaaaatcaattccgatggtggagatgaaggtggtgttgaaggcgtcctctgagaagcggaacaggaggcaggtcttgcctacccccgagtcgccgatcagcaggagcttgaagagataatcgtacgtcttcgccatcttctcgctccggccctctc

SEQ ID NO: 312326 - DNA, 309 bp, Homo Sapiens
  misc_feature (16)..(16): n is a, c, g, or t
cgcttatcaccattcnacttgcattgggccatgccactgcattccagccttgggcaacagaacaagacatgtctctaaaaataaaaagtaatgacaacttgcaaactatataaagacagtgcttccgaataagcatttctcccgttcaagtttggaattactagtgcaccagcaagctaccccagcctcagtttccccagagttgtgggtagagtagaacactaacgataaagttagtgtaataaggagtaaaggttggccaggtgttgtaactcgcacctgtaatcctagcactttgggaggccctag

SEQ ID NO: 312327 - DNA, 1954 bp, Homo Sapiens
gcaccacacctctatttattaggctctggagtcaaaacagtttggtagggagttggtcctagttcagaaataaagaatagaccaaccacaactttaaatcagtttattgacacagtaacacaacacacttgcctccctgacatccccgtccccctcacccaatctagatctctcccccttgctctccccttagaaaaagctgtttagtgaaaacagttaagggcaggccacttctacactcccagcgctaccctaggccctgcagagcagagtctcagacactactcggaacctggtggggaggcagctagtactatactcagccagccagaagtatccagtccctaagaacggattgccccacaattcccaggccctgagttgctatatattcctcttccttactgctgtttgtgaccccaagaaggagaccttggggcctgggcctgcagccaggagcaagaactcctggcagtgatttgagaattaattagagtttggctagtgttttaaaggcccaggcatcccccaaaaaagccctggtggtgggagtaaatttcaatgcccctatttaaaatgtactgataacattaaacagattaagccagcttaaccaaatgccagaataacactaagctgtaaagaaggaggggtcggacctgcttactccaggccagacgcaaatgcacacagagaagcccaggtaagagtgtcaaaaaacaactcaaggacactgcccagggactgaaaagcctatactcaggagcccctggggtgacaggaagcaaagaaagaaaatacacaagtcttaataaccaaaacagaaagccaacagcagggaaacctgagcctgacagtgctgcccaccagccctccaggccatgcccctgaacccagacagtccctccccctctaggcaatgtcctcccctaggctagatagaacacatcacacagcgcagtttagaaagcttctaatgccagttcataaacatcttcatttactattggtgattacatgtgaataatatgtttatactgttctttatggaaaacaatttcaacgagtcaactccgagaacacaataggcaaccctcaccctgagcccctcagtgtccttccctagacagcgaggagccctctcgtctgtcccagggctgcctaacttcccctcttcccccactgtggctcttgggtaaagcatcctctatgactattagtcctcatcggacaagttctggtccaggggataaaccatgaacatcacatctggccgagaggggacacagggatggcctggacgtacaatctcaaagcccaagaagctgaaggtcttcaggagtggagctctgtcttctcggcccttcctgaagcagatgaagacatagttcactttcatcttctcttcagcaaactctagcagtgctaacaatccttctttgctcccatcagctaataatccatctgggatttctacaaacaggctctggctggacaggactgcatcccaagaagagaccttcacctcggtgacctcatactggaagtggacgatgtgaggttttccatcattcacagggaggtcctgggtcacagtgagcttctcgtccttatatattagagctgagagagaaggatccctgccgccccctcgcccaccggggatcttcgacagtgggtgaggggcatcaggagcaccacagaggccctggaacaatgtgcctgcagcactggagctggggacagttactcaaaggcaaaatactactgtcctgggtgtttatcatcctcggcggctctgctcagggtgggaggaggcggcgcagggagtggatagatggatgagtgggtgggtgtggggtcacgcgcgcggggtcgatctctgcgggctaagtccctgtcaggccgcgggccgagcgcctccttttgcctcagcgagcgcctgcctccaacc

SEQ ID NO: 312328 - DNA, 473 bp, Homo Sapiens
  misc_feature (412)..(412): n is a, c, g, or t
  misc_feature (419)..(419): n is a, c, g, or t
  misc_feature (434)..(434): n is a, c, g, or t
  misc_feature (447)..(447): n is a, c, g, or t
  misc_feature (454)..(454): n is a, c, g, or t
tttttgcagtttagaaagcttctaatgccagttcataaacatcttcatttactattggtgattacatgtgaataatatgtttatactgttctttatggaaaacaatttcaacgagtcaactccgagaacacaataggcaaccctcaccctgagcccctcagtgtccttccctagacagcgaggagccctctcgtctgtcccagggctgcctaacttcccctcttcccccactgtggctcttggggtaaagcatcctctatgactattagtcctcatcgggacaagttctgggtccaggggggataaaccatggaacatcacatctgggccgagaggggggacacaggggatgggcctgggggcggtacaaatcttcaaaggcccagggaggcttaaggggtttttcaggggnttggggngctctgttttttttnggggcctttcccnaaggcangtttgagggcataggttca

SEQ ID NO: 312329 - DNA, 516 bp, Homo Sapiens
  misc_feature (33)..(33): n is a, c, g, or t
  misc_feature (42)..(42): n is a, c, g, or t
  misc_feature (49)..(49): n is a, c, g, or t
  misc_feature (58)..(58): n is a, c, g, or t
agctaaataatcccatctgggaatttactaacnaaaaccagnctctggnctggaacangaactgccatcccccaagaaagagaccctttcacctcggttgaccctccatactggaaagtggaacgaatgtgaggttttcccatcattccacagggaggtcctgggtccacagtgagcttctcgtccttatatattagagctgagagagaaggatccctgccgccccctcgcccaccggggatcttcgacagtgggtgaggggcatcaggagcaccacagaggccctggaacaatgtgcctgcagcactggagctggggacagttactcaaaggcaaaatactactgtcctgggtgtttatcatcctcggcgctctgctcagggtgggaggaggcggcgcagggagtggatagatggatgagtgggtgggtgtggggtcacgcgcgcggggtcgatctctgcgggctaagtccctgtcgcgcgcaggccgagcgcctccttttgcctcagcgagcgc

SEQ ID NO: 312330 - DNA, 666 bp, Homo Sapiens
ttctgtttgcctttactcattttcaaaatctgtcaaactctcctcagcattaaattaattatccctttaactaatcaatatacaaggataaatgagtagtactttgggttacttccttctcttcctccctctcttccaaatagactgagataaggcttctcagaaccatgggatgtatcagcagtatagaaaagggacagtgctgaatgagtcagcacccagtgcctcctacccattcccttctataccagctggtaggctcccatttcacatctgggctgagagttacctcagaacttgggaaactgacactctctgcacatttccagagagaaagatctgaagatcactagcatcaaaacctactgtcacagggggctggcgcatttcacaaaagcctcaggcctgaaagaaatcgaagagatctcttttcctgccccactctactgaaacacctgtgtggagtaaaaattttcatacatgaacacatacatattacatttcaatactgttgacaagaaatataacaaacttcatgtaataaccaagattttgaatcttcctaagtggcccacttatttaatgagtattggataaaaacaaaattctagtacaactgaaggctgtaaatcctgagagttggttataataggatctggcctggat

SEQ ID NO: 312331 - DNA, 977 bp, Homo Sapiens
cctaacttttaaaacagctccaaggtcacagtcagcagtagcatatgcatgaggtacagtacttttagattcagttaatcttcttggcaataactcttcgaatattgctggcggggatttcagtgaatgtgcccactgcattgggttgtccaggagttgatactggtgggatcacaggccggggataagatggtccagctgtggcctgtaggggcgaaggtgctgtgggagtggctgtgggggctggagttggtctggactcggtaatcttgcccgtttgtttcaactggacaagtttgagagcatcctctttagtgaatatcccccgagggccagtggctgtgccctggctagcatccagtgagtgtttttccagaatattgcgggcagctggacttaaacggaaccgtagtgtcccgggtatgtgttccttcttgacagggatggaaatctgtggttctggtgaggggcgaggctctgaaggttttgaaactggtggtggaggacctacgtctttgggaatttcaacatgtttccaatcttctccttcttctactatcaaaccaattagtgaacctagccgtatatttttacttccttcttcaaccacgattttggccaagattccatcatcacttgcatctaaggtaaccacagctttgtcagtctcaatttcacataatgcatctccagcactcaccgcttcaccttcctttttcagccatttcacaatgtttccttcttccattgtaggagacagtgatggcattagtatcttaatgggatcaccccgaagccactgcgtgctgtgaaaccatctccaattagctccgcggcttacggaccacccaagagcccccttcaccagccctacgcttcggcggccggggaagcccacaagataacgcagcagccgcggatcacagcccagcctccaggaggccgccatcttgacggccttctcactggctgccccc

SEQ ID NO: 312332 - DNA, 1168 bp, Homo Sapiens
ttttttgacgcaaacaaggaaaaaattatttttattatacaactatttaataattttacccatgcattctcggtctgaagaggtttgggaaatattcctttttgtaatgatgtccagagctaaaagtaaatattcctcctgggccaaaagtctctggaacctattcagtttctgctgcctcttcaccttctccacattcaaaccgcacaaagtctactaccgacaccccctgaggctgcacatactgccccaaggtaatggagggatccagcaaatacggctgggacagcatcttagtctctgcctctcccccaggctcatcgtccagggagccaacagagaggggggccatgcccaccacatgctgcccaaggcggcggccaacgtcttcaaggtttgttttctgttcagacgtctcacagatgaccagggccccatacttccccagcaccagcttgtgaagtgagggactctgcattgctccgtggacataagagccaacgtagaacccagatggcaccttcacccatgcagctcgtttaagaatcatgttttctcccagttttccaattgctaaagccaactgatccttgagtgagccttctctgtcaggcccagctggaagtccagaaagctcagaggaattcaagaaacctttactgtatgcagagggttgatcctttagggtctgacaatgcatcatggttccaagggctacttgctggaccaacagttgaaattttaaatttctagaaacaaaatctgtctcacagtttacctctactaatacagttgtgtttccttcctgcaacagcccaatcaggccttctttggtcttcctcccttggagcttggcagctttgctccagccctccttctgggcctccttgtggagccagatctctgcctgtttgaggtccccgccacaagtctccagagctttcttgcaatttacaaaggagtagcctgttttccgccgcagcttcatgaggagctccttgctggaggccgaggcagacagacggggcccagcataaaatgtgtgccttggctggggcgactgacgcagaagagacccagccgggtagctcccggtccgcgcgaccagaaacacgcgcagcgaccgcagcagcgacatctccctcgtgccgaattcgccacccaggcc

SEQ ID NO: 312333 - DNA, 2053 bp, Homo Sapiens
  misc_feature (212)..(212): n is a, c, g, or t
  misc_feature (267)..(267): n is a, c, g, or t
aaattcccgttataggaaataaccctgtgttaatttctggaaaaaaagcattaaaagaccattttttcccctggaaaccattccggaaccaggtccatgccaaaatctttttgtttacaataataaaattggtaataccggtggaattggcacatacagattttatctccccagatagaataaacttaaatatttaaaacgtacctttaacntgactttgtaacagacagcaatattcaatacaaaaatcacaaaacccactaactntaaacgctgcatagtacagcatacaaactcatctcccctatgacctactgaaactatgacacttttttaagctactctagcatttaacctttaactagaaatttatacgaaacacgattttatgttcaaatatggaaataagtaacataattccaaaacccaaaagcatcccagcattctgtaaaaagaaatacccccagcggctacatccatggtcactagcatcattgtgcagcatttcaggtaccatatcaaccagagcaacatacatgaataagccagcagtaagtgcaaatatccacatagaaacattttcagcataatgaccaatgaaaattcctgttgccattccaagatacgccagcatggctgacaatgcattataaaggacagcctgcttaacggtcatgccagcctttagtagaacagcaaagtcacctaattcatgaggcaactcatgacagaacacagcaacagaagtacttaaaccacttgataagccttcagtaaaagcagcaccaattgctaggccatcgctgaaattgtgcaggccatcacccattatcaccatccaggccagagtggcgacgccggcatctttcagctcctcccgagagtagcgctggctgtgactgtgaggatggtggttttggtggtggtgatgatggagaatatgatggtagtcatgatggtggtgaatgagatcgtctgactggccgagtgtatcgtggaaatgtgaatggcatttattcttgcaccctctgggtacatattcattgtagacttcctgtggatgagcatgagctatcatgacctcttcttcttccaagactgcaggctgctgagaatcaaagtgggagggctcttgtgagtctgctcgtaaatagccttcagttcgatcatctgtatctactttctcctcatttgttgaaagttgagattcatacttggacaactgcttcttaatctccacatcatcatcattttcaggtttcttctgattctttttcttcttatctttaaattgtttgatcaatgtgaggacatgttcaacaagaaacatgaaatacaggcctcctagagctgttagacccttccacgtggaatcaaaataggcactttcttctatgttttgagaagacagatgactgaaaagtggtcctcttttcatttccattgctggttcttcatggctatgactatggtggtgacttgcatgagaatgtggaagaaggtgtaaaaaagcatcaccactcaaagtcccaacggccagtgccacaaggaaactcaggagaaatttgaaaaacacccgattcatgagaggcactaagataacccccagcagagacaggaaactgatgatggaaatggctataaaaccaccaacccaggctatttgtaatgaataggtctttggagggatttcagccttcttttcacttgtatgaatcagacaagatctagcatcaatttggttgatgatggctggacagagatagttgaactctgttgcattcagcggaacctggatgcccatgccatgagatgtcagtagctttgatgcattgagacactcctgaggattttcatttgtgtttctggaatacataaagccttttcggggctcactcacagattcatttgttttcctaccagccagccggctcacccggctctttgatgtgacactgggtggagtggagctgcttacatctttggggaagagttttccaggtcttggagtctctattgtctctagaaagtgagttccttcagagacagtgtt

SEQ ID NO: 312334 - DNA, 385 bp, Homo Sapiens
  misc_feature (44)..(128): n is a, c, g, or t
tctagaactagtggatcccccgggctgaggaattcggcacgagnnnnnnnnnnnnnnnnnnnnnnnnnnnnnnnnnnnnnnnnnnnnnnnnnnnnnnnnnnnnnnnnnnnnnnnnnnnnnnnnnnnnnacatcaacccagtgctgcaggttttgtgtaatacaagtcactaatcatactctgatgcctgaacttgaggaggaaaatacatgtatatttttgttccgtaaaaataaccttaggaactgtagccatttcattgccttaattttaagaggtacactttagggtgttagctgctatgaacctgttgcccctttcgatcgtgtatttatgtaggtttatcagtgaaatgggcttgtttccgtctagtctctttttggtgt

SEQ ID NO: 312335 - DNA, 939 bp, Homo Sapiens
  misc_feature (512)..(530): n is a, c, g, or t
tcaggctgcagaaggtctcgagggtggcgtcacagcaggatttccgccttctgcattgcactgcacagccccatggaacatgaggcacttgaggccttgcttcttggagcctctggggagcagagtaggtcactgccctctgggagtgttttgcagtagttttgtaaatgtgttgctacatagtcaagttcctttgtggcaaagaaatattttgttttgatattaggagccagcccatgtaatgcctctcaggcttgcttgcttagaagaaaaaagtcaccctttgtggtttttaagaaaaaaattctgtgcagatctgttcctcctcctgctccttcccttttctctacatacagtgctcattggaggctcctgctaaaccttcttaaccagagaaataataggtatttgttagacctgagtgtacatttcacatgttatccttcacatatttctcattttcatctagtactttcttaatgcctttgttggagtccgcatcctcatctttnnnnnnnnnnnnnnnnnnncagcttagcctaagccacattcactttttttagttcacaaaaaggatttaatagccacaatgtgatttttgccacaactgtgtgattttaatattctctaatatcaagggcggatttagaattgcaggaaatacctggagaaatcacagtggagtgaatttttgctttaagaggaatgagagttggctgtctctgtaattgataatacagcttcatcctagtcccatctgcattccagaaaataaccctcatctttacaaaacacaggacacttgtgggacagttaactcaagcagctatggggagggaggagattattgaatggtgattaaataatgcaaatggctcttctgtttcttaaagactgtggaagaggtcagactgcccatttgaggtgggcagttcatac

SEQ ID NO: 312336 - DNA, 699 bp, Homo Sapiens
gagaagatcacagatgaaacctgcaattacttggatgcacagtttttcatgttcaagccccagcacctgaagaccctgccaggatccccagagtctcagtggtttgttctggggtgctcaaatgctatggtggggagataacattggaagataacacttgtatatggaacaacttaaataaccacttagaattctggctgagaagccaagaagaagcccaactcctctacttccagcttgctccagttcaagcacaagaatggagaataactcagaaaaatcttgaaaggatccatggtaatcttgaggctacccattgggtcccattctaagtacaatagcagcttgcataggccccaagggctacctaactctaatataaaatgttataaagtggctagcttctacgcatagggaaactagaacaaaatctggaaatggggttgctgagctcacacaggctggctttttgcactgacatatacattgtgtgtgtctgatgatgaagaagcagcaacacagctgctagtccaatccaatggttggagacacagaacttgctgtgaacctcggggctatgggatggcttctcctccctgccctggtgcctcctcttcttcctctccctcaaacttattgaaggcacactcctggatcctccggtccagctcagacaagctcccttcctggtctgagctg

SEQ ID NO: 312337 - DNA, 654 bp, Homo Sapiens
agcttttggtttttcaaatacttccacttcttcagcctcaaaaacttctattaccctatgaactttttcaactctgtgttcttcttcaactctatgttgttctaatttgatgaattcttctacttcatgaaacttgccttgttcaaaatattcttcaacttcatggaactcttcttcttccggaatttcttccacttctgcttctactacttctaattctagtctttcttttactactacttcttggcggaaggcaactgatactttttcttcaaggacagttctccctttagctgggggaacagcttcctttttaggcacaaggactttcttttctgggactttctttggtacttcaggcactttggctgggggtgcctcttttttctgaacaggaacaggtactttttcctcaggaattttctttgacactttagctggtggtgcctccacttttttaggaacaggagtaggtgcttcaggtactgctttcttaatcacttcaggcactctaggtggtgccacctcttcaacttcctctatgctaggtggttcttctgggatttcttcttctgaaataggctcttcttcaggctcctcagtcacttcaactggtagaacttcctcttctttagggagaatgattcgtttttc

SEQ ID NO: 312338 - DNA, 954 bp, Homo Sapiens
tccttagaaattcctttagtgctcagctgtccatgaaaacaggataagcggcttcctccgtctgtgctcagcagggcagggtggaggcgctgcgctcaggccaggaggacctctaatcaggacggggtggggcggggctctgagctggggaagcggctccagcgttgctactttagggcgtccaggtgggtgcagacctgggagaagacactgtccacggagccctcagcgttgaccttgcgcacaatgccacgtttctcatagaaggcgatgacgggttctgtggccttgtaataggtctccagccgctttttgatggtctcctcattgtcgtccacacgcccgctggtctctccacgtttcaagagccgctgggtcatggtctcagggcctgcgtccacatacagcagcagtgtgggctgtccaatccgtcgctcaaactcttctccttgctgcacctcccgcgggtagccatcaatcaggaagcctttggaagtattgactttggccaccatggcatcccggagcatgtccaacactgtctccagtggaaccagctgccccttctccatgatttccgacagcttcttgcccctggccgagcctgagctgacctcggaccgcaggaggtccccggtggagaggtgggtgtagccatacttctgcacgatcttctcacactgggtgcccttccctgagccaggcccacccaccacaaagatgatcttggttttcttcagcttctcttccatcctgccgaggtcccgggagccgtgtcagtgctctggggaggggtgcgggtgggcgccggggccagtgcgtgccctgcccgtcctcgcggcggccggcaaaggcgactatttataaggctgtcagcgcgcaggcatgccgggagccggcgttcccgcgacgcgtgggtcgacgatatcccgaaattccggaccggtacaccca

SEQ ID NO: 312339 - DNA, 1351 bp, Homo Sapiens
  misc_feature (61)..(61): n is a, c, g, or t
cacagactaaacgcactgcccagcctttagtttggagtgtgacttgcactgactgaaatanatctgacctgtcacccttgggggacatctcagtctcagatcttgctccagacccaacatctcctgcttgaaatgagacattaagaaacacacactcatccagtaggaactgcacacaccaccaaaaacgttcccctccccacaaccctgcccctttatgtttgtctagcaaagcactaggaaatggttcaagtttagggatttgctctatatttgcatttttctttttaaaaggcacagtttttattttaacgacgctgcattgctctttgatggtgaatctcaattcgactcctcaaactgtcaacactcttgttatcctagattctagaaggggcctcatcttttgacttctttctatagagggccacttctaaagctacagtactcatttggaaaaggacactgggatcaacacgtaagcgttgcaagcacaggggccgcctctcttgcagacaggtggccaaagcagggcttgtgctgggccagaagtggaagtaattcctcgccagctacacattcagtctgactggtggatgattgggagtgtttgtccctccctcccccaataattgatggccttgagatctgccagcatctcaaaggcagattcgtggctctgttcccagacttaggtctcagttatttaattggtaaatgacacaatcaagagactcaacactaattggaatgctgatttcaagtatttcctgggctagctggtagaagccatagattgtggaatgtgatttccatttctgaatcagtgggtggcaggttggttacagaaatgcttcctattagtctggaggccctctaggagtctgacatgtaattaacaaagcaaaaggtaaacatgaagggctggcatggagctgggtgtatatctggctgtgggacgtcgggttcttttctccactgcaaatgagactacagttgtgatgatggtgggaggttccaggggtgcaggtcttcaccaaggaccatgttgtaccacagcctctgctgagctgagggacacatgtccccctgctttcccaacaccaccaactttggatttcacagattgtctctaggctgggggctgccttgactgtattacacctggctggctcctttaatcacagcattctagaaatccatattggatgtggaataccagaatcctatgtagcatcctagtttgcaatccaattatagagttctttaaaaattctggagttctgtatgagaactagaaccatgatgaggtcagaggcaggcactttgcccacagttgatcctggaggcc

SEQ ID NO: 312340 - DNA, 1238 bp, Homo Sapiens
  misc_feature (733)..(733): n is a, c, g, or t
  misc_feature (1200)..(1200): n is a, c, g, or t
catttctgaagtttaagatgccttgactttttaaatgctcttaaggctattcgatgtaattcttactcctaaaactggctgttcttggcctgaaatctaatgctttgttttttgtacctctcccaggtgggtaacactctaggatgacatgatgttataattttaggggaaatcacatttttaccttatgctgttactgggcagaaccacgttttatgtaaacataccagacatcgggtatcagacagtactttaaatgttataaatttggtgatcagaactattaatagcatatatcgaactcacatggaagcacaactgagttcatgcacgtcctgaattttactttgccttatgaagtgccctccccacaatgcaggagaggcacagagtgcactgtgcattgacatgttacccgactaaggatcactctgttcataagaaaaaggcctgaagtgactctgtttaataaagtcagtttaattttatctaataatgatcttaagacattcccatgtcaaaatttgaaatatggtaattcagtgataactatctcttctaaagcagccgtaaacccttcccactacccgtctttctcccagctcaccccggctttttttgctgggggtgctggatgcaagcccccagccagcacacctgggatgctcaccctgtcgcacagttcagaaggcaagtgctcacctgctcgcaaagacccttcttctccaatggnggtctgaagaatactgccttctatctgtcttctgtgtaccactcgctcctctgctacccttctgtcgcacacagtgcttttccttttggcccagttctgtcccgtgaaattctcagaaggcctcgtgagctgcgctgatgtattctctccttgtttgatagctcatcatcagtagataagcctacacacttcagagggtgacaggtttcttacttggagacttcactgcaccttgacttgtagatttgccttcagacagctcttggttatggtaacaagtggcccccgagtcccagaatctttcccaggttgccccagaaagaccagccacctgtcacaggtgcagttgtccggcaatagggaagcaacttcatttttgttttatatttattccctcaagtgccctgagggagcatttgcaaactggggtacaataaataaggtgggattatacaaaggtatttaantaaataaggtttcagtatctattgggaggacatgaggc

SEQ ID NO: 312341 - DNA, 714 bp, Homo Sapiens
  misc_feature (540)..(550): n is a, c, g, or t
ggccgcttaattaaaatggcagttgaatattatgttaactttggttttatgattaaaccttttcaaagtttttgttactttcagatactcataagtaaggcatataacctctctagacctcactttccacatttgataaaggaacgatttgaattaaatgaaattgaaaatctcttagctctaagtataacaaattatgtgttaaattgtataattcatctcttagatatcatgaagaatgtgttgtttataatatgaaaaagtatgaagataaaaatcaaatatgactttgggtagcaagaagagattttgggggaagttgctaatgtgtacagttttttcccctaagagcggcgagagaatggcagctgatcagactggtggtggaatctgtctctattgcccagcttgggcactatgaagtttgacctgtgtcgatcactcaaaactagctgatgacatctgaaagggagttttaccccggctccctgaagtttcacattacagctctacatttgtgttaacacaatgaatgcttcnnnnnnnnnnngttatagaaatcaaagcttacataggcaaatctttgttagtgacttagttaaaaacatttcatgaataatagttgctcaagctattttaacccttttccctttcccagaagagaaacaagaaaatcccacacattttgctcagtcagggtatggtgctagctct

SEQ ID NO: 312342 - DNA, 848 bp, Homo Sapiens
  misc_feature (777)..(777): n is a, c, g, or t
  misc_feature (824)..(825): n is a, c, g, or t
ctgcagtaccgggaatcggcattacggcgggcgaacaaaagtccatgtctgtctatgctccccaccaaatcttcccgggctactgtgggcaacaagatgttgtcaagggtgcccctgagggcgtcatcgaccgctgtaactatgtgcgagttggcaccacccgggtgccactgacggggccggtgaaggaaaagatcatggcggtgatcaaggagtggggcactggccgggacaccctgcgctgcttggccctggccacccgggacacccccccgaagcgagaggaaatggtcctggatgactctgccaggttcctggagtatgagacggacctgacattcgtgggtgtagtgggcatgctggaccctccgcgcaaggaggtcacgggctccatccagctgtgccgtgacgccgggatccgggtgatcatgatcactggggacaacaagggcacagccattgccatctgccggcgaattggcatctttggggagaacgaggaggtggccgatcgcgcctacacgggccgagagttcgacgacctgcccctggctgaacagcgggaagcctgccgacgtgcctgctgcttcgcccgtgtggagccctcgcacaagtccaagattgtggagtacctgcagtcctacgatgagatcacagccatgacaggtgatggcgtcaatgacgcccctgccctgaagaaggctgagattggcattgccatgggatctggcactgccgtggccaagactgcctctgagatggtgctggctgacgacnacttctccaccatcgtagctgctgtggaggagggccgcgccatctanncacacatgaagcagttcatccgc

SEQ ID NO: 312343 - DNA, 1061 bp, Homo Sapiens
  misc_feature (119)..(119): n is a, c, g, or t
  misc_feature (1035)..(1035): n is a, c, g, or t
catgcttttaagtaccaaattctagtgttaaaaaatagaatatttaatggctactcattagtttaaaaatataacactaagtaggtaattttggcagaaagatatttaattacataaanacattcattactttcaaagtacacactaaccataacaccacatctgtgatactctttataaccattttgaggtttttacaagaaatcctaaaaaggcaaagaaccacagcaataagaaaaagatcaattaaaaatgaaaaacatggcatttaaccacacatattctccagtttataacagtagacacccagtagtgaagacagaatagagctcttgactcacataagactaagtattctgtgtctcttaatttagaatatctagagaataattaacctataggggtatcacctgttgtgtgaatgtggctggtacatagtttttgttattctggatccttgtatcactaaatgcctaatccagatgcttctgactggttccctgaaatttaaatgcagaattcactttcctacagaaacaatgtaataaataataaggcataattgacaatcacagtagtactgtaactaggcacattttaaattaaatatgctttttgagaattctgaatttataattaaaacaaatttcaaatgtaactcactgttgtttgaaaactgcctcaaacctaaacttaattagccacaaattactgaaattcctgaattattagcctcaaaaaaattttcccatctttttctgttagtattttctcaccactcaacataaacctttaaaaaatacttacccaacttagtatttccaagacaatcttacttcagcattgggattaggataaacaatcatgacaatcttcagttttaaacatcagccagttgttttcaaatattactcctattctatatacagggaacagagtcttctggtttggagcaaaataatggaaacttcttaactccagcattattacgtggaacatctgatagaaaacccagtcccgccgtcggcagccgcnccggcgcacagtgacgctcctgcggg

SEQ ID NO: 312344 - DNA, 572 bp, Homo Sapiens
aggctgaccaggtcccgcccgtcgctcagcctctgcatgatgttcagttgtaggcacaaaggcaggtcagtgaaggtgaggcctttgaaggcaggcctggtgatctgaatgttgttcagctgctgctgccagtggagaatcgtctccatccgatacacccacatgttaatgttcccgaccagcacagacttgccgactctttggaccagtgtacataaggatgtgtagagggtctggagtagttcccttattagtctaatgttttgctggtcttcaaggactttcagtaccactttttccaaaatattcatgaagttcttttgggcgatgccactcagggatgtgagctgtgactttgctatcagctccaacagccggaccacgtagttaaatcttctggaatccagaatggcagttgagaagtccagtctgttgaaagcttcccccagggtgcaatatccatggcgctctttagtacttcctttgtgaacatagatccatttttcttggtggaaatactgagttttggttttgctattcagcatgtccttctttctcttcttggctgcaac

SEQ ID NO: 312345 - DNA, 537 bp, Homo Sapiens
attattatttaggtccaaaaaaaagtttttaaaaatcacaacagaaataagagaaaataaaatgttcttccaatttcaatattctatatagcacctcactttctcctaatttttccttaaactaaaaggaaaccaggtaacattagtgtggcagagagttcactgtagattcagtgtgattttccttatcctgcttttcttcatgtggtgaatctagttcatttctgctatattcctcctcactggaatcactgtccgatccaccttcctccatcctgacagactgattgtcatgagaagcactttcacaggctttgtctgtgggaacagctcctttccgttggggcaagatagtaaaaaaatgcttcttgccagtctcttgtttccaggtattccagaataatttcaaacacatgattaactgccaaaacttttcgactattcatcttcacaaaatttccaagtgggagctgtgcatgattgattccataatctgacgcttgtttatatgtgagtcccttgtgatggttgtgatcc

SEQ ID NO: 312346 - DNA, 805 bp, Homo Sapiens
attgggccttcgggacagcagaggagcagtgtccggccatggccggagcccgcaggctggagctaggcgaggccctggcgctggggtcgggctggcgtcatgcgtgccacgctctcctctacgcgccggaccctgggatgctcttcggccgcatcccgctgcgctacgccatactgatgcagatgcgcttcgatggacgcctgggcttccccggcggattcgtggacacgcaggacagaagcctagaggacgggctgaaccgcgagctgcgcgaggagctgggcgaagcggctgccgctttccgcgtggagcgcactgactaccgcagctcccacgtcgggtcagggccacgcgttgtggcccacttctatgccaagcgtctgacgctcgaggagctgttggctgtggaggccggcgcaacaggggccaaggaccacgggctggaggtgctgggcctggtgtgagtgcccctgtaccctgcatgatggtgtgggaggcctgcccatctttctggagaattgctttattggtgctgcctgggagcagttactggataccctccaggacttgggagtggtggaagctggtgctttctcaggacttcagatcccagttcgtctgaggcaaccctctgtggactcagggaacctgagctgaggactttggtacaaggaagggaatgttttctcttccggacctaaagacgataccaaattaaaagaagacatgtatatcatatgttttgagcagaggaccctccaattcatgggatcaggggcacttgtatatttgcatacagcctggt

SEQ ID NO: 312347 - DNA, 1585 bp, Homo Sapiens
ccaaacgccaggtctttttgagtcaacccaggactccgaaagccccggagtcttccccccctgaatcccccggaaccctaagggttccaggccaaaaaaaccagggtgggcaatggagggggggcccctcacagaacccttgtttgggtaaaacaaagtcatcctgggatgccaccctggtacgcacccccggagaccaccgggggctgcctgggaaccctcgtaagatacgggccctcctaggctctctttgggggggttcctgcgccttcatggttgccaaggagaagagcggatataaaaccggtataacctcgtgctccctaatgatgaagaggagggccccgaagctggtccagaatgggcctccgggagctccctccggaggtggcttccattatgtaggaactgatagagggcttgtctgaccccctcccctgagagttttctttcatagtccttgtctttgcagagaaagtacttcttatctgtttgataaacctgcatgccgcagatgcgcacacccaggcaggctgaggtgctctgcgcacacttcctcatgtggcgggccttcttctcctccgatgcatcatcgccgtgctgccgggtccccatcttcagatccaggacacagggatgcgtgtactgtgacactacattttccagcaacaagaaccgatgccgcttgttctctgggtactcggagcacaggcgggtcaggtgggcctggtggcattgcaggccccacgggttgaagctcttcctctcaacctggtttccgttggtgtcttccaccagcgagaaggctggagtgttgaggtggggctcggacctcagaagagccttggccgggctctccttgggtgagcgtgccagctgggcatgcggccactgggcaagggtgcagtcgctgccattgctgccggtggtctgctggagcgtctgccatatggccaccgccgccgactctgtggagaccttgaagggctcctggctctccttcactgggttggcaaccaagctgagatggcctgtgctgtctttccagaggtgcactgtgacggtacctttgtactttggttgaacctcttcatggccagcggcagggattcatagaacctctgctcccgggagacgaggggcttgcacaccgtatgctcgtcatacttcatcacgctcatgtgccccccgacctggtgcaggaagggctccagctgcacgcctgccctcatttccccggcttctgcgcttttttgcacaaccatggcggcagatgttgttgttggggggtccctgcacagtctgctagaggaaggtttgaagtagaaagggcagctcccaacagcacacggggctgtcagcggtcctcaactttctccttcttggcctttattgctgtcatagcgcagttgtcctcctgtctgtgggttctcagcggggtcctcagagcttcctccaagatcgtggggagtgtatggaaggcagggcccaggaattttttttctcagtgcccaccatgtacaggcatcaggcaatggcccgtcccagcgtggagcattttcttttcaccagagccctggtgcgg

SEQ ID NO: 312348 - DNA, 290 bp, Homo Sapiens
gctttagggaaagagcaatctaattatctgattatatgattggcactaagatgggaatgactctggcctgatttcttcagtttacattttaaaataggagcttagttagcccccaaataatatgtaattgatgtattagcgttggggagtgaatatttttcaaggcagaagatatttctcaattcttgcttacttttagaggttgaagttcaaggaagccccttccttggcactgtatcccagggaggtatttggagttaatttcagggcttagcagtgactctttagaa

SEQ ID NO: 312349 - DNA, 671 bp, Homo Sapiens
  misc_feature (53)..(94): n is a, c, g, or t
cttatacagcttttagaattttcatgacaggaggaccgttttctcaaatgagnnnnnnnnnnnnnnnnnnnnnnnnnnnnnnnnnnnnnnnnnnacttgaaccttaacataaccttccaatgcactgaatttaaacactgcctgaaaaggtttacggtcaataggacatgaagccagtgtctctgcccatttaagaatacaagtcatacagaagacatgattacagctttctggaaaaccaacttccttttctaatagacaattaagacatattgggcatctgtcagcctcactgtacaacagaccagtggaaatagtattatctccgttttcttcaccttccatgtcttcatacttcttatctcccatatttagggtacatacagttttcttcttcatttctctttggaaaagggtttcctcagaccgaggtcgaggcgctcggtccggccgcggccccacagtaggttcccaggtcccagtcactccgctgccaagttccccaacatggactccttcgtccgctttgtggtgttacagggtctctaggacactgactccgctggctcggtccggaggcggcggcgaagcagggagcgacccaggttgcgctgctccgcgcggcttaagccaccgctactcccccttcccccgccttgtctccccggccg

SEQ ID NO: 312350 - DNA, 1089 bp, Homo Sapiens
  misc_feature (57)..(57): n is a, c, g, or t
  misc_feature (71)..(311): n is a, c, g, or t
  misc_feature (326)..(359): n is a, c, g, or t
  misc_feature (694)..(702): n is a, c, g, or t
gcctgaaatatttattgccaattaaagaaaaatcttcaaccgggcacggtggcctcnacacctgttaaccnnnnnnnnnnnnnnnnnnnnnnnnnnnnnnnnnnnnnnnnnnnnnnnnnnnnnnnnnnnnnnnnnnnnnnnnnnnnnnnnnnnnnnnnnnnnnnnnnnnnnnnnnnnnnnnnnnnnnnnnnnnnnnnnnnnnnnnnnnnnnnnnnnnnnnnnnnnnnnnnnnnnnnnnnnnnnnnnnnnnnnnnnnnnnnnnnnnnnnnnnnnnnnnnnnnnnnnnnnnnnnnnnnnnnnnnnnnnnnnnngatctccgtctcagnnnnnnnnnnnnnnnnnnnnnnnnnnnnnnnnnntcctcaaacatatgttcagtattttcatgaatttttttatgaatgactacattgtgaagtaaacaatttcccaaattgcatcaaaaacatgcaacaattttttgaaacatctctttaaactactgaaagtcacacatgtaacatatacaggcttctctctgctaaaagcaaggaaagttttgaaatgaatatatgcttgtttgctaccaatgttcacagctcatggttttcccccatgaacccacttcatgtcaatgcaaagtattataaaataatacctccattgacatatacccgaaagatccaaagctctagatctctaagcttcagatagnnnnnnnnntagtgaaaaatgttcattatcaattaatagctgacgagacccaccaaagaactgtaaaataattccaggaaaggaaactcaaaacccactttcttattacacccttaggaatttctgaagtttttgttattttcctttcagaataaagaagaccaaatgtaatcaatcaggggaataaaaaatactgatacagatgtttgtctaggttaaactgttagagaaagggatatgtgaacacatttttaaattaattcatttctaaccataattagcttttaaataagtgtcttcaaattattctcttttctcagaatcatttctgggctcaggtatttctaatcatactcagttttgtataagcctgaagctttgtgtctttgtagagca

SEQ ID NO: 312351 - DNA, 487 bp, Homo Sapiens
gccaattttctatgtatgaatatgctttaacctaggatttcagtccactctgactgactttctaaactttaacttgggtttttacagtgactatgcattagtgctgactctttggtataagccataaaatattttccttcctatcaatttatctgaactttggtcttttcactaaattgtacagtattctacttctgtttaaaaaggggagatgagaaagggaatactatctaaccaataacttgaacaaaaacactaaactaagcatttaatagaaatgctttttattgaggaggtattatccagagttcatgcttagaacaaatgcatctttgcgtatcctagacttaacaattcatcagtttctgagaccacagaatcaggttttccgtagtagataaagactctctggtgcttcaaattctgttcaagtgttttgactcatcagcttctactctttctattactgcctttgcctggcttgttt

SEQ ID NO: 312352 - DNA, 974 bp, Homo Sapiens
  misc_feature (23)..(23): n is a, c, g, or t
  misc_feature (38)..(38): n is a, c, g, or t
  misc_feature (51)..(51): n is a, c, g, or t
ctgtcacagcgctcatcgattgntgcagttggtgagtnctctccctctgangtagtcttcagaaccagcggagccggcttcgttcaagtctccatgaccagggctcggaccgcgcggtagttggcgtagatgtggagggcagtgaggaagaagaaacatccaaggctgaagccagggcaacctgacaccagagggagcatcaggaggctgaccaagagccccgccaggttcaccagcgtctcctggctgctgtcccttgctgacacgtcagccattttgttcctccgaggcttggtgcacggtcagggcagcccgagtgggccccaccagcaacactcacgatgcacttggctaggttgctggtggagacggtcatggtgaaacagattgggtatacaggagccataatctcaaggaacatggctacgtcattgaggatgtccgcaaaaagcctccactgcttggcattgcagtccagtttgctccctttccaccaggcaaagacgatgcggcccagcatgccagttgaatctttcacgagccaggtggccgtggcagctgaaacagtggcttttgcgttccccacccctatgcccagcaagactgcctgggtggctagggagccggagaggctggaagcaaacgcctgcacggaatcccacagctggtagggcaagtagtccgggctgacgctatcagggaagccctgaggcaggaacacggcctggagcccggagaggggcggtgagggggccccggaagcccccacttcgcccgcatctcgtccttcaggtttgaccgtgaaggccctggagagcccccaccagcgccagcccccgacctcccactgcaggctcccgtccgcggcggcgcggcagccccgtgcctccccggagccgaactgctcggaacacagcggggtctccaaacccgcgtcgtcagccatgccgagcttttggatcccccccggcctg

SEQ ID NO: 312353 - DNA, 834 bp, Homo Sapiens
  misc_feature (561)..(771): n is a, c, g, or t
  misc_feature (773)..(773): n is a, c, g, or t
cggccgggattgaaaatggattttattatgacatgttcattgaagacagagcagtgtccagcacagaattgtcagccctggagaatatatgtaaagccatcataaaagaaaagcaaccttttgaaagactagaagtcagcaaggaaatcctcctggaaatgtttaagtacaataaatttaaatgccgcattctgaatgagaaagttaacactgcaactaccaccgtgtacaggtgcggtccattaattgacctttgcaaaggtccacatgtaagacacactggaaaaattaaaaccatcaaaatttttaagaattcctcaacatattgggagggcaatccggaaatggaaacattgcagaggatctatggaatatcctttcctgataacaagatgatgagagactgggaaaagttccaagaggaagcaaagaaccgagatcacaggaagatcgggaaggaacaagaacttttctttctccacgatttgagtcctggaagctgttttttccttcccagaggagccttcatttataatacgcttacagatttcatacgaagannnnnnnnnnnnnnnnnnnnnnnnnnnnnnnnnnnnnnnnnnnnnnnnnnnnnnnnnnnnnnnnnnnnnnnnnnnnnnnnnnnnnnnnnnnnnnnnnnnnnnnnnnnnnnnnnnnnnnnnnnnnnnnnnnnnnnnnnnnnnnnnnnnnnnnnnnnnnnnnnnnnnnnnnnnnnnnnnnnnnnnnnnnnnnnnnnnnnnnnnnnnnnnnnnngntcaagtgattctcctgccttcagcctgcccaagtagctggggattatagggcattgcacca

SEQ ID NO: 312354 - DNA, 612 bp, Homo Sapiens
  misc_feature (438)..(452): n is a, c, g, or t
tttagacaaaacaatgtcatttagtagaatatttcagtatttaagtggaatttcagtatactgtactatcctttataagtcattaaaataatgtttcatcaaatggttaaatggaccactggtttcttagagaaatgtttttaggcttaattcattcaattgtcaagtacacttagtcttaatacactcaggtttgaacagattattctgaatattaaaatttaatccattcttaatattttaaaacttttgttaagaaaaactgccagtttgtgcttttgaaatgtctgttttgacatcatagtctagtaaaattttgacagtgcatatgtactgttactaaaagctttatatgaaattattaatgtgaagtttttcatttataattcaaggaatgatttcctgaaaacatttcaagggatttatgtctacatattnnnnnnnnnnnnnnnatatatatgtaatatgcatacacagatgcatatgtgtatatataatgaaatttatgttgctggtattttgcattttaaagtgatcaagattcattaggcaaactttggtttaagtaaacatatgttcaaaatcagattaacagatacaggtttcatagag

SEQ ID NO: 312355 - DNA, 1480 bp, Homo Sapiens
attattattaaatgtcctcattttctaaaaataagcaaccagagcttgtcaacattttcttaagactgattattacaaagccattccaaagttaaatgtacaatccacagtacatcagagagagacacaataataaatgtataatcaaaggtactattattgatcacaatttattttaaagtcaggaaaagcctgcaataggctggacaaatacttgattgtgcccatgtttccatgggatggacagcagcactgagtcacacaatgagagcaacacttccttttccaccttcctggaaaaatgtttgttagataaggcaaaggatgggtggctacagaatggtggtttgaaccatgcaagaacagcaaataataggtaataggtgtgcagtaaacatctgactgctgaatcttgggtgaaaaaggcagcaagaaaaatgaccacagaaggaaatggttgaaaggcatttcaactctgaactttttaaaataatgcaagaaataataagctttttaaaaatgtctttctgccacctttatatagggcagcacaatccaaagataattttctcttctctgtaattttttaggttggtgcacagagtggtctgcttctgtcctcttttgttccaaatgaggtgaaacataaacccacctatgtgtcttcctctaaagctctggattatagaaatgatcaacaaataacatttattttcacatctaagcataaatactaaaatgaagattactgttcactttactcttccattatttcaactctgcgaggcccatagagtagaacgtaagcgatatgccagtctccaccaccagaaagccgtaagatatgcttctggttttacgatgctgactttgtcatcatcaacgttaatccattcatcttgtttccttttcacccatgatacataatgacctgaagaactagaccttccctggtgtgttagtactgcttgtaagtcatagtatccacaattattggagccaatatcatcagcaaaagaaaagggttcatacttaacttctttctggggactactctttttgtcacttgtatttggctgctgattcacttttttatcttctagatccttgaatttggatcgaaaagacaccattttctcttgaagttctggtgtacacagttcatacatatccaacataagaggaaatttaacatccttaagaactttggcattcacagattccttctctttataaaaaaatcgagccatctgaatggtcaagtaagcaggcagccggctgatcttggaagatttgatatacaaggcatttctttgcaacgttggagactgtttggtgatttcttcctgaagtcgcaatttaagtcctgtaaaaagatacttgacttcctgattgataaaacagctaagctgaagttgattttcctttcctttggtgacttcttcttcttcagattctgtacatttcatggtagtttcaa

SEQ ID NO: 312356 - DNA, 756 bp, Homo Sapiens
gtttgcctgctatgaagaacatatttggtaaaataaaaacaagtgacatcttctctttgtattcatagagtcttgtaattcttaacttatttctggaaatagtttgttcatatggccaaattataaagggacttagtaaaagaaagctatgttttctgattacgaaggaaatctatgctcacagtgggaaaacaagaaaatgtggcaaagcacaggtaagaaaataaaaatcaataatatcaacattatgaatattttaggtacttaggaatttggggtagaatgatggaaagcaaactgttaattatagctgtatatttcagtgtagaggctacaggtgccttgcatttgttttcttataaaatctgttcccatacattttacttactttatttgaatttaggaaactttcattaggtagccatttttattttctgtttctttaatcattttactttgaaataattttaaatttacagaaaatttgcaaaaatagtgtagaaatttcccatttgcctttatccagcttcctgtagtgttgccattttatgtaaccatagtacaattattgaaaccaagacattaactttgagaggctgctactactctaagaaccatttttaaattttaccagttttctcactaatgtcctttttatgtagtccaggattcctcactgcattcagtcatcatgtccccatagtctcctgtggtctgtgatagttccaagtcttgtcattcataaccttgacattc

SEQ ID NO: 312357 - DNA, 1816 bp, Homo Sapiens
  misc_feature (455)..(455): n is a, c, g, or t
ttgctccaaatgctacgacctgaagaatggctgcagattgagatatcaaaaatctcagaaaaatatataatatatttgtatatctctgtatgtctattatttaaatttcacattcctttaaaagtggttattcagtcagtagctgctgaaggaggctcttctgctgggcctggggggtctgtggtcctgacgtgggcttttgagttcccagtggaccaggctggttcaggtaagggtccccgcctaccagattcactgtacactggacgtcagcaaacacctgaacctgttgcacctgctgggttccatctgcttctgttttgagaaggtcagtggatgagagctggttgcagtagaggcctgtgtgtctcagtgcgggatcatttatctggctcagggcacacagtgttcattcctggcatctgcaaagagctcatctgcatctggggccatcnattgggttccatgttctgaacattcgtatttccacctgccatggaaacggtgatgctcatgttgttgtatactccctggctgtgcaggcgtgggctggttctggacagcttgactgaacacattgttgtttcctatcgctccttgctgccaggccttcatgtctggtgactgatacccggaggcaggtggagtttgctggagcagagaactctgaggaggagggattggcatcggcaccatggagctcccagggcttagagatggagcaaagttggcctcaccttggggaaccattcctgctcctggatactggaagacattctgctgcatctgaggattgattccagtgccaaactgtcctcctatgtttcctgtcatgcctctgctcaccatgctgttgcggttgggccaaggatgcttcagggtttgcttgctagttgtgaaaacggggctggtagaagcaggtgggtttcctggatttgtaccatagtttggtggataggggaattgctgtggagcaccctgaggaaagtcggggttcccccatttgaactggtagtccagatgagggagggaggttgttcccaaagctttgctgcctcataagcatggctctttgctgctgtattagctgcctctgtcggtgctgttgactgtacagttcccgctgacgttgtgccaacatttgagcattcaggggtggctgaggtgtaatttgctgttgcatgcctgatctcatattgatgcccaacaggagcagttgcctgcaaactggtttaagatagcttgccgattttggtgtatcaactgctgttgtccctgtaatcgctgctgtagttgaagtcgaagctggttaggtgcagccggaggtctgtttagagtttgcctgggctgcatgcccatgccaggtgaaaaagcacctcggggaggtgttacttgaacaggcatcgtccccagtgaaggtttttgcctgaccatgccttggaaagggctagggagattggcagtaggagaaggagaagagtaaggctgggaataaaggttgggtctttcttccatgatcaaaggtggcgttgcttgttgtggtggaaatctctctgataatacatctaatccacccccctgaacaagtttgtcaattcccagagctctgtctagttcagctagctcagtttcatctttgccactaaggaaggataccagctgttcaagaagagccttctcatcatttctcccttctactgttgtgggtggacagagaagctcatctaattgtgagctaatacactggtcttctgatttactctgatttatagctgtcaccctcgtgccggattcgccacccaccccttggcgttga

SEQ ID NO: 312358 - DNA, 484 bp, Homo Sapiens
ttgcagatgccagagatgaacactgtgtgccctgagcagataaatgatcccgcactgagacacacatgcctctactgcaaccagctctcatccactgaccttctcaaaacagaagcagatggaacccaggacaagaagacagaagagttcttctctgtggtgactacagactagaggaatgctcctacaggtgcaacaggttcaggtgtttgctgacgtccagtgtacagtgaatctggtaggcggggacccttacctgaaccagccctggtccactgggaactcaaaagcccacgtcaggaccacagaccccccaggcccagcagaagagcctccttcagcagctactgactgaataaccacttttaaaggaatgtgaaatttaaataatagacatacagagatatacaaatatattatatatttttctgagatttttgatatctcaatctgcagccattcttcaggtcgtagcatttggagc

SEQ ID NO: 312359 - DNA, 1992 bp, Homo Sapiens
  misc_feature (114)..(114): n is a, c, g, or t
caacttaaatgcttttattgacaatgtcttggaacaataagcaaacaatgcttaaatttttcattcaaattcactttccacatgtcaaaagacctcagggtagaaaaaaataanataaaaatataaatatctgagaatccatcttaataaataaattaaaaacacaataaaacgttttcatggaaaactgttaatgtcagaacattcagaccacctcaacaatgcatgatcagtaacattacaatgaacattgatgttgaaggaaaactacagtgcatggatatagctatttatttctatgtacattgatgttgaagccgtatctatttcttagtataatattggtcatttctaatcagaacacactattgccaggaacacagtagttattgttaaaatcagctgcactagatacaatttgaaaatatccagcaccaggttaattccaataatgaacccaatagattagttaatgctatgagaggactaaggagaaagagaaaagagacacagacccaggcctggctcaccatgctactaactaccagctctctgaagtgtcactgggaacaatacacactccatgcgttttgctacatctccggaagaggtaaggacttacgcacagataaggtcctccctaggtctacaggaaccctctagggaagatgtgtttctcctctctgtaatgcaccagctcgggcagtggcacttgtgggtgccggctgcctccccttccctgccccctcacagggccagcagcgtgggtgagctgagcgagtcagaggaaggctcattgctgctgctgcccttgcggtgggcagctgcacagctggggaaggagtcagcctcggggtaggtgaagacgaaggaagacgtgtaagcagtgcagctgggagtacaggtgaccaccggagtgcacaggggctccagctctgtggccatgggccccatccccagggagccactgtgcagaggctcccagtctgctgcatagaaggacccagataggtccatgtctggcacggagcgggctgtctcagagccactgggcctggatgatgctgggaacaggaagtcatcaaagggctcggtcttcagctccatgctgctgatgctcttgacaggttccactgagggcttgggctcagggtcattgaggagaggcagggtgaaggcctcctcagactccggggtggcaacctctggcaggcccccagtcagatcaagggaagccacagacatctcttctgggaagcccaggtccttctccttcagcaggttggcaatctcggtctgcaaagcagacttctcatcttctagttggtctgtctccgcttggagtgtatcagtcagctccctcctccggttgcggcatttggctgcagccatcttattcctttcccttcggattctccttttctcttcttcttctggagataactgttccaccttgcccctcctgccaatgctctgcgctcggcctcctgtcatggtcttcacaacgccagccctggagtaagccccagcggagggggcggggactccgaaagggtgaggggctctggtctgcgatggggccacagaggagacgagggcgggctgcaccagccactgcaggtccggactggtcgagatggcagtgaccgtgggaatgaagttggcactggagacggccaggtccgtgcagaagtcctgcgcgttgacaggcgagcccatgctggagaaggagtctgcgggtgagtggtagtaagagaggctatccccggccggggacgcgctgctgcagcgggaggatgacgcctcgtagtctgcgttgaagcccgagaacatcatcgtggcggttaggcaaagccgggcgaggggccgaggggcggagacaggtgggtgctgtgcagcagagctgggtaggagcacggtcactgctcgttcgctgcgccgcggccgccggctcagtcttggcttctcagttgctcgctgcagatgcggttc

SEQ ID NO: 312360 - DNA, 681 bp, Homo Sapiens
  misc_feature (573)..(573): n is a, c, g, or t
  misc_feature (612)..(612): n is a, c, g, or t
  misc_feature (656)..(656): n is a, c, g, or t
  misc_feature (671)..(671): n is a, c, g, or t
gcacgagggaactctagcgtactcttcctgggaatgtgggggctgggtgggaagcagccccggagatgcaggagcccagtacagaggatgaagccactgatggggctggctgcacatccgtaactgggagccctggctccaagcccattccatcccaactcagactctgagtctcaccctaagaagtactctcatagtttcttccctaagtttcttaccgcatgctttcagactgggctcttctttgttctcttgctgaggatcttattttaaatgcaagtcacacctagtctgcaactgcaggtcagaaatggtttcacagtggggtgccaggaagcagggaagctgcaggagccagttctactggggtgggtgaatggaggtgatggcagacacttttactgaatgtcggtctttttttgtgattattctagttatctccagaagaagaagagaaagggagaatccgaagggaaagggataagatggctgcagcctgccgcaaccggaggagggagctgactgatacactccaagcggggacaggccaacttgaagatgagaagtctgctntgcagaccgagattgcaaccttgctgaggagggacctgngcttccccagagagatgtctgtgggctcccttgatctgactggnggcctgccagaggtngcccccccgg

SEQ ID NO: 312361 - DNA, 578 bp, Homo Sapiens
  misc_feature (113)..(138): n is a, c, g, or t
tttcgcattcaacttaaatgcttttattgacaatgtcttggaacaataagcaaacaatgcttaaatttttcattcaaattcactttccacatgtcaaaagacctcagggtagnnnnnnnnnnnnnnnnnnnnnnnnnntctgagaatccatcttaataaataaattaaaactcaaataaacggttttcatggaaaactgttaatgtcagaacattcagaccacctcaacaatgcatggtcagtaacattacaatgaacattggtgttgaagaaaaactacagtacatgggtatagctatttatttctatctaccagaaaataaagtcgtatcttttcttagtataatattggtcatttctaatcagaacacactattgccgggaacacagtagttattgttaaaatcagctgcactagatacaatttggaaatatccagcaccaggttaattccaataatgagcccaatagatttgttaatgctatgagaagactaagggggaagagaaaagagacccagaccccggcctggctccacatgctactaactaccagctctctggagtgtcactgggaac

SEQ ID NO: 312362 - DNA, 475 bp, Homo Sapiens
  misc_feature (32)..(32): n is a, c, g, or t
  misc_feature (42)..(42): n is a, c, g, or t
  misc_feature (55)..(55): n is a, c, g, or t
  misc_feature (60)..(60): n is a, c, g, or t
  misc_feature (110)..(110): n is a, c, g, or t
  misc_feature (123)..(123): n is a, c, g, or t
aaaaattcaacttggaaattaaaagttaaccnaccggaattncaaaaaggggctnccaancttcttgttgccaatgggccccccaatccccccaggaagcccactgtgcnaaaaggctccccnaatctgcctgccataaaaaggaccccagataggtcccatgtctggccacggagcgggctgtcctccagaagccactgggccctggatgaatgctgggaacaggaagtcatcaaagggctcggtcttcagctcccatgcctgctgatgctcttgacaggttccactgagggcttgggctcagggtcattgaggagaggcagggtgaaggcctcctcagactccggggtggcaacctctggcaggcccccagtcagatcaagggaagccacagacatctcttctgggaagcccaggtcatcagggatcttgcaggcaggtcggtgagctgccaggatgaactctagtttttcct

SEQ ID NO: 312363 - DNA, 615 bp, Homo Sapiens
taatgagttcacaggtgttactgacactgcttggtatcactgtgctgttcaaagttaaaataggaacaagatctccatgcctaccattaatttgcagcagatatattttgcacactcaaacagttccagaagtgttttttcagactttaagtgcttcaaaatccatttaactatgcaactgaggagcttccgcctaacctttgattggcagtgactcatctgcaatgtagtaacatgctaaaagacaaatctaagagaagaatcgaacaaagttccataaatgtcttccaggcaatgtatatgctcaattaagatcatattctggtgaactgatatcagtattgggcaatatccatttttttgggaatttgctcgcactccagtttaattttctcttcttgtgtttcttcaacttctgtatctatttcatcatcgattctttcgtcagagtccgtggccgttttgccgagggccgggttggggggttttgagaaaagattctcaaaatccatgacccagacaggtcctccctttcgcgagccgggaagctacagagtaacaacccgagagagtgacaacccggacgcgacgagacggacccagagccgcgccccc

SEQ ID NO: 312364 - DNA, 596 bp, Homo Sapiens
tggctgcctgggtaggctctaatatgagacgaagctcttcacataaccgttgtgaaagaggcgctgttaagatcaggtaactctgccacatctcagctgcaaccttctcctcctctgggtttccagattcacgtggcaaaaagggctggaagatcgtgtccatgaggaattgatgagctgtatgaatggtagactctcggcttctttctggtttctcattttctgtctccttatgggctttgtctgttctggggtcttggtcttcctctgttttaacagtttggatctccacttccatctcatcaaagcccaagggtgctgtggtgcccgacttgatttcctctggcttcagctgctccacgtctgctgctttgaactcctcctgctcctctgtgtccataagggtgtcctctatctcctcctcttcctgatctttgccagagtcttttgcagactgttgctgttctttgctggccacatcataggtctgtgcatcgtatgcgtcactgccttgtttaatgtgctcgaatgcatctgcatcctccacctgggcctggggctgctgagctggcccctgctcggcatggctgtccgta

SEQ ID NO: 312365 - DNA, 1135 bp, Homo Sapiens
attcagctccattttctgtctctgcaggtcctcagtggcatctggatgggactcactgagccgctctgctgtctcccccagtatggtcaccttatctcccaggggtgcgaggtccctttcaaagccctcatgccgtcgctgaagagcctgaacactgaacagatctgagccagggtctgcagcactgagggcctggcatttcttctcaatctgctccttcgtgtcatctgcttctctgtgaaacacttcaacagcatgggcactgcccagcagctgccgctgttcatctgcaagcctctgcaaagaaccccagcgggcattcaattcctgccggatttgagctccttctggtgttagaagtccttcaaatagtagatcatcagctaccttgttgatatcccttagccgaggctccattggtattcaaatccttttggaactcatcaaactttttctgcagctcccaaacatcatctagttccactccagtgttttctgcctttttctcttgaatccattccagcatgtctcctgcctcataggccaataaaaattcattataacgttgcaatagacgacgtctgcgttcttctgcccgatccaagagggagcggtattggttctcaatctgctcctggcgctgggtgatgtttcctggctcttctcgtcgccgctgtgggagcatcgggaactcatcgtgggccagtcttctgacatagacagctgggacaatgccctgatgatcagcggcttccaccttccaccagtccttattgatggaactgagcagcgttaagacatcacctttcttcatggtgacttctcgggggctgcgggcctggaagtcatataaagccatgaccctttgttctccagcaactccctccactggtgcagcctgttgttgctggcaggcgtttgcctgattccgcagagctttcatactgtctccaaatgaattgagatctaatagaaaggcctcatgcttctttagaagagccccagctgcttcttcatcagcaccatagttagtattatctacaataggttccttctctctgatccatgtttctgcttcatgcaggtcagccaggtactgctggaactggacaccggcttcaagatcattttgtcg

SEQ ID NO: 312366 - DNA, 1347 bp, Homo Sapiens
  misc_feature (547)..(547): n is a, c, g, or t
attttagcagggagtttcagcagccaggcttgcagagaattacttacattcttgcagcaatgttatgtgccctgagtgctttttctctctggcctctcaactctgttttaatgggatatgacaagaataacccaatttgtgtaaacttccatagtgcaattattgtttacttctttgactagcctaactcttcattttgtgtagagaaccagacattttatttaggtgctttagataatgtctatcactttgtctcccatatagagcctatgtaatactttgcacatggagatatctcataagaacttggaaaatgtttcttcctttttgaaatgattctttatattttaatggtgcttgttagctacaaggaagtaaataatatttggctaatgatactgtggtctagagtagaagatatgtgtctgtgtgaatgctgtcaattatagatcttcctaatacctttgactctggggtgggacagcccatgtgcaaggagagatactgctaaggaagatactagcaacatctgtgtttaaaatgaagntgtcatctcatgtgtgtgtcaagcagatatgcatcctctatttaccactagagagcctgaaggacagaaaatgagagcaagtgggaatgcagcactaggtacctggagccagatggctgtggagttgaggaagtccctgaacatagcactttgttcctggcagcggggattattggggttaagtttaaatctcatcttgtctcttcttttagatcatgaattccttgaaaataaggataatgtgttacacttttttgtttcccaaatggcttgaaatagttctttaaacataggcacatattcaaccactattaaatgatttggcccttgtcttgtttgctacttttttctcttactctaggataaattgtgtgacttgtccataagtaccaggctctgtcatgtctctggaccagtactgtccaatagaaatagagtgcaaactacgtatgtcattttaaatttcttagtagacactttaaatagataaaaagaaacaataaattaattttaatgtatatgtatttaactattgtatccacaatatcacttcaacatgttgaagtaattatattgattacctaatcaatataaaaattattattgagatatttacatctatttttatactgtaaatttaaaaattttatacttacagcacatctccgtttgggctagccacatttcaaatcgtagctttagtcatttacttcgcaaatagattgcaaagttttttggaggcaaattccatggcttattatgcctagcacatattgtatgcttgaagaatttatgtatgt

SEQ ID NO: 312367 - DNA, 1090 bp, Homo Sapiens
  misc_feature (276)..(276): n is a, c, g, or t
  misc_feature (303)..(311): n is a, c, g, or t
  misc_feature (743)..(833): n is a, c, g, or t
  misc_feature (864)..(882): n is a, c, g, or t
tcttctggtgactcaggcacagtgggcaacacagttttgctcggaggtaggaaaaggccatcaacatatcggtcctctattgtgatggaaagcgcagtttaatttttgacatcctgttggctgattttcccaataacaaggaatttccactgcgttttttatcaatctccagtgtgccggaaacctgcacacctgtcagaaaacagcgcccgttcttgccataatgtgcaaacagtttcatttcctattgcagcttcacagtgacggaatgggcantgtcgcctttggtacatgtggaatagnnnnnnnnntagcagtcttctccttgattaggcatgctgggtagattcttagatcagaagtggcttcttgaaacaagccactgcttcctcaaagcaaggaccaggctccaagtcctcgtgaaatgggtttaatcttccaaatgacaacttgatcacagaaattgtctttaaactgtaatcattagctggttgctctgaacaggaacatctgtgtcttcactgagttccaatctattacgcctgtaggtcgaaccaacactcaatccatgaattaataataatgaggcagaaaaaaatttcctcctcacattgccaagaaaacctctcagccacaattcaaacacagcatgtgtttttaaaacatctcccaactactgggagattaagtccattcaaataacctttgtcagactggagacagctagggttagttatctcctnnnnnnnnnnnnnnnnnnnnnnnnnnnnnnnnnnnnnnnnnnnnnnnnnnnnnnnnnnnnnnnnnnnnnnnnnnnnnnnnnnnnnnnnnnntccatcttccatagctgaacaatataatttnnnnnnnnnnnnnnnnnnncatcagcttttcagtaagatccaatttctggtcttcaagatttcttcacctattaagaaaaaaacagaaaccttcccccatctttattatctgtataataaaagcatacttgtatgtaaaaatatagtgttttatgtatataatatacatacagatatatactaactggcttatacacacacacatatacacaaaaatgtatagaaat

SEQ ID NO: 312368 - DNA, 503 bp, Homo Sapiens
  misc_feature (162)..(185): n is a, c, g, or t
  misc_feature (223)..(223): n is a, c, g, or t
gacttaatttcctcaagagtttttattccaaaattcaaacattcaccttgctttatattgactgcaggtttccggacagaagtcactcgtaatccattgtgaacttcaggagttggttgcagggtaggtgttttggtttcatcaccttcctcagaaaactgnnnnnnnnnnnnnnnnnnnnnnnntgcagcattaattacaactggtggatgcgtggggctanggaacattttcggaactttctactttcataattctccgcagctgaggggaaggattggactggacagacaatttgttctgctgaactgaaagttggctagccttcacttcctcttctggttgactcaggcacagtgggcaacacagttttgcctcggaggtaggaaaaaggccatcaacatatcgtcctctattgtgatggaaagcgcagtttaaatttttgacatcctggttgggctgaattttccccaataacaagggaattttcactggcgtttttt

SEQ ID NO: 312369 - DNA, 647 bp, Homo Sapiens
  misc_feature (20)..(20): n is a, c, g, or t
acacgacacgggggtctggnatgcatcgatggcggagtggatcccgcgcctcaaggcccattatcatctgatcgacggatcaagggttccccggtgatgtcatctttcatgggctcttttggagggttgaactcctcgtggtaggaacggccactcttggggtgaatcagccttcctgtgattcttcggatcagcagagagtctgggatgctgaattcaatcacagaatcaagcttctctttcctcttctccatgaggtcatcgagcatttctgcctgcctcacagtccgagggaagccatccagaagaaaaccatttttgcacaagggggtctccaaattcttctcaatgagctccactaccatttcatcactcaccagtttcccagcatccatagttgccttcagcttttttcctagctctgagccagaagccaccatggccctcagcatgtccccagtagctaaatggcagacacagaagttttcagccaatctgggtgcctgggtccctttaccggccccgggaggccccagcagcacggcccggatgcctttaggatactcgggttctgccgctggcacgctgggagccatgtccgccgaagtctctcactgccaccagttcgcacgcctcacaggtccagt

SEQ ID NO: 312370 - DNA, 669 bp, Homo Sapiens
  misc_feature (38)..(38): n is a, c, g, or t
cattatcatctgatcgacggatcaagggttccccggtnatgtcatctttcatgggctcttgtgaagggttgaactcctcgtggtaggaacggccactcttggggtgaatcagccttcctgtgattcttcggatcagcagagagtctggtatgctgaattcaatcacagaatcaagcttctctttcctcttctccatgaggtcatcgagcatttctgcttgcctcacagtccgagggaagccatccagaagaaaaccatttttgcacaagggggtctccaaattcttctcaatgagctccactaccatttcatcactcaccagtttcccagcatccatagttgccttcagcttttttcctagctctgagccagaagccaccatggccctcagcatgtccccagtagctaaatggcagacacagaagttttcagccaatctgggtgcctggggcagtagatagcagcagaaagagcaggagctttggagtcattcagatgcaagctctgtaaattacttgctatgtagcctagagaacaagccattcaaacttcagtttctccaactgggtccctttaccggccccgggaggccccagcagcacggcccggatgcctttaggatactcgggttctgccgctggcacgctgggagccatgtccgccgaagtc

SEQ ID NO: 312371 - DNA, 1644 bp, Homo Sapiens
tttttacaaattttaacatattttattgatttaggggccaaacaaggcagcatttggtcagttaagaaaggcacctcattgaaaataatacatcacagtgctgttgagtgatcccagtcacaggatttgagaatggaaaggacaatctttggatgacatagcttaggacacttgctcatttatttaaaagagtcccttcacacagtgcagataaaagaaggcaagagcataggattgtggcatgtgctgggtagctgtgagaggttactcatgaaagtaggtagcctagtaaattagtggtaagtcaggggaagggaatcagcctccctttccatttcattcccttccccctccccttgattccagtttgcttgatttgttgagccaccatccctatgaatacaccttacatctctttcaaatgtggagatggttttttgatcttacagtgtgtggaaccggagtcagtaatcaaagctccctgttccaagctatagacagacaggacaacaatttgatttcctgtactcttggtctgggaacccatggggttctgagataaaagctgaggtcttagagcactggctttaaaaaatattttcacctgtccagagtaaatgaaaacccgattccttagaaataatattgtgtctatttctacccccaccctccaagcatggtgttttttaaaaaattaatttttcccttacactttaaaaactctcacctatgtataaaagaaactgccacactacaataacactgctgttgttccaagtattcctctgagcccctcaccagccctccctcaccatcctcaccctgaccacccttcccctctgcccagcacctaagagcagggatcacgccgcggggtgatgagcagtgttgcagtctcgcctggccttctgatactaggatgtggctttggagaaggctgctaggatgcttgcgaacacgacatcgggggtctgggatgcatcgatggcggagtggatcccccgtttcctgtagtactctatgagtggggtggtttgagtgtggtaggcttgcaggcggattttcaaggccttttcattatcatctgatcgacggatcaagggttccccggtgatgtcatctttcatgggctcttttggagggttgaactcctcgtggtaggaacggccactcttggggtgaatcagccttcctgtgattcttcggatcagcagagagtctgggatgctgaattcaatcacagaatcaagcttctctttcctcttctccatgaggtcatcgagcatttctgcctgcctcacagtccgagggaagccatccagaagaaaaccatttttgcacaagggggtctccaaattcttctcaatgagctccactaccatttcatcactcaccagtttcccagcatccatagttgccttcagcttttttcctagctctgagccagaagccaccatggccctcagcatgtccccagtagctaaatggcagacacagaagttttcagccaatctgggtgcctgggtccctttaccggccccgggaggccccagcagcacggcccggatgcctttaggatactcgggttctgccgctggcacgctgggagcccctcgtgccgaattcgccacccaggcctcgcta

SEQ ID NO: 312372 - DNA, 878 bp, Homo Sapiens
acatcaagcaagtgcttttttaatcaatacatcaaatgatatttttgctagcctgaggaagcttctctttgcctgtcctatcattcccacccattgcctcacagggatggaaagaaattccttcttggacccaacattagataaacataaccaagtctttacatgtggctttggagaaggctgctaggatgcttgcgaacacgacatcgggggtctgggatgcatcgatggcggagtggatcccccgtttcctgtagtactctatgagtggggtggtttgagtgtggtaggcttgcaggcggattttcaaggccttttcattatcatctgatcgacggatcaagggttccccggtgatgtcatctttcatgggctcttttggagggttgaactcctcgtggtaggaacggccactcttggggtgaatcagccttccctgtgattcttcggatcagcagagagtctgggatgctgaattcaaatcacagaatcaagcttctctttcctcttctccatgaggtcatcgagcatttctgcctgcctcacagtccgagggaagccatccagaagaaaaccatttttgcacaagggggtctccaaattcttctcaatgagctccactaccatttcatcactcaccagtttcccagcatccatagttgccttcagcttttttcctagctctgagccagaagccaccatggccctcagcatgtccccagtagctaaatggcagacacagaagttttcagccaatctgggtgcctgggtccctttaccggccccgggaggccccagccagccggcccgatgcctttagatactcgggttctgcccgacgcgtggtcgacgatatcccgtaattccggaccgtacca

SEQ ID NO: 312373 - DNA, 1344 bp, Homo Sapiens
  misc_feature (236)..(236): n is a, c, g, or t
  misc_feature (345)..(374): n is a, c, g, or t
  misc_feature (493)..(604): n is a, c, g, or t
  misc_feature (1206)..(1206): n is a, c, g, or t
ataccataaagagggccccgccacagggggcggggcgcgcgctatattttccctcattgtgggggaagagtgttccaacgggttttggcggacacccacccccggtttttttggggaaatagaggcctttatccaaggtttgcgtcgacgggaaaaacgcctctaaagggggaattttgggaacaaaaaaacacctccctggtttgcagcccgccccgcgggcgcggggttttttntttgattttggggaaaataaaaaaccaccccccttttggagctccccgcgggggggtttgttttccaggaaaaaagacctttcggaacctgcccctttgggtttttttnnnnnnnnnnnnnnnnnnnnnnnnnnnnnnttataaaattttttaggaggcaaagccctgcgccaaaccaggattttcctatgaaggcaactatgggccattttcccgtgcgttttgtggttcgtggggcaaaggaattgttttgatannnnnnnnnnnnnnnnnnnnnnnnnnnnnnnnnnnnnnnnnnnnnnnnnnnnnnnnnnnnnnnnnnnnnnnnnnnnnnnnnnnnnnnnnnnnnnnnnnnnnnnnnnnnnnnnatagtaaatatttaattgtttccatcagcaattccagcacaagttttcctggatggtaggcagaatcaagctacccaagggttcatgatgaggtatgggggtcactgaggagacccccagagtcactgacccctcccgccacctccacacaccaggtggccctgcagaatgagggttgggctgatagaatgtcaattaggggagacaggatacagggtgagggaacagggtctagcttgtatatttgcctgcaggaaggagggagggcaggagagactctgcatagaaggactggaactacacatttaagttttcaaccccaatatgcagggggaaacagccaagccactctccatctgtctagtattaggaacctctcttcaagtggtcttttgtcatctctgttcttcttcccaattctgtattccagattccaaattctacaattgaaacccaagttctgaattctaagttctaccttccgagttcctgttacgtgtctgtctcctgcccctaaatctttcctggctcccatccctttccccagcccctctgggcagaatgtctgaacctcctcctgaccgtggtgacgagagttgttngtatttgtttttttgtttgggcagttccaggctttctccagcagaaggactggcttaacatgtacacaagtggtggcccagtgaaaacagggattcctgaggcctggctgggctcctttttcccaccaactttagcca

SEQ ID NO: 312374 - DNA, 1605 bp, Homo Sapiens
tggtttttcttccccattttgggttcccaaattcccaatttctccattggaaccccaggtttttaaattctaagttccacctctccaagttcctgttacggggccgttctcctgcccctaaatctttcccggcttcccatcccttttccccaagcccctttggggcagaatgtctgaaacctcttcctgcccgtggtgacgaaggttgtttggattggtttttttgttttggcagttccaggcttttctccagcaggagggacttggctcagactgtccagcaagtgggtggcccagtggaaaccagggaattcctgagggcctggcctggcctcctctcttcccaccccacctctagccactggacatactaccttttgtgcaactaagctaaacagaggatttccaagggtgataactggggactggtggccttgagatgaggaattttagaagatatatgaaggcctaaaagatcactatctttcattcagggaaatcagaaactacttctagcagggggagggaggcaggcagggaaagtagaaagggcctgggcagagctgtaatcctcagaacttgtcagccttcagttcccccttgtctgaactgagcactgcccctcagagtcctcccagagccaagacaaaaccaagacagcaggaccaggagtgccactgtctgtcggggttgcctgagggagaaggggaaggaggtggaggtgtaggcagcatcactgcagaggcgagatcttcaaggggatcatgatcctagactccatgtgtcgcaccagggggactgtatagtagacattttcatcccagcctctcttcctccaggcagcgtttcgagtctcctcccgagactgcaggtctttataggcccagagatggtgcaccacgtagagctctcctatctgtgagaagaagccgcccactgcctcctggttctcctgccggtacttgatggcccgagcccagttgttcccccactcgatcatggttcctggcttgagcttgtatgtcctcagctcatagatgttgggacccattctgggctgtggctcattccagaagctgaactcgaggagcagctggtttctcctggacagcagcatctggctccgctcccttcggaactccaggtactccttattgtttttgagcttgttcatgcagtccatgagggctgggtagccacctgagaatcgccacaggtgcactgcctggtcctgctccccataccacgtgttccagttgcccacgagtgagcatgggtagtcctcatccaggtgaagcttgggcagcacagcctccgtgaggctgttgtaggcatccaggtattcaggctttacattgtgaaactggatcttatagaggttgctggtttccttcttggacagcagggtggagtgggcatccttccggggatccactttgtgaacaaagagggagcggaaccagctgccttcattgtccttggaatagaaacgcgccgcagctgcagacgcaacgtccccagcgcgaggccccgggccccccagcagccgccgcgccgtcacagagatgctgcacagccgcggagccatgttggagccgcaaaaaa

SEQ ID NO: 312375 - DNA, 465 bp, Homo Sapiens
gcaacatcactgcaaaagcgaaaacttcaaagggaatcatgaaccctaaaactcccatgtgtcgcaacccagggggactgtatagtaagacattttcaatccccagcctctcttccctcccaggcagcgtttcgaatctcctcccgaagactgccaggtctttataggcccagagatggtgcaccacgtagagctctcctatctgtgagaagaagccgcccactgcctcctggttctctgccggtacttgatggcccgagcccagttgttcccccactcgatcatggttcctggcttgagcttgtatgtcctcagctcatagatgttgggaaccattctgggctgtggctcattccagaagctgaactcaaggagcagctggtttctcctggacagcagcatcctggtccgcctccttcggaactccaggtactccttattgtttttgagcttgttcatgcagtc

SEQ ID NO: 312376 - DNA, 443 bp, Homo Sapiens
  misc_feature (23)..(23): n is a, c, g, or t
  misc_feature (74)..(74): n is a, c, g, or t
tttttttaataataaaatatttnaattgtttcccatcagccaattcccaaccacaagttttccctggaatggtnaggccagaatccaagcttaccccaagggttccatgatgaggtcatgggggtcactgaggagacccccagagtcactgacccctcccgccacctcccacacacccaggtggccctgcagaatgagggttgggctgatagaatgtcaattaggggagacaggatacagggtgagggaacagggtctagcttgtatatttgcctgcaggaaggagggagggcaggagagactctgcatagaaggactggaactacacatttaagttttcaaccccaatatgcagggggaaacagccaagccactctccatctgtctagtattaggaacctctcttcaagtggtcttttgtcatctctgtcactgtgccgaat

SEQ ID NO: 312377 - DNA, 325 bp, Homo Sapiens
ttttggaattttaggcgaatggcattattctacagatttatgtccagtgactcctccatcagatgcaatgtatctccagaggtcttccaatgaatgaacctgtttgtggttacggagtacaacttgtcactctccaggtagtggaagcctcccgcgctttctctgtattttacggcgccagccacggcatttgcagtcgcaatggtgcagagtgtgcattcccgaaagtgcgtcggcctttggtgttcagctccgtttagctccacgaagctcctttcgcaggggtcccgctgctgccatcttcccgccgtcgccccgacgcccc

SEQ ID NO: 312378 - DNA, 396 bp, Homo Sapiens
caaataaacaataaactcatagcactaagaatgatttttgcctgattatgaagagatcatgatgggttatctaattcattcagacaaaatcatgattaacttaaatgctttaattaccaacctggggagtcgtttcaatccaattaaaaaatgttctcaaattaggaaatcttaatgtctaatttaaagtactcatggtatgaataaattatttctttgtcttcactgtaatggagaatagatggttaccatttccttcataaccacaaaatacctgggtcttacattttctaataattcttcccttttatttatttatttttgaacactgtgttgagacttccttgtttactgttaagtccccttgttttttgttcaatgtgaaacctatttaag

SEQ ID NO: 312379 - DNA, 1504 bp, Homo Sapiens
  misc_feature (15)..(15): n is a, c, g, or t
  misc_feature (32)..(32): n is a, c, g, or t
  misc_feature (91)..(91): n is a, c, g, or t
  misc_feature (101)..(101): n is a, c, g, or t
ccctttaaataaccngccttggaactcttttngtaactatttctggccagtttccctttacaacccacccctccaaacatcccaaggttcncattaagctncactccagccccagatactttaaaaacataaagtaaaataaagctaataaggaacaaaatttaaggctttttctttttatttcagccaaggaatgatgcatgctacagattaatctttactttttcccacttggtttttcaaagaacaccaccacttcaacccccaatgaacatggcacttgtttgtttcttccccttctaatttattccagattttcaagtgttttcttcagtaacgctgctttctcctgcagttcaggtctgctgtctggctccatagtagctaaagactcaattaggagcactctgcattcagatgtcaaacattcccactgtttagattcttcaagttttttaagcagcaattctatcacagataaagcttctgttctcacagatgagtaggtcttattttctaaagaatatgtgattgatttacaagtttcaagcagaatttcagccaaagcctcaggatcggcatgttcttcttccaaaagcattaacccctgaaaaaaggcattcattgattgcaggactcctagctgcactttccacgtgctgagttttagccgttcacacatcagtttgcacagctcctgacgataacaacgttgggtctccgcgtttcgcggccaggctttgcccaggctttcaaaggcacccagcagatattccagctggagctccttttccttttcattctcctcttcatttttggttgtccggaccccactgctttcaagtgagttcttcttgatgagaggtatgacaatgttagagaactcctggaatctgtcctctttggtggccttccaagatatcagctgcacagctgattgctacaatcttgtatttgacattctctttgctacattccttcagaacagcttgaagaatttcatttgtgctgggttgattgggcacagacttttccagctctgcactgcaagctgtcaccacacaggcaatggctttcaatagctcctcctttcctgcccacgttcttccagccaggccttgcagcaatgcggtcagtatcattccgagatatggaggtactagagagctagtctgttttgcaattgatgccatggcaattgcaccctgggctttcattttccaggactgagactgcaaagccttctgggtaatagtaattaactcctgcaggtataatcgaatgccaccaaaggatccaggtacgttttcctgccacacttcggtccataaattacattcttctttttcggatttctcctcatcagcaatttcatgcatgcctaaaaatgccagaggcaggacttcttttgcatgattctttaatacatcagggctgtatcgtccaatagcatggaatagtcgaacgcgtgggtcgacgatatcccgtaattccggccggtacc

SEQ ID NO: 312380 - DNA, 413 bp, Homo Sapiens
ctttttacccatacttatacacatgtaacacctttctagtggtacattttaatcaatatatattttttaaatcttatttttaactcaatctttttagtgctatgatatgatgggcttaatttaatagttgaagcatggtgtgataacaacattgtacggtttaaactaattcacaactgtagtaaagtgtttgattttcagtatataaccaagatgatgctgaacagtaataaacacagaaacactagaaaacagtgaatgaataaataatatgatttttcatcagtggccattcattattttgcttttagaaacctggaagaaattgtcttctttgattttcaaatgttctggtaactctagtcgtttcttagcttcttcaatatcaccttgaattgctgaaataagtgact

SEQ ID NO: 312381 - DNA, 1122 bp, Homo Sapiens
  misc_feature (788)..(826): n is a, c, g, or t
caattagacaacttttactaaatgagaaaactacatttaaaatgtgctttaaaacaaaacggaattagaaaaaaagacatatgcattttaaagaacttttgcactgtgctgaaaatgaaatatctcttgcagtaagtaatacaatgtgccaattcataaaatgtaagttaacaggtttctcaatttaacattttcaaagacgatattaaggtcaaaaatgtcacatctatggtagcacatatagaagggcattatagatatgatgtccatccctatgaagcttacaaatttgacaatgctcaataaaagcttttagaatcacatccaatagtgtcacagtcaaagaatcacaaatctgtgtcctgtaagttctctccttctaaaatcttcatgttaacttttctactcattgccatttgttaatactaacccttaaaaaaaagaaataggaaaagaaaggctgcaataaacttgatcaggtacagaaattattgctactatacttcactacaaagcttgtctatacagtatcatatgacctttgattatgaaaaaatcagaataaaaatctttagtgacataagccttacaatcgtatacaacattcacatggcaatattagacagttaagcacccaatacccatagttgacaaaatgtcccactgaccagcattcatttaaatacatccttcgtatagagggaggaaaaagagacagtgtcagctttccaaggcttgtcaaaaaaggattctcatgtactgtggatctaaaaacaaacaacaactcnnnnnnnnnnnnnnnnnnnnnnnnnnnnnnnnnnnnnnnccaatgcaggtgaaggtgttaccaggaagttaagcatgccaaaaggtgttccgcgcgaatgaaaacctaaagccaaggtaccacataatcacattaccaactagttgggtaatactatatgagccttatcttaaatgaaatgctactgcacaatagagcatcaataagttaaaaattagagtgcacaaatccaaatcagtgtcaattcctgtataaagcaaaatattcactatcagctgtaaagtttgcccagtcaaactgtatgattaaaatcactggattggacaatgtgcgta

SEQ ID NO: 312382 - DNA, 846 bp, Homo Sapiens
  misc_feature (350)..(358): n is a, c, g, or t
tggacaggttatttctgggaatctttcttcctcaaaattagaacagaaaaacagtaaagcgaagacacacacgtgcgtgcgcgtgcacgcaacccaaagcaaaacccattccaccactggaaatattccagacaggggattgcctgagccattatttgtttcaaattagtgatgtatttatagtacctgatatactctggcttacagccaattttatagaaaaaaatccatttataagtgattcaaataaattatgattccttaatataacggaaatatactatgtaagcattaaaaatgtagttgtctagatacattaaaaaatggaaaaatgccaaagagaccaagtnnnnnnnnncaaggtgcaactcatctgtgtttatggtatgatcacatttgtttaaatcaatatacataaaataactgtatatgcatagaaattatcttgatgatacccaagaaaaagtaatagcagttactgctcttggagaagagaatgaggatgtcaaggtcacatccgggagtgacactcacttttcatctccccctttctctacagtatttcaattttatacataagcatgtattatcttattaaaagagaaaattttaacaatgacaagaaaaaaaccgtagaactcatgactgttatctaagtgtcaaagaaagatgcctgctcaatttgagtacatgttaataatacattttatggattactcttctactaaaatctactaaaaagatacttaggccatttctactgtgaacttaaatggcataaaatatttacaaaagccttaatgcaagcacataagctaatttcaaacagatctggttacttaccct

SEQ ID NO: 312383 - DNA, 617 bp, Homo Sapiens
ctgctgcttagattgaaatttcggtgtctctattctgtctcttcttccagatgcaactgccaggttgggaaattcctcggcatcttcaatccttggaggctcttgaactgtcaggacttcatattttgatgtagatttttctttctttttcttattctttcttgaggcttcattttgttcaaggtcactaccttgtgatgctttagacttttgggtaggatgaataatgtgtttttctttgttgtaggaaggatccgaagataaagcttcagaagatggtatactaacatttttaggatctgctgatgaagcaatggtctttaagtttatcatagaagtaacatttttaggggctgctgacagttctgtagataatgtctgtcgaacaacataacccattggtgtccaagataactcttgaagtgtacctttaacatcagaagtcaaagatcactagacttcagctatcacaataactggtaatttatttcttttagaacagaggcataagtacagcaacactactcctttaggtgcccatgaaactctcttgtacatgaaggagaattggtagcggcattagcagttacagattcatttgggttatttttcaccac

SEQ ID NO: 312384 - DNA, 1032 bp, Homo Sapiens
ttaagtttatcatagaagtaacatttttaggggctgctgacagttctgtagataatgtctgtcgaacaacaataacccattggtgtccaagataattttcttgtacatgaaggagaattggtagcggcattagcaagttacagattcatttgggttattttttcaccactatttcaccctttgataacactgcagctggttttactacttctcttagaagagaaatgtcggtaagagacagaagtggacaggtccccacttgggttgcttctgtatctctgacatattgttctctgcaccttgcagttcaggaaagtccagtgtggtaaattcaaactcaggtttggaggtagatacattttttgcaatgattctggatttcctgtctgttcgcttatggtaaccatctgatttcaaactattctcagcgtaaatggacaaatgatgtgaacctctagctgattttatctcagatgatatagttccatcagccctttcactgtcaaacttttgctgatcatacgtttttttctcatcataggttttcttcttaaacagagctttcatttcttgtgggagagggcatgtgttctcatttcgatgcttcactgtttgaaaacctcggtaacatctgggttggttataaagatactgggagccaggcactgagtaaacattctgtgtggagtcaagggtataaggagaataggcatatggatgaagagttatctcagaagataaatactgaggtggaaaagttgaagctccaaaggccatgtcttcagtatatattttctgctctgtcactggtggttcctgaacaagcggatagtatgtggctgcagagctggggaagacacatgcttctgaggactctaaccatgccacattgagcccggcaaatctggggacaaatggtttgacatctgctgataacttgatgccctcgctttcgggctcccgcggcccctccgacgccatgccgcgaggcgcggaggaggccgcgtcacggaggccagcagcgggccgtcg

SEQ ID NO: 312385 - DNA, 719 bp, Homo Sapiens
gcgcgcagggtgccaagccctcccctacgaagtctgttttgtctcaggctgggctgagtcacatagaatagatagatagttgatttagcacatgtcctccagatcatattatccgcctacaaatatagcctgttagcgcacaggcacgggaggcttcttccggctcggccgtgctgctcagcgggtgtaaacagcctctgcggtgtaaacagcctctgcggtgtaaacagccgcggcgggcaggccaggactgtcagtgcccgcccctcggggcaggtaatttcatgctcccaaaatgggacataaagtggttgtcttcgacatttctgtcatcagagccttgtgggaaactcgtgtcaagaagcacaaagcttggcagaagaaggaggtggaaaggcttgagaagagcgccttggagaagataaaggaggagtggaactttgtggccgaatgcaggaggaagggcatcccccaggctgtatactgcaagaatggcttcatagacaccagcgtgcggcttctggacaagattgaaaggaacactctcacaaggcagagttcacttcccaaggacagaggcaaacggagcagtgcgtttgtgtttgaactttctggggagcactggacggagctcccagattcattgaaggagcagacacacctgagagaatggtacataagcaataccttgattcaaatcattcctacatatattcagt

SEQ ID NO: 312386 - DNA, 1629 bp, Homo Sapiens
  misc_feature (536)..(536): n is a, c, g, or t
agctgttaccccttctagtgaggctaaagattccaggcttcaagatcagaggcagaactctcctgcagggaataaagaaaatattaaacccaatgaaacatcacctagcttctcaaaagctgaaaacaaaggtatatcaccagttgtttctgaacatagaaaacagattgatgatttaaagaaatttaagaatgattttaggttacagccaagttctacttctgaatctatggatcaactactaaacaaaaatagagagggagaaaaatcaagagatttgatcaaagacaaaattgaaccaagtgctaaggattctttcattgaaaatagcagcagcaactgtaccagtggcagcagcaagccgaatagccccagcatttccccttcaatacttagtaacacggagcacaagaggggacctgaggtcacttcccaaggggttcagacttccagcccagcatgtaaacaagagaaagacgataaggaagagaagaaagacgcagctgagcaagttaggaaatcaacattgaatcccnaatgcaaaggagttcaaccccacgttccttctctcagccaaagccttctactaccccaacttcacctcggcctcaagcacaacctagcccatctatggtgggtcatcaacagccaactccagtttatactcagcctgtttgttttgcaccaaatatgatgtatccagtcccagtgagcccaggcgtgcaataccaaatatgccccaacagcggcaagaccagcatcatcagagtgccatgatgcacccagcgtcagcagcgggcctaccgattgctgcccccccagcggcttagtccacgcatcatccagagtgccatgatgcacccagcgtcagcagcggggcccaccgaattgcagccaccccaccagcttactccacgcaatatgttgcctacagtcctcagcagttcccaaatcagccccttgttcagcatgtgccacattatcagtctcaggcatcctcatgtctatagtcctgtaatacagggtaatgctaggaatgatgggcaccaccaacacacggcccagcctgggtttagtatcttcttcagcaactcagtacggggctcatgagcagacgcatgcgatgtatgcatgtcccaaattaccatacaacaaggagacaagcccttctttctactttgccatttccacgggctcccttgctcagcagtatgcgcaccctaacgctaccctgcacccacatactccacaccctcagccttcagctacccccactggacagcagcaaagccaacatggtggaagtcatcctgcacccagtcctgttcagcaccatcagcaccaggccgcccaggctctccatctggccagcccacagcagcagtcagccatttaccacgcggggcttgcgccaactccaccctccatgacacctgcctccaacacgcagtcgccacagaatagtttcccagcagcacaacagactgtctttacgatccatccttctcacgttcagccggcgtatacaacccaccccacatggcccacgtacctcaggctcatgtacagtcaggaatggttccttctcatccaactgcccatgcgccaatgatgctaatgacgacacag

SEQ ID NO: 312387 - DNA, 1088 bp, Homo Sapiens
  misc_feature (1007)..(1007): n is a, c, g, or t
gtttggcagtaatagcagcaagaatcactcttgttacttcttttgctagctgatgtgttcatgactttcaagggttattaaaaaataaataacttccagtttcggcaagcagagctggggtacctgcgggactctgaaacagcatatggaattatggaatagcccccaagttcctaaatgcctctactcggtccaagtatcttccactgcaagtgaactgttagcattcctattggatgttacaagaaatcaacatatatattttaaaaacaaaataaatgaaattctagttttctgtgcttccagttggtagaagcagtagaagggaggaggggaatttgggcctttcggttcctccaggggcagccttacaactgctgttggtggtgggcttgtactgaagggtgcgtcatataggggaaatgcgctgttgtcgagactggaatgggctgtagtgcactttgagcgagggcggcctggggaccgccgggtggctgtgtcgtcattagcatcattggcgcatgggcagttggatgagaaggaaccattcctgactgtacatgagcctgaggtacgtgggccatgtggggtgggttggtatacgccggctgaacgtgagaaggatggatcgtaaagacagtctgttgtgctgctgggaaactattctgtggcgactgcgtgttggaggcaggtgtcatggagggtggagttggcgcaagccccgcgtggtaaatggctgactgctgctgtggactggccagatggagagcctgggcggcctggtgctgatggtgctgaacaggactgggtgcaggatgacttccaccatgttggctttgctgctgtccagtgggggtagctgaaggctgagggtttggagtatgtgggtgcagggtagcgttagggtgcgcatactgctgagcaagggagcccgtggaaacatacatcgcatgcgtctgctcatgagccccgtactgagttgctgaagaagatacttaaaccagggntttaaccgtttttttgggtggtgcccatcattcttagcatttaccctgtatttacaaggacttataggaccattaagggat

SEQ ID NO: 312388 - DNA, 916 bp, Homo Sapiens
cccccccaaagaaaagggaagggcacatggagaaaaaaagggtcaagtctgtcatgagagcttcaaggccggtgtacccctccccctgccctcccaccccattaatctcacacctatgaaggtgagtggtgtaggtgaaggcacccacatataaaatatagatgcctgatatcaccctcagtagcttctgatgtaatggatccagcccaatacacatcagtatagtttggaagaatgtaaaagttcacagaggttttccttgggcagaatgggagaggccagtcctttcctgggaagggaagggcaacaccagttcagcctagggtagacatagttaatgagtcaacacgcggctcaagcatttagagtccccagttaacccagcctcctccacaacctaggaagtctgttgcccaataacagctcagagttactgaggaaatggcagggccacagcttcaatccagggccccaggaatttcaggctacactgtcatcaactctgtcctcgtggactcaaaggggatcgcctgttatgaagaattcacattgattagtaggccaaagtgagtcagtactgctggagaaagagctaatcacccttgcattgaggtgggcctttcacttctgtctcctccccacgtggtgatcttgtcttgtctttggtcaccaaatgaagaggcagcaacacggctgcagctcaatctcttgggcaaaggggctgctaccctctgagcaatcgcaggccaaggccagacctccccttctgctcttggcccacatcattgcctcctgggaggcaggggctggttctctgggggttttcacatttgcttcctccttaccacacctgaagaacattttatatccgcactttctgggtgcttaatggagcatgttgaccaacgtttggacc

SEQ ID NO: 312389 - DNA, 766 bp, Homo Sapiens
  misc_feature (173)..(182): n is a, c, g, or t
  misc_feature (214)..(222): n is a, c, g, or t
ttttagtttccaaattttatattttaaattgatgatattcttatacaggatgtcacaccacaccagacctctttacataatgtacagtatttctggttttgtgggccagatgtgagtacaaacatatggtttctgccacttctctgtcattctggtgtttagccggagtcagnnnnnnnnnntcgttactttaagtgttacttctctagcaatnnnnnnnnnttatacttagtgcatgcttcatcatttgtcaaaaaatgtttctgaaaatatgactcaagttacccaatggtttacaaaatagaaaaatcattcattagggtaaaaatgtggtgggatttaggtccatttccagaggactaacttcgttcctaaaggccgcaccactgtccttcagcagaggtggtaatgacagttccatgatggaagcggccggcctgcagaaggccactacttgacatctgattatctttgaccaccccatatctgccacttcattagtgctataaaaagatgggatttttgtggaaaagtcaggaacatttctgctgtacatgatttagaagttctccaaatttttcaaagaggtcctccacccattttacatttttcatacaaagttgaacaatttcctcctgtcctaaatcttcattttttttctgcaccgaagaaatctaaaaaaagaaaatcgccaaattagcttatacttatcacatcatatttaagttcaactacaagtactggtattttatttttttcttaatcc

SEQ ID NO: 312390 - DNA, 1112 bp, Homo Sapiens
  misc_feature (67)..(75): n is a, c, g, or t
  misc_feature (119)..(187): n is a, c, g, or t
  misc_feature (237)..(275): n is a, c, g, or t
  misc_feature (287)..(287): n is a, c, g, or t
gtttcaaagccagcagattttttggcaggaaaaaaaaggatttcaagaagaatccctttggatcccnnnnnnnnngcccggctctttgggcgggttaaattccccgggttctgcagcgnnnnnnnnnnnnnnnnnnnnnnnnnnnnnnnnnnnnnnnnnnnnnnnnnnnnnnnnnnnnnnnnnnnnnttacccactttgtacaagaaaggtgggtcaggaaacagctatgaccatgnnnnnnnnnnnnnnnnnnnnnnnnnnnnnnnnnnnnnnngcctcgagtttnttgttttggtttttgttttttcagagtgaaaaactttattaacaacaggtttcaacgagaaagcaaatgaatacccctagaaacatggacagcatctcccccagcagcaggcaggggaagggaggcaggaggggtaagcctagggtgttccctaggaaagggccaggttccctctatccagctgggggcaccgagacggcctcattcagggaagtccaggatggcagctgaaggcagcaggtttagcagccaaagcccaggcctagtggatagacagggtccaaaatgtgacccttctaggctggtatcaccatgggggcgtcatgggctgaggattctgcagataggacatcaccacggcagagatggacagcatgaagctactcatcatttgcttcgtgtcctccgagctccgagagttggcaaagctgatgaaggagcagtagacagcgacccaagcacaccacttcagcttaagcatgaggccgcacatgctgaagatcatgcccagcaggttcatgtagtccggcgtcgggtcgtccaaggccgggttacattcgctcggcgggggcttgtacctcagcactttgttcggcctccgtgggtccgacatattgttagtggacatagcgagtcgaaggccagatcacgcctcttccgctgcaggaatcgcagcttccgggcgtgcaagctgagggcggattttagagtaacacccgaggccctcgcatttccgttcctcatgacagaggcttggactccccttacccagagaacggagatttaggagaagccagaagtcttcctttcaaagggaaaatgggg

SEQ ID NO: 312391 - DNA, 1584 bp, Homo Sapiens
  misc_feature (594)..(861): n is a, c, g, or t
  misc_feature (873)..(875): n is a, c, g, or t
  misc_feature (877)..(879): n is a, c, g, or t
  misc_feature (881)..(888): n is a, c, g, or t
aggctggaccggtccggaatttcgggatcaaggagaaatcttcctggatgaaaagaaaaagttctatggtccacaaaggcggaagatgatgtttatgggatttatccgtctgggagtgtggtacaacttcttccgagcctggaacggaggcttctctggaaacctggaaggagaaggcttcatccttgggggagttttcgtggtgggatcaggaaagcagggcattcttcttgagcaccgagaaaaagaatttggagacaaagtaaacctactttctgttctggaagctgctaagatgatcaaaccacagactttggcctcagagaaaaaatgattgtgtgaaactgcccagctcagggataaccagggacattcacctgtgttcatgggatgtattgtttccactcgtgtccctaaggagtgagaaacccatttatactctactctcagtatggattattaatgtattttaatattctgtttaggcccactaaggcaaaatagccccaaaacaagactgacaaaaatctgaaaaactaatgaggattattaagctaaaacctgggaaataggaggcttaaaattgactgccannnnnnnnnnnnnnnnnnnnnnnnnnnnnnnnnnnnnnnnnnnnnnnnnnnnnnnnnnnnnnnnnnnnnnnnnnnnnnnnnnnnnnnnnnnnnnnnnnnnnnnnnnnnnnnnnnnnnnnnnnnnnnnnnnnnnnnnnnnnnnnnnnnnnnnnnnnnnnnnnnnnnnnnnnnnnnnnnnnnnnnnnnnnnnnnnnnnnnnnnnnnnnnnnnnnnnnnnnnnnnnnnnnnnnnnnnnnnnnnnnnnnnnnnnnnnnnnnnnnnnnnnnnnactcttaactannnannnannnnnnnnaattgattgctgtgcctcattacaaatgcatatgatgtttgagtgctgttgtttgaaattatttttcttttcgggtcttcaaaaattcaagaaaagttgatgattgacttgaagattacaaaatttaaggttttttggcatgtgtgttttctattaataattggttatatgatgtcaaagtaatactttcataatagaattgacatgctctgggatagtttgacaaaggtaaattataaagtgaaatctcttgtttcattatcttccattctaacctcagagatctgtttctctagaaaaaaagtccatctctggctttaataaaattatgcatcagaaatcacctgtatgtataagattttctgataaaactaataattatatttaccatataattggctgaaagtaaaaaaagtcagcattctccatggctgaggggtaaagtgcctcgggggattcctctggttctagctatctaagtggtttgaaaatgaccaggaaaaattcatcctgtcattcacgttagtaattttgctgtctttcctagaggaatgactttggtgtttaaaattggtagctgtttttctattggtcttttagcctaatttggcaaatcagaagaaaggacatagagatgatgaaatataactttatcttttttgtttgaattttgtcgtgtaagtttgagtgacatca

SEQ ID NO: 312392 - DNA, 709 bp, Homo Sapiens
  misc_feature (290)..(312): n is a, c, g, or t
  misc_feature (314)..(587): n is a, c, g, or t
cccaccactcacttctccttgcacaggtagatcagtttggccacgttgtagcacagctgcacatcaaccacctcacacgtgggatacgcgtccctgtggccagggagagaaggaggcaaaagacaccgttggaaaagaaaacaccccaagcaggagacgtgcccacggatccaagggaaaggatggcagagtgatctcgctgctggtttctgtgccagcggagacctctcttctctttgtcttttatcctccaaaagggggaaattttgaaatttaatacaaagagggcnnnnnnnnnnnnnnnnnnnnnnnannnnnnnnnnnnnnnnnnnnnnnnnnnnnnnnnnnnnnnnnnnnnnnnnnnnnnnnnnnnnnnnnnnnnnnnnnnnnnnnnnnnnnnnnnnnnnnnnnnnnnnnnnnnnnnnnnnnnnnnnnnnnnnnnnnnnnnnnnnnnnnnnnnnnnnnnnnnnnnnnnnnnnnnnnnnnnnnnnnnnnnnnnnnnnnnnnnnnnnnnnnnnnnnnnnnnnnnnnnnnnnnnnnnnnnnnnnnnnnnnnnnnnnnnnnnnnnnnnnnnnnnnnnnnnnnnntagccttttttagtagtatgaagctaactgcctggaactgacaagtttatacccacttggcttggaatcagctggcacttctcctggggaaaatgacacatcactatccccttctaaagacc

SEQ ID NO: 312393 - DNA, 2673 bp, Homo Sapiens
  misc_feature (437)..(437): n is a, c, g, or t
  misc_feature (511)..(511): n is a, c, g, or t
  misc_feature (1167)..(1167): n is a, c, g, or t
  misc_feature (1401)..(1401): n is a, c, g, or t
  misc_feature (1532)..(1532): n is a, c, g, or t
  misc_feature (2533)..(2533): n is a, c, g, or t
  misc_feature (2566)..(2566): n is a, c, g, or t
  misc_feature (2570)..(2623): n is a, c, g, or t
  misc_feature (2642)..(2642): n is a, c, g, or t
gtcgcgggccgcttggggagtcagcagcgcgccaggccccttcgggccccacacgcattaggtgccttcttgatgggtacggagtgaacgcgggcggcggcgggaccgaggcagcgcccagtttgtaaccgccgcgccgcccgtgcccgcgcgcgccacaccccagcgcgcttccggccgggccacgtgaccgcgcgtgcacgtgttccggcctctccgcttcgccgctccgaacctcctcctggtcgtcccggcattcgtccacgcggagcggcttgggcggggcccgggaggcggcggccggagaagccgcggagacgcgagcgccgagcgtcgcgagggagcaggcccgggcaggcaagcggcggcctccgccatgaaccccaggggcctgtaccaggacttcaaccccagtaagtttctcatctacacctgcntgctgctcttctcggtgctgctgcccctccgcctggacggcatcatccaatggagctactggggcgtctttgcncccatatggctgtggaagcttctagtcgtcgcaggcgcctccgtgggcgcgggcgtttgggcccgcaaccctcgctaccgcaccgagggagaggcctgtgtggagttcaaagccatgctgatcgctgtgggcatccacctgctgctgctcatgttcgaagtcctggtctgcgacagggtggagaggggcacccacttctggctgctggtcttcatgcctctcttcttcgtgtcccccgtgtccgtggctgcctgcgtctggggctttcgacacgataggtcgctggagctggagatcctgtgctcggtcaacatcctgcagttcatcttcatcgccctaaagctggacaggattattcactggccgtggctggtggtgtttgtgcccctgtggatcctcatgtcgttcctttgcctggtcgtcctctattacatcgtctggtccctcctgttcctgcggtccctggatgtggttgccgagcagcggagaacacacgtgaccatggctatcagttggataacgattgtcgtgcctctgctcacttttgaggtcctgctggttcacagattggatggccacaatacattctcctacgtctccatatttgtccccctttggctttccttactaactttaatggccacaacatttaggcngaaaggggggcaatcattggtggtttgcgcattcgcagagacttctgtcagtttctgcttgaaattttcccatttttaagagaatatgggaacatttcatatgatctccatcacgaagatagtgaagatgctgaagaaacatcagttccagaagctccgaaaattgctccaatatttggaaagaaggccagagtagttataacccagagccctgggaaatacgttccccccccntcccagttaaatattgatatgccagattaaactcctagagaggacccaggcacacacagactccacttggcctttcgcctcttgttcaattcatcccaaacctggaaatggaaacaggcttcaaacactcntctcacgccgtgtttgagatcaccgcctcatcagtatgcatcatagatggaggtggtttcagtatgtgggtgtgtgtggtgtgtacctgggtaagagacttgctttccaggttcgcactttcaggtgtagctgggggcagtaagtcgaattgttttagtaggtcctcaaaaggaataaccacacagctgtttgtttaaatgctactgtacctatcaaaactattgtttaaaaagtatttttatacactgctaatctaaaattgtatttcagattgtgcctgtcataacaatagcaaatgtaaaaagttctctttcccaccacttgtttataaacctcatagcttgatatttttagtgttcctactgttaaaatactctctccttgggctttgctgatactggtctttaatattctgataggtgaatttttctaatggaatgaacccatgcatatatagtatttatatgaatattttagcagtgtaatatgttgaattctagttctctgcattaccattattacgttaaagtattttttaaagcttaggtgtgaagatatgtgtctattgcagatgtccttgaaaactgcataaaacagtatgtgcctggtgtggatcttaccaaagtactaggcatgaatgtagggactgcaaatcccatgggtcttaatatttaggtgttagtaaccaaggtctctggtagtacccgttagtagaggaagaggccactgcccttgggaacttgtgacaggctctagtgtggtaccaggccataaagtgacactgttatttagcaacttgaatttttccacacaggtagtaactgtgtggaaataagcaacaagtggtttgtccatttctaagaatcttgaactattagttggctgtagtgtgaagcattacttgtcattggaaggatggagagagtggcctttaccggaagtggtcagtagaagcaggtgtcattttaagggccaaactttaatctgtcagcaatagggnaacaactgttcaaattatctttgtagataagancagnnnnnnnnnnnnnnnnnnnnnnnnnnnnnnnnnnnnnnnnnnnnnnnnnnnnnnagacagagtttcactcttnttgcccaggctgggagtgcaagggcacaatc

SEQ ID NO: 312394 - DNA, 550 bp, Homo Sapiens
ttggtagccatgaaataggatgtctgtgccaaatccttgcttgctcttactaactgggtacatttcaccacatctgtgtgtgggtgttcaatggtgatctcaaaacctagagtttgtagcattatggtttcaagtataaccagttcttgagtctgttgaaggtaagcatcacatttagtatccagcagtggctctagaggatgaagacaagcatgtgctactttgataacatgttcaagttttcgagcctgttcttccacttttgcagccaaaaataatgcagtagacgatattatatttttgttgaatttggtgaaagaatggtgcatataaaacctgtgcatataaacaatcgcagtgtttattgtaagctgagagacattgagacgctgtcccatctcctggatgaggttggccgcctgctggcggcacgagagctctttatccgcctccactccgcagcggcggctcggcgtgttctccagctgttcccgagtaaagaaccagcgagaagaagctccacggcccgacgccatgacacttcctcctc

SEQ ID NO: 312395 - DNA, 1057 bp, Homo Sapiens
aaatacaataattctgttattgataaaatttaaggcattttcattgccttttgcagatttactcataactacctaacaaggaaagaaggtataattatttcagattggattatttattctaaaattaaattcttcactaatttattctaagatgaatttaatagtccatcaggaaattggtttttataaagcttattttatgggcataaaatacaggaaaaagtaataataaatgccaaaccgtctctttactttatgaagccaaatatttcctcagacttggtttttaaagctggaatttattccttcagggccactattatttttcaaaactccatataaatattgaatctaaaaattaattagtaattttaattttcctttttctcttcaaattccttctcttctcctgaactgttgactttcaaaaattcacagaatgagcatgtttcttacacaggggcttgtccttcttggagaaaaaggtctgaccttccaaactttcacaacacactgagcatacaaagcaagtgtcatgccaggtgtagcccagagcttccaggaacatgtcaccagcttctatgggaaattcacatccatggcatatagtaccaaagagggcataataatcagtctgcacagtagggttcaccatcctccaagtgaaaaacattgttccgaatgggctttccacaggctacacacacaaaacaggaaacatgcccaagtttgtttcaacgcattgatgacttctccaaggatcttcctttggcatcgaccacattcaggggcaaagaatttctcatagcacagctcacaatacagggctcctttctcctctacaaatcccaatgtaggccattgtatttttgcagtgagcgcagttgaattcttctgggtgccaagatttccccagtgccactaagaatggtcctctgatgacctggttacaatgggcgcacatcggagttcgtttccctgctggaatgtgctcagctctttgcactaaagtgtcctggtcacttggctgggtttgtcccaaagctgagttggctgg

SEQ ID NO: 312396 - DNA, 771 bp, Homo Sapiens
aaggtatctaactcccaatgtagtcataacagcgttataaattgggcataacttaaaaattttagttcattcatgatgaagttaaattactagtacttgagtaagacccccatagacttcaaaaagctagatggcagaaactttgttgtatatatgggttattcacatttaggtgtttaaaacttgggagtctatgtttctaatccttacttcaacatcaataaatagagtgttcagaaaggccaaataaaagttgttataataaaaatttttaataaatatgtacacccagtgctaaaccttacagtagggcttacattttataaaatgtacctgcttacaaaaataattcaaaccagaattcttgtagaaaataaaaacctacagccaaagtttcttccagctaactggaaattaatcatctcctttgatttatgttatgagtaggatgtcatgatgagccagtcagattctagatatttatttatagttctacttaagtgaattttattttggattaggttttctcaagtttttctaaattctttcctgtttctgataattcttagagctcagaaaaggagatatttatttatggtaggcccagatcattttagcagtatttccttcataactgctggtaataatgaattatccaagtcagcaatcatgttaaaattaacataacatgattattaactgttgacagatattaacttgacagatactattaaaaataaacttattttacctcacatttaattcccggcc

SEQ ID NO: 312397 - DNA, 1089 bp, Homo Sapiens
  misc_feature (72)..(72): n is a, c, g, or t
  misc_feature (541)..(571): n is a, c, g, or t
  misc_feature (614)..(622): n is a, c, g, or t
  misc_feature (795)..(823): n is a, c, g, or t
ttggaaaaccaaacatgctttatttcatttttttcacaatttatttaaacatctcacatatacaaaataggnacaatttaatttttctgcttgcccaagaaacaaagcttctgtggaaccatggaagaagatgaaaatgagactggcaaagaacaaatgctgaatctgaagaagaggacaactttgggcaaataatctgcatacttttaattgggaataagatggaaaatatgaatgctaaatcaaattttttaaaaaatacaccacacgatacaactcaatacaggagtatttcttctcaaattcttctagcaccatcaacattcttcaagtatctgaaatactattaattagcacctttgtattatgaacaaaacaaaacaaggacctcagttcatctctgtctaggtcagcacctaacaatgtggatcacactcatgggaaagtgttttgaggtagtttaaacctttggaagtttgggttttaaacttccctctgtggaagatattcaaaagccacaagtggtgcaaatgtttatggnnnnnnnnnnnnnnnnnnnnnnnnnnnnnnnttacaaaggttgacattttccataacaggtgtaagagtgttgnnnnnnnnnttcaaatttttgggggagcgggggaaggagttaatgaaactgtattgcacaatgctctgatcaatccttctttttctcttttgcccacaatttaagcaagtagatgtgcagaagaaatggaaggattcagctttcagttaaaaaagaagaagaagaaatggcaaagagaaagnnnnnnnnnnnnnnnnnnnnnnnnnnnnnagattgagttcatttatttgaaacagactgggccaatgtccacaaagaattcctggtcagcaccaccgatgtccaaaggtgcaatatcaaggaagggcaggcgtgatggcttatttgttttgtattcaatgattggtctttccccattcatttgtctttttagagcagccatctacaagaacagtgtaagtgaacctgctgttgccctcagcaacaagttcaacatcattagagccctgtagaatgacagcctttttcaggttgcc

SEQ ID NO: 312398 - DNA, 1149 bp, Homo Sapiens
  misc_feature (25)..(25): n is a, c, g, or t
  misc_feature (32)..(32): n is a, c, g, or t
  misc_feature (41)..(41): n is a, c, g, or t
  misc_feature (63)..(63): n is a, c, g, or t
gtgcagaaaaatggaagaatccacnttcagtnaaaaaagangaagaagaaaggcaaagagaantttttccaaattcctttcctttttaatttaaaatgagttcatttatttgaaacagactgggccaatgtccacaaagaattcctggtcagcaccaccgatgtccaaaggtgcaatatcaaggaagggcaggcgtgatggcttatttgttttgtattcaatgattgtctttccccattcatttgtctttttagagcagccatctacaagaacagtgtaagtgaacctgctgttgccctcagcaacaagttcaacatcattagagccctgtagaatgacagcctttttcaggttgccagtctcctcatccatgtatgcaatgctgttcttgcagtggtaggtgatgttctgagaggcatagttggccagcaggcgcatgaaggcaagttgggtagccatttccttggaagtcactccttctacattatattcaaactggctgccagcattgatagtttctcctagccagacgtgtttcttgtccttggagctcctataccagttcttggctgggatgttttcaggttgggcccggatacaggtttcgccagtagagaaatcacagtatactttgatagcatccatagtgcatccttggttagggtcaatccagtagtaaccactgctccactctgggtggctgagtctcaagtcacggcatgtgcgagctgggttctttctagagccttcaggagtaagaagggtctcaatctggttgttgagagacttcagagtagcatcaacttcatagtccttgggtctgagagaaggtgctgagcggaggctggtcagccctgtagaagtctccatcgtaaccaaagtcataaccaccaccgcttacacctggaggtccaggagggccagggggaccaggggggccagcaggtccaactgtaccaggatgtccagtgcgaccatcttttccagcagggccagaaggaccagcagggcccctaggaccagcaggacccacggagccaggagcaccttgatcaccatggtgaccagcgataccaggcagaccttgcaatccattgtgtccctttaagccaggaagacctctgggccccttttcaccgggctctccgg

SEQ ID NO: 312399 - DNA, 355 bp, Homo Sapiens
  misc_feature (100)..(128): n is a, c, g, or t
tctcttttgcccacaatttaagccaagtagatgtgcagaagaaatggaaggattcagctttcagttaaaaaagaagaagaagaaatggcaaagagaaagnnnnnnnnnnnnnnnnnnnnnnnnnnnnnagattgagttcatttatttgaaacagactgggccaatgtccacaaagaattcctggtcagcaccaccgatgtccaaaggtgcaatatcaaggaagggcaggcgtgatggcttatttgttttgtattcaatgattgtctttccccattcatttgtctttttagagcagccatctacaagaacagtgtaagtgaacctgctgttgccctcagcaacaagttcaacatcc

SEQ ID NO: 312400 - DNA, 449 bp, Homo Sapiens
  misc_feature (18)..(18): n is a, c, g, or t
  misc_feature (34)..(34): n is a, c, g, or t
aatcccaaaggtgcaaanatccaaggaagggcangcgtgaaggccttatttgttttgtaattcaaatgaattgtcctttccccccattcaatttggtccttttttaagagcaagcccatcctaacaaggaacagtgtcaagtgaaacctgcctgttgccctccagcaacaagttcaacatcattaagagccctgtagaatgacagcctttttcaggttgcccagtctcctcatccatgtatgcaatgctgttcttgccagtggtaggtgatgttctgagaggcatagttggccagcaggcgcatgaaggcaagttgggtagccatttccttggaagtcactccttctacattatattcaaactggctgccagcattgatagtttctcctagccagacgtgtttcttgtccttggagctcctataccagttcttggctgggatgttttca

SEQ ID NO: 312401 - DNA, 299 bp, Homo Sapiens
  misc_feature (123)..(123): n is a, c, g, or t
ccccaaagaaaaaaagttcaaacatcaataagagcccctgtaagaatgaacagccctttttgcaggttggcccagtgctccctccatcccatgtaatgcaatgcctgttccttggcagtggtnaggtgatgttcctgagaggcatagttggccagcaggcgcatgaaggcaagttgggtagccatttccttggaagtcactccttctacattatattcaaactggctgccagcattgatagtttctcctagccagacgtgtttcttgtccttggagctcctataccagttcttggctgg

SEQ ID NO: 312402 - DNA, 1097 bp, Homo Sapiens
  misc_feature (261)..(269): n is a, c, g, or t
ggggccccacggagcgcaagaaagaagaggggtttaagaaaaatattgttaagaggggaccggaaggcgagccccagacaaggtgtattggtttttaaaagtgagggggggtaaaataaaagctcccggtcgcggtgaggccaagagtttttgaaggaggaataaaaaaggggaggcggggggatatataggaaaaggtacctatggtgcgaatggttccctttagaaagccccttgaggtgggcagggagggctttccannnnnnnnnaaaggaaaatttacaggagcccacagggagcaccaaacaggggaagatgtgaggaagcttggcagtccgggggcccctcccagctcacctcttatttcgggctcccgcggatacagcagcacccccacgttgatgaaagcaaaaatagtgaagagagtgacagagaaagctagtgtgccaggggacactttgaactgttccccattggctgcgtggtagatggcagcgatggaccaggccacaccgattcccaggaagacattcaccgcgttgctgcccgtgacgttacctatggaggcgtctgcatactggtcctgggtggctgccactttgctggcaaatgtgtctggcactgacgttccaagtgcgacgaacacgactgcagtcacagaatctttcaggccaatggtgcagccaaagtgggaagccaggtctccaatgaaagctgtcagtaggccaatcatgaggatggagacaatgaaacacgcccagccattccagtattcagtaggggggacgaaggcaaacaggaccttccagaacacagtcagaaagtgcatcacgtaatcgaaacaggagggcagcttctcttccccacattcatcgtcgtcatcatcttccccagcactgacagtgatagcttcaatgaactgttctctccagctgttagtcccaaccacaagggccaggtttgtcttcttaatgagtttgtccacagtactcttgaattcataggattcttcaatgatcacttccaacttggtgtgctctcccaggatggggcgccccatttctgcaatgcgcctctcctcttcctctttgctggtc

SEQ ID NO: 312403 - DNA, 699 bp, Homo Sapiens
  misc_feature (20)..(20): n is a, c, g, or t
  misc_feature (23)..(23): n is a, c, g, or t
taatgcagctgagaattcanacntgcgttagggtccccataagcatgagcccgagtatttgcatgataagcagaggccagggtttctgagttgggagaaaagggagtgtgtaaagaactccggttagccctctctgaaaaggtcatgtgtggattcatgtgatgagggtctccccctgggcctctgctccgcaccaggagacattttcaatttttctgcaaagtcatgatattgagaaggggaccgacccctcatgccctcccgaccaccaactctgccagggacccgccgcattggcgtgggtctgctgtcttgcgggccatagtctgaaagggaatcatgggttgctgctccagggctggcattgccgcggtaagactcatgcttgatgctaggaggatggcagtggtctccagatttcttgttgttgaaactagcttgagatttagactgttcaaagtcttcctcttttatctgcccgctctgggatttcagcttggtttccatggacaccaaaccaccaggaagaatgaccgactgacttaaagttggattgggacggtcattcctcccaattctggtgtcggcactcatgtgtcccagtgagtgagcccctgggtccctgacaatctgtcttagtggagaaatatcacagatcactgatcttctttcagagagggaacccccaggctcatgtgc

SEQ ID NO: 312404 - DNA, 1002 bp, Homo Sapiens
  misc_feature (87)..(87): n is a, c, g, or t
  misc_feature (955)..(955): n is a, c, g, or t
tcgcaacagggaccccagggccgctgcaagttggactcaagttgttccccaccctcgttttatttggacaaagtacttcaatttggnccactctggaagaatttaattttcttgatatcaactgggctcagaatcagtgttcccatttttgaattttccaacctgtccaatccgtccatttgacaaaatactgggagcggacttctttttggatttcctgtcctcctgtcctttcctcttctttttcttgaaaatatctgtttcttgggccagtctcttttcttcttcctttgctgcctttttttctttaatttgctcctgtaaacccttgtaattcacatacctctttttaggaggcttagcgcccagcatattggcacgttcctgttccaggtttctctcctttccttttccataacccgtgattccaaaccggtgcacttctaaacgagctttttctaggttaaattcctgtgtatccacatctctctgcaaaacactaggattagcctgctctgtgttcttgttatgatctggcgtcaattttcttcttttactgctgtgatattctaccacttctacttgttccctattgttctttagggaagagggaggatctgcagcagcaaggatctctggtcctgtgggggtcccagaagtagcacaatgccgctcttctctaagttccttgaagaagctcgaagcgctcttcctctggcctcttatgagagaaccaggtaggggagatggctctgctgccaaggccgctgaagccatcacatctctcttcttgttttcccttttctttatgatcttcttctgttctgtttcaccttctgtacctccaaagtcgtaaaggttctgtagcagagcgtcaagaagtgtcgtagaactggtaggcgtggaggaccccggcccttgctcctgcgacattgtggggtcagccgaggaatcnaaccctcattctgccgcgctgcacccccgcttccgggttccgcgacc

SEQ ID NO: 312405 - DNA, 1681 bp, Homo Sapiens
caacaagttttcactgaaaatagatttcatttcattcaaattagaaatgtgttctcccaaaccgcctcccaacaaaggtctctgcttgataaatgaaaagatagtaaaagaaaacttcacatttctttttatgtggatctatcaaaaggtacataatcaaaacaactttaacacccgacctatccatgaggagtctggatgattcactctgaaggaaaaggggagagaagagagaatcactgctctgatttgaagtgtgcaaagttcttatctatgtcacttaacactggtataattaatacagaaaggaaaatgaccctcaagaggaaggtttcattgagcagagcttaagaggaacaataagagggtaggagacacctcctgagaaggtttgcttgtgttcagctgaagattaataggaaacagtgaaaaaagcaacgtcctgtgatcaagtaactttaaaagacaagcttggttctctctttctggcactactgacattccccaccattctagcttccaaattctggaaaaagagaagatgattaacaaaaatagagaatgtagaaacttctggttttgtgccttacaggattggcaccagaccctcagtgctcacttgctccatctacaaggcagcacccctcccagaggcagccagggaggcctctccaccagggcctgcgctggctggtggtgcggcttcctccctgggcgccagaccaagtgcacgtctcctacttggccatcttgcggatcatgtagttgaggatgcccccgttgaggaaataagtgagctccacatcagtgtcaaacctcatgacagcctggaaggtcttgccagtatccagcttgacctggactttcatttgtggtttgaggttttctggaataatgatagtgtatcgttcttgccctgtgagccccagggcatctgcattctcaccagggagatattcaagtgggatcacacccatcccaaccaggttactgcggtgaatgcgctcgtagctctcggccaggacggctttgattcccagcaggaaagggcccttagctgcccagtctcgggagctgcctgcaccgtactctttgccagccagaacgatcaggggaaggcctgcctgctggtaccgctcagcagcatcaaacacatcaaggatttccccagaaggcagatggatagtctgtggtgcctgcttgttcaaaaatctgtttaacaagcgaatgttggcaaatgttccccgtgccatgacggcgtcattacctcggcgggagccataggagttgaattctcgtggagttaggcctctgttagttaagtagcgagcagcaggactgtttcttgcaatatttccagctggggagatgtggtcagttgttaccgaatctcccaaatttagcagcacataggcatccactatagatttagggggctgaagatccaaagtcaggttttcaaagaatggtggtgatttgatatacgtagatttggaattccagaaaaacagcttatctgatggggttgctaaggcattccagctttcattcacagtctctattttctgatagacttccttaaacatccccgggatgacatactgacgctccactgcctggatctcgtctctagtcggccagatatctttcagaaatacctgctgtccctttgcatttactc

SEQ ID NO: 312406 - DNA, 781 bp, Homo Sapiens
ctctgctttcagctcattggtctgcacttccttggtctccctttttgctgctcctccttctaatttgtcttcctgtgtttcttttaccttctcttctctctccttacttactaattcagtaggctgcatctccactttgctcactgagggtttttcttccttgctcactgagggtttttcttccttgacttcaactttaatctcttgtttcttctgagccatttcttcagcatcacccttagcctgtctctgttcttctggaaggggttcctctttatctaagacctgttcttcaacaacagcttgggtaggctcttttttatctcctccatctttggccactactaaggtatatgacttttgcttcttaagccatggcggtatgaaccgagaaatacccctgctctccgatgtttccttctctctcttctggcggcgtagattactttggctttcagctgcaggaggtggctgggaacctttttcctcctctggatcggaagactgattctgctgattttctgctacttctttaggtttttccttggttgcatctgttcctaactggctagagtccttcttcacttcagacacagagcctacttcagtagtcatggccacagcttatgctcaggagctcgctcgccgcgggacccgtcccttttcagtcccagccgccggcagccgcgcctgcctcctcccttgtgctaggtttcaaattgaaattccctgactggggccgtcagaggactttgagggccggccccgccccctcccggcc

SEQ ID NO: 312407 - DNA, 1342 bp, Homo Sapiens
cgggtggtttttatacattcatattcttataatgtttaggaatgtgctgttattactgtttatgtaagacttggggcataatatttatattccttactaacttatagaccattatgttttactaagacttgttctgtaagcaagtccaattaaaaattttattttttctttattcagtatgttttcaccatttctgctattttagaaagatgtttacaagattacattttgtttatttatttcagtgttttcactttaaagagttctgtgagtcagaagtcattttgactgccctcaataaaattagtaatgcaattggtcattttctctttacagattgttcagttcaagggaatgaagaattcagaataattttggtaaatggattccaatatggggaataagaataagctgaacagttgacctgctttgaagaaacatactgtccatttgtctaaaataatctataacaaccaaaccaatcaaaatgaattcaacattattttcccaggttgaaaatcattcagtccactctaatttctcagagaagaatgcccagcttctggcttttgaaaatgatgattgtcatctgcccttggccatgatatttaccttagctcttgcttatggagctgtgatcattcttggtgtctctggaaacctggccttggtcataatcatcttgaaacaaaaggagatgagaaatgttaccaacatcctgattgtgaacctttccttctcagacttgcttgttggcatcatgtgtctcccctttacatttgtctacacattaatggaccactgggtctttggtgaggcgatgtgtaagttgaatccttttgtgcaatgtgtttcaatcactgtgtccattttctctctggttctcattgctgtggaacgacatcagctgataatcaaccctcgagggtggagaccaaataatagacatgcttatgtaggtattgctgtgatttgggtccttgctgtggcttcttctttgcctttcctgatctaccaagtaatgactgatgagccgttccaaaatgtaacacttgatgcgtacaaagacaaatacgtgtgctttgatcaatttccatcggactctcataggttgtcttataccactctcctcttggtgctgcagtattttggtccactttgttttatatttatttgctacttcaagatatatatacgcctaaaaaggagaaacaacatgatggacaagatgagagacaataagtacaggtccagtgaaaccaaaagaatcaatatcatgctgctctccattgtggtagcatttgcagtctgctggctccctcttaccatctttaacactgtg

SEQ ID NO: 312408 - DNA, 854 bp, Homo Sapiens
  misc_feature (73)..(73): n is a, c, g, or t
gtaattggaacattaaattcaaagtgttttctcttaccatcttgttctttatgggcaaagaaatgcaagtcangggaaggctcgaaggtgcctgggggaaaccttacaggtgtgcacacccatcagacctgggaaatgttcgacagatcgcctgatcgtcaggctgtttccatctttaaacccaagtggctgttgtgttctggcacctcctgtgctctttggaaagcttacttagattttacccctgcctcctcttgcatccctaaccagaaaaattgcccttctcctctcctctcgtgccctacaatattgatggctatgagtcacagatggtgagggggctgcctccctgggcttgggggtgttgagggacatgggtattacttgcagaagatggggggtgctggtcaaggggaggcattgttaatggattcttttgcctcagacccgaaaaaagcagcgatcgtttaagagctggacccgtctggcccacttgcatttctggtgatgtatctgttgacagtggtgacagagctaagtgtgtagagcaggtctccgaagatctcatttgggaaaatacgaggaatgaacctaaagcaaggcttctgagttccatatagtctctgggatcattaagggctgtttctgtgcccactccccggcttacctaaggacgcggcttctccgtaactgatactgactcacacccttcccccatcccctctttttaacctcataagattcttccctgcggatccaaaaaacataacggcatgggagtgggaggaaatgataaggaagcttcttggttcctcagaagtcagtttggggctgggcacattgggtcacacctg

SEQ ID NO: 312409 - DNA, 1089 bp, Homo Sapiens
  misc_feature (16)..(16): n is a, c, g, or t
  misc_feature (54)..(54): n is a, c, g, or t
  misc_feature (78)..(78): n is a, c, g, or t
  misc_feature (424)..(440): n is a, c, g, or t
tttagacgttccatangctcttccttttcacgttctattctttccttttccttntctgctatttctcttttcttcttntcattctctaatgtgccccttccaactgcttctgatgtttctcctccctagcctgagccttcatctgttgtacttcaatagtatcaggcttccttcttcgcatgtatagttcatggtttcccatacataaggccaaaatccgctttattgattctcaggggagggtgcataaaacacaaatatcaggtgccctttttgtcgattggctttataacaaattttttgtcattaaatgaaatatttctgatttcactccagggaaaaaccaattttaggtgttaacttgtcgtcatgctcataaatattcagacccaaagcatcaacacctagccacaattcagttccnnnnnnnnnnnnnnnnncaaaatagttgactccatacatttctagatcttgtgcaatcttcaggtattccatcatagaatcctcccttaacattcctctatgttcttcatgccagttctgtattctttcttcccactgttcttttgttagtttgtgttgttccaatacacgctggggtaggagtctatcattagccaggtagcctggcttatgaatctctttattgtaatctccatacttggcttggacagcataggaagccaaaagaactgcagtttctggcgggcaatatatctcatcatttaagatggcttctttaacttgcaagaagaagagtctctgggttatttcttgaattaattcctcagaaacatcttcaggaaagaatttagctctaaacttgaactgtaaaggattctcttttttaacatcctgctgtgttacctttttatttagtttaagccatgtagaataacctttgctgtctacatactgcagcccaaaaaaccagacctcacgcaaaccaactgttttcaccacctggtcaaaaagttgtttgccagttgtattgggctgaatggcaaattccagctcagcatccattgtagttactcttacgttgattggtttcggcattttctttctctttttgttaccttctttaaa

SEQ ID NO: 312410 - DNA, 723 bp, Homo Sapiens
  misc_feature (30)..(30): n is a, c, g, or t
  misc_feature (50)..(61): n is a, c, g, or t
  misc_feature (72)..(72): n is a, c, g, or t
  misc_feature (137)..(188): n is a, c, g, or t
  misc_feature (212)..(226): n is a, c, g, or t
agccctgggcaaacatgatgaaacccccanctcaatgaaaaaatacattnnnnnnnnnnnnttagcggacanaatggcatgtgcctatagacccagctactcaggaggctgaggtggaaggatggcttgaaccccannnnnnnnnnnnnnnnnnnnnnnnnnnnnnnnnnnnnnnnnnnnnnnnnnnntgacaggtccagaccctgtctccnnnnnnnnnnnnnnncctgaaaaacgttttatttatagacttctagaatacaattttcagacaatataatgcaaacgcatgtttcacttaccgctggggtaggagtctatcattagccaggtagcctggcttatgaatctctttattgtaatctccatacttggcttggacagcataggaagccaaaagaactgcagtttctggcgggcaatatatctcatcatttaagatggcttctttaacttgcaagaagaagagtctctgggttatttcttgaattaattcctcagaaacatcttcaggaaagaatttagctctaaacttgaactgtaaaggattctcttttttaacatcctgctgtgttacctggaaaaataatttcaagtataatcaacaaaaatcttaagtttacaataattagacctagtcacatcaaattctttttggaagaaaatgaagtgaaatagattctaaatctatgaagattttagtgtgtaatagtctaaatctgt

SEQ ID NO: 312411 - DNA, 2598 bp, Homo Sapiens
  misc_feature (42)..(42): n is a, c, g, or t
  misc_feature (107)..(107): n is a, c, g, or t
  misc_feature (209)..(209): n is a, c, g, or t
  misc_feature (239)..(239): n is a, c, g, or t
  misc_feature (242)..(242): n is a, c, g, or t
  misc_feature (362)..(362): n is a, c, g, or t
  misc_feature (451)..(451): n is a, c, g, or t
  misc_feature (502)..(502): n is a, c, g, or t
  misc_feature (525)..(525): n is a, c, g, or t
  misc_feature (1732)..(1732): n is a, c, g, or t
  misc_feature (1734)..(1734): n is a, c, g, or t
  misc_feature (2098)..(2098): n is a, c, g, or t
  misc_feature (2100)..(2100): n is a, c, g, or t
  misc_feature (2109)..(2111): n is a, c, g, or t
  misc_feature (2113)..(2113): n is a, c, g, or t
  misc_feature (2123)..(2123): n is a, c, g, or t
  misc_feature (2140)..(2140): n is a, c, g, or t
cggggttgaggggcggggagaagagacgcggggcgtatatantggcggtggaaaagagtgttatagactggaggggcgcgtgtttattgtggtaatgggtcgggagnacacaataattatcgagcggagaggagttggtgggcacccaacagacatagaatcttctcgtgagacggccgccgcacggcaattatgagtgcacacttatntttgtgtggtgcgtccccgcgcgcggcgtnttntctccctcccgctgcgcgtcagagacaataatagtcgcgtgcaccagcgcgagaaggggtggacaccacacaaaggtgatgtgtcgtggggtagaacagccacgggcggcggcggaaatnaaatacaaggaagtgtggcgtgacgcaaagacaagagcggcggggtcgcaataagtataaggctctcttccacagaagtgatagtggtnggcgaggacggggccacactcgttaaatagagaacaggccgcggtggcaangaaccacgcggtagcggcggcgntcaggcgaaaacacagacacgcgggcggtagaaggacagggcgtgagagggcggagaaaaatttgtgagacgaacgggcggaggggcgccggcgcgcaagaggcgccgcgccctctgtttgtgggataggaagatcccgcaggtgagttgaggccctcctccccagggaccccgccctgccttagggaaatttgttgtttacagagccgcggtgtgtgtggttaacacccgcgggggggttttttttatcggtgggaagaaaagccgcgaggaccctatggggcgtagggcccgggggttttgtggggggaaaaacaagatgggacaaaagggttattgtgccataagggagaccgccgcggccaaacggggggtgttttggaaaagtttttgggaaagcggggggaccggaccgaagaaatttctaggctatagaggggataggggttcccgcggggaccattacgattcggcggttcgtgcttgtagtcgttttgcgatcgggttttggtgagggaaatattggagatgtttcggattgtggttgtgtcatgagcactgccacatagattttaatttgcctaaagatgatagcgattttgagctgtggttagggataactgttcccacagtagacctattaccaacatgagttgctggctttcatttaataggactccaagctggcaaacaaaccccaccatcttcccaacagccacatcatgagatctagcagcaccagcctcttgaagtggcttctcagtggaaggtttgctccgtttcagtgaagcttctctctcaaagctctgacgtcaccagggtgcccctcgagggtctggatagactgtccgaaaggtcaggttcactctcggttctctagagtggtattctttgggcactcgatgctgccagtcagcttgtgtcgctccttccatgattaacaaggtaccatgatccaagggtatcttcactctttccacatatgtgtagtctccattctcttctggtggtggcttctttctcatctcaaatgtgcgtgtggcaccaaaacttagtgaagcaataatggggcacctccctagtgagggttcatcatcactgtaccagtccacgctgtccttctcattgcgataaagattgcagagtaaggagttgaaggtgtggccagtgttctcttcaatgcggttctttagtgtgcgcacagagngntgccagtgaggatttggttccatagtgattcttgaataagtgtaaggaagttctccataccatgctgtaagtcttggttgctgataagttatatcctctctgatgccggtcctctgtttccagggaacatcttgacaaagctgttccaatatccagtcagcttctttcacgtcaacaaagccaggatacaaacagaccgtagatacacctgtgggtgacaggctgatttcatacacaccctctctgtcaatcactcgtggctcaggagctctacgtactacctgctgaggttctttgaacacaaactctctgtcagagagatgatgctctttgttcttccaggtcttgttaggtttttggtggngntggcttttnnnantggtagttgnctgagtaatggcctggnttttaacaggggcagcccaggctccctgaactcgggctcgccgtcttttttcctccatgttgaccaaaaaggcttctgctccgagctttcagaagattttgttcctgtttcaaactactccatggtatctttctgagccccagtttttcctcagtaaacagggcagtcactttccgcacggttgaggtgcagactaagcgagctccgtaggtggaagagcttggtcgtggataagggcacttccttttcctaatttagatccttctctttaaggaggcctagaatgaggccccggaggtcgcccaggaagagacttcaggggtggtactcgcacccccagccccgcgcacccagcagtaagtcaggaaggcgcacttgcgggcggagccgggcgcgcccgtgcaaacccggtaggacttggggcagccctcgcagcccctgacccactccgcagtctg

SEQ ID NO: 312412 - DNA, 642 bp, Homo Sapiens
tgctcttcacttcatgtccacatcaaagtccagcaccagcagcttggtttcttcagtcccattccgactcccaactgcacacaccagctttgtgtttgaggctctgatccgccacacaactcccccactacccccactctccaatgtgactaggtttcgaataaattcacccgttttcaagtcccatagttttacagttccatcatctgagctggtaattacaaagttcttgttgaactgtaaacaggtcacagcactctgatgcttgttgggaccttgcaatgtttgtaaacactgtcctgttttgatatcccagattttaactgtagaatctgcattcccagagacaagaatattgtctttgagttccattccacttgttaacgactggtgccctgttaaggtgtgaatgcaattccctgtctccacatcccaaacacggattgatgtatcaagagatccactcaccacatggataccatcaaactgtaatgaatagaatctattagtatgcccctgcaacgtgtgtagacaggtttcagtatgtggatcccacacctttaccataaaatcatatgctccactaacaaccctcctgccatcatattgaacacagcggactgctgcaacatgaggcatcat

SEQ ID NO: 312413 - DNA, 734 bp, Homo Sapiens
  misc_feature (554)..(563): n is a, c, g, or t
caaccggtctcccgttaaagtgaattcccggcccacgtgtaaagtaaagacaggccaattatgttgcacaggcttagtcttgatctcctgacccacaaatgatccccttacttcagctcccaaaagtcttggaataacagaattgacctgccgcccctgcccccacactctattctgaatgcatgtatgggcacatgtgcatgcctgtcccctttcactcagtgataaggaagaaggggaaccagaaatttctgtttgagaaattagtaacagaaaatgggtgtggggagctggttacctgggagatccttgttcatttgtaacatcaggaactgcttcttttcctccttctctcttctagaagactgtcaaggagcccgagtgagggaagcagaccaaccatggtcttggagaaaagaaaatagggtttccatcccttctggagggagaaggaatagcagagatgaacatgaatgaagaaggaaacaaatggaaataaacaaaatgaaggtaaataccctatatgttaaaagaaaaaaataccctatatgttnnnnnnnnnnggttaggaatagggtaagagaaaaggaaaaacagcaaccagcagaggaatcactcccctgttaaggttaaccaggaggagaggcttatataaggcatgaatgtgagtgggtatgagagtccagctttcccactgcacttgctctggttatggagcagactgccatcttctg

SEQ ID NO: 312414 - DNA, 861 bp, Homo Sapiens
  misc_feature (609)..(692): n is a, c, g, or t
gagcgcgtggctgtcctgctgtgcgctctcgctccgtagtctgggctgattcctggtgccttgtgttgggacctcccggcgttggaattgcggacctgtccgtgggtccgccgctcggtgggctacgctgatcccttccgctagagagcaccgtttcagagttggccgctagtctgactcggacttctagatcaccgacccgcctcccaagtgctggatacaggaatgactccgcccgtgcccccacactctattctgaatgcatgtatggtcacatgtgcatgcctgtcccctttcactcagtgataaggaagaaggggaaccagatatttctgtttgagaaattagtaacagaaatgggtgtggggagctggttacctgggagatccttgttcatttgtaacatcaggaactgcttcttttcctccttctctcttctagaagactgtcaaggagcccgagtgagggaagcagaccaaccatggtcttggagaaaagaaaatagggtttccatcccttctggagggagaaggaatagcagagatgaacatgaatgaagaaggaaacaaatggaaataaactaaatgaaggtaaataccctatatgttnnnnnnnnnnnnnnnnnnnnnnnnnnnnnnnnnnnnnnnnnnnnnnnnnnnnnnnnnnnnnnnnnnnnnnnnnnnnnnnnnnnnttaggaatagggtaagagaaaaggaaaaacagcaaccagcagaggaatcactcccctgttaaggttaaccaggaggagaggcttatataaggcatgaatgtgagtgggtatgagagtccagctttcccactgcacttgctctggttatggagcagactgccatcttctg

SEQ ID NO: 312415 - DNA, 958 bp, Homo Sapiens
ctagctttaactcagccataattgccttgcttaatcccaggaacctggccactgctccttggtccttggcattatgacgggattcccttgtcacctctgacagttcctggctgcggtgtcccggactggctggggagtgatgacaggtagctatcagagctccagcctccaggcagctttagggattaaaacggaggccaaagcaactccagacctgtttttatagccaaatactgagcctcaggggttgtacactcaggggcttccaggaaaatgccagccttacttttctggggtgccttttaataacctccaagcactttgtggactgtttgtcgagggacggtgaatcagaagaatcactattctgatttcctttgtctccgaagaggaagtccctgactagctatataactttgggcgagttacctctcacttctttgtgccccagtgttctccttgggaaactggatttaggttagatgaccttttaaggctccttgtatgatattttgtgatctgtacatggcagagtatagattaggagccaaattttccaacctagtgctatggttcagaatacatagcaccccaagcgtctggctggagccgaggatgggtcctccagtttttggcacagatgttccggagcccaggaagcatcccataaccaaccttcagccccaccgccacccccagcgtattccagagccgcttccaaaccacagcctatcctctgctccatttcactcttgccctcacagactttcagcctccatgctctgagacaactgtgggtaggtacatctctgttggtggaaatgatgcttaagaaccccaaagattaaaggaaacaatgttaagggcttttgtgaggataaaagataatgggtatatggaatagaaacatttcaaatgaagaatcaaagcatttcaatcaatccacttagttgtaaaa

SEQ ID NO: 312416 - DNA, 1918 bp, Homo Sapiens
aaacattcacacaatgaagggaatcagaatctgtttttatatccctagagttataaacatttgtatcaaaatatttacaattatagtatatgaaataatctattaacgaagaagcccaatacagtactagaacaatccaccagagtaatgcaaattacatgagacataaatgtcacagaaaaaaagtaaaagataagggaatacatggtttactccagtcatagttcaacttcttaacaaaatgtgagtattccctttggatatgtctgaaatgtaagtatgttttttgcactaagacagccttctataatcatgtgataatgaaatcataatgacaaagttcatcttcccacagtttttgctggccaatctctctaacctcagcctaggtaatttggtggcttgccctcaacatttccttaactagaataaacatagagaaatagaattagtaataatccttttacataaataccaaaaatcatggcataacaactccccaaaaaggaaaggtataaaagaaatggatgaggagaaagctaataaagaaaagtaggcaagatgtctcagattctccctggggtagatcttctcagggcgataaagaaaacgtcttcccaaaaaacccctttagacagaatctgagatggcttaaaatagctgctccagggcaaagcaatgcctgcttaaccaggaataacatactacttctaagtcctgtatagaggtgctcctgcggcagcagacagctcgtctaccatctgactaggtaccacaagagtttttgcttttttattttaaagaaaagatctgcccatcacctatatttttatttatctcatgggattttcgtattttcctgggaatgcaggcactctgttcttatcatggctgaaatacggtaggcttaatacttcattattatatagcacctttcacccaagggcctgttgtttggttttggtttatgtgtgttttaatcagcttccagaattgccatgcctcacctgtgaagtgggataggcagggtccccaagaggtgatcactccaggtggtgtctaagccagagctaccactgagcctaggagccctgatcctcaatattgataattagacaaaacttcctcaaaaatgttagaggaagagtaataggattgtgctacaatgagccatgtccatctctctcctgttgtatacttaaaagaaacactgactgcattgaggggaatcctaaaaacataaccctaaaccaccgaattgttcactagtgactttagagaaactccagaagagctgccttggctttcagcaagaggcctagcaaagaccatggcatgaggtctccatgagggacagccgtgtgtgaggtctcgactgggctctgaccatcccccaggttttccattgtgaaaaggtctccttcttggtttagctaacccaccagcatgaccttacgaactctctttccgtcctcccattttgtcactgaattccacagagctaaatatctgttccaaagagggacaatggctcacaggccaaagccccccagtaggcacttcagactggaatgtgatgttttgctttgggtcagaagggcaggatggcttccaggcttagcgtattcagcacaaagacagtatctgctcttgccagaacttgtaccgctattttaactcagtgcagtaggtctgtggacctcagtgcatgacccagaagtggggctggtgttgtggcagctgatggggccccagacagtgtgtgtcactaagaacagctggaggccaagtctggtggctgcagggaggctctctggaccccatcaagggagcatcaaagtactagcccactactttctccccagggcagggggttggcagtagagaatcccctcagtaatggtttgggatttgacct

SEQ ID NO: 312417 - DNA, 1420 bp, Homo Sapiens
  misc_feature (77)..(77): n is a, c, g, or t
  misc_feature (140)..(160): n is a, c, g, or t
  misc_feature (181)..(190): n is a, c, g, or t
  misc_feature (568)..(622): n is a, c, g, or t
ttttgctggtgtctgagcttcagtattaaagacaaaacttcctgtttgtggaacaaaagttcgaaagaaaaaacaanacaaaaacacccagccctgttccaggagaatttcaagttttacaggttgagcttcaagatggnnnnnnnnnnnnnnnnnnnnnctctcatccaggctgaaggannnnnnnnnnctttacaaaatgagttcctcaaattgaccaatagctgctgctttcatattttggataagggtctgtggtcccggcgtgtgctcacgtgtgtatgcacgtgtgtgtgtccattagacacggctgatgtgtgtgcaaagtatccatgcggagttgatgctttgggaattggctcatgaaggttcttctcaagggtgcgagctcatccccctctctccttccttcttattgactgggagactgtgctctcgacagattcttcttgtgtcagaagtctagcctcaggtttctaccctcccttcacattggtggccaagggaggagcattcatttggagtgattatgaatcttttcaagaccaaaccaagctaggacattaannnnnnnnnnnnnnnnnnnnnnnnnnnnnnnnnnnnnnnnnnnnnnnnnnnnnnngaactgagatgacggagttttgagaatatatttgtgccatatttaatttttaaagtctctggtattagcctcataagttattgactattccccggggttggcggggagtggggacatgagttggtctgcctgttgtggggccgggaaggggagggagtcaggcacaagtggcctctttgtttggtcttaaaggcatccatttctgggaatgaagccatgttcgctgctaacacttttggatgttgtgaggccacgtggagtgtgtgagagactaggttttatggatggtctggttcaggtaccaggtctgctggaaggttcctgttcggataagctggtagctacctagctctgagcctgccttcaagaacacctgtgttcatcctctgattctctgtgtgtacctcttgtggcgtttcctctcccgggtgtgaacatcctaccgttattgtgcaaacccaagaacgtcagatcccaaagcacaacaacctggatggactttgggaacatctaagcaatataagagagaggtgcactgagagtacgtcttggtcccctccaccctgagagcatctgacggtcctcagtactgaactcccggaagctgctctgagcccggtgacctcatctgggccaggtgtggtgcctgagctgaatgctcaggtgcttacagtgttgcaatccctaagagagtagagtctggaggagaaaccgtgaaaaagaccttacacaccaccaagaacttccgaatgggcgtgaatccaccgtttcttctctttgcaaaaagaaccaccacag

SEQ ID NO: 312418 - DNA, 709 bp, Homo Sapiens
  misc_feature (646)..(646): n is a, c, g, or t
tgccattttagtattcagcaaagttatttatgttactgtatatttactttgttgtttttttgaatgtgtaaataaaagtctcctaatccattttatatttcattgcattttattagatttacattaaaaaataggcattaaacattttcctgcttcatatccttttattgtttaaattcatttttgagggtatctggctgtttcatgatttgggttagctaaaatttgggtggtactacagttgttttcaataaagtcatttttaaaatttatcattttgtatgatatataagtctctttaaatgaagagaagtttcctggatttcatgaggctgttttcaaagactgactcattgtgaataattcagaaattgtgattagaaggatttattattaatgaagagagtatttgttattatttcctctgagcttattttttaatttgttagtaacttagttgagtacatattcatgatagagtttgtattataaaatttcccatattttagcaagtgacaattgtaaaatattactcataagctgtttgcatattcaatgtatgtaaatttacctgttgcatatttgagtacccttactttgattattctcccttcccatggagaggaagctttccatgataagtatntttaaattttttttctttgtggttattgtcttttttcctcttagaattatacaattttatctg

SEQ ID NO: 312419 - DNA, 1296 bp, Homo Sapiens
  misc_feature (1175)..(1175): n is a, c, g, or t
  misc_feature (1186)..(1186): n is a, c, g, or t
ggggttgaataaatttgcgacactcaaacacttgaggtgatagttgttaaaaacaataccagtatttgatccagtttcatctcaactatgttatacctggacattttagatgtttatcaaaggtcttttatggggaagaaagtaaatgtatgaaataataaatgtgtgacatttatagggaatgttggctctgaacaaacttttgaaaacttggttgacaaaattttggatcaactgaaaaaagcatgacttttgaaatctctgaatgccttggttctcagtattatcattctttattgaatttatttcttattaaaatatgtagtttttaagactttttttctgacagtattatgtaattttttagcgtgggtagatgggagtgtcgcttgtatgttatcgtacagctgacatgtatttttgtctattctttattatcttagtttcatgctatgtatgtaccataaccaacctattgcctatgagaaacatgtaagataatgtatttacagccattgttacaagtttataatgtatttttctatcttgttttatatgtatgttatataacattcaaaaagaatttttttcttgattgagaaaaggatacaaaatgcaaaatccacaattttgataactgaaaattgccaattgttttgcagtactttattatattgggtgtcttgtcttttttgggcttttagttagctaatgaatgaatacattagacacttttgggttttagttgggattttacatagcttgcattttaattctttggttctttgctgtttctattaacccacagcattattttaataaatgttataataccaacctactaactctggactttgtctgtttattaacctttatatgtttaattaaaataagcaaataaagacaaaagaatgtaaagtcttgagttactggactaaccctgaagaacgtgaccacagataacatagcgtgacttgtttttatgttgtttgtcagctgacagttttgcacactactgttaaaatggctttggttattctggtcttttagcttgggggccggggcgggtgtgggtgtaggtgcagtagagatgggaacaaagtagcctttgtttgaggcattcttctcttgccacttgcctttcagcatctgcattactaattccacaccttatntttccttctcncaaataatcactgtctgctcacagcatcgagtaaaaagatacattgtcatggtatatacctggagaaaccagtttgattctttgttgaaccatttcttttaaatttctgt

SEQ ID NO: 312420 - DNA, 1012 bp, Homo Sapiens
  misc_feature (56)..(56): n is a, c, g, or t
tcttttaaaaatagaaaaccctactgctggctttccagttaatatttttccatatntaagtagtttgttttcaaaaatacaaataaaaattattgcttataagagtatttacagaatgataaattacttaaggtttcttaggactcagactaccatttgatatgctgaatgaggcttcatagctattcaaggaggcctctgtcatcccagcctctctatcttaaatctaatagggtaatgaaaataaccacaaatcctaccattttcaaatgatattgaacaactcaaaggttgtatttaatcactaaaattaagaatgagttaagagaacatcaaggtaattttgtctatgaatggattcaaagtacacagcacatgtgtgtcattaaaaaggctgtaagtagtttgggtacctgcctcaagtataatgcccacaggtaattagctaaaataaaaaattgataattctagtataaaaagctccaaatgcttatctaaaatttgtagtaatttgaaaaacttaacatggggctagaatccttatttcaacaggaatcctaggcaaggagctatcacattagctatgggaagcataatatcatccattgatcatagctaagagagggcttaagaagcctctgttattttcaagggagatttatgctttggatagcatgctcttctaatgagaaaggaacaagaatttgtaaaatttggagaaaagtttcattcgttcagacttttgtactcttagtttcaattccagtgataaatcctaatttcttgtttaactagcattctcccgtcaattgttcactgcatatttagcatggcaatttggagaagtgacaagccacaggctaggaaagtaagaagagattgtaattcaaattctgcaactatctcctgagtgattgggggtgattaaccttacccatgtttgaatactggtattatacaagatgatttttcctaaggaaacttctactttgggatttgcccagcgcgtccg

SEQ ID NO: 312421 - DNA, 661 bp, Homo Sapiens
  misc_feature (29)..(30): n is a, c, g, or t
  misc_feature (43)..(43): n is a, c, g, or t
  misc_feature (646)..(646): n is a, c, g, or t
gcccttcttggggtaggagagtttcatcnncgccctgaaatcnttcccgatcgttaataactcctcaggtccctgcctgcacagggttttttcttagtttgttgcctaagagtacaccaaatgtgacatcctttcaccaatatagattacttcataccacattgtcaaggaaaggactagaagaattttttgatgacccaaaaaactgggggcaagaaaaagtaaaatctggagcagcatggacctgtcagcaactaaggaacaaaagtaatgaagatttacacaaactttggtatgtcttactgaaagaaagaaacatgcttctaaccctagagcaggaggccaagcggcagagattgccaatgccaagtccagagcggttagataaggtagtagattccatggatgcattagataaagttgtccaggaaagagaagatgccctaaggcttcttcagactggtcaagaaagagctagacctggtgcttggagaagagacatctttggaagaatcatctggcacaagttcaagcagtgggttataccttggcacctaaattaaagatacaataggaaacgattctttgccttgccttatgtggaccattttctcagactggaacatgagaaacgagcccgcatcanagcacggaaggaaga

SEQ ID NO: 312422 - DNA, 929 bp, Homo Sapiens
  misc_feature (108)..(206): n is a, c, g, or t
  misc_feature (261)..(381): n is a, c, g, or t
atcgttttcaaaataatgagttagctcccaagcattctctagagatgaccagtgagtttttaaatttgtttttagtacattatgaacgcatgaactgagcacaactgnnnnnnnnnnnnnnnnnnnnnnnnnnnnnnnnnnnnnnnnnnnnnnnnnnnnnnnnnnnnnnnnnnnnnnnnnnnnnnnnnnnnnnnnnnnnnnnnnnncgtaccatcatgttaagtctttttgatagctttcttgttctgtggtaaaataagnnnnnnnnnnnnnnnnnnnnnnnnnnnnnnnnnnnnnnnnnnnnnnnnnnnnnnnnnnnnnnnnnnnnnnnnnnnnnnnnnnnnnnnnnnnnnnnnnnnnnnnnnnnnnnnnnnnnnnnnngccaatcatcctggttttcctgaaactgaagagtttcctgggatgtgaaattcgggtgctgaaactgggaagtctgggcacaccaggtaacactggtcactcaaatctgggtccaagaaccaagaagcatgcaaattgctacaggactggctcttgtttctagaacatttcaatggacagaaccaggaaatacacaattttctaagagacaaaatacattaatgggtcatgctggcattatgctgaaccctattaagctgccaagattcaatggtttttgactagagaaacagcaatttcatatggttcaaattaatacctttaaataaatccagggctacaatgtttacttaacctaatcaatttacagctgaatctcctttctttcatgccaaacatcccaatattcaataacaacaatataaatattcatttgcattttcctgtaatacatactcaacagtaaccaaataccagcattactgctaactacataattacttaaaacattacaatttttttctttatagttctttttatccttagaa

SEQ ID NO: 312423 - DNA, 531 bp, Homo Sapiens
atcgtttttcaaaataatgagttagctcccaagcattctctagagatgaccagtgagtttttaaatttgtttttagtacattatgaacgcatgaactgagcacaactgatgtgtttcaatctactgaagttgttattcttattgatgttccaattgtcttatttttggccagagggaacctcttcagagtggctcctgagtcctgttcgtaccatcatgttaagtctttttgatagctttcttgttctgtggtaaaataagatactcaaggcttattttaaatgcattccatgccccaggtatggaatcagccaactggtcccaaaggccctagttcattttcatgggaaaatgataattaggtaccataatctggggtgaaggtggccaatcatcctggttttcctgaaactgaagagtttcctgggatgtgaaattcgggtgctgaaactggggaagtctgggcacaccaggtaacactgggtcactcaaatccgggtccaagaaccaggaagcatgcaaattggctac

SEQ ID NO: 312424 - DNA, 1019 bp, Homo Sapiens
  misc_feature (280)..(304): n is a, c, g, or t
ataaggaaaagctacaaacctcaaggttgatttatttaaaccaaataattctgagcaaggcatatatacgttaaaaacagatgggcgcattaaaatttcgctattttacaatctaaattgtagcgccatatacaaatactgattgagtacagtacctgccgaggtaagataagtacattctgggagaatatcactgacgctcaaaccatttttatttccaatatgtatttcaatacatgtttgtttccacttttcccagtgccacgcgcactcacacacnnnnnnnnnnnnnnnnnnnnnnnnncagtcacaagttggattacattagaattggtgccacagttgactttttaaaagcattttaataaccacccaactcttagattttgcagtttagggacttcaagttcagaaccaaaaagcagagaatcgtttcatgtgacatgatgtttctatagacctcttgctctctaggtgacaatgcagagccagggcaaaggtgtttaagctttgtcaccttccacagctttgtggccacattcatatttagataagctcggactctgctcccctcttctggagatggggagaggcaagtgtgtatgtgttgtcatacttactgcattaattcttcactcgaaccggtttacatcagcgaaataaacccattgttccaatgcaaagtgcaaacagtgaaacatgaacttaaataaactggactagacccatcacatccaacaggatctatttagatttatagcatttaataaagtataagtcagaattcacaatatcttaaactgtgctgtttcctaagatcaagtaacagccaagtcagtgtaattttatgaaacctgtaatggccacatttgttgtgtctccgatgtatttctataattgcattaacaggaaaaaacttaatccaatataccagtgactttgagtcttaaatgttgcaagcaaaggataaaaattcaagggaattttgtcagatatggttactttcacattttctccgt

SEQ ID NO: 312425 - DNA, 470 bp, Homo Sapiens
  misc_feature (333)..(373): n is a, c, g, or t
aaaggggcccggaggggcgggcccgacaatgggaattaaattccccctgggaaagggggtggcctagtataagggaaaaagctacaaacctcaaggttgttttatttaaaccaaataatctgagcaagacatatatacattaaaaacaaatgaacacattaaaatttcactattttacaatctaaattctagcaacatatacaaatactgagtgactacagtacatgccgaggtaagataagtacattctgggagaatatcactgacgctcaaaccatttttatttccaatatgtatttcaatacatgtttgtttccacttttcccagtgccnnnnnnnnnnnnnnnnnnnnnnnnnnnnnnnnnnnnnnnnngtcacaagttggattacattagaattggtgccacagttgactttaaaagcattttaataaccacccaactcttagattttgcagtttagggacttcc

SEQ ID NO: 312426 - DNA, 552 bp, Homo Sapiens
tctgtcagcctctcacccagcgtggccagcacgtggcgaagctcagcacccatgacagtgccattgccctccttgtcgaagacccgcagcccctccacgaagtcctcataggtgcctgtgtccttgttcttggaaatgtgctggagcataggcaggaaagtttcaaagtccatcatcttggtattgagctcttcctgtcttggcttccccaggacacggagcacttctgcctgtgtggggttctggcccagcgcccgcaggacatccccacactgcccgtaggtgatcttcatctcacacttgggtgtgcggtcgaacagcatgaaggcttccttgaactcttcaatctgctcaggtgtgaactcaatcttgatcttggaagcatcaaactcgacctccttagggcgctcaggctcagggggaggtgcgggagctggagctgccttgggggctgccttggcatcatccttcttgggctctggctttttgggggccattgggggctgtaagtacagagagggatgtggagagaagaatgcagaaagcagggtc

SEQ ID NO: 312427 - DNA, 1004 bp, Homo Sapiens
  misc_feature (136)..(150): n is a, c, g, or t
  misc_feature (257)..(268): n is a, c, g, or t
ccctcatactatgaaacaaggcagaatctgtgtataaaataattcttcaaatagccctgttctgacttttcttttttacttaaaaaggcaaatattttaacaaatagcttcattacctgtcaattacaattgtgcnnnnnnnnnnnnnnngttgttgctccaacctctttgttaactgaatgcctctaagaagtggagaggaagaaaaattcaagtacgctgaatacaactttgcaataaaattaacaacaacaatnnnnnnnnnnnncggaaaagggaacaaaatgccacaccctgatgttcagccatctatctttgcaccagcaataacttttctttccatgtccaaaggagaagtatagagatgggaattaagatccttctgtgccatcagaatggtaacagattttagtttacaggcttgtctgaggaatgttgtgatgggaatgtcagcaggaaggggtgtctcttgagtcctggtaggaacaccagaactgtgtaccaaagaacgccagataccagaagcgaagagtaacccagactgggggcaggaagggagggggcaaaagagaagaggggaggagtattcagcatgacttgcataaaccatcccatctatcgctcgggaacaatttttcaaagtgcttttcgaatggaatggtttataacaatgctaaactgtgaaccagacatgccaatcagcaccaaaaattagtttttttctaagaagaaatgccaaggccacattacccttttaaatacaataacagaaaagactccattctggatcccacccttggtctccatctgcctccgtttcatgtgagttttggttatggcccatagctacatttccccattagatagcaatatggtggtgtctgcaatgaactgcatttggaagaagaagcaggatgtcacagaacatgaaacccaggagccaatcacctgtgtccaactggcaaaataaaacatctttttttaggtagcagctactgtagaca

SEQ ID NO: 312428 - DNA, 909 bp, Homo Sapiens
  misc_feature (320)..(320): n is a, c, g, or t
tacatctgagtgtcccccaaacccagcagtcatgtcgccagcaaacaaagaaatcacgttacttcctccagctgatgttccacttgtttcttctgttgtttcaaagatttgatggtgtcattcagtcgactgatttttatggacctcgagttcaggactgctgcttgttcttggcacgggctctgaggcgcatgcagagaggaggaggcggaggaggacttgggggagaggtagagagaacgatcattagggctgggttgtgtgtgggctgtctcagctgggcagaggggcacccagtccccgcttcgggagggaggttnggagggctggcctgcggggtcacttgcacctccgcccagagcctcctacctccagatccttcaagggtaagcagatgatgtagggccctccccgtggatacctgttgctgactctaagagatgagagtgcacatggagatgttctgtcccccctcagtgtctgagccctctgacttcctttcttcccccatcaactggcaacattttcttttctgcctatcttggaccctttttcccataactcctttgtgccaacttctctcgtggttcttatctccccaccatcccaccctgggggcctttcagtgactcctaaagggacagcctgatggcaagtggctcttctcattggcctggcttccccttgggactggggatgaggaaaatcaaacagcaacgaccatttcctcggtgtcctgggtgtttgcggcaggccatgtactaaggattcacataaaagcaacaataacgaatctcatttaaacttcacaaatggaagtcaaaaaataccacctctattatcagatgtaaaagagaggcccaaagacctcaagcaacttgccctaaatcatatgctaatcaatcccta

SEQ ID NO: 312429 - DNA, 836 bp, Homo Sapiens
gagagaacgttccatgtggtacaggtccgtaattagttcctccttctgtaatcacaagagttgctgcgctttcagcagtgcctggtcctgtagggactgctctaactcccactctgtatgtgctttgctgcagctggacaactggtttgccttcttcttctctgtggcgatgacagcagacagagccctctctaactctcctttacactgcaatgaatgttgcaggcggacagccaggtccttggactcttcttcaaagtatctgagagaacgttccatgtggtacaggtccgtatttagttcctctttctgtatgatcaatgtctggttttgaagctctagctccctttcggctttctgtctctcgttgtttgctttcttttcttcttccagctgatgttccacttgtttcttctgttgtttcaaagatttgatggtgttcttcagtcgactgatttttacggacgttgaatccaggactactgctcgttcttggcacgggctctccagatctttcagggtagcagatgatgtaggcgcttccatgtggaaccttgtgtctgaatccctaggtggctggcaaccaccagaagtggctcctcagggatactgccatttgttttcctgtgcctgttcgctcctgctggagctctagggctgtttctctgccaatattcttttaactcaacaacaggtatattttcctggagatcagtgttgtgcgaatccagtaaaccaatcacccgagcaaccttggcccatatatcgcagtttgcagctctttacaaatccaggctcccaggtgaagagtctctcggcttccaggcggaatacag

SEQ ID NO: 312430 - DNA, 345 bp, Homo Sapiens
ggtcggtgttgtcacagtcttcactactttcttgaccgtggtctctgtgcgccgagtggtcccatcatctgagtgtctccacagagactacagacatggctccctcaggatcttcctcggtgtaggtctccacattctgccgcggttcttgcatcctgggaatggtgctatatagaaggtgcctgtgatcttggggtccgttgagtttcaaatctgaaaatttctgtctttcaaggtcagcttggcccacaaaccggcggttctcaaatgtgaagttctaaaaatcagtcctttaagaaagaaactcgccatctcttcctcctttcggtatctctcgtgctcttc

SEQ ID NO: 312431 - DNA, 529 bp, Homo Sapiens
tgttatatggcttttgctttattaacgttgtggttttttaaggagatgtatgtatttggctttctttacaagacgttctttctagtctggtgggtttctttatagctattattgtaactctcgtcacggcctcaaggtatatgagagtacctagggggaaattgtgagctcagtaggtgtactaactgtggcatggatatgtgagagaagtggcaggttagcacaaatcttaggctgttattttaatacccctctcccagatgtctttttaaaaattatattattttaaaaattcttctatactggatgagtacaatgagaaagaaattcgacagtgaaatttttagttttatgtatttttttaattgcacgctagccccttctgtgtttaaaatcccttctgccattcctcttagctccatatcctatgaaagcaaaatactacttaatgattttaaatcccagcattttcataaatcacaggatattcctgttggtttctgtttctattcatgaacagagagtaaat

SEQ ID NO: 312432 - DNA, 431 bp, Homo Sapiens
tgagccatcagtttatttaactttcaagtgtgcaaagcttctagctcagtgcctaaaacctaagacgtgcttaagaaatggtagttagctttccctctgttttacaaacactcatttagccacctgcctcctcaccagctccaccattgtaatggtgtgttgaatttgcgccttccattgaagaaccaggggctgccccaggctggttttctctggtacgccagggagaggacaaggtcaggctcccagtggcagagtagttggtagtcagacaggtgtaaactgaacacaggtcagacaagagctgcaaggacatctgcctatgaaaataagtttcccatgtgagggacccctgccaggtataccagaagtatctcgtgagaagcataccatacccatgtccagctcccctgaatgttctgttaggacag

SEQ ID NO: 312433 - DNA, 1188 bp, Homo Sapiens
gtgacactcttcctctttcctagtcagtatgtggacgtggcctcgctggggctggttcctcagctcactggaggaaccctttacaaatacaacaatttccagatgcacttggatagacaacaatttttgaacgacctcagaaatgatattgaaaagaaaataggctttgatgctattatgagggttcgtaccagcacaggtttcagagccactgatttctttggtggaatcttgatgaacaacaccaccgatgtagaaatggctgccatcgattgtgacaaggcagtgaccgtggagttcaagcacgatgacaaactcagtgaagacagtggagccttaatccagtgtgctgtgctttacacgacaatcagtggttaaagaagacttcggattcacaatcttggcttaaactgcagctctcagctagctgatctttataagagctgtgagacagatgctcttatcaacttctttgccaagtcagcttttaaagcagttctccaccagcctttgaaggtcatccgggaaattctagttaatcagactgcccatatgttggcatgttaccggaagaattgtgcaagtccttctgcagcaagccagcttattctaccagattccatgaaagtattgccagtgtacatgaattgcttgttgaaaaactgtgtactactcagcagaccagagatctcaactgatgaacgagcataccagagacagctggtcatgaccatgggtgtggctgactctcagcttttcttctacccacaacttctgcccatacacacgttagatgtcaagagtacaatgttacctgctgccgttcgttgctctgagtcccgtctttcagaagaaggaatattcttactggctaatggtctacacatgttcctgtggttgggagtaagcagcccaccagaactgatccagggaatatttaatgtgccatcttttgcacatatcaacacagatatgacattgctgcctgaagtgggaaacccatactctcaacaactcagaaatgataatgggtattatcccacaaaagaggccatattcaatggagctcacaattgtaaagcagcgagaacaaccagaaatggttttccgacagttcctggtagaagacaaaggactttacggaggctcttcttatgtggatttcctttgttgtgttcacaaggagat

SEQ ID NO: 312434 - DNA, 1063 bp, Homo Sapiens
  misc_feature (919)..(919): n is a, c, g, or t
gagcaagaggaggatgaagagctattaacagaaagctccaaagcaaccaatgtttgcactcgatttgaagactctccatcgtatgtaaaatggggtaaactgagagattatcaggtccgaggattaaactggctcatttctttgtatgagaatggcatcaatggtatccttgcagatgaaatgggcctaggaaagactcttcaaacaatttctcttcttgggtacatgaaacattatagaaacattcctgggcctcatatggttttggttcctaagtctacattacacaactggatgagtgaattcaagagatgggtaccaacacttagatctgtttgtttgataggagataaagaacaaagagctgcttttgtcagagacgttttattaccgggagaatgggatgtatgtgtaacatcttatgaaatgcttattaaagagaagtctgtgttcaaaaaatttaattggagatacttagtaatagatgaagctcacaggatcaaaaatgaaaaatctaagttgtcagaaatagtgagggaattcaagactacaaatagactattattaactggaacacctcttcagaacaacttgcatgagctgtggtcacttcttaactttctgttgccagatgtgtttaattcagcagatgactttgattcctggtttgatacaaacaactgccttggggatcaaaaactagttgagaggcttcatatggttttgcgtccattcctccttcgtcgaattaaggctgatgttgaaaagagtttgcctccaaagaaggaagtaaaaatctatgtgggcctcagcaaaatgcaaagggaatggtatactcggatattaatgaaggatatagatatactcaactcagcaggcaagatggacaaaatgaggttattgaacatcctaatgcagntgagaaaatgttgtaatcatccatatctctttgatggagcagaaactggtccacctttatacacagatatgcatcctagtaccaacagtggcaaaaatggtggttttagaccagctgctccctaagttaaaagaacaggttccc

SEQ ID NO: 312435 - DNA, 1768 bp, Homo Sapiens
  misc_feature (721)..(741): n is a, c, g, or t
  misc_feature (839)..(901): n is a, c, g, or t
  misc_feature (974)..(984): n is a, c, g, or t
  misc_feature (1076)..(1076): n is a, c, g, or t
gggatttaaaaatttctgtgttccttttaaatagcagtactgtgatgtataaagcagtcccttcctcagtgagtcatcttacaacttctttgcttagccatcagtggaaatattcttttaatcctaccaccttcagaatttggtcttaaaaattagaatctatgattcctcaaaaattttaaaataagtatagtaaaaactagataatatacattcttgatttaatggaaatatttatatgcagtgaaacataaaacaaattattggttgtattgctatatttaaacaattttcttaactaaaatataattaagaatcccaaaattgtcctagacaactattttagaatcaaaaagtacatgatcacaagtacttaaaactataataaaattaatatttatctgtacatccataataaaagttactattttagtttgctaccaagaatgatttttaccaagggtgatctgggtttaaataggctgatttactatgtttccattattattttaaatatatattgacatttatgtttaaggaaacaacagagctgaaccagtgaagcacatttcatgataagcactaaagagaaaatatgagatcactaaaatccccaaattacttcataagggaaacagtctgagggatattattaaaaatcaatttaagtacatattggatttgtgaaaggcttatataagcgtaagttgaatttactttnnnnnnnnnnnnnnnnnnnnncattctataattctccccaagagacttattcaaatacgagtttaagtaatagctgcagagcctggggtgagaaagctgggcatggtagtgcatgcacnnnnnnnnnnnnnnnnnnnnnnnnnnnnnnnnnnnnnnnnnnnnnnnnnnnnnnnnnnnnnnntgcagtgagctgtgattgcaatattgtactctagtctgggcaacagaatgagatcctgtcttaaaaaaaacannnnnnnnnnnagatggaaaagtttgcagaaagaggcactaatcaatcatcaaacgtaatttttttcccctgaaacacagcaatattagattgctgttctttntcgccttctgcttgcttcccatgaaggatgaagaggcagctgcaattgctgttttgtattttcaagtcttcctgatagcttcttattaaactgattcttgatctgaggctcattctgtggaaaatctagggatcttgtttttggagcctgttctttgaaatttcttctagagcttttagatccagataaagagtggaaaaacactgattctaactttctggtttctgtacttggcttgattttgtcatttcttgtatccccatgagtttcacctgtatcttctttaagaaacactttttctagtggtttttgttccttaactgaagaatgacaactactttccttctttcgtgtccgtctgactttcccaatgaagaagtcgtcaccgctatcactatcttcagacatggaagactgcttgtaaaacctttcttctgtgctatcatcaaaatattccttctcctcttcacaaaattcttctccgccatcactgttaccagagagtgagctatcagatcctttgttttttttggtttgacttagagttttcagttttgggtcagcaggtgtcttctgggactcaagggaaactacagaatccttttctgaaggctttgatggagaatttgcaatagtcactgctttaggtccatgttccatctttgcctcgtgccgaattcgccacccaggcc

SEQ ID NO: 312436 - DNA, 823 bp, Homo Sapiens
  misc_feature (47)..(47): n is a, c, g, or t
  misc_feature (59)..(59): n is a, c, g, or t
ttttttacttattcactcaacaatcatttattgtttgtgtgcaaggntggtgttaggtncaagagcagaaggaagaagatacaaatatgaatgggcatattctgccctccaggaacatacaatctaagagtgattaattgcatacaaataattgtaataccagatagaatgtggtaagtgccatgggagatacttactatagggaagctttcttagctcttaacttcaaagaccaggtcaggttttgtcctactgtagtctgtggcaggcatgaaaaggcagctgaggggacctgctaggctttgatgaactgagctgcatcttggatttcgcttcctcttctttctcagccgaggttacggtgattagcaagggcagttgctaccactataaagatacatgaagaagcagagcaagtggaaaccaagcttgatcatggcttctttcatgtgtgacttcagctgccctcgattgtgtatttctgttggatcaaacactcccatgttaccactcggcaccataatgtatcgatatatattccaagtggcaacaggtaagttgagaaggaagatgaaccagtgcaatgacatgagcagtaatacagtgacaatggtatggccaatcaattctggaattacccacttgtttaattttgagcaacatgatctagcattaatgtaatcacattctaaatcagacaatgtaattatgaagtagaccgagaggaagatgagcgcgcaacaatcgaggagagagaagacgaacaccaccgcctccatcctcctcctccgtcgccgccgctccttccgtcaaacccgctcgg

SEQ ID NO: 312437 - DNA, 735 bp, Homo Sapiens
  misc_feature (104)..(104): n is a, c, g, or t
cccaaaaaaccgaaaatgggtttttaggaaaaactttttttcggaggggcccgaacgccggcccgacacaggaacgttatttttaagagggcgaggccaggggnggggtttttttaaatactttatatggtaaaaatacagcaaaaatagttttttgttccaagaggaaaatatatactgctatggtcacggttctaaggatgatttaagaagtctctggctcctcaactgtgcactgtagtgtaggctgacttcaaccacggcttctccagcttcagtcatttatcaaagctaagatcatactataaagatacatgaagaagcagagcaagtggaaaccaagcttgatcatggcttctttcatgtgtgacttcagctgccctcgattgtgtatttctgttggatcaaacactcccatgttaccactcggcaccataatgtatcgatatatattccaagtggcaacaggtaagttgagaaggaagatgaaccagtgcaatgacatgagcagtaatacagtgacaatggtatggccaatcaattctggaattacccacttgtttaattttgagcaacatgatctagcattaatgtaatcacattctaaatcagacaatgtaattatgaagtagaccgagaggaagatgagcgcgcaacaatcgaggagagagaagacgaacaccaccgcctccatcctcctcctccgtcgccgccgctccttccgtcaaacccccc

SEQ ID NO: 312438 - DNA, 2553 bp, Homo Sapiens
  misc_feature (362)..(362): n is a, c, g, or t
  misc_feature (1732)..(1732): n is a, c, g, or t
  misc_feature (1771)..(1771): n is a, c, g, or t
  misc_feature (1834)..(1834): n is a, c, g, or t
  misc_feature (1882)..(1882): n is a, c, g, or t
  misc_feature (1905)..(1905): n is a, c, g, or t
  misc_feature (1910)..(1910): n is a, c, g, or t
caagctccagcaatttttattttcatgaatgagagttggggatcagctgttaggttctgtgcccaggacactgactgctgcctggcgcccactctctatacagtcattaacagcaactccctcataggaggctccagccagagtcaggggcaacctgtgagcagtcaggaattgcctagctgactctagtttttgccagtgacctagtgtatactggggaatgcagttcttgtgtagatggaccaaagcagtggctcggcatctccttcaagtcctaattgtgtagcagctgcttcctgggccccgctgtttgaaacagctccctggagataagacacagccactagcctccagtgtctgtnaccaggaacctcccagcatcacagtcactctgaggccaggggggctcccgtcctgctcagggaaagcaactgagtcatacacgattcccaggactcctggatcttctgaagatggcaccaaatgtccaaatccctggacaggcagatgggctccttggtactgcagattcaccacagctacagacactgcagtgatggcactcagggcacgagccagaggggcagcctcagcagggagcagctcactgagcactagagatcaggcagaggcctgactcagaaggcattcccattacagttgtcagtcctctttgggattagactcccatagagatgaccagttcaggggcatggtgtggtcctgctgacccaggaaggtatagcttttgcttctcactggtaggggttggggaaggggaaggtggctattccattacctgaagctggaatggcactaataacgtggtcagcctccagactgctgtcccttagagatacctgagagcatgaaaacatttgagagacccagaaaatgagaatttgatgagtgaaaagagacttctggtgcctcactctcagtttcccaggcacccatgtggccggggagactgtgtactgacccaggatgaagagattgggtgactatgtagacttcacaaaaaatcattcctctgtgtactccaggaagtggaccagacaggccagtgtggctgttctgaaatgttcagtgaagctgggttctttcccctatctctaagccacttataagtactacttctatccacagacttgcataggctctttgaggaaggttcacaaatagggcctaggattctggggtagcccatgtctaagtagcttctaaggcacaaaaacaatgaggaactccagtcctatcggccctggcctagttaagccacttggataaagatggaaacactgacaggttcattacactccaggggttcccctaccttccagcgcccttttgcctggaggctgagcccacagaccggctggccttgagaacactgacccccctactagtcaggtgggtttcaagggcctgaggcaacatctctagacctccacgaagtgaccactggctccagcgctcagccaaggcctggcgaatgagtgctgagtctggctgtggggtccgccctgcccccagcagcaggcccagtaatatggaacgatgggtttgctcagcttggaagagactgggaaagcaggacctgatgctgagctcacggctgttgcctgcaaacactccacggcagagactgtctcatggctagagacgccacctcaggtccaaggcggcgctgggcaaaactgtgcacagtctcatcaggctctttgccccngggcttggtcagctccctcagcccagcccaaaacagagntttggagaaggggggtgaagggcggagtagccccctgaggccagtgggtagggcatgcaggcnccgcccacgtagaggaacctgttctgggcagctgggtggtctccccgnacaggcagcacttctgaatccangccangctcagaaacctgctctccacatgccctcagaagaggagaaactaagggaagatctgacccaccaaacatacttcctcccctaaactctattccccaatggaagccccctccacaacctctcctagacatcccacaagcctctcaccaggagcaaggtccgggcccctagggctcccgctggcttaattccccgaggtccaagctcaaagatagcaccattagggcctcgaacggagcgaatccagcctcccagacgctcactgctctccactaggaccaccttaggggggcagggggcccggctcaggtggtaactggcggccaagccgctgatgcctccgcccagcacgaccacggtccggcccatgcggaaacccacaataggtagggatgagagaaaatgagggagaaggagatcgaggtcctaagaccgtaccccgccggcgctctgctgggtgcagataagggccacaccctcgctatcggccctcgcagggctcgggcggcgggcagtacgcctgagttctgaggtgctctgcttgccacacctctgtaggccaacaagtgcttcaaatccgctactcccacccccagccttttcggtctctcctacgctccgtccactctgttctcgcggcacgc

SEQ ID NO: 312439 - DNA, 611 bp, Homo Sapiens
cagcccagcccaaaacagaggtttggagaaggggggtgaagggcggagtagccccctgaggccagtgggtagggcatgcagggcacggcccacgtagaggaacctgttctgggcagctgggtggtctccccggacaggcagcacttctgaatccaagccaagctcagaaacctgctctccacatgccaggagcaaggtccgggcccctagggctcccgctggcctaattccccgaggtccaagctcaaagatagcaccattagggcctcgaacggagcgaatccagcctcccagacgctcactgctctccactaggaccaccttaggggggcagggggcccggctcaggtggtaactggcggccaagccgctgatgcctccgcccagcacgaccacggtccggcccatgcggaaacccacaataggtagggatgagagaaaatgagggagaaggagatcgaggtcctaagaccgtaccccgccggcgctctgctgggtgcagataagggccacaccctcgctatcggccctcgcagggctcgggcggcgggcagtacgcctgagttctgaggtgctctgcttgccacacctctgtaggccaacaagtgctt

SEQ ID NO: 312440 - DNA, 557 bp, Homo Sapiens
tttttcaagctccagcaatttttattttcatgaatgagagttggggatcagctgttaggttctgtgcccaggacactgactgctgcctggcgcccactctctatacagtcattaacagcaactccctcataggaggctccagccggagatctagtgtatactggggaatgcagttcttgtgtagatggcccaagcagtggctcggcatctccttcagtcctaatgtgtgtagcagctgcttcctgggcccgctgttgaaccagtctcctgagataagacacagccactagcctccagtgtctgtaaccaggaacctcgcagcatcacagtcactcttaggccaggtgggcctccttccttctcagggaaagcaactgagtcatacacgattcccaggactcctggatcttcttaatatggtaccaaatgtccaaatccctggacaggcagatgggctccttggtactgcagattcacacagctacagacactgcagtgatggcactcagggcacgagccagaggggcagcctcagcagggagcagctcactgagcac

SEQ ID NO: 312441 - DNA, 1256 bp, Homo Sapiens
atggcatcatgccctttttcataagcccacatcaaacatgtctgctcatctttttcaccactagacctgctgggatcacaagccactagattcatatcagctccattatccagtaagaactgaaccaggcgaatgtgaccgtggtagcaagcagagtgtaatccagtgtgcccatcccttccttggtggttgatgtttatgacattctgatcaagaagaaatttgactaggtcaatgctcttgccataggtacaagcactatgaaaagctgtttcactgaagatgttttccttagtcagactttctgttcctgatatttggatgatttccttggcaacttcaaatttgccattgtagcatgccaggtgtaagggggtatctccatagatattaacaacatgaggttgaacttccaaatcactttgcagcagatacttaactatatcatggtgtccaaatcgagaacagaaatggagtgggacatggtcttcattatcttgagcattcacatctgctttgctgccttcttccatcaagagttttgcaatattcaagaatccttttgcagatgctaggtggaggggtctatctccaacttcaccacttacatttacatcagcaccaaatttcaaaagaaggcgagttacctgttcatgtccatagtacgctgcaatatgcaatggagtgaaaaaaactgcatcttgaatattgacattagctccatgttgcaacagcacatcagcagcctctaggtggccagctattgtagcaatatggagggcagtgaggccaccgtatccaacctgctgtatatcagctccactgtgaagcagagaagtgatcaattctgcattatccttgtaaactgctaaatgcaaggctgtaaatccatttcttgtcagtcgagatgggcggagccctttcaacataagagttcgaatatgtgatttcttgcctccacaaatgcaacataaatgaagtagagacagcccattttcagtgcggtaatttaaattgactttactgaaggcttcatcagagccaaatatattccttagttctgtcagttctttttccttgatctgcaggtcatcttctaatctttctattgtgataacatatgattcactgacttttttcttccattcatcagtacaagtttgggttggtctagatttataatttcccatttattataagtttcttcctttctccagggcagttcttcaagttataagattccaagttcaagtgcc

SEQ ID NO: 312442 - DNA, 949 bp, Homo Sapiens
gggcagatgctgaatgtgaatatccatttaactactggagggaggctggagagtcccacggtgtctaccatgattcattatttgggcccagaggattccctgaggcctagtatttggctcagttggctcagtaacggacactatgatgctgtatttgatcactcctatcctaacccagagtacgacaactggtgcaaacaaactcaagtgcaaaggaaacgcgacgaagaacttgccaaatctatggccatatccttgtctaaaatgtatattgaacaaaatgcatgctcttgaaatgtctcaaaaccttacaccctgggaataattgcatatataacttgtgtttggagaatcacatgaactttaatcagggtaatagcactttcaaacttgctagtagattttactgtaggtgtaatgccttaatcatctttttgaatgttttctcagagctggaggttgctgggcacctaaatgatgtttcatgatagctttgggtgattttactgctatttataatttgctgtataaagtgagcattacttaatttgcaagctgatttctcacagtgtaaatttgttcattcctggtagtctattttctataaaaatgtatttttgcacaacatttttaaaaactggtgtaccttcatctatgacgtgttccattttgacaaacagctttcaggcgtaaatccagagaagtgctttatatgaaatgtattattttgaacagagtttgtgatttggtagttattttatgttgttgaaatttgaatttcacaattcttagataattatttcaaatggatattgatgcattcttgttaccagatgtttggcccattccattttgatgaaacagagctgttgttttggaagtcattatttttctagaaatggcgaatcttttaaagaaaattacttaatggaaggttgtgggaagggtg

SEQ ID NO: 312443 - DNA, 767 bp, Homo Sapiens
  misc_feature (28)..(28): n is a, c, g, or t
  misc_feature (116)..(116): n is a, c, g, or t
ttcccctactggaaccaggaaattaagnccaaatcattattccataatctttctgagcccaaagccctaaggtgggaagcaagtgataaaaacacaaaaccaaaagatgcatttcntatgaccatatgcaagaattttaagctttatatcaacattctgtaccagcaccagcccctctgaaaggaaaaagtgtagtcatgactgtccatctcttttcaaagcttccagtctttgaagcagtgcgtttccaaatgcttctcggtaggcggggctgagtgtatccaacaaggagtagactgtttcatggtagggagtctgtaaatgatcatctacctggtcaaaagcatagcctaccaccttgagccctgcttcagtgagttctaggcaatatctgtttctttcctttgtttccacattgatataggccacatcatccgcacaccgcaggcttttcgagacaaacatgttgttaacagcaaagagaacatcatttacaactgcttcagcttcgagcctcatgtctttcatgtcagttccttcaaaaccgttcagctctgaaccttcttcaaatcctgacatactgcttagctccatgggattacagtctgtttccattcttgatgatgcagaaagatcaagaatccagtacttgaagggaaggaatcctcacaggtcagtgaagtaggtcaccaaacagttgtgataatcagcaccgagctgcgcgcccggcgtcctcttcttccttcctccggaggcgactggagccc

SEQ ID NO: 312444 - DNA, 528 bp, Homo Sapiens
tgatcatcaaaagaacctggtgcgaagtcgaagtcgattttaattgcaacctcagaaccctctgtgggtctctgcaggccagagaggagcagcaggaatggcagcaggcctccaaggagccagattctcatcgttgcaggaggtacagtagttgggagaagaatcttcttgcatctgttgatcaatggacccatttgcttgtgtcacaagtacttctcctttgcccttgcagcttcatcctgagatgaattctcagagttctcctttgaggttttctttcagtctcatccgtaaccgttttttcccctgtctatgctgagcaacttctgttgcccaccaacaaccaatagcttgtctgagggaagaaatcaactccgacttctttgcaaaactgaaatctctgtgaaatagccagatgcgcacaccaaataagggtttctaaagagaacccaagttacttttcaattaaaaaaataaaatctctgatctagtctgtattcaggggaatgccgaagtcctgttaagtgt

SEQ ID NO: 312445 - DNA, 656 bp, Homo Sapiens
gtcaacatttaatagcctccacttctgttaagataatgtatactgctgaggaattactattaatagctatcaacataccaccattaaattaaggtattcactttagattttttattaaagcttttttcttgcacactgatcgttgtgtttctaagctgattttttcagctctaatatacctatggttaaaaagtataaaaacttaaattgatatttagatatatgttttcctattagtttatgttttaaaaagacaaaattgtatctgtcagtccctgaaggcagtttgtttttatactctctcacatttgtatttgttttttaaatggcagtattttagaagatttggagaaaagtccacataataatgttttcttaaaagcttttaaagtttttgctgtacttcaatttacttcttccatcagaaaactaagaacaaagtgttgctcagtctgttccgctgacctaaatttgtgttttcagcacttggctcagccaattcactgagtgaaggaattgctttatgaggcaaagcatgtgaaagttctaaagtatggttagattgtaggtcgtgctctatatggaaacatcaaaccattactacagagaaatgataaggcattggatccactattgaaattattatttttggatca

SEQ ID NO: 312446 - DNA, 587 bp, Homo Sapiens
  misc_feature (91)..(145): n is a, c, g, or t
  misc_feature (168)..(210): n is a, c, g, or t
ataagaaagaacaaaacaaaccccacaaaaattagctgggtatgatggcacgtgcctgtagtcccagttactcaggatgattgattgagcnnnnnnnnnnnnnnnnnnnnnnnnnnnnnnnnnnnnnnnnnnnnnnnnnnnnnnnagaaagagtgagatcctggctcnnnnnnnnnnnnnnnnnnnnnnnnnnnnnnnnnnnnnnnnnnnggaagactgaaagagaatgaaaagctggggagaggaaataaaaataaagaaggaagagtgtttcatttatatctgaatgaaaatatgaatgactctaagtaattgaattaattaaaatgagccaacttttttttaacaatttacattttatttctatgggaaaaaataaatattcctcttctaacaaacccatgcttgattttcattaattgaattccaaatcatcctagccatgtgtccttccatttaggttactggggcaaatcagtaagaaagttcttatatttatgctccaaataattctgaagtcctcttactagctgtgaaagctagtactattaagaaagaaaacaaaattcccaaaagatagctttcac

SEQ ID NO: 312447 - DNA, 486 bp, Homo Sapiens
tccgttttcgataaacgacacaccagttgctcattcaataatttttggtgctgtatttaagagtaaagtttctaatttcagtggtgtcatttttcttttgaagtgaaaaccatagggaatcatttggctctgtagaactttcacgtaaattaatataatttccaagcataaaggctacaatcatattgtaatcaatgtaagccattgttatagtacatccctgacggctgcatctttcaaccatatcttcaatgctacctccatgaacactagacttatagagaagactcaaagaacacatttccaagcagcttgcgcagatgattttcatcattccatgtcaatcttgttgtcacttccattgttctatatctgtttctaggggttagatcaggcttaaattgaggattaactgttctgtctgatttatcgagcagccacggtttggagacagaaagttcttaagagatctgtggcttcagagac

SEQ ID NO: 312448 - DNA, 1445 bp, Homo Sapiens
  misc_feature (1348)..(1352): n is a, c, g, or t
  misc_feature (1354)..(1357): n is a, c, g, or t
  misc_feature (1359)..(1359): n is a, c, g, or t
  misc_feature (1361)..(1362): n is a, c, g, or t
  misc_feature (1365)..(1365): n is a, c, g, or t
gggacagatctcttaagaactttctgtctccaaaccgtggctgctcgataaatcagacagaacagttaatcctcaatttaagcctgatctaacccctagaaacaggaattaaggataacctagacgacataaagaggataattaaagccagagagcacagaaataggcttctagcagacatcagagactataggccctatgcagacttggtttcagaaattcgtattcttttggtgggtccagttgggtctggaaagtccagtttttttcaattcagtcaagtctatttttcatggccatgtgactggccaagccgtagtggggtctgatatcaccagcataaccgagcggtataggatatattctgttaaagatggaaaaaatggaaaatctctgccatttatgttgtgtgacactatggggctagatggggcagaaggagcaggactgtgcatggatgacattccccacatcttaaaaggttgtatgccagacagatatcagtttaattcccgtaaaccaattacacctgagcattctacttttatcacctctccatctctgaaggacaggattcactgtgtggcttatgtcttagacatcaactctattgacaatctctactctaaaatgttggcaaaagtgaagcaagttcacaaagaagtattaaactgtggtatagcatatgtggccttgcttactaaagtggatgattgcagtgaggttcttcaagacaactttttaaacatgagtagatctatgacttctcaaagccgggtcatgaatgtccataaaatgctaggcatttcctatttccaatattttgatggttgggaaattatgcttcagattttgcttttgttcgttttgccttctgtccttgggaacagtcatatctcaagttcaaaggccaaaacctgaggagcggtggggcttaggtaggtcctactgcaaaccacccctccatatttccgtacccatttacaattcagtttctgtgacatctttttaaacccactggaggaaaaatgagatattctctaatttattcttctataacactctatatagagctatgtgagtactaatcacattgaataatagttataaaattattgtatagacatctgcttcttaaacagattgtgagttctttgagaaacagcgtggattttacttatctgtgtattcacagagcttagcacagtgcctggtaatgagcaagcatacttgccattacttttccttcccactctctccaacatcacattcactttaaatttttctgtatatagaaagggaaaactagccttgggcaacatggatgaaacccccatctccactggcnnnnnannnnanannaanaaattaggaaaggaccaaacccaaccccccaaaaaattacctggggtatgaagggccacgggccctgttaatccccagtt

SEQ ID NO: 312449 - DNA, 1386 bp, Homo Sapiens
ggtacccggccggaatgcttgggatatcgtcgacccacgcgtccgaagtgaaccaatttcaaatgtgatcacaaagttggaaaagcttttattcacagaggttgggtagtgtgggaggggagtttaattactcagatggcctgttatttgatttcctcctttgggaaaagaattatgtagataccacatggagacagggaaacaattgtggtaaaactgtggatcctgttgctatttgcccagtgagaaaacagattctggtatttgatttggtttttctctttgtttccagaatggatgaaagtccatgaacctcctaagttataatttaaatttgtttggggcaaggtgattttatagtcgagacagagccctaggtccttcctgccccatcactcacttacgacatcacttccattgtgtgcatgtttgttatagaggaggttttaggctacaatatttgtttaacctccctaagaactttcaaggcatctgtcctgaaagctgttaatttatggtctagcagatttatattatatgcagataataattaactggggataaaagaatggcaaggggtgacacaaagtagcaaactgaatacttctccaatagcaaccccaagctacctcctcaccctgcatcttggagggaggcaggaaatttcttttgaaataaagtgctggagctgaattctgcattacttatcgttgctgctgaaaccacctataaaagacttgctggctaatgtgcattgtcatataatgtacactgtcacatctttacagtcttgtatgttatagaatacaaaataagttgatggtttagttggtgtgagcttttgttgtttgttagtttggcttcataggttatatgccaagatagtatttgataagtcaatgacatttggatgttttcttcaaagaattttatttgacccagatttcttataaagttatcttacattaaggatgtcattttcatcagacttctttctacaatattattcatgaagcataatggttgcatttctccaaatttatggctgaaagggtagtgtggcttctaaaggtatcatgttgtcttgggcttgtcatctcttcggggaagattatattgctctaaaaaggtaatccggtgaataatttggagttatcggagaaatttcggttcctggggaaggccaatttattgacccaaggatcttataaggggagggttattttggggaccgaataaatggggaataggcataaaggagatgagaaactgcgagaagaggagaggagaatagggggaaggagaaaaaatgtgtagaatgtgtataaagagagaatactaatgatgaggtgaacgaatacgatatgtatacaatatacgttaatg

SEQ ID NO: 312450 - DNA, 762 bp, Homo Sapiens
gggggtgtccagagccaggcagcaaggaccagaggaaggtggacagagaccgaaaggacaaaggagagacacagagaaaaaaagagaccaaccccaaagggacaaagaccccaacgtttgtccacattgccgcagaggcagctggagccagtgctgcctgtccgtccccatgggccaccataggccatggctgcacgcttctgtcctctgggctggggtggccagcctgctcctccccccggccatgacccagcagctcagaggggatgggctaggcttcagaaaccggaacaacagcactggagtcgccgggctctccgaggaggcatcagcagagcttcgccaccacctccacagccctagagaccatccagatgagaacaaggatgtttccacagagaatgggcatcatttctggagccacccagaccgtgaaaaggaggatgaagatgtctccaaggaatatgggcacctactcccaggccacaggtcccaagaccacaaagtcggagatgagggtgtctcaggtgaggaggtctttgcagagcatggtgggcaggcccgtgggcacagaggccacgggagtgaagacacggaagactcagctgagcacaggcaccacctccccagccacaggagccacagccatcaagacgaggatgaggatgaggttgtgtccagtgagcatcaccatcatatcctcaggcatggacaccgaggccatgatggggaagatgatgaaggagaagaggaggaggagga

SEQ ID NO: 312451 - DNA, 1056 bp, Homo Sapiens
  misc_feature (318)..(339): n is a, c, g, or t
  misc_feature (984)..(1011): n is a, c, g, or t
aaattcccaaaggggccctggaccgtgggttccaatttggtccaaaggttgccatggcaaggaaaaaaactggcccagcccccaaaccaggtgttattaaatccataagccaaaatgggaactttaaggggaggtcctttatccattaaagggtagttccaaggtaattaatatggaaaaacctggatgtgtaagcttgatctttaagggggacagggaccccccaaccaatacatgcagattttggtgggtgtggacagaagggtactttttgacattcagtttttgctatatagaaacagaatgaataaatgaacnnnnnnnnnnnnnnnnnnnnnngcaagaggtaagtaaaagattcaatttgattcttctagaggggggaaaaaggagttgaaagtaggtcttcattttgcagtcatcatctgtacgaattcttcatagttgacttgtccgtctccatcaatatctgcttctctgatcatttcatctacttcttcatctgttagtttttctcctaagtttgtcatgacgtgacgtagttctgctgcactgatataaccattgccatccttgtcaaagactcggaatgcctcacggatttcttcttcactatctgtatctttcatttttctagccatcatagtcaaaaattcggggaagtcaatggtgccattaccatcagcatccacttcattgatcatatcctgcaattcagcttctgttgggttctgacccagtgacctcatgacagttccaagttcctttgttgtgatggtgccatcgccatctttatcaaatagggagaaggcttccttgaattcagcaatctgttcttcggtcagctgatcagccatggtgcgagcgaagggaggaagagcagagggagcgagggtggctgcaccagcgcgggggctgcgacggcgggggtacctccgatgccgctgctgctcctgctgctgctaaggcgcgctgtgcgctatnnnnnnnnnnnnnnnnnnnnnnnnnnnngactacgagtaacggcacggcgtccacgacactcccagcaccact

SEQ ID NO: 312452 - DNA, 808 bp, Homo Sapiens
  misc_feature (109)..(109): n is a, c, g, or t
  misc_feature (722)..(722): n is a, c, g, or t
  misc_feature (733)..(733): n is a, c, g, or t
tattggtgccgtgagtgctcggtttgttcagcttcagcatggtgatattgataaacgtgtggaggtaaagccatatgtgctagatgaccagatgtgtgatgaatgccanggcgcacgctgtggtggaaaatttgctccctttttttgtgccaatgtcacttgcctgcagtattactgtgagttttgttgggcaaatatccactctcgtgctggacgtgagttccataagccattggtaaaggaaggtgctgatcgcccacgtcagatccacttccgctggaactaagaatagcaaactggcctctgtttaacaaggaaagaaagggtgcatgtggcttactgtgtctgaagatactgacatgcagaagaaataagtgcattcttctgcttttcaccccagctatcaatacatgcatctttatcagcagccaaaacactacaagcctcttgtttttcaccaaaaccctacatctcaggcttactaatttttgtgatattttcatgttcaaataaaatgtttttttgtattttctccaagttatttttatatgtaaagttaaaattagatatgagaatgttttgcgtaggggcaacacagtctgctgctatatagtgggggaagcgtgcacttatttctaaacatgggtttttaacttcaagatctgccccagtaatttaccaaaggtagcaaaataatagtgaagatggaatatgtctgctancaatgcttatntttattgttgctattttcagtgtatacataaactaaaaattagggttgatttttttgctctccattttgacttgc

SEQ ID NO: 312453 - DNA, 1414 bp, Homo Sapiens
  misc_feature (1354)..(1354): n is a, c, g, or t
  misc_feature (1378)..(1378): n is a, c, g, or t
ggcaggggctggtacggtccggaattacgggatatcgtcgaccacgcgtcgctgcgctaacccccagcccacagagcctgaattgtaagcaacttgcttctaaatgcccagttcacttctttgcagagccttttacccctgcacagtttagaacagagggaccaaatgcttctaggagtcaactggctggccagtctgggtctgggttggatctccaattgcctcttgcaggctgagtccctccatgcaaaagtggggctaaatgaagtgtgttaaggggtcggctaagtgggacattagtaactgcacactatttcccgtctactgagtaaaccctatctgtgattcccccaaacatctggcatggctccctttgtccttcctgtgccctgcaaatattagcaaagaagcttcatgccaggttaggaaggcagcattccatgaccagaaacagggacaaagaaatccccccttcagaacagaggcatttaaaatggaaaagagagattggattttggtgggtaacttagaaggatggcatctccatgtagaataaatgaagaaagggaggcccagccgcaggaaggcagaataaatccttgggagtcattaccacgccttgaccttcccaaggttactcagcagcagagagccctgggtgacttcaggtggagagcactagaagtggtttcctgataaccagcaaggatatcagagctgggaaattcatgtggatctggggactgagtgtgggagtgcagagaaagaaagggaaactggctgaggggataccataaaaagaggatgatttcagaaggagaaggaaaaagaaagtaatgccacacattgtgcttggcccctggtaagcagaggctttggggtcctagtccagtgcttctccaacactgaagtgcttgcagatcatctggggacctggtttgaatggagattctgattcagtgggttgggggcagagtttctgcagttccatcaggtcccccccaggtgcaggtgctgacaatactgctgccttacccgccatacattaaggagcagggtcctggtcctaaagagttattcaaatgaaggtggttcgacgccccgaacctcacctgacctcaactaacccttaaaaatgcacacctcatgagtctacctgagcattcaggcagcactgacaatagttatgcctgtactaaggagcatgattttaagaggctttggcccaatgcctataaaatgcccatttcgaagatatacaaaaacatacttcaaaaatgttaaacccttaccaacagcttttcccaggagaacatttgtattaccattacttgtataaatacacttcctgctntaacttgacccaggtggctagcanattagaaacaccattcatctctaacatatgatactg

SEQ ID NO: 312454 - DNA, 544 bp, Homo Sapiens
gtgtctactatgtgtgttttcagataataacaatgactgttcttgtgtgtccttacatctcacacgtctgccgtaagtacttccatttttcctagaggagcatcaactttaacatctttgcgaacttatagtgggaagtttactgtattaattatctgtgggtaaaaattaacctagactgggttaaaacaacaaatatgtattgtctcattttcctgtatgtcagtaattgggcgcacttcgctggatcctcaggcatgtgttctcacacagaggctgtagtcagaatcttggctggggcttcagtcagcttaaggcttgactggggaggagccccttctaacatcactcacatagttgtcggcaggcttcagttctttgctgagtgttggctggaggtcgccctcatatccttgccaagtgggctataaacagggcagctcatgatatggcacctggcctccatcatagaaagtaagcaaaaaaaggaagagagggcatgcatgcaagatggaagccagagtctttcagtaacctaatgttc

SEQ ID NO: 312455 - DNA, 883 bp, Homo Sapiens
aatccttgctgcctttgcaagtcctggtgaaagcaatggggagctttgctggctggttttgtagtctcaacaattccatgtctgtgtttagctgagtaactgctatcatttagaacagtaaaatttttatagatttcaaatttgaaaattcatgtacactcagttatctaataaggggccaccgacgctgtttttaaaactattttgaagttataaaaaggtagaacatctgactgatgatgttcacataaagagacagacagactatcatgttgcagacatgaaaacagcatgtcaggtttttcctttccttccatgccatgggctacccatctcttcccactagatcacctggtgaggagggagcacctggctgactcatgcagagtttggccaatcagagaattgtgtggtctccagctctactttccttaaacaaatcctttctgttttctgagctgcagtgctaaaacagatccctaaaaggtaatagcatcttccagactagtttaattatttcctttataagaatatgacataaatttttattatagaaataatgtcattataattttagtgctagtacttgtgggttttctgtatttgtatcaccttgaaatttgttccatgaatagaaaatacttctttattcatgttttcaatcacttagaattattttaaatttattttgggtttgtgagagataataagattaagaacttcatcatttcagtgactttcctccaactctctgaatctgctacctcttattatatgtcccttagcagtacttttccagttaggttcgttaccctcctcattagctaaacctctttatcttgtgcctcaaaagagcttttacttttcttagaaacgatttata

SEQ ID NO: 312456 - DNA, 739 bp, Homo Sapiens
  misc_feature (45)..(45): n is a, c, g, or t
  misc_feature (62)..(62): n is a, c, g, or t
agtccacttgcgggatatgcacaccgtccctcatactgagttggnaagtgtccaggactgcngggcattcctgaggagtgaaagtgagtctggggttttgggatgcctgtaagtaagggggaatgtctatcccgtcccacagccactgttcactcataaagctcccccgcatacccaacaattggacacattcatggtaagcacaatggttctcctagatctacaaacagattttttcctggcttaggaagggatgcatctgcttatagtttttgtataaaggaatggaacatgccgcgggcgattttcagggggagttgttggttttgaggctttggctttggctataatctgttctctctttatgtcctcaagcacctgagtgtttactccccattgtccaattttggtgaagcaaagccactgcttccctctggggcaaatagccccattacgactgccacatactcctagattctttactttataataactctttcctgattcaacacattcctcgattaagtttccataacaggatctttctatatgagtatggtaagtaaagtattgttgcatctcccctctgtagtgcaaagactgataacactcacggcagctcggaggggctgctgtggacagcaggacagctactgacagtattaggatcgtggtgagggatattcccatatctagacttttggttggaagagaggtatagaaagtggttgggtagata

SEQ ID NO: 312457 - DNA, 2306 bp, Homo Sapiens
accaaaagaaatctttattcttcagcaggtagacaacatctgccagccctggtcctcagggccacactcatatgcactcacccctcagcagcatatcgccccttttctgacatataaatgcaagagacccaggaccctagatctttcttcaaacgcaagtgtctcacacacacttattttacaaatccactagaaatatggactcttatgttctttgtacagccatgcaacagaggcctagcatttgtgctgtgtctttgggaaaggcagtcagagaccagtggtttccctgctttggggaagatggctcaacagttagtaatcccaggttagattgtcagaacagtctaggccaggactgagggctcagctgccagggctccccaacagaaaccactcccctctggctgacactgcttccttgcgcaccagtctcttcttgtcatccaggggtttggctaaggcccgaatcacctgtggtttgtacggcagcagcacaggggtgggcaggcgagtgagagcatgcatgcactgcagtgcggcgatccggacagccatggaagggctagagctgaggttcagaaacttggtgacgagggtgtccacgtgaagactcatgacttggggtgcttccagtagaagaggctgaaggcagctgagggtggagagctgcaccacacagtcagggcaggacagggcctccagcagcaaggaaagaagcgtgggcagctctggcaagagtacaggcttgggcagcctgttaagtacatgagaaagacccttcaagtagtttggcttcacatcttggggagcagcatggaagccctggaccaaagcaggcacattatctgtgaagaaccgctggcggaacatgatccgcacttcggcatggccagcacgagtcagcacatcagtgcagtcagacatgagcagagagaagccatcagctgctgctggacctaattctgggtcactcaggaggcccatgagccgggctgtaaggcaggagctgagaggatggtatctgagcactagggcctttgttacccagagaagaagagtgaaggcctgactacgacagggcccagagcccaggccagcctccactttgtccacagctagctgtaggaattcatccagctgctgccctgcagggtgcttgttgaggagtcctgcaaagcacttggcagcagcggtggaagaaaaggggcagctgtggcagcagctcagttccaaaagctcccgcatgagttggttcagctgagggatttccacatttcgaggcagggagcagacaaaggccataagcagtgcaatcagccgcctctgccctgaggagccatcctggaatggctggaatctgctcgggaagctgttttcaggcagaaaggacacgttgccatccaagaagaggggcacaatgtgtgtcacactctgggcagctaactcagggctcaggtgggttgtagcagtgccaatgacagacaccatggcagccaacacctcatcctcccaatagtacttttctcagaactgagggctccttcttctggcatagaggcctgcacagccaaggcaagcaggcaaggtatagctgtctggtggaaataccagcaactctcagggtcctgctgacatttttctgccatctgtctgaggctctgacagacagcaataacgtcactggattgtgcaaccatattccctctgttcacttgccagagatgctgcagcagcagaggcagtgtctccttgacgatgctgggatgtgttgatacatgcgtgacaagggcttgcagacagcacagatgccgggagcattgggtgggctcatctccgttagtcaaatttgactcccctacacgcagctcctcagcgagcttgggtacgaggtggctgctgaaggccacagggtagagagcagccagggttcctgatgcttccagtgctgccaccctgcaactctgggaatcctccttcaggaagctcagtctgtacaggtgacccactgccagctccaagtcctcataagataggagatctggctgggcacccaagactgtcagtgtacggatgccaacaagctgaagctgggtgctgggcgtctgttagagccatgaataccagtgagcacagctggtccttgacagccattcagacggcctttgatctttgtcttcatagctccatttctgctgcagcttcaagcaaacccaggagcatttcaaggcattgtccgccgtctggctgctctgactgtgcttgtggaactcgacgcgtgggtcgacatatcccgaacttccgag

SEQ ID NO: 312458 - DNA, 736 bp, Homo Sapiens
  misc_feature (63)..(75): n is a, c, g, or t
  misc_feature (163)..(172): n is a, c, g, or t
  misc_feature (217)..(249): n is a, c, g, or t
  misc_feature (594)..(621): n is a, c, g, or t
  misc_feature (630)..(695): n is a, c, g, or t
  misc_feature (698)..(698): n is a, c, g, or t
caattaaacaaacattatttgaacagttactgcatgccgcgcactgtgttgggcttagtaatnnnnnnnnnnnnngataagtgcttgttctagtataaattaaaaggtccaagggaatttaatctggaagagaacatatgccaatttttaaactatgacagcnnnnnnnnnnctctttccattcaaatagtcctggttcattcccagaagggcacannnnnnnnnnnnnnnnnnnnnnnnnnnnnnnnncaaaagccaaggtgtatgctctcaagttccaaagatgttatcaaaagctgaaatcatttgtttggtcattcagcaagctaattgagtctctgttatataccaagcactggggataccatggcgaaaaacaactttgttccttcctcctagaacttacattttaatggaaatagacaaaacacatcttcttaacggatggtgacctataaccattaatgttgaaaatggaagagacttgcttccaaaagattaaaaggagttgttcttttctccttcagaaaaataccagatcatttcctaaaatctccagtcccaagtattacatcgtggtttccctccccgacnnnnnnnnnnnnnnnnnnnnnnnnnnnngagatggannnnnnnnnnnnnnnnnnnnnnnnnnnnnnnnnnnnnnnnnnnnnnnnnnnnnnnnnnnnnnnnnntgngttcaggagatctcctctgtcagcgtcccaagtagctg

SEQ ID NO: 312459 - DNA, 803 bp, Homo Sapiens
  misc_feature (52)..(62): n is a, c, g, or t
caaattttatttcacgaaaagtttttttaaagaacagaaacttttccatttnnnnnnnnnnngcagacttctggttcaagatagctcactggaatacatgtttacctctttctttcctaaattgcattgaattgataggaaggatggcggaatcttaaagtgatacatgctaactgtagaaaaaaatagaaaatgcacataagcaaaaggaaacatttaaatgctatctttcaaagataactactcttaaaaccttgagtatcttttcagacctttttcttggcaaatgaatccatattgacatatttgatttttttaaaaacatggaaacgtactgttttgtaaattctttttaactgcacatctactgttcataaatatacctctgtaacataactttttgtggttctaatgtactctgttgtatagctaatacaagttaggatgcttttggccagaggtaacagtgtccaaatataattggcctaagtaacctaggaaattgtttgacataacacagggttcaggggtgtcattaaagacacactttttttgccttgacctcagttggtttgttttgccttaggctattccacctctcgatcacaagagctgctgctataacttccagttttacatctttgtaaaattgtatctcaaaggcagaaaaggccatttcgtctctcatttgttttatccatgaggaagatttttaacaaaagcctccagaagatttcccctcagtttccattgacttagatcaggttacagagaaaggcaatgtctgacatttttggtctctg

SEQ ID NO: 312460 - DNA, 1016 bp, Homo Sapiens
  misc_feature (75)..(105): n is a, c, g, or t
gctcgttatcaccgtctattgggacgtcgtatacttcccttgtcctttatttatttccacacggtacgcacaatnnnnnnnnnnnnnnnnnnnnnnnnnnnnnnntaattatacctctccgggaaccaacggacatgttaaggtctcgcaccctggcccttaataagtctaaaaataacacgccgcttcccatgttaaatctgtaaaacaccggctgaccggaatataaaggaacggaaagtgtttcctgcttgctattgtttgcgcccaggaacgtgactgctgctgtttacacaagtccagacgctgccagggcctgttgggatcagctcagtctgtgactaaaacagctggatcatcgactctcttgacttgccaacaccaacccatttgactgcgactcccacgtgattctccacaaagcggatgtagttctgggcctgtgggggcaggtcctcccacctcctggcgcctgtggtgtctgctttccacccaggcagcgtttcatactcaacttcgaccttctgaagcatctcctggttagctggggaatagggagtccttttcccgttcagcttgtatgagacaccgactttaacctcacccagtacgtccaggatgtccagcttcgtcagggccagcgcagtgaatccgttgaccatgtgagcatatcttagaatcatcaggtcgagccagccgcagcgcctcttcctgcctgtggtcactccccactcgtgccgcgggtctgcagcaggcctccaatctcgttgatctgctcggtggggaaggccccgatgcccacacgtgtggtataggctttcaccacgccatacacgtcacctatgttctgcggggggatgcccaggcccgtgcacacaccgcccacggtgcagttggatgaagtcacaaggggtaggtcccgaagtcaatgtcgaggaggcggcgttgcaccctccaccagatcttctcgacgcgtggtcgacgatatcccgggaattccggaccgtaccgctgct

SEQ ID NO: 312461 - DNA, 1257 bp, Homo Sapiens
ttctctgcacaaatcttacagagctgaaaagtggagcccatttcacaatataattcatattgttcctgtgtaacttttatatggtcatgaggtgtaggttcacataatccagttaaatcaggattataactcctcccatcaggataaagataaaatccttccctgctgccatcaatcagggcttgaaataagggcttgttatgaggtatggtctgtaagatattcccatccccagtcacatagccaatggcccactgtcccaatcgagtgcaacttaaccggaaaatatagcttccgggtttggtgctatatttctgtagtcgtgctttaacttcatcatatgtgagaaatgccatgtaacctggatgtgtcacagctaagaaattccaattccgcaaaatagagccccaaggctgaaacagcctggtaaaaatatcaaattcaaaaactgaaatgtaatcattgcaagttaaatcaattgttgattttagagccattgcttccaggccagagctaatctggtggacctcatgaaggcactgtctgaatactttcccatggtacgatagttttgtctccaaaaaactttctcccagaattcagcagcatctgcttttgtgatacgaaagttatctcccctggaattgaccattgggaaagattgctttgatttctgccagcatgtgactgaagataagggacagttttgtgagatttcgtctgtcctgtgactgttcttcatacattctctccttgccttctttaaagagtcttattgcccgttttgactttttcataaggctatcaatgtagattttaaagtactcattctcactgagttgggcaagtttctggttgtcatcatatttactcaatataagtcgtaaatgctgatatgtatcaggcaaaatatcaagtatatatggtgggctatttttcaactgaagtttgggattttggcacagtcttaccactttgtccatgagcttccaagtcttctccacggtcctgcgatctgcggcagcttgcttagggggtccaactgcatcctgaatagcatcaataatacccaaaattcgaccttttcggggatttcctcctcgaccaccagggtttctgccattcattgagtttgccatctggaattttagttcgtcaagacaaatccacacccgctctcccctcccgcccgactcggggaggccgcgggacgccgcagcagcactagcaggaggaggagacggctcgctggacccc

SEQ ID NO: 312462 - DNA, 662 bp, Homo Sapiens
  misc_feature (51)..(63): n is a, c, g, or t
gcagaaggttaggtgtttatttgcactgcttttataccgtctaccaggttnnnnnnnnnnnnncagagactcttttgaaggcatagattttagatatcaacctcagactgtggcatttgggatttccagagcatgtcgttgaggcacttttgtacccagaggcacatggaatttaccaggctgtggagatgatgtgctctcgggatgctgctgccagtagcctggtgaggtagggaagacagcagtggacgcacagtcagggcccagtacacagcccgcctgcctttcgtgtgattgtccagcaggtggcacctgttccctcctgccacccaccttataattgcttccctcttgagcaccttcagccagaggtgggtgggaaggggaggacgtgcactgggttctgctatgtgccagcatctttggtataaggagccattccctggcccagggcaggcagccagtacccaccggggttggggatcattggtgggtctccattgcccatgctctccctgcctctcattagtagggaatcgatgggcccttgttatgccaaggcaatgctaaaatctctgctttacctgcccccttctcagcaaggctctctgtgggccacagctgatgctccatcagtgccaatttatgagacaagtttctgc

SEQ ID NO: 312463 - DNA, 1259 bp, Homo Sapiens
  misc_feature (251)..(251): n is a, c, g, or t
gcaggggaaccaccaagcacccacttctttcttccaattgtggcccagggagatccctcccccctggttcccgtacagactcattttttctgagaaaccaggatctgtgtgcatccaaagctctaatgaagttcttaaaggccacctgtcccagctccacaaatgagtcaacattctctaactgcacggaaaacttgcccttctccatatcgtagaccatcctcgagctgccaatgtagtcaaaagtttcnccttgaaagaagacaaacatgacattgcggggcagggtggtcacatcaggtgccttttgcaaagcttcagcagcagccagctgggtgacaaaggaagccactgcgctttcagcccctggggccacattccagaaaaaggaacgactatccagccgggtggcagcaaccacaaccctgtcgtcaggctttaatgtcccagttgtatttataggctttagcatgctccacacattgtaatcagacagggggtcacagacgatttctgggttgatgctgaaggtgctttggatggagctgcgccgcatgcaggtggcagtgctgatgacagcatgcatgtgtgaaaagagctgcatggcacatagtgggaaggttggtgctgagccattctgactcaggttgtgatcttgatagcactgcttgatgactttggtttcattttcatcttcaagaagaaagatggggaaactaaagtcttcataagccaaaccattgcccagcgaattccactgtatttctctgcagtgagcaaactctggcccataggaattggagtaaacaccaaacccatcatttgggcactgtacactaggagagaagcctgaggcaggactgggcttggtcaaggacactgcaagaccagcaattcggctggttctccctttcagcttctccattaaatccctggtaaaatgcttgctctccagcagaaccatgtaaggggggttggggccatcagtcaatacccactgtaggtcctcctctttctctactacgtggataacccctgtgtctccactaattgaagactggcagccaatctgatgagtggcgttgagcaggcgaacacagggagctgttttatttaaggggatatatatcttcctctccactgagtttcccctgcacaaacctgctagtaggacgcagaaagacagaaggcgaaggagaccccgacttcccgggtcagccccagagccaccccctgccgtagccatcttgcctctctcc

SEQ ID NO: 312464 - DNA, 1555 bp, Homo Sapiens
  misc_feature (132)..(132): n is a, c, g, or t
  misc_feature (136)..(136): n is a, c, g, or t
  misc_feature (252)..(273): n is a, c, g, or t
tgcaggttcccaataatcggtaagttaataaaatgaatatattttgatggcagaatgttgaaagacaagaaactaataaaaagtacttgtttttagctggaactagcatttggaagtaatgctagccagagntatnttccactgtgaaatgcacactcaaagtcctattgtaatattattttaagggtcttaggaggcccctcagaggagactgcaaggtcagggctaagagtatgagaaagtcctaagggnnnnnnnnnnnnnnnnnnnnnncctataaaccctgaggttgaaagctctggatagctcacctaaattactttcctctaatctaacccctcacagcctgaatttctgagtattgcttgaccagtagtgacacattcctgaggcactaatataacccaaatggaaactacaggtcctaggaaatccagataggtcacaatgggttcatgtgaagatcaaggtgagccagaagatctcatctgcaagccatttagcagccctttaactgtaaaaagcagttccactttcaaaggctacagagtttgtttacatacaaggtctccatgtaacatgttggatttcttcccactgtcatgggccaacccacactagactcagaagtcaagggaaagctctgccagctaaacacttcttatcaaagagggtgtgaagaaaccttgcaattttaacaataactaagcccagcatgtaaggtggtcttaccagagatcacttgcaggaacaggatattgataggaacttcagaattcaaacagcactcacataacatggaatttatgctgaaaatccccatgctttctctctcagaaaagagagggagcatacctgtgtggagagcttgtattttctcccctcccatccattcggtttacaactgaatagcgaatgtgaacttgaaactaatctttaataaatctataaaatgcaagatattatgaccaagttctgtactccgtttttactgaaatgacttctacttcatcaacgtacggtctgttcctgaagaaacttcctctttctgggtcaaattctgactgagaatgtaaaggtaggttatctttgagacttgagcttaaaactcctaccttttcataccacttgatctctgttgccctgtgaaaattctgtaaaccttcctcattgcatctgaggaatcatgctggaatgcttctttctggctcggagggttccaagacctccccagctagtggaccttcctagtccttatgccgttgctgtagcaatggggcaggtcaagtttcctgatcatagctgtgaagcactctggggcacctctgctcctggtatttcagggtgatattacatcactgctgctaattttggtagctctaaagtattctcttaaagacctctaagaacctgatatttatgctaataattacccagcaagaaacattagctgtagttttttgcaatatcactttatacagctaaaatcactttgtatatgtatagtaactcattgtatatatttgtctcttatgaataatgtgctaattacatc

SEQ ID NO: 312465 - DNA, 729 bp, Homo Sapiens
  misc_feature (43)..(51): n is a, c, g, or t
actctgatttctgaaatggtgaaacaatcctattaatcataannnnnnnnnaatttcagcagagctctgttacagatatgaaaacaaaatgtgacacaatgaagaagctgcataaaaatactgaaacctaaggtatctgtagtatataggatgtaccctggcttaccatagaaaagtctttagatagtaaatagcactaagtctaaaagcaaggagataagatttcatgttggatactgtttcaagaactgtatttggaatattaaaggaaatccttatgttagtaagtttaaaaaaccaaacatcatatacaaaataaaattttagtatgataaaacctagcttttcttattttttaaaaggacatcaaactatataattgctcaagagcaaagtttagtgttttggtgagctgtatttcatgttacttgtagcaattatatttggtgacatggatcgcattttccattttgctctttcttttgggaccatatctaatcaacagaagtactggaagcccaatgagtcaccgcagaattaattgctggagtcaggcaaatggcagtttaggagcttcagtaaaagaattgtagtgttttttacaagagaaaatccagtataattgcacatttacatacaaaaaaaagaggcacaaaacagattttcaccctctttccatagaagagctctaaattgataagcaaatggacactcaatacagctgaagga

SEQ ID NO: 312466 - DNA, 663 bp, Homo Sapiens
ataggaattaaccaagtagagctcaggaggattggtacgagtaaagaagttgggaaagtgatgtatgtaaaatgctaggccagggagcttgtaagtcaacaacagtgggcaaattgtatcagtagttgatcggtctccatcatctaagaccagaattgctcatcttacagatagctgtttatgttttttttcaggtataaatcctggtttattttgaaacttcctattacttaagtttactgacatttccaaggctttattatattaatatctggtcacactcaacacatgcatatatttttgaacactgaaatgcatacttcagttccatttgaggtccatatagattctgtgtgttttagtcttgcttaaattatttctactacttctttgcacccctttgctagttttctcagtgccgtagggtttattgaaatcataattggactctagtaattttttttaatgagagagagggaaactatatttgaaattggattgggacatttattttacttaaacggaagtttgcttatgacacataatctagatgggatatatcttatctatagtgtatccacctgctgtaattagatactgtatttgtatagccatttattttgctgtaagtactttatcattttaattaaattgattaagagg

SEQ ID NO: 312467 - DNA, 681 bp, Homo Sapiens
  misc_feature (499)..(499): n is a, c, g, or t
  misc_feature (597)..(597): n is a, c, g, or t
acagcccgtggcagcttcttggtgtgcggagccacacggccattggcaaagcagccatgaagatagaccaggcacccgcaggccttgtgttctgcacattctgatttctcatgaggaaaggccacagagagggaagaccgaggaagggaagggatggataccgatgtttaattaattgccacccactagagttatttgaggtttacatgtagcaaattcaagataatgtttaaatgcacttaaaatgcatctagctacgacacgtaaatgactaggctgctttcaacccaggagccttagactttttcttaaaaggatgaaatacgtataccagtcacacagtagtcaggttttacaaggattttcctcctcaacagaggtggaacaaaggcaagtcaatatcaatggggctgccaccctttgggaagggaatgtgggccagctccctgcatggggaccctgctccctgggttccctctggttttgatgttcatggtancaggatggggccccgtgattgagcgggattgagtatttcttgtgcactgagctcaatgttcaaatcttggggccgaccagcatggaaagaggagattnggcctgtgttgttctacaaaccatggtagagagtctcagccatgcacccacagggaacagccgacaggactcctccacctccca

SEQ ID NO: 312468 - DNA, 472 bp, Homo Sapiens
ccactcgctgccttgcctcatatcggtgtgcacaggtaacaatcttgcccccaggcccctggctccgaacactgactcccaaccactggttctccttgctttccttttgcatatcagctccctggtcgatgtccactctgtagcagtcagtctcctccaggctcaacgggcaagcgaagaggcctccagtgcgattcgcctgctgcccaggaagagccagggcctggggagcacccaccagcagcctctccaacactggaatccttctgcctgcctctgaattctggttgtagtcaaagcttgaaccatgggagtggcgaagggagccatttggactgtctcaagggccccctttctttgagcactggcttcaggccaacatttggaacttagccacaccaccaccaaccccctctcttgaagcccagccagatctcccagtatgtgaagccttgtctactcactctgtgtc

SEQ ID NO: 312469 - DNA, 1083 bp, Homo Sapiens
  misc_feature (851)..(851): n is a, c, g, or t
  misc_feature (865)..(923): n is a, c, g, or t
  misc_feature (1054)..(1054): n is a, c, g, or t
  misc_feature (1070)..(1070): n is a, c, g, or t
gcaaatagtgagtcagaatctggcattttctgcatgtcctccctgtcagatgatgatgatttgggatggtgcaattcctggccttcaactgtctggcactgttttttgaaaggcacacgactgtgctttcataagggaagcaataaggaatggcaagatgttgaagattttgctagagctgaaggctgtgataatgaggaagatcttcaaatgggcattcacaagggctatggttctgatggtctaaagttgttatcacatgaagaaagtgtatcatttggcgagtctgtactgaagttgacttttgatcctggtacagtagaagatggtttacttaccgtagagtgtaagctggaccaccctttctatgttaaaaataaaggttggtcatcattttatccaagcttgactgtggtacagcatggcattccatgttgtgaagttcatattggcgatgtatgtctacctcctggacaccccgatgccattaattttgatgattcaggtgtttttgatacatttaaaagctatgacttcacacctatggattcttctgcagtttatgtgttaagtagtatggctcgccagcgtcgtgcatctttgtcttgtggaggacctggtggtcaagactttgcaagatctggattcagtaaaaactgtggctcacctggatcatcacagctctcttccaattctttgtatgctaaagctgtcaaaaaccacagctcagggactgtgagtgccacttctcctaataagtgcaaaagaccaatgaatgccttcatgctttttgccaaaaaatacagagttgaatatactcagatgtatcccgggaaagataacagacgganctccgctgtgtcannnnnnnnnnnnnnnnnnnnnnnnnnnnnnnnnnnnnnnnnnnnnnnnnnnnnnnnnnnaaagccataagtgtgatccttggtgacaggtggaagaaatgaagaatgaagagagaagaatgtacacattagaagcaaaggctttggctgaagacagaacgtttaaatctgactgttggagacgaaaaganccattcagggctcacnaccacctttaacc

SEQ ID NO: 312470 - DNA, 441 bp, Homo Sapiens
  misc_feature (39)..(39): n is a, c, g, or t
gttaccaaattttttaaaatccccccttccgtacaattnaaaataaaaacatgtaatacactcctccctctcctttcctactgtacttttaggcacccacaggatatcaattttcaagccctattattaccctgatagacatatatgaagtttggaagaaaaataaggcaatttggtttaaaatgttgatagttttagcttaatgctctaatggagaaagcaaatcctcactcatattattaaatcatttcaagactcaatgctatcagtatcttatggtcacacgaattgaggacaaatggtgagaccttgatcttcttaagtctttccatcaagagtcaatgtatatgcaaatatagacttaagaacataagcatcctggtttaatgttgttgtgagccctgtggaaataaaattaaactcagtgaatgtttacaaatc

SEQ ID NO: 312471 - DNA, 1049 bp, Homo Sapiens
  misc_feature (944)..(944): n is a, c, g, or t
  misc_feature (965)..(965): n is a, c, g, or t
  misc_feature (981)..(981): n is a, c, g, or t
tcttccattctttgtatgctaaagctgtcaaaaaccacagctcagggactgtgagtgccacttctcctaataagtgcaaaagaccaatgaatgccttcatgctttttgccaaaaaatacagagttgaatatactcagatgtatccagggaaagataacagagccataagtgtgatccttggtgacaggtggaagaaaatgaagaatgaagagagaagaatgtacacattagaagcaaaggctttggctgaagaacagaaacgtttaaatcctgactgttggaagaggaaaagaaccaattcaggctcacaacaacattaaaccaggatgcttatgttcttaagtctatatttgcatatacattgactcttgatggaaagacttaagaagatcaaggtctcaccatttgtcctcaattcgtgtgaccataagatactgatagcattgagtcttgaaatgatttaataatatgagtgaggatttgctttctccattagagcattaagctaaaactatcaacattttaaaccaaattgccttatttttcttccaaacttcatatatgtctatcaggtaataataggcttgaaaattgatatcctgtggtgctaaagtacagtagaaagagaggagaagtgtatacatgttttattttaaattgtacgaaaggggaatttaaaaaatatgtaactgctgtttatacattggctccttactgcttattaatctgtattgtacacatgatgaaatgaagcagaagctgggagtcggcctttcctctagtaaccaccacatggctcagcatctgtgccaaacataggcgctcctagtctggtcagtgccaaagaggctaccagaacaatgggggcaggtggctggtggttggtgtcccagcctaagagccacctgctggcagtttaccatgggcatgcttgagtttgatgncaccaggttggcaggcagccntccctttatttatttnccattggagtacctaggcccagggccaaggttaaagttagtttaattggcctttggggtattagttta

SEQ ID NO: 312472 - DNA, 499 bp, Homo Sapiens
  misc_feature (256)..(265): n is a, c, g, or t
tggagcaatcggcactgggctcaacccccaaaacttcgctgctagacaagtaaggaggtctctcaaatttataactgcttggctatggcctcgccttggtcctggtctgcagtttattgcatcatttgtctgtcttgggaaatttgttgattactgaatgcacagaatgatattaagtgtaggttctagatctttcagcccatagaacccatctctcttcatgttttttaacacggattttattttaaacctgtannnnnnnnnngtcttctcatttttgatcataagttcatatttaataagtaataactgactaaggaaaatgttaaagaggctacgtaagtaccttagacaatctaacttaatgcatttgccattttaaacattagattggatatgtaatactttggagatcttttcaatttaataaacctgctaatttaaaaataggaaaactagtatgattaagtatttgtgggttatggcatcttgaaatcta

SEQ ID NO: 312473 - DNA, 746 bp, Homo Sapiens
  misc_feature (458)..(466): n is a, c, g, or t
aagcagcaacttttcaaaaataaaatgtgataatttctgaacttttgtttgtgttgtaatagtggtgtgaaaatattaacgttcttgagaaaaactgataccactgttgtgtatcagtttctatacaatccataatcctcctgtacagtttttacatgtagttatgagtcttactaaaatttatataatggacttgttttcctttaagttgtaaaatgttaaacaccttgaaggttattttggacttctgtatgtttaaatgttgtcttaccaaaatttgcacgaatggaccattttcatttactacttaatatcaaaatcaggaatttacagtcaactgatagtacatgataggtgcatataggacagtttagttacctgctactaaaagatttttagataagttttagaagataaaggaattccatagtttcaggagggacaacatcttctgcacnnnnnnnnngcacagaaaagtctgtcattctctaatggcaaatttcatatttgttaattcttggctcaaaatatattaggtaaaattcttagatctgtttttaaagggagtttcctgaaactatcattaattgacattattaccccatggattttatgggataataaatgtttttcatgttctcttataagatactatgtatgaaattacttcagagagctatatttattttaaaataaattagctagggttaaggttatattctatctccaacatcagaatggtaaca

SEQ ID NO: 312474 - DNA, 1746 bp, Homo Sapiens
  misc_feature (166)..(166): n is a, c, g, or t
agctggtaacgtgttggcagcccaacaacttggttacatgtctgtggtgacctgaatgcggtcgggtacaccgggtgctgttcatgcggctggccacgttcacggtattgccccagatgtcgtactgaggctttcgtgcccctatcaccccggcccaccacggggnccgatgttgagcccgatcttcatctggaagttgttgaaggagtgctcattgatgtacttcatctggtccatcagcttcatggcaaagtcggccagtgccttgatgtgggtcttgcccaccttgtcgtaggtagagtcgttgaggccggaggcagccatgtaggtgctgccgatggtcttgatcttttccagctgccggaaccgctcctcgctgatgatctcatcaaagtcagcgatgatctcgttgagtagccgcaggcactcgacaccctcgttgtttgcctccagctccacgtagaactcggagaagttggcgatggaggcgaacatgaccgccacacactcacaggactgatagtagagttcatcattgcggcgctcgcgggccaggaagtgggcggccacgtccttgggcaggatgttgtgcagcagcctccggttgtatgcctgtagctcctccatctcctctttctcctctgttgcctgtagtttccagaggaagtctaggcgggcagtggactccacctgctgggcgtgcaggtacagggccagcgcaaacaccagcagaatcacaggggtcatatatttgagggccaccctccctgcagctggacagtccagcccatcaaaggtctcattggaagaagccaagccatggacgccaagcagtaggtcatagttgtcaaagatggtggctgggggacccagcagaagcagcaccaaatagatgagccccaagacaaagatcatggccaacttcccgatgctgctgatgtgcaggaagacagagctggccaagagactcagcagcatgttcccgatgaagtactcaggaaagctgcaggtgggcatggtgccctcacacaggggagcatccaggcccagagagtaattgagctgctgcaggtggcaggcagtgatgtcagcaggtgttaaattcagcatccgggctgcacagctccgtatgggggtgtggttacaggtgaacatgttggcaatggcagaagtaaacacaagcaggacggaaaagatgccaactgcggtgctatgtgcccgtgagcggacaatgctgcgggacagacgttgcagggccttagggaacagagaaccacaggagtacacagcacagatcagcacggtgattagcagcagcaggaagatgctggcatagatcccaagcatcagggtggagtgtgggaagatgagaagctggatgaagcagatgaagcagaagaccaacagggcacaggcaacgtaggctccgaagcggggatccaccttccgggagtacttcttctcaagatcctctctctggaaggtgagcagaaaccggcgcacatggtccttccgcagctgatcaatgctgcgggcatcgatggcacggctcaggaactcatccacctcatcctcagggttcagggcatcttgggtgccccggttgtctttgctggaatcatcaatgcccatctggcggaaggccttggagtccttggtccgggagaaggcacgatcaggaacccagcgcggcatcagcccttccatggagttggcccgagtccgctgcagcttggccagcatggc

SEQ ID NO: 312475 - DNA, 699 bp, Homo Sapiens
  misc_feature (90)..(119): n is a, c, g, or t
  misc_feature (121)..(410): n is a, c, g, or t
agattgtgatctcttagagggtagcagccaggattaccttgtctattatatcacacggtacttcataccataggcctacaataaacattnnnnnnnnnnnnnnnnnnnnnnnnnnnnnnannnnnnnnnnnnnnnnnnnnnnnnnnnnnnnnnnnnnnnnnnnnnnnnnnnnnnnnnnnnnnnnnnnnnnnnnnnnnnnnnnnnnnnnnnnnnnnnnnnnnnnnnnnnnnnnnnnnnnnnnnnnnnnnnnnnnnnnnnnnnnnnnnnnnnnnnnnnnnnnnnnnnnnnnnnnnnnnnnnnnnnnnnnnnnnnnnnnnnnnnnnnnnnnnnnnnnnnnnnnnnnnnnnnnnnnnnnnnnnnnnnnnnnnnnnnnnnnnnnnnnnnnnnnnnnnnnnnnnnnnnnnnnnnnntcaacaaacacttattgaatccctagtactttggtgaaattcaacttttacatccagggacatgctcttgggacataatcttgaagaaggtgtggtctcaaacctctaggaacttcaaatctattaatgagccagatgagaataccgttaattacagtatgatagataagtacttaaacagaagtattgtcaaggtgtagaggggattcagaggtctgacactggcaggaagtcagaaaatgtttcttcacagaggaagtaatactttagctgaatgagcaggagctcc

SEQ ID NO: 312476 - DNA, 646 bp, Homo Sapiens
  misc_feature (344)..(440): n is a, c, g, or t
  misc_feature (463)..(574): n is a, c, g, or t
gagtccatgccatccagaatagaggtggacaggaaataccctggccctttgtagggactgagccctgcagagacgaccctcaatttccagccctgtatggaggacccctgacccatcccccagaagtagactccccatctccttctgcagcaagataacatgctacctaggcctcaattcattgttaaatattttttaacaagtatctcacatttaacaaaaaaagatcagtcatatggcagcaaaatacaatgtagtatgaccaaaacatgaaagactgtgaaaatgaatctggaggtgacccaagcattgagttcaacaatccaggctgggtgcggtggctnnnnnnnnnnnnnnnnnnnnnnnnnnnnnnnnnnnnnnnnnnnnnnnnnnnnnnnnnnnnnnnnnnnnnnnnnnnnnnnnnnnnnnnnnnnnnnnnnttgggctgggcacggtggctcannnnnnnnnnnnnnnnnnnnnnnnnnnnnnnnnnnnnnnnnnnnnnnnnnnnnnnnnnnnnnnnnnnnnnnnnnnnnnnnnnnnnnnnnnnnnnnnnnnnnnnnnnnnnnnnttatctgggcatggtggcatatgcctgtagtcccagctactcaagaggctgagggataagaatcgtttgaac

SEQ ID NO: 312477 - DNA, 739 bp, Homo Sapiens
ttttgctgacatggaacagctggctgtatttcatcactaagtacaaatcacaattattaactcactggtagggcagtgatgatcaaaccaattgcattcatccatgctgtaatgttctctcttggcactaaaggctgactgcaaccggcaaaaaagaatgtaagtatgaatttataaaaacattttagatggctgacaacggatcttatttttaaagaatatgtctaattcagaggatcgacaactaatccatttcaataaaacaatggggaattttttattgaataaaaatgtaatatgcataaaaactcaagaaggctttttaaaaatacttccttccccaatccattatcccatacttcatgctaatttttaaaagaatcttgaaatcttgaaaacaagatgaagagaatcttgttttaagtgacaagttaacattattcctatattaaatgtcaaactgctattaatgagtagaagtaggaacaaacccggatcttaggatcctgtccagggctcattccataactcctatatcacaaagacaagatctggaaccagaaaacagtcatcatccaatgtgcatcagccttgcggcaacaggtttgtcttaaaagtttgaaatagaataccattctatttacaaataaacaacaaatcttactgcatgaaccagaatacatacctttttaggacaacatttagaagggcattcccaacttctttgcctgaaactgcc

SEQ ID NO: 312478 - DNA, 992 bp, Homo Sapiens
  misc_feature (294)..(304): n is a, c, g, or t
  misc_feature (347)..(369): n is a, c, g, or t
  misc_feature (578)..(586): n is a, c, g, or t
  misc_feature (785)..(793): n is a, c, g, or t
gggagctcactcccttgaggcattgcagagaacaagagacatgggctgtggggcagcttttcaatgaaactgagaggcacatcaacatggcactgtatgtgtccacttaaggatatatgataaacatgcaatttcaaaaggtaaattattaaagataattggccaatatatagatatgcatagtttttagcacataggccctcaataaaatattaggatctattctgaaaatgtaatgttcactaagtaatacgctgtaaaaggtaaaagtcaggaaaagaaattcaactcttnnnnnnnnnnngcacataaaatccaccctatcttaatgcagcagttggaaaagnnnnnnnnnnnnnnnnnnnnnnntaagttgcagtaggttttatacctaataaggtatgctgtagacataggaaatatcacattattaaattgtaaaatgcaattttgattaacagataactggtatcgtgagtttaaaaatcagatgaaaatggttcttaaaaaaaggagaaaatgactaagtggatctgtacaaatcaatatatgggaccttagcaaggaaagtataaaannnnnnnnnagtaagcagtttttcattagttagaaggaaacggaattctgaatttcaccttatatgtttggtcctcttatctttcctggacaaaacagtcctaaccgttttaacaaatctcaattaaagtaatctaataatgtaagaattcagggcaacctaccatctgtgcatctacaatatcctgaaagtcttgctcagttaatgnnnnnnnnngccaaatctgaccatgtttacagttttccacaataaaataaaatatctagaaaggcaataaaaatggcttacttacatgaggttatttttacttgttgattgtacatttaaaaaactgagtatgtgccttttcctgctcattcagtacttttcataaagtcccaagttgagtgcatgctgttttgtaaccacagtgtct
